United States Patent Application Publication US 2004/0034888 A1 - sequence listing, part 18

SEQ ID NO: 46855 - protein, 204 aa, Zea mays
  Clone ID: 700614850_FLI.pep
TSLISAVQDQVVLLHSGIPSISIHQNSQSPQQQGARPAPAAGNKRHSSDGVRAGVRAVRDAEQPVPVQGGRADAGVRRVRGGRGHRVAAGGRRVPVPPPQGTTHHGAPGHRRVPARYQGHPDLIGRPISQVAVSCPGLCRQRTEMSSVQICESFYTRLPFFLNKSRKCVWFQFAYICTPIVSIAVNVRNTMYVISVYPSNFLLL

SEQ ID NO: 46856 - protein, 65 aa, Zea mays
  Clone ID: 700615386_FLI.pep
HPLHRTLASFILTRLHAVKTRDPAAVYTPLPSPSPITGRQLLSRANTFATQVRHPWKPPSAVSSS

SEQ ID NO: 46857 - protein, 244 aa, Zea mays; identical to SEQ ID NO: 36900
  Clone ID: 700803635_FLI.pep

SEQ ID NO: 46858 - protein, 258 aa, Zea mays
  Clone ID: 701159095_FLI.pep
VPKTKKASSRSCTGNYTQHYSMYSTPTPPHSTVHLSSSSSRLVLCKHELTLYTNQALHGGTNCYHRLYEQLASYCTYSTGATPPSSEVLHDRRLPAAPHDVPAAEPELPEPPPLHRPFPGALVARARLRGRAVVVQQRGLRRAGPHAVHDLLHHVVHLAHLGAGLGHPDQAPVRHTGQLRHGLEVVVPLQPRVDDDGEPFHVRDVRLHPVQELLLALWAVPVDGAAAGDQLVQEDAVAPYVALRGQAPSLHVLWSCVA

SEQ ID NO: 46859 - protein, 187 aa, Zea mays
  Clone ID: 701159547_FLI.pep
ATVLDTKRKTIARDPNGEAATPFDFGSGFMDPIKALSPGIIFDTHPEDYKSFLCAISRDDHSVHLITGDNSSCTHRASSSATALNYPSITIPYLKQSYSVMRTMTNVGNPRSTYHAVVSAPPGISVRVTPEVINFKNYGEKRTFTVSLHVDVPPRGYVFGSLSWHGNGSDARVTMPLVVKLQTSGKA

SEQ ID NO: 46860 - protein, 124 aa, Zea mays
  Clone ID: 701160349_FLI.pep
DERAEGDGRVHVPARDVDGHRHRHGQTQRVRQRHCHQPARRADRAVVVVHLPEREDGSLGGEDEDGGGDELGDGGADGVRVRGVLAPSHREPPPRPHARGRAHVVRQKPSQTPASGLFLLASLQ

SEQ ID NO: 46861 - protein, 243 aa, Zea mays
  Clone ID: 701163081_FLI.pep
VGHCIAGARRVLVYQFVPNKTLEFHLHGKGQPVMEWSTRLRIALGSAKGLAYLHEDCHPRIIHRDIKSANILLDNNFQAKVADFGLAKLTSDSNTHVSTRVMGTFGYLAPEYASSGKLTDKSDVFSYGVVLLELLTGRRPIDAGDARPFLDDSLVDWARPALSRALADGDYDGVADPRLRGNYDPVEMARMAASAAAAVRHWAKKRPKMSQIVRALEGDISLEDLNDNEGVRPGQSMAFGTAD

SEQ ID NO: 46862 - protein, 114 aa, Zea mays
  Clone ID: 701163146_FLI.pep
KVAPDSQPWLHQIKVRGYLQSQSQRVFGSEFARRMYVNIYWSDFRVALDQLSQECFKHCAADGLSSGAKSNIGRRKSANPLASGSLKLYLSTSTRSRGQNFSLLTLFKSPYRSK

SEQ ID NO: 46863 - protein, 162 aa, Zea mays
  Clone ID: 701163190_FLI.pep
KNLKLIDVDVPVVGGHAGITILPLLSKTRPSVTFTDEETEELTKRIQNAGTEVVDAKAGAGSATLSMAYAAARFVESSLRALAGDPDVYECTFVQSEITDLPFFASRVKLGKNGVESVISADLQGMTEYEAKALEALKAELKASIEKGIAFVNKQREAAASV

SEQ ID NO: 46864 - protein, 162 aa, Zea mays
  Clone ID: 701163276_FLI.pep
TLLAASLPLRSQIRPVRRSRPHPWPPVSSPAPTPPSSSATTASPSPCVLSRCSFLLIEFSFFERSSCYVGGVSCLQAEKIATIVKAANIKVESYWPALFAKLLEKRSVEDLILSVGSGGGAAPVAAAAPAGGAAAAAAPAAEEKKEEPKEESDDDMGFSLFD

SEQ ID NO: 46865 - protein, 201 aa, Zea mays
  Clone ID: 701163477_FLI.pep
RFLLTLLLFYSKQSKSIRGANVVYDRITSQVDTPAIYDVFQLEKTFKTTFSLLVLHMWLVLRRLKEEGKDGVKFGQYIYEMYNHDVELRVSKAGVNLLLTKWMKELEKIFYGNIVKYDAAISPEAHQDDLVNVIWRNIYAEEGSEAMDVAAAPAVRALARYTRREATCLSLTDRDSMFSGNFKFTTLVPATLSPSPKKHGR

SEQ ID NO: 46866 - protein, 207 aa, Zea mays
  Clone ID: 701166245_FLI.pep
ASNILLDKDLTPKISDFGLARLLPPNATHVSTRVAGTLGYLAPEYAIRGQVTKKSDIYSYGVLLLEIVSGRCNTNTRLPSEDQFLLERTWALYEQGRLEDIVDMDIGGDRDVEEACRFLKIGLLCTQDAMARRPNMTNVVRMLSGERRISVEKITRPAMISDFAELKVSSKERRPGEARSPTTAPTTKSFTTTEPFSSSETPTQSSM

SEQ ID NO: 46867 - protein, 426 aa, Zea mays
  Clone ID: UC-ZMFLB73082F04_FLI.pep
SGHPTSYPLHLSSHPSPPLPCPPLAWGSIQATRGVASIDAREAMAVSSPSSAPEKKRKWLLSNRKVTDKYLREARKILAAAPECGGGDAVAALGLVDAALELSPRMEAALELRARALLALRRYREVAEMLRDYIPSCGKSCSGEDTSSSSSASLLSTGSGDLGTISRAKLLSPDRHRSDDAEPDARPVRSFRCFDISELKRRVLAGLSKNPNTDTQWRYLVLGQACFHLGLIEDAMVLLQTGRRLASAAFRRESVCWSDDSFSSSSSSSATAAAPCVPSGKTSSSGWAFIIPATESEAVSQLLAHVKLLLRRRAAAMAALDAGLPAEAVRHFSKILEARRGVLPHPFAAACLVGRAAAFQASGRPADAIADCNRALALDPAYIPALRARADLLQSVGALADCLRDLDHLKLLYDAALRDGKLPGPR

SEQ ID NO: 46868 - protein, 531 aa, Zea mays
  Clone ID: UC-ZMFLB73091G09_FLI.pep
KSTSSTPHHTSPAVRPRHFEFGWRLGGLGKTLLVVARSACTTRRRRALFQKLAKMVQCTQPPPQLKLPESKITEPTDDENQDLPPKPEKRTRMHHIERHRSCVVTLSDIELNGLQPRHLHQPIEISPGGSQCSLHEETPTDTNASHRHAIADAAWEALKRSMVYFRGQPIGTVAAIDKSQGAALNYDQVFMRDFIPSALAFLMKGEHLIVKNFLVETARLQSREKMVDLFKLGQGVMPASFKVHHRNPTQKTESLLADFGETAIGRVAPVDSGLWWIILLRAYTKWTGDNSLAESTNCQRAMHLILRLCLSEGCDTSPALLCADGCSMIDRRMGIYGYPIEIQALFFMAMRCALSLLKQESDADFVNHITKRIQALSYHLHSYYWLDFQRLNDIYRYKTEEYSQTALNKFNVMPESIPDWIFDFMPSRGGYFIGNVSPARMDFRWFCLGNFIAILSSLATGEQAEAILDLVEERWQELIGEMPLKICYPAMENQEWQIVTGCDPKNTRWSYHNGGSWPVLLWLLVAVSVKL

SEQ ID NO: 46869 - protein, 442 aa, Zea mays
  Clone ID: UC-ZMFLB73073A05_FLI.pep
HDLGGSDRIGSFHKFPSGFAGMAIRKGSSYAVAALLALASVAAVAGEVFFQEKFEDGWESRWVKSEWKKDENMAGEWNHTSGKWNGDAEDKGIQTSEDYRFYAISAEYPEFSNKDKTLVLQFSVKHEQKLDCGGGYVKLLGGGDVDQKKFGGDTSYSIMFGPDICGYSTKKVHTILTKDGKNHLIKKDVPCETDQLTHVYTLIIRPDATYSILIDNEDKQTGSIYEHWDILPPKKIKDPEAKKPEDWDDKEYIPDPEDKKPEGYDDIPKEIPDPDAKKPEDWDDEEDGEWTAPTIPNPEYKGPWKQKKIKNPNYQGKWKAPMIDNPDFKDDPYIYAFDSLKYIGIELWQVKSGTLFDNIIITDDPALAKTFAEETWGKHKEAEKAAFDEAEKKKEEEDAAKGGDDEDDDLEDEEDDEKADEDKADSDAEDGKDSDDEKHDEL

SEQ ID NO: 46870 - protein, 300 aa, Zea mays
  Clone ID: UC-ZMFLB73095G07_FLI.pep
SSLRSKDVRGKYVLCTGGPSTEIEQQMDEVQSNGGLGAIIASDMKEFLQPTEYTMPLVLVTQPDGAAIAKYATTAAGSARAGGGAPRASIRFGGTALGVKPAPTVSYFSARGPGLISPTILKPDIVAPGVDILAAWVPNKEIMELGRQKLYTKYALVSGTSMSSPHAAGVAALLRSVHPDWSPAAIRSAMMTTAYVKDSASNVIVSMPSGSPGTPLDFGSGHVSPNEAVDPGLVYDAAADDYVDLLCALRYSGSQISTITGRPNPSCAGANLDLNYPSFTIILNRTNSATHTFKRVLTNV

SEQ ID NO: 46871 - protein, 400 aa, Zea mays
  Clone ID: UC-ZMFLMO17127C09_FLI.pep
LAWWPESVASGVQLTGGCWVSEGASVVRALQDDYGDGLLPRHDGRGAAVRGDDPGLRVGAVVAHLLAGPVLRDQPLRGALRGAAAVLPLHLHQQPLHHEPALHRRRHAAEAHGAGHAHRVEPPQPPGQPGVDHHALLPLHAAQHARHGHPPAQGHVRRLLRQPHGADRRAPVHHLVHAHALHVRVPRRADAHHRAVPGQRRGHRLHRRRPGRGLPRRPQGRHRDGGRGQGGRQDTRHRAPLQRLALRHLLAPLHGLLQHHAAPQQPDQRRDLLAAVVAQPDPAGLQLQPQRLLLHGRPQLQLRRGRRVRHPHRRHAAPVQLRGRRVQAQVPSPRGECDVRGGGGSLPRAEPGRGRGAQGRQEGGDERAGQGRGPPHVRLELQRVARVGRLRRWRPGLQRG

SEQ ID NO: 46872 - protein, 308 aa, Glycine max
  Clone ID: 700877103_FLI.pep
IALLSVAVGLPNVGGHFETWNTGILGPVVLRGLNQGKLDLSWQKWTYQVGLKGEAMNLASPNGISSVEWMQSALVSEKNQPLTWHKTYFDAPDGDEPLALDMEGMGKGQIWINGLSIGRYWTAPAAGICNGCSYAGTFRPPKCQVGCGQPTQRWYHVPRSWLKPNHNLLVVFEELGGDPSKISLVKRSVSSICADVSEYHPNIRNWHIDSYGKSEEFHPPKVHLHCSPSQAISSIKFASFGTPLGTCGNYEKGVCHSPTSYATLEKKCIGKPRCTVTVSNSNFGQDPCPNVLKRLSVEAVCSPTNRRG

SEQ ID NO: 46873 - protein, 85 aa, Glycine max
  Clone ID: 700877141_FLI.pep
FTNVSSPSAKAKLRLLFEVAPLGFLIEKAGGYSSDGHQSVLDKVISNIDDRTQVAYGSKNEIIRFEETLYGKSRLKGGVAVGAAA

SEQ ID NO: 46874 - protein, 166 aa, Glycine max
  Clone ID: 700875378_FLI.pep
NSPTKSLEGCSKSGSRDKKSGSSAHKRLGEAVVQRLHKSFKENQYPDRTTKESLAQELGLTYQQVAKWFGNTRWSFRHSSQMETNSGINASQQVTDGRAENEGEKECELISLEFSGEKSKTPNSRKRKHLSEPLSEAQLDINGSAASSPNVHLTQIGNKMKTRKRK

SEQ ID NO: 46875 - protein, 137 aa, Glycine max
  Clone ID: 700876296_FLI.pep
AAAAAAASTPYSSYMSTVAVTPMAQSHRMKKAPSNLGDDPLKMSVMQRQQTNGALSVAGGLSNVKILSKSKVSREMDGPESRVVQSSVQLPVGNGGSIDKSSMSSAQISGSANGRLVSSFASKQQTRATGAVYPSQR

SEQ ID NO: 46876 - protein, 463 aa, Glycine max
  Clone ID: 700854216_FLI.pep
KEEFSGLEYVYVWHAFCGYWGGVRPKVPGMPEATVVPTKLSPGAEMTMTDQAVVKIMEIGVGLVPPHRAHELYEGLHSHLESVGIDGVKIDVTHILEMLSEEYGGRVELAKAYYKALTASVRKHFKGNGVISSMQQCNDFMFLGTETISLGRVGDDFWCTDPAGDPNGTYWLQGCHMVHCAYNSLWMGNFIHPDWDMFQSDHACAEFHAASRAISGGPIYVSDSVGKHNFKLLKKLVLPDGSILRCQHYALPTRDCLFVDPLHDGKTMLKIWNLNKCSGVLGLFNCQGGGWCPVTRRNKSSSDYSHSVTCFASPQDIEWGKGKHPVCIKGVDVFAVYMFKDDKLKLLKYTESVEVSLEPFSCELLTVSPVVILPRKSIQFAPIGLVNMLNSGGSIMSLEFDQQENLARIGVRGHGEMRVFASEKPESVKIDGESVEFDYVDRTVRLQVSWPCSSRLSVVEYLF

SEQ ID NO: 46877 - protein, 301 aa, Zea mays
  Clone ID: UC-ZMROB73020H11_FLI.pep
TKQIGTHHKAIPKKDQQRQAAPSLAERAALRHGGRVRDAGGLVHGLVRRRRRLPARADLVDHLHHVPDLGPLLGRRGRAAQRQLQHRHHLLLDALVLHQLQVEHLRRPLLPHHGLHPPGQLHHDAAVRQLAAREPPRQELQQHHAERVHVAPVRRPGPGRRGRLGRAVPRRPSRRRGRGRPQLRQPAVRETRHAESVQQDVGALDVAVRQLRRAAAPPPRVVDVGQPARGAGCDAKPRRPLQRRAPGAPVTVEDGEEAAVGHVLVHQQLLVAGVVVGVEGHDVGVPEAAEHGHVVLEVLLG

SEQ ID NO: 46878 - protein, 321 aa, Zea mays
  Clone ID: 700573489_FLI.pep
QQSQRKVVLMSTVTLPTLSRCLVELEGLHHLPGEVGVVTAEVAVGGGLDEPVAALLQVEVDADHPGPEVEVLLHDLEDLLVGDRAGAVRVDEHGQGLRHADGVRHLHEAAAGEAAGHDALGGLPGHVGAAAVHLGGVLAGEGATAVGSPAAVRVDDDLAAGEAGVTVGPADDEAPGRVEVEDGLLVEVLLRDHGLDDVLLEVGGDLVVGDGLVVLGGDEHGVHADGHHGAALVHVLHRHLGLAVGPQPGAGAVLAHLGEARAQLGGQHVAQRHQLGGLVGGVPEHVALVARADLLGPLREVPVHALRDVGGLLLDVHQHLA

SEQ ID NO: 46879 - protein, 316 aa, Glycine max
  Clone ID: 700839738_FLI.pep
ETEHRVIWWVERGTEQSNMKPPTKPISSPGRTEKFPPPLMRFLRNNASSRSRGRSRTTTAMFLRKKNTNNIETQEPSSPKVTCMGQVRVKRSASKRVPSAGAGTPTKFRCCSWVPHALFFHRLIKPEVCFPFQCKQVWPNWRFLQRKKRDSKVTETSSPKTELNFRGRFNPNYDDSEHKDRVIVNPPAFVSNTSSTPPRNALLLTRCRSAPGRRFLNEETEVVEKNRVNREHSENNRDRKLEAKLRFFKELEESLRERIIMESEKAREESDSVHPLVLTRCKSEPARTAQKLDPEMNGLSKKTTLGFAHAWFSHGL

SEQ ID NO: 46880 - protein, 433 aa, Glycine max
  Clone ID: 700843914_FLI.pep
DYCVRSSLASSAGIQTIVLVPTDMGVVELGSVRMLPESFELLQAVKSVFSTQSPSYQGVSVSTGGNAVFPGLAIGDANKVDGGVSIPKVFVNTIGNRTHFREKLAVRKMEDNRPWPGHGHPDPNGNNLHNNVSFPNVRGNSLHVSSWAVNSDLRQPGPLEIFAPRAPTSSVLAELANVGKQDFRPQRQVQMQIDFTGATSRPSSARPVVGELELSDVEASCREEQQPSFADERKPRKRGRKPANGREAPLNHVEAERQRREKLNQRFYALRSVVPNISKMDKASLLGDAIAYINELQAKVRIMEAEKERFGSTSNDGSVLEAKLRLENQEKKAPDVDIQAFQDEVIVKVSCPLDSHPVSKVIQTFNEAQISVVESKLAAANDTIFHTFVIKSQGPEQLTKDKLIAVFSPTESNSLQPLSQLDSKGIAVSIVHT

SEQ ID NO: 46881 - protein, 201 aa, Zea mays
  Clone ID: 700569159_FLI.pep
GGLAIESTNKNLIFNVHPVLMLIGYVIIGGEAIMVYRVLPTSNHDTTKLIHLILHGIALVLGAVGIYFAFKNHNESGIANLYSLHSWIGIGTITLYGIQWIIGFVTFFFPGAAPNVKKGVLPWHVLFGLFVYILALANAELGFLEKLTFLESSGLDKYGTEAFLVNFTALVVVLFGASVVVAAIAPVRLEEPQGYDPIPEN

SEQ ID NO: 46882 - protein, 264 aa, Zea mays
  Clone ID: 700571655_FLI.pep
ITDFFKVYQFENLFAKRNTPVAHAVGFWDYQAFITAAALFEPQGFCTTGGKQMQMMELCAFLGHVGAKTSCGYGVATGGPTAWGLCYNHEMSPDQTYCDKTYTQYPCVEGAEYYGRGAIPVYWNYNYGAAGDGIKADLLHHPEYLEQNATLAFMAAMWRWMTPIKKSQPSAHDAFVGNWKPTKNDTLSKRLPGFGATMNILYGESICGKGYVDAMNVIISHYQYYLDLMGVGREHSGDNRDCAEQAPFNPSSPTDDQKQQQSGS

SEQ ID NO: 46883 - protein, 169 aa, Zea mays
  Clone ID: 700573405_FLI.pep
GINHYTSFYMKDPGTWNLTPVSYQDDWHVGFVYERNGVPIGAHANSYWLYIVPWGINKAVSYVKETYKNPTMILAENGMDQPGDVSITQGVHDTVRIRYYRDYITELKKAIDDGARVIGYFAWSLLDNFEWRLGYTSRFGLVYVDYKTLKRYPKDSAFWFKHMLSKKRS

SEQ ID NO: 46884 - protein, 325 aa, Zea mays
  Clone ID: 700573209_FLI.pep
SSNASCLLKSKDAFVRLCIIINSALAGEEAEKAPIGFFDRDGKYIECLLSVNRKVNADGVVTGVFCFIHVPSDDLQHALHVQQASEQTALRRLKAFSYMRHAIDKPLSGMLYSRETLKGTGLDEEQMRQVRVADNCHRQLNKILADLDQDNITDKSSCLDLDMAEFVLQDVVVSAVSQVLIGCQGKGIRVACNLPERSMKQKVYGDGIRLQQILSDFLFVSVKFSPAGGSVDISSKLTKNSIGENLHLIDFELRIKHQGAGVPAEILSQMYGEDNREQSEEGLSLLVSRNLLRLMNGDIRHLREAGMSTFILTAELAAAPSAAGH

SEQ ID NO: 46885 - protein, 116 aa, Zea mays
  Clone ID: 700572681_FLI.pep
GAGTTGSRWRRWCRWRCCARSTSPATGRRCRRWSGCWKVTGSQSGGRLRSARTRTSPSKCPTSLSAAATPTLPTTRHCWCRPSSCPAQDDTNHHHRQFALVQHKDRESCVYCHIGE

SEQ ID NO: 46886 - protein, 336 aa, Zea mays
  Clone ID: 700569771_FLI.pep
GTPGKGILAADESTGTIGKRLSSINVENVEENRRALRELLFCCPGALQYISGVILFEETLYQKTKDGKPFVDVLKEGGVLPGIKVDRGTIEVVGTDKETTTQGHDDLGKRCAKYYEAGARFAKWRAVLKIGPNEPSQLAIDLNAQGLARYAIICQENGLVPIVEPEILVDGPHDIDRCAYVTETVLAACYKALNEHHVLLEGTLLKPNMVTPGSDSKKVTPEVIAQYTVRTLQRTVPAAVPAVVFLSGGQSEEEATLNLNAMNKLSTKKPWALSFSFGRALQASTLKAWAGKVENVEKARAAFLARCKANSEATLGTYKGDAAADTESLHVKDYKY

SEQ ID NO: 46887 - protein, 130 aa, Zea mays
  Clone ID: 700428128_FLI.pep
VSIGSPIHPPSRCFHLPATSPGSPLLQRRPVLAAGTPASQCRVPNPLAAHLAPPFALAMFPALASKMLPQGRPLPYHGRALSRPSPEASLERLSILQTSLIAGVNPLARPSAGPCPAAQPFFVVATAGSV

SEQ ID NO: 46888 - protein, 320 aa, Zea mays
  Clone ID: 700428144_FLI.pep
TQARDPLPLFLLRIRGDLAGGGRRSDGGAKPAAQRRADGDDARRHEGAARRRHPRSRAVEEEVRRAHGPVPRHPQEDRRRQGVHGRDDARLLLLPRRGQVRRRRRRPSRRPPDHPRRLRPRSISPGECRRGQAPEVHSLRRPRRGIRGALQRVSEPYGPRPRRAAGRRLPRRARQGHRGARRARLAPDLLPHARRGHQDHQPPRQRARECREAQDREHHQLHQGGARRTRARGLFQAQEDPGLQEEGDRAPDGQRQAFRRGTARRGSRAQEGHLRGGCGKSAGCWRGEGRRHHLLIASFHAHPIIQSVRRIIKALFWIWF

SEQ ID NO: 46889 - protein, 165 aa, Zea mays
  Clone ID: 700428146_FLI.pep
PRRVSARFNPGKAKLCTSATFTHRGTRARAAAKDMTPPAAPTMAAGDAVHVGRRRHVLLFPLPYQGHINPMFRLAGLLHARGFAVTVFHTQLNAPDPARHPEYRFVPVPNGSPVPVAIEDVVAHILELGRACEAAFRDRLASVLEEYSRDTVACLVADAHLLPIF

SEQ ID NO: 46890 - protein, 84 aa, Zea mays
  Clone ID: 700428364_FLI.pep
TTFSPLSRFHFPSLSRSFFTGSFSIDSSFSRTALSILLYNFISCPKVPVHILYLGNMLVVFLRTFGRRRPPTFLFMICILIFFD

SEQ ID NO: 46891 - protein, 71 aa, Zea mays
  Clone ID: 700429366_FLI.pep
HTRVRASYISIMVITNILISIYMLLIMHGLARRCTHRRHMHGSRASSMQHRPSSSHTHQKREARPATPLPS

SEQ ID NO: 46892 - protein, 211 aa, Zea mays
  Clone ID: 700429526_FLI.pep
QQGNVRILSCIFQQRLQQSNMRTLPWMAVNTHLEPIIATVIHDITYYTWHGNSRYYIKSTDFMKIREGACSGMFRSSSLFCNLVLRFRQQIAQGDDRSLGASTLFNRLEFLQLLEVLPWLLPDLSFIELIDFAILHFNSEIVHRASNHLCLGLHKLLEPQKSIGLLVVLIDGEARELLELEVVLVRRHVLDAACQHPGVVSRGLLLCAARG

SEQ ID NO: 46893 - protein, 190 aa, Zea mays
  Clone ID: 700430169_FLI.pep
RHHMLGRLSSIIAKELLNGQKVVVVRCEEICMSGGLVRQKMKYLRFLRKRMNTKPSHGPIHFRAPSKILWRTIRGMIPHKTKRGEAALARLKTYEGVPPPYDKTKRLVIPDALKVLRLQPGHKYCLLGELSKEVGWNYHDTIRELEEKRKEKAKVAYERRKQLAKLRLKAEATAQEKLGSQLDILTPIKY

SEQ ID NO: 46894 - protein, 48 aa, Zea mays
  Clone ID: 700430190_FLI.pep
VLQAGGRTSTVPNHFLFNRVVVREIRMEITGLHPCFSFACSDNHVLFI

SEQ ID NO: 46895 - protein, 45 aa, Zea mays
  Clone ID: 700430274_FLI.pep
AAAVVLFLILIDGGNKDAAPRGGPPAAEQRAVAARALTTAAIVAS

SEQ ID NO: 46896 - protein, 275 aa, Zea mays
  Clone ID: 700430319_FLI.pep
HRCSGFPPHSPACLRHSVSRRTAIRIRRSLLPAIKPRCLAHLPPPQGYRGERERGREKMSSKKNYYKEKLMRRKEEKKEEPETPRYRDRAKERREDQNPDYEPTELGSFHAVAPPGNDLRLADAHKISIEKSKYLGGDLEHTHLVKGLDYALLHKVRSEIEKKPEAEDGKDTKSRAAKEDQAVSFRTATAKSVYQWIIKPQSIIKENELFLPGRMSFIYNMEEGVTNDIPTTLHRSKADCPVPEEMVTVSVDGSVLERIAKIMTYLRLGSSGKVL

SEQ ID NO: 46897 - protein, 181 aa, Zea mays
  Clone ID: 700430353_FLI.pep
RSVRPSMALPTRSVVPLSTIRASIPFLRAAPFHPWLASRNPPTYGAASQSGIHPQNHYPLCGDGRESKRVLPPSILDVARIAWPSFRAPNPSMQGTRASPFHPRRCANCRLRIAWSSFRPSSLPASDGRAPRSASPPSMRCLPFLHGDAKEKEPVTKSASVRSMNIHQRSVMSAPVQTSPP

SEQ ID NO: 46898 - protein, 165 aa, Zea mays
  Clone ID: 700430942_FLI.pep
SMISSILAANPRRRAERERAKRNKEKKHILIWITAAAQPTTPYIASCSGRLLARVNVDADGDEEDGDEREVEDGVDEDGQAAGVHAAELCDAAPARQRAEQPRREDHEQHRRYDHGAPVRHRGDLSDSPPPSSFLRLATGALHSPVKKLPQIHTLSLSLLEIGMR

SEQ ID NO: 46899 - protein, 193 aa, Zea mays
  Clone ID: 700431308_FLI.pep
PHRWSVSDRMDPTDQSPEEVYSVWALPPEPVRDRFRRIMEGLRAAYGGPAFEPHVTVVGDFRGRRSEAVKVLRAAAASVQPYTARVTGVARGSFFYQCVYILLDPTAEVVGASDHCCANFGYNRKTPYMPHVSLLYGDLTDEEKEEARKKAEELDKDIYVLEFEISELALYRTDTTDKTLESWELVEVCHLGS

SEQ ID NO: 46900 - protein, 190 aa, Zea mays
  Clone ID: 700431508_FLI.pep
TAISEKRTTDLYLFLSHRLMHCGTASSTKHTASSRKPLPSRRGWAIDDIPAHYPGPSAATVLLGAIGIATVVSVHDQIPKTHAQFLLSHLLLLLLGPGCGSSERLEVVAINVLCGVSFLVVEQHDVAMPFPDAILPAGIVVETDAEVVVADSHGLARIGLELVLGLPGQHHPHNLLLQLRLLPRQHPPPW

SEQ ID NO: 46901 - protein, 47 aa, Zea mays
  Clone ID: 700431634_FLI.pep
ASAAGAGAARGASPCVGEAMSRRSGSRRRRVGTRCEEESGRGGNGNC

SEQ ID NO: 46902 - protein, 71 aa, Zea mays
  Clone ID: 700431958_FLI.pep
VVMLHTKACSEARSRSHNRPLLVKWWIFSWSAGSRKACTVRAGYWKVPLVRAGYWKVPFVITLLFAEMYAA

SEQ ID NO: 46903 - protein, 111 aa, Zea mays
  Clone ID: 700432435_FLI.pep
VSLKTGLVLPRARRRRWRAEGRDSTRLGSSSGGGTSGGGTLWRGTSCATPHPGSASPSSPSGSTSSARPPTTASTAPPATTTTRSPAGSVTRSRSWSQLYQALVLLMFLQF

SEQ ID NO: 46904 - protein, 104 aa, Zea mays
  Clone ID: 700432894_FLI.pep
DKASLSSHLSLPSPPQSSHTLRLSQSAASALPQNPPPPRRNPSLRQPVAMREILHIQGGQCGNQIGAKFWEVICDEHGIDHTGKYAGDSDLQLERINVYYNEAS

SEQ ID NO: 46905 - protein, 137 aa, Zea mays
  Clone ID: 700432919_FLI.pep
SMVGLRALFFPSSNLEQMQYMYSSLPLVSICYIHIHTYRILCGGWSTQTLLDAGQLAGERSLNAGAGVNRDRQDARRQRRAPLTVVIGLAPLRRCARPARSRGTHELRVASVLLLPVASCACASCSSKQSALLYGTY

SEQ ID NO: 46906 - protein, 169 aa, Zea mays
  Clone ID: 700433017_FLI.pep
FDVFAAAEGVLYAKKDYNLAKHPQIDVPNLQVIKLMQSFKSKEYVRETFSWQYYYWYLTNDGIEHLRNYLNLPSEIVPATLKKSAKPPGRPFGSGPPGDRPRGPGRFDGDRPRFGDRDGYRGGPRGAPGDFGGDKSGAPAEFQPSFRRPGFGRGGGSGFGAGPTSSSME

SEQ ID NO: 46907 - protein, 248 aa, Zea mays
  Clone ID: 700433068_FLI.pep
KSKAKQTADPLVGAMGGSGTLISVYPEELTFLFELEKPCYCNLKVVNNSEHHVAFKVKTTSPRKYFVRPNASIVQPWDSCTITITLQAQKDYPPDMQCKDKFLIQSTKVAASTDMDEIPPDTFNKEADKVIEEMKLKVVYTLPSCGGSDDSSVSSLGSRSFKAASDDLMMLKNASLEEIQTIQRLKEERDNMLQQNQQMQRELDVLRRRRSRKGDAGFSLTFAAFAGLIGLMVGLLMSLIFSSAPADA

SEQ ID NO: 46908 - protein, 50 aa, Zea mays
  Clone ID: 700433844_FLI.pep
IENEFDSRMKRNGKSSSPSVSKWEPQILIYIQAAVISKRTRTGSTTRCGA

SEQ ID NO: 46909 - protein, 300 aa, Zea mays
  Clone ID: 700799424_FLI.pep
RKQWPGKPLLYGIGTLLVMPLRTLYGVGRVFGAGRFLCNMTNVSSSLQIELVPCLRDNYAYILHDVDTGTVGVVDPSEAMPIINALEKRNQNLTYILNTHHHYDHTGGNLELKAKYGAKVIGSEKDKDRIPGIDITLKEGDTWMFAGHQVLVLETPGHTTGHVCYYFAGSGAIFTGDTLFNLSCGKLFEGTPQQMYASLQKITALPDDTKVYCGHEYTLSNAKFALSVEPGNKALQEYAANAAELRNKNIPTVPTTIGREKECNPFLRTSNPEIKRTLSVPDHFDEDRVLGVVRRAKDNF

SEQ ID NO: 46910 - protein, 162 aa, Zea mays
  Clone ID: 700799536_FLI.pep
SRIHNLPLSSPGGVRGRMAESTARTVKDVNPHEFVKAYSAHLKRSGKMELPEWVDIVKTARFKELPPYDPDWYYIRAASIARKIYLRQGIGVGGFQKIYGGRQRNGSRPPHFCKSSGAVARNILQQLQIMGIIDVDPKGGRLITNQGRRDLDQVAGRVAVEA

SEQ ID NO: 46911 - protein, 173 aa, Zea mays
  Clone ID: 700800587_FLI.pep
RGPSQTDGSFHSPEWHAARLASLNKTHTLTWEEFKKKQKEEELKRGELEADKDKMMREYRAQLDAERAQKLANGRNHSRSNSKSSSSKKERKDKDAKKRSKKRRKHKSSSESSSSSSSESSSSDDEDRGSRKSRSRSRSKRTRKEKKSRSRSKRRGSESEEEGPVRLSKFFGK

SEQ ID NO: 46912 - protein, 120 aa, Zea mays
  Clone ID: 700801551_FLI.pep
RSKMEIIIIISLVILLALGALFAIPKSQNKGKSKGTDLGAGMTSRSFTKEEISKHNTRKDCWIVIKDKVYDVTPYVEEHPGGDAILNNAGGDSTEGFFGPQHGTRVFDIIEDFCIGQLKA

SEQ ID NO: 46913 - protein, 435 aa, Zea mays
  Clone ID: 700803682_FLI.pep
ACSFYLSSRLEVPSGRKPAATVGMALVLHSGAGNKNAFKALIAAEYSGVKVELTKDFEMGVSNKTPEFLKMNPLGKVPVLETPDGPVFESNAIARYVARLKDDNPLFGSSRIEQWMDFAATEVDPGVGWYLYPRLGYIPYAHTTEETAIASLKRSLGALNTHLALNTYLVGHSVTLADIVLTCNLYHGIARILTKSFTSDFPHVERYFWTMVNQPNFKKVIGEVKQAESVPPVLKKGVPPKESKAKDVKKETPKEAPKPKVVEVPAEEEAPKPKPKNPLDLLPPSKMVLDDWKRLYSNTKTNFREVAIKGFWDMYDPEGYSLWFCDYKYNDENTVSFVTLNKVGGFLQRMDLCRKYAFGKMLVVGSEPPFKLKGLWLFRGQEVPKFVMDEVYDMELYEWTKVDISDEAQKERVNAMIEDQEPFEGEALLDAKCFK

SEQ ID NO: 46914 - protein, 282 aa, Zea mays
  Clone ID: 700803779_FLI.pep
LPLLSPSLSPLASQPPRASQSPALASLFLSSLPARRRRASPCPETKAPGQYKFSSRGCGLLAFWIQHFLLLCSGIQKCHCGLKRIMYGRRASQLLKEIDSSEAGQLVPFNSDVFDQVIRECNEHNSQFQSLIRKMVEQNLDIETTRNEDHYGAAIHHLSLLRNKRCLMAYMYNRAEVIQSFRWKIGPVLPHDIQEKLHFSEKEYFKNHSAAIKSYISEMDIDLTVDMVPPKDPYIQVRVLEDIGEVSLGDHSVSLTKNSLHFLRRTDAEQFISQGLMEEFLE

SEQ ID NO: 46915 - protein, 352 aa, Zea mays
  Clone ID: 700804314_FLI.pep
AGPALAFPKCAQSPLPHPIFRSRSRDAVSPVSAAAFSLAGRHCIAAVAMNYIIGAFKPPCDISITFSDARTRKQVSVKKDNGKTTMVPVFQSLETISGEVSIAPVPGKRIEHTGVKIELLGQIELYFDRGNFYDFTSLVRELDIPGEIYERKTFPFEFSTVEMPYESYNGTNVRLRYILKVTIGRNYVGNIVEYRDFCVRNYSPVPTINNSIKMEVGIEDCLHIEFEYSKSKYHLNDVIIGKIYFLLVRIKIKNMELEIRRRESTGSGSNTYVETETLAKFELMDGAPVRGESIPVRLFLTPYELTPTYRNINNKFSVKYYLNLVLVDEEDRRYFKQQEITMYRLQESPPAS

SEQ ID NO: 46916 - protein, 512 aa, Zea mays
  Clone ID: 700804383_FLI.pep
GKMFIESFRVESPHVRYGPTEIESEYRYDTTELVHEAKDGASRWVVRPKSVKYNFRTSTAVPKLGVMLVGWGGNNGSTLTAGVIANREGISWATKDKVQQANYYGSLTQASTIRVGSYNGEEIYAPFKSLLPMVNPDDLVFGGWDISSMNLADAMTRAKVLDIDLQKQLRPYMESMVPLPGVYDPDFIAANQGSRANNVIKGTKKEQVEQIIKDIREFKEKNKVDKVVVLWTANTERYSNVCAGLNDTMENLLASVDKNEAEISPSTLYAIACVTEGVPFINGSPQNTFVPGLIDLAIKNNCLIGGDDFKSGQTKMKSVLVDFLIGAGIKPTSIVSYNHLGNNDGMNLSAPQTFRSKEISKSNVVDDMVSSNAILYGPGEHPDHVVVIKYVPYVGDSKRAMDEYTSEIFMGGKSTIVLHNTCEDSLLAAPIILDLVLLAELSTRIQLKPEGTDKFHSFHPVATILSYLTKAPLVPPGTPVVNALAKQRAMLENIMRACVGLAPENNMILEYK

SEQ ID NO: 46917 - protein, 199 aa, Zea mays
  Clone ID: 700804635_FLI.pep
FSASPTDREAGGARGKFSGEISAPAKSGAVAWATQDRVSPSRREKPGHDPLLPADSFFPIKSSTATLAQFIPWRSYVAPLRPLLSARPCPRRHHPLCSACPFSTPSSRHRPRLVYAPTVESPPPRYLLCILTQCASFGSDVRQVLACAFSDLPRVIRALVPGIAHRTDASPPGRLNSRTNRLRSRLPTSKPLWNLRFNK

SEQ ID NO: 46918 - protein, 216 aa, Zea mays
  Clone ID: 700805878_FLI.pep
PSTSAARRRFPSAAAPPPLPLLLVVDLVSGTMARSLSTALMRGLMRSSRASTSAAVSRPAIQQFMNYSSGLSGTPNANGDSVTTRVAADHDTHQDFQPTSKSSDMSFSDIVAQDVKEHPVVIYMKGYPDAPRCGFSALAVKVLQQYGVPISARDILSDLKLKESVKAYSNWPTFPQIFIKGEFVGGSDIILTMHQKGELKELLGDIAQKAEQSGSS

SEQ ID NO: 46919 - protein, 280 aa, Zea mays
  Clone ID: 700806127_FLI.pep
ETHQAKRTSNNLTTMATKILSLLALLALFASATNASIIPQCSLAPSSIIPQFLPPVTSMAFEHPAVQAYRLQQAIAASVLQQPIAQLQQQSLAHLTIQTIATQQQQQFLPALSHLAMVNPVAYLQQQLLASNPLALANVVANQQQQQLQQFLPALSQLAMVNPAAYLQQQQLLSSSPLAVANAPTYLQQELLQQIVPALTQLAVANPVAYLQQLLPFNQLTMSNSVAYLQQRQQLLNPLAVANPLVAAFLQQQQLLPYNRFSLMNPVLSRQQPIVGGAIF

SEQ ID NO: 46920 - protein, 321 aa, Zea mays
  Clone ID: 700479534_FLI.pep
RTDMMHAKSESDVTSLAASSPPRSPKRGGGAGNGGYYVQSPSRESHDGGYKSSSMQPTPVYNSPNESPSHPSYGRHSRSSSVSRFSGNLRKGAAGDRKVLNDKGWPECNVIEEEGPYEDLAGDSGLSRRCQIILGFLTFVLLFTVFCLIIWGAARPYEPEVIVKSLVMDDFYAGEGTDHSGVPTKLVTTNCSLHIAVYNPATMFGIHVTSGPIHLMYSEIPIAVGQVRRYYQPRKSHRMVTAVIHGEKVPLYGAGGSLMLSTSTGGAVPLTLDLDLTSRGYVIGKLVRVTHKVHVTCPVVVDAKKTKPVRFSKKACAVYRA

SEQ ID NO: 46921 - protein, 212 aa, Zea mays
  Clone ID: 700479692_FLI.pep
RDRIRLPAHPPPLFLPLRPSDAAARRPSEAGNPPPRGRDRNRKPEAKMSSVFSGDETAPFFGFLGAAAALVFSCMGAAYGTAKSGVGVASMGVMRPELVMKSIVPVVMAGVLGIYGLIIAVIISTGINPKAKPYYLFDGYAHLSSGLACGLAGLAAGMAIGIVGDAGVRANAQQPKLFVGMILILIFAEALALYGLIVGIILSSRAGQSRAD

SEQ ID NO: 46922 - protein, 171 aa, Zea mays
  Clone ID: 700618704_FLI.pep
ERERDTYVRAPACTLLQMHTQTRTASNAGGLPAWLGLASTLLAVGRRGEAALGRKLHGALGVDVVDAHPRRVLVAAQALEVRPRQRVAARLRRRGRRVRRLGRRGLARHELLVAHVAHRRRAHHQDGHRHGGGHEQCGSCPLRRARGRRRLAAGGRHVVVPPDYLADCTRC

SEQ ID NO: 46923 - protein, 135 aa, Zea mays
  Clone ID: 700619327_FLI.pep
GDPSLTMSSEKEAALAAVLDDSPTVFDKIIKKEIPSTVVYEDEKVLAFRDINPQAPTHILIIPKVKDGLTGLAKAEERHIEILGYLLYVAKVVAKQEGLEDGYRVVINDGPSGCQSVYHIHVHLLGGRQMNWPPG

SEQ ID NO: 46924 - protein, 132 aa, Zea mays; identical to SEQ ID NO: 43695
  Clone ID: 700619361_FLI.pep

SEQ ID NO: 46925 - protein, 178 aa, Zea mays; identical to SEQ ID NO: 41250
  Clone ID: 700619788_FLI.pep

SEQ ID NO: 46926 - protein, 103 aa, Zea mays
  Clone ID: 700620026_FLI.pep
DGAELLATYSVSAMSPFGAVITPETLKYIPWDNIPTRAYTEIGSENYFKTRWSSVKTSLGHSRRVTRAKDENCASTVSIGGYTTAFCIAVLQHQFQPLPEERE

SEQ ID NO: 46927 - protein, 133 aa, Zea mays
  Clone ID: 700620035_FLI.pep
SCARYPSPSRPLPAKSAQSPTRMKFVAAYLLAVLAGNSSPSAEDLTAILESVGCEVDNEKMELLLSQLSGKDITELIAAGREKFASVPCGGGGVAVAAAAPAAGGAPAAEAKKEEKVEEKEESDDDMGFSLFD

SEQ ID NO: 46928 - protein, 241 aa, Zea mays
  Clone ID: 700620278_FLI.pep
RRAAARTDKEQAEEELCQGTMGISRDSMHKRRATGGKQKAWRKKRKYELGRQPANTKLSSNKTVRRVRVRGGNVKWRALRLDTGNYSWGSEAVTRKTRILDVVYNASNNELVRTQTLVKSAIVQVDAAPFKQWYLTHYGVDIGRKKKTPAAKKDNAEGQEVEAAAEETKKSNHVTRKLEKRKEGRTLDPHIEEQFGSGRLLACISSRPGQCGRADGYILEGKELEFYMKKLQRKKGKSAVA

SEQ ID NO: 46929 - protein, 217 aa, Zea mays
  Clone ID: 700620543_FLI.pep
LLSPSCTLLRLIPSASHFKRFDRVRRFAPAAMATSSGPKEAPANNPGLQTEVDPATKGYFLQQTMLRVKDPKVSLDFYSRVMGMSLLKRLDFEEMKFSLYFLGYEDVTLAPDDHIKRTEWTFRQKATLELTHNWGTENDPEFKGYHNGNSDPRGFGHIGVTVDDVHKACERFERLGVEFVKKPDDGKIKGIAFIKDPDGYWIEIFDQTIGTVTSSAS

SEQ ID NO: 46930 - protein, 485 aa, Zea mays
  Clone ID: 700620565_FLI.pep
RLRTRLSPRPKAFPLLPFFSHFSPPPPLPPFDNTMRECISIHIGQAGIQVGNACWELYCLEHGIQADGQMPGDKTIGGGDDAFNTFFSETGAGKHVPRAVFVDLEPTVIDEVRTGTYRQLFHPEQLISGKEDAANNFARGHYTIGKEIVDLCLDRIRKLADNCTGLQGFLVFNAVGGGTGSGLGSLLLERLSVDYGKKSKLGFTVYPSPQVSTSVVEPYNSVLSTHSLLEHTDVAVLLDNEAIYDICRRSLDIERPTYTNLNRLVSQVISSLTASLRFDGALNVDVNEFQTNLVPYPRIHFMLSSYAPVISAEKAYHEQLSVAEITNSAFEPSSMMAKCDPRHGKYMACCLMYRGDVVPKDVNAAVATIKTKRTIQFVDWCPTGFKCGINYQPPSVVPGGDLAKVQRAVCMISNSTSVVEVFSRIDHKFDLMYAKRAFVHWYVGEGMEEGEFSEAREDLAALEKDYEEVGAEFDEGEDGDEGDEY

SEQ ID NO: 46931 - protein, 169 aa, Zea mays
  Clone ID: 700620571_FLI.pep
SLQAPHLAQGGSPEITATMVKAVAVLAGTDVKGTIFFSQEGDGPTTVTGSISGLKPGLHGFHVHALGDTTNGCMSTGPHFNPVGKEHGAPEDEDRHAGDLGNVTAGEDGVVNVNITDSQIPLAGPHSIIGRAVVVHADPDDLGKGGHELSKSTGNAGGRVACGIIGLQG

SEQ ID NO: 46932 - protein, 337 aa, Zea mays
  Clone ID: 700620654_FLI.pep
ENGLRVPIQASTKYQCTNNSLRAQHRQIYYEKDNTTICLFTLTPDAKDHMIPYRQQNVSLQDRVYLSISKPQFGELEVGLFVVIKESLLIHSIFLDKRAENRVAQQGFVTWELKKALLITTQKFLEVRVVKDQRVCSPGPLETRPLFVAPSQGVATREGNNVLIAQAHLLAKNLPQVVRTLSGIRKAALRWGLRLVLPTGVEGNLRPTGDLHGHNSRELVEIGVREDWELLLDGLEQPHRDVQPRVSAVSQFRLMLHRAEWTAGPRRHVERPRGVPREAEHERGAALLGDEGSELAPGLLHSLAVLGAHGRVVLRHGCEQRELWIVGCDATRLREGH

SEQ ID NO: 46933 - protein, 162 aa, Zea mays
  Clone ID: 700620710_FLI.pep
TLHPLYTHIQSIEFHYKQIKAQRYVASSKNTRNKKKRGDTFVGSLECNSGTGGLELSGERLGLLFRQPRAHHYGRLLHELLCLLQTQVRHRAHLLDDLNLRRGLVLLDLQVERRLHRRGGLHGCSRGVPGPGRRGSSSCAGGERQAELEAQERRVVVQLGGG

SEQ ID NO: 46934 - protein, 131 aa, Zea mays
  Clone ID: 700620711_FLI.pep
LSHGGQAVETRETRRTRERKPTGSAAPAHLPHPQKKSRVPPAATTITAMISILAQERLLGFALGSVSIGGFVLHQRRAIYRSIAEADGSPYFYQPGEIASRRSSTELAHVWNKAVDETLGRLVVYLSSRGW

SEQ ID NO: 46935 - protein, 118 aa, Zea mays
  Clone ID: 700620952_FLI.pep
RRSLSRRRLGDRCLLLPWSPLGPLPDFLSPLRRRRTPLPGMGLWTLLEGFLLLANALAILNEDRFLAPRGWSMSEVSGNGQTKSLKGQIVGLIYATQFLRMPLIALNVLIIVVKLVSG

SEQ ID NO: 46936 - protein, 66 aa, Zea mays
  Clone ID: 700621043_FLI.pep
KNIYFRSNSTCVTVAEVEQYKLMLSVCLNINSYNQTGVSSSSKYQTGMDYSSFCLRGCLVYREKKV

SEQ ID NO: 46937 - protein, 113 aa, Zea mays
  Clone ID: 700621109_FLI.pep
KRCEASFGDPSSRSNAGIGLRQERTEMTQKQTLFKGQSKKKTIPPNRHGKAPHVRKGKRAVKPTKFTKDMDAEKELTKFINQCNEIKAANLASKEGGDLNIVKADGEESKSKK

SEQ ID NO: 46938 - protein, 69 aa, Zea mays
  Clone ID: 700621379_FLI.pep
WFIYTVDESSQMLWFSARPVIGVHGVVVCLYLNRRVSPARGESGLHQVRAAQGHAARPACCLMTKYGRY

SEQ ID NO: 46939 - protein, 278 aa, Zea mays
  Clone ID: 700465509_FLI.pep
RAIRSDPELCRPAMATRVLLTALLLAFLLVATPFTARVARADSEEDAAAAEVVEGADLGIVGDDTQVSSDGPLSPAPGVETVVVFPKNAGKIVLAGEETELLVGLQNEGESTLNVVAVHSTLHLPFDHNMYGQNLTVQNFFNASVPVSVQATFPYKFVVSKFLQPGAYDLVGYIVYEIDQHPYQNVFYNGTIEVVEAGGLLSVESVFLITLGTALLGLFGLWAYGQVQQLSKKTKKAPKVELGTGTTDANIDEWLEGTSFVQRSKSKKADLKLALQSS

SEQ ID NO: 46940 - protein, 80 aa, Zea mays
  Clone ID: 700466371_FLI.pep
YVTSLAKVFMSQRYLEGILTFILWCRAIRLIITSFNSFLVSTEIRGDISLHDIFSLLGLVLEHCFPKRFGELPLYIIFID

SEQ ID NO: 46941 - protein, 611 aa, Zea mays
  Clone ID: 700466783_FLI.pep
TKTLAARSALRPTHARRSLRSPHLPPRLVVLVRYSPRARRGARGHQMAAAAEIGGFAAARVAVATLRPAAHPAPAAAPQQPRRAVAAQSLRTTATEALTADLAGTTNGAVHARMNSKATSEITSQAVTANSRRKTKIVCTIGPSTNTREMIWKLAETGMNVARLNMSHGDHQSHQKVIDLVKEYNAQNTDGNVIAIMLDTKGPEVRSGDVPEPIMLKEGQEFNFTIKRGVSTEDTVSVNYDDFINDVEAGDILLVDGGMMSLAVKSKTTDTVKCKVVDGGELKSRRHLNVRGKSATLPSITEKDWEDIKFGVENGVDFYAVSFVKDAKVIHELKDYLKSANADIHVIPKIESADSIPNLQSIIAASDGAMVARGDLGAELPIEDVPLLQAEIVQTCRSMEKPVIVATNMLESMIDHPTPTRAEVSDIAIAVREGADAIMLSGETAHGKYPLKAVKVMHTVALRTESSLYNPTTSPSLVASAQNEDFSPSQLSKMFGSHATMMANTLRTPIIVFTQTGSMAVLLSHYRPSSTLFAFTNEERVKQRLALYQGVIPIHMQFSDDAEETFSRAISSLLKAQYVKKGDYVTLVQSGVTSIWREESTHHIQVRKVQV

SEQ ID NO: 46942 - protein, 130 aa, Zea mays
  Clone ID: 700467055_FLI.pep
MEVPMNSTQSGPHFPVQHQSLSLDIKGNKTDIVISKYEDTFLLIVAQIGCMGTILAAKKDESVFSDPTYNVSVLFGKRNEPLLQACARQLIEHISGSGSARSLVISLGLKDHSQGTLKDIIVAVIENRLW

SEQ ID NO: 46943 - protein, 146 aa, Zea mays
  Clone ID: 700467394_FLI.pep
EKVFANVGKTIGYKVGTMIEIPRAALVADEIAEQAEFFSFGTNDLTQMTFGYSRDDVGKFIPVYLAQGILQHDPFEVLDQRGVGELVKFATERGRKARPNLKVGICGEHGGEPSSVAFFAKAGLDYVSCSPFRVPIARLAAAQVLV

SEQ ID NO: 46944 - protein, 304 aa, Zea mays
  Clone ID: 700469048_FLI.pep
SYENNADAEPNKERRDLTGVNDVDVRGCAKTANTRRHHGVLSIGSTKQRVDSARRRRGCRTFRRAPSKHHGHCAAARKQGGHRVASHGGVAPRRLLQYAMGSWRSGCWSSERRPWREGRSCCCNFWAPARRSCRGVAPMGASPTAPRRRWEQRAWAPWLLGDAGAQSAIVGVGNGEKKLSAENSGRHGARSRGSRDQGERRGRCAQGVGGGACWLEEEEGEEGAMDQSSPTPWTAEGNAGELDCWPTTEKTTPCCSRSPGGGAGRALGCCCAREKEQGALREGEQRCHAMDAGELAALCLLRVG

SEQ ID NO: 46945 - protein, 170 aa, Zea mays
  Clone ID: 700469321_FLI.pep
SPVSSCVVSSLHTLSLGYVHLMVVVVDDGGGGALAQVPGAVVPELFPDELLVDEGGALELRQRQPRREQHLGRVPHGYPVEERLGEHLQEGDEGVYDPVGQPLLVVRLGRALHRAHRRVQRVQQGDARPGDGVEVADERPGLAHLSLSLCSRPVDQPMEPTATNSEELLG

SEQ ID NO: 46946 - protein, 82 aa, Zea mays
  Clone ID: 700470413_FLI.pep
FPSKLAKLSCICCAVALALRQTSTPYVCLPPQAIGLGENKTSVRCQQEWTSNNYCKGIHHTPWKQVSLAPGRGWPHGHMHFV

SEQ ID NO: 46947 - protein, 142 aa, Zea mays
  Clone ID: 700471944_FLI.pep
DLTAPRLTNPKASMATHRHCLPLLLLVAAALAAVPARAALGGGRGPLLGGWNPIPDVSDSHIQELGGWALGQAKHQKLAADGLRFRRVVRGEQQVVSGMNYRLYVDAADPAGRTVPYVAVVYEQVWTRTRQLASFNPVPRAH

SEQ ID NO: 46948 - protein, 341 aa, Zea mays
  Clone ID: 700472694_FLI.pep
MEGDEMLRVKLGRQGLEVSKLGFGCMGLTGVYNAPVPDQAGIDIIKHAFEAGITFFDTADAYGPHTNEVLLGKALKHFPREKVQIATKCGIAGFDASGMRVKGTPDYVRACCEASLQRLATDYIDIYYQHRIDQSVPIEETMGELKKLVEEGKVRYVGLSEASADTIRRAHAVHPITAVQLEWSLWTRDIEEDIIPVCRELGIGIVPYSPLGRGFFAGRAAVERVPSESLLSKHPRYSGENLEKNKVLYTRLEMLSKKYGCTPAQLALSWVLHQGEDVVPIPGTTKAKNLDENIGAVKVRLSKEDLEEISGAFPAGEVAGSRLLGVLEPFSWRLANTPPPK

SEQ ID NO: 46949 - protein, 256 aa, Zea mays
  Clone ID: 700473317_FLI.pep
RLRSRGEMAQAVEEWYRQMPIITRSYLTAAVVTTVGCTLEIISPYHLYLNPKLVVQHYEIWRLVTNFLYFRKMDLDFLFHMFFLARYCKLLEENSFRGRTADFFYMLLFGATVLTGIVLIGGMIPYISETFARILFLSNSLTFMMVYVWSKHNPFIHMSFLGLFTFTAAYLPWVLLGFSILVGSSTWVDLLGMIAGHVYYFLEDVYPRMTGRRPLKTPSFIKALFADDNVVVAQPPNAGIGAGARFGAIGVDPQAQ

SEQ ID NO: 46950 - protein, 590 aa, Zea mays
  Clone ID: 700474023_FLI.pep
TSLFTSLCSSEMAAATSSSTYLAIGRKTLNPAPSVATAATSVSFPATQHPCLVAASADRRRAVAAKVSSPSVIGTAMPSLDFETSVFKKEKVSLAGHEEYIVRGGRDLFPLLPEAFKGIKQIGVIGWGSQGPAQAQNLRDSLVEAKSDIVVKIGLRKGSKSFEEARAAGFTEESGTLGDIWETVSNSDLVLLLISDSAQADNYEKIFSHMKPNSILGLSHGFLLGHLQSLGFDFPKSISVIAVCPKGMGPSVRRLYVQGKEINGAGINASFAVHQDVDGRATDVALGWSVALGSPFTFATTLEQEYRSDIFGERGILLGAVHGMVEALFRRYTEQGMDEDSAYKNTVESITGIISKTISKKGMLEVYNSLTEEGKKQFIEAYSAAYYPCMDILYECYEDVSSGSEIRSVVLAGRRFYEKEGLPAFPMGKIDQTRMWKVGERVRSTRPQGDLGPLHPFTAGVYVALMMAQIEVLRKKGHSYSEIINESLIESVDSLNPFMHARGVAFMVDNCSTTARLGSRKWAPRFDYILTQQAFVTVDKKAPINQDLISNFMSDPVHGAIEVCAQLRPTVDISVTADADFVRPELRQSS

SEQ ID NO: 46951 - protein, 266 aa, Zea mays
  Clone ID: 700474380_FLI.pep
REDLVMSSRSLPPKDRRMRTERTSYRDAPYRRDSRHGPSRFRNDLCNNCKRPGHFARECPSVAVCHTCGLPGHIAAECSSKGVCWNCKEPGHMANSCPNEGICRNCGKSGHIARDCTAPPVPPGEVILCSNCYKPGHFREECTNEKACNNCRQSGHLARNCTNDPVCNLCNVAGHLARQCPKSDTLGERGGPPPFRGVGAPFHDVGAPFRGGFSDVVCRACNQIGHTSRDCMAGAFMICHNCGGRGHMAYECPSASLMDRFPPRRF

SEQ ID NO: 46952 - protein, 38 aa, Zea mays
  Clone ID: 700475908_FLI.pep
RKQLDRTTAGTLYNLSSVCLRANEKVHNTNPDCFQPFH

SEQ ID NO: 46953 - protein, 89 aa, Zea mays
  Clone ID: 700476119_FLI.pep
NKPPNRQLSAKLQISSDSLKMTSINNTHCTTPGILHGSAEDLENLGDFTCKHTLPFLDVVVGEPTSFPPAFTFGPSIVRHLSDHYVVTS

SEQ ID NO: 46954 - protein, 406 aa, Zea mays
  Clone ID: 700282526_FLI.pep
LPNSELQVSLLVATTGRDRRRRRRLSSLEMADGEDIQPLVCDNGTGMVKAGFAGDDAPRAVFPSIVGRPRHTGVMVGMGQKDAYVGDEAQSKRGILTLKYPIEHGIVSNWDDMEKIWHHTFYNELRVAPEEHPVLLTEAPLNPKANREKMTQIMFETFNVPAMYVAIQAVLSLYASGRTTGIVLDSGDGVSHTVPIYEGYALPHAILRLDLAGRDLTDSLMKILTERGYSFTTSAEREIVRDIKEKLAYIALDYEQELETAKNSSSVEKSYELPDGQVITIGAERFRCPEVLFQPSMIGMEAAGIHETTYNSIMKCDVDIRKDLYGNIVLSGGSTMFPGIADRMSKEITSLAPSSMKIKVVAPPERKYSVWIGGSILASLSTFQQMWISKEEYDESGPAIVHRKCF

SEQ ID NO: 46955 - protein, 163 aa, Zea mays
  Clone ID: 700352655_FLI.pep
YTTSIDIWSAGCVLAELLLSQPLFPGESAVDQLVEIIKVLGTPTREEIRCMNPNYTEFKFPQIKACPWHKIFHKRMPPEAIDLVSRLLQYSPNLRCSALEACAHSFFDELRESHARLPNGRPFPPLFNFKQELANAPPELVSRLLPEHARRHSGFGSLFGSGP

SEQ ID NO: 46956 - protein, 223 aa, Zea mays
  Clone ID: 700354483_FLI.pep
SGLWASACVRAATDRRPGTMSFTGTQDKCTACDKTVHFIDLLTADGAIYHKTCFKCSHCKGVLSMCSYSSMDGVLYCKTHFEQLFKETGSFSKNFTPGGKSSDKGELTRAPSKLSSAFSGTQDKCAACQKTVYPLEKLTLEGESYHKSCFKCSHGGCILTTSSYAALNGVLYCKIHFAQLFMEKGSYNHMNKKSPSQEVLPDVADEEQPPEPAPPQDEKEEDN

SEQ ID NO: 46957 - protein, 185 aa, Zea mays; identical to SEQ ID NO: 41307
  Clone ID: 700354555_FLI.pep

SEQ ID NO: 46958 - protein, 246 aa, Zea mays
  Clone ID: 700355649_FLI.pep
RVLLLSDPELRRPQHQARPPSRVTEMALPNQGTVDYPSFKLVIVGDGGTGKTTFVKRHLTGEFEKKYEPTIGVEVHPLDFTTNCGKIRFYCWDTAGQEKFGGLRDGYYIHGQCAIIMFDVTSRLTYKNVPTWHRDLCRVCENIPIVLCGNKVDVKNRQVKAKQVTFHRKKNLQYYEISAKSNYNFEKPFLYLARKLAGDPNLHFVEAVALKPPEVTIDMAMQQQHEAELAAAAAQPLPDDDDDLIE

SEQ ID NO: 46959 - protein, 148 aa, Zea mays
  Clone ID: 700355786_FLI.pep
PFVRAVRERGRCSRRRRRRRQFLSFGSQGGVANGHQPAWTTCARALDPRTFGARKQGAPDLGAVGHSLPPLTCAFAGDVTSVGVPDGAANYVGNVWDRCRTKECVLAGEFLAVAQRRHEPAVPHGQLHPASQPSIMPLGSIRYLLCII

SEQ ID NO: 46960 - protein, 120 aa, Zea mays
  Clone ID: 700382302_FLI.pep
SQAGPGQRAPAASLAQPAGDELAEVNVDADGEEEDGEEGEVDDGVDEDGEAAGLEVAELDDPALAGDLEEQARGEQDEEHQPDQHWPPVRHAEIDRSVDEQSTAHSQRAALSTSCSLWLC

SEQ ID NO: 46961 - protein, 281 aa, Zea mays
  Clone ID: 700383103_FLI.pep
IQSRSTPLPLSLFAVRSSAPQSNRHLTEMGRKFFVGGNWKCNGTTDQVEKIVKTLNEGQVPPSDVVEVVVSPPYVFLPVVKSQLRQEFHVAAQNCWVKKGGAFTGEVSAEMLVNLGVPWVILGHSERRALLGESNEFVGDKVAYALSQGLKVIACVGETLEQREAGSTMDVVAAQTKAIAEKIKDWSNVVVAYEPVWAIGTGKVATPAQAQEVHASLRDWLKTNASPEVAESTRIIYGGSVTAANCKELAAQPDVDGFLVGGASLKPEFIDIINAATVKSA

SEQ ID NO: 46962 - protein, 198 aa, Zea mays
  Clone ID: 700282280_FLI.pep
GAARSCAPPRSPRSCGNMGLTFTKLFSRLFSKKEMRILMVGLDAAGKTTILYKLKLGEIVTTIPTIGFNVETVEYKNISFTVWDVGGQDKIRPLWRHYFQNTQGLIFVVDSNDRDRVVEAKDELHRMLNEDELRDAVLLVFANKQDLPNAMNAAEITDKLGLHSLRQRHWYIQSTCATTGEGLYEGLDWLSNNIANKA

SEQ ID NO: 46963 - protein, 166 aa, Zea mays
  Clone ID: 700282306_FLI.pep
LPSCLLPSLREIPARVAMADQLTDEQIAEFKEAFSLFDKDGDGCITTKELGTVMRSLGQNPTEAELQDMINEVDADGNGTIDFPEFLNLMARKMKDTDSEEELKEAFRVFDKDQNGFISAAELRHVMTNLGEKLTDEEVDEMIREADVDGDGQINYDEFVKVMMAK

SEQ ID NO: 46964 - protein, 184 aa, Zea mays
  Clone ID: 700347436_FLI.pep
NYQRANRRQMELQTQALGSQYTQHEHYNASPSTSYGSQPLTLEDLSRRHFQQDLRRPLRPHPRVGVLGSLLQQEIANWSGNCGPQSGYRLGDCKGTRPPDANRAGNYETLSSAGWNTLQLGSVSSAANLEYRFPWYGTGQPSTSGNGRTIHPLDKLVRKDICVTNRNPADFTVISDKNEYMRTL

SEQ ID NO: 46965 - protein, 197 aa, Zea mays
  Clone ID: 700347587_FLI.pep
LIYKLQNMFKNTFQSGFLSILYSLGTKPLQIWDKEVVNGHIKRPQDEDIQSNVLEIVGTNVQSTYITCPADPSATLGIKLPFLAIIVKNLKKYFTFEIQVLDDKNVRRRFRASNFQSVTRVKPYICTMPLKLDDGWNNIQLNLADLTKRAYGTNYVETLRVQVHANCRLRRIYFSDRLYSEEELPPEFKLYLPIQKS

SEQ ID NO: 46966 - protein, 101 aa, Zea mays
  Clone ID: 700347878_FLI.pep
ELTEQTLIVNTEHECFLCPIAKSARLRQAKEEAEREIAEYRAQMEAEFQRKVAESSGDSGANVKRLEEETAAKIEQLTQQAASISPDVIQMLLRHVTTVKN

SEQ ID NO: 46967 - protein, 436 aa, Zea mays
  Clone ID: 700348006_FLI.pep
AKTLARPPQFPISATPSLPPRLHPCFRLPVPATPVEAMDSSLASAAAIADQRQKIEQYRHILASVLSSSPPDISQAKRFLDHMVSDEVPLVVSRQLLQTFAQDLGKLESDAQKEVAHYALTQIQPRVVSFEEQVVVIREKLAELYESEQQWSKAAQMLSGIDLDSGIRMLDDTNKLSKCVQIARLYLEDDDAVNAEAFINKASFLVTNSHQEVLNLQYKVCYARILDLKRRFLEAALRYYDISQIEQRKIGDEEIDENALEQALSAAVTCTILAGAGPQRSRVLATLYKDERCSKLKIYPILQKVYLERILRKPEIDAFAEELRPHQKALLPDKSTVLDRAMIEHNLLSASKLYTNISFDELGTLLGIDPRKAEKIASRMIYEDRMRGSIDQVEAVIHFDDDTEELQQWDQQIAGLCQALNDILDSMSSKGITIPV

SEQ ID NO: 46968 - protein, 488 aa, Zea mays
  Clone ID: 700348076_FLI.pep
QRQASSYSPISATQSFPQFPPFSHFSPPPPLPPFNNTMRECISIHIGQAGIQVGNACWELYCLEHGIQADGQMPGDKTIGGGDDAFNTFFSETGAGKHVPRAVFVDLEPTVIDEVRTGTYRQLFHPEQLISGKEDAANNFARGHYTIGKEIVDLCLDRIRKLADNCTGLQGFLVFNAVGGGTGSGLGSLLLERLSVDYGKKSKLGFTVYPSPQVSTSVVEPYNSVLSTHSLLEHTDVAVLLDNEAIYDICRRSLDIERPTYTNLNRLVSQVISSLTASLRFDGALNVDVNEFQTNLVPYPRIHFMLSSYAPVISAEKAYHEQLSVAEITNSAFEPSSMMAKCDPRHGKYMACCLMYRGDVVPKDVNAAVATIKTKRTIQFVDWCPTGFKCGINYQPPSVVPGGDLAKVQRAVCMISNSTSVVEVFSRIDHKFDLMYAKRAFVHWYVGEGMEEGEFSEAREDLAALEKDYEEVGAEFDEGEDGDEGDEY

SEQ ID NO: 46969 - protein, 168 aa, Zea mays
  Clone ID: 700348186_FLI.pep
FTTAGAGSNRRRRKMTVGMINANPVVHERPERASHPHAADVLDPLDVFDTVRDIKDPEHPYSLEQLSVLSEESVSVDETLGRIQITFTPTVQHCSMATVIGLCLRLKLMQNFPPHFKVDIKVAPGSLANEESVNKQLNDKERVAAALENPNLRQLVDECLCFNDPYSR

SEQ ID NO: 46970 - protein, 296 aa, Zea mays
  Clone ID: 700348226_FLI.pep
PLYYSKLLPAACFNSRREREDGVTEALVGGPAPPGGGGRAGAGARGPDARQLREEQEGDGAEPVQPRRDADAGAAGQQPAAVRGHLHAAPAQPRRVPRVLVDGAPARARRRPGGVPRRRRRRLLLPGPQRAAGPARPGLRHPARLAAAGPLPRRRLRHPGPLLRAPGAQRRLPQRPGDEDHLLQPARVMRCGHGVVAPSRDLCCAFFHVAVAVVCPTAIVVRLLLISRLLRSVASLSSVLSLASHACDVSHCTRECHMSRRPVSSHVFEIVGSRGSRCVSALFVFTAVSLSPSSII

SEQ ID NO: 46971 - protein, 366 aa, Zea mays; identical to SEQ ID NO: 41312
  Clone ID: 700348517_FLI.pep

SEQ ID NO: 46972 - protein, 181 aa, Zea mays
  Clone ID: 700348555_FLI.pep
RSLPLVTSLPLPAPLRPPRHRPFARQETGPETMADQLTDDQIAEFKEAFSLFDKDGDGCITTKELGTVMRSLGQNPTEAELQDMINEVDADGNGTIDFPEFLNLMARKMKDTDSEEELKEAFRVFDKDQNGFISAAELRHVMTNLGEKLTDEEVDEMIREADVDGDGQINYEEFVKVMMAK

SEQ ID NO: 46973 - protein, 242 aa, Zea mays
  Clone ID: 700348864_FLI.pep
DFSRRRCSSHIPREDACSSPIDTMAVFSDLHTADGLKSLEAHLAGKTYVSGDSITKDDIKVFAAVPSKPGAEFPNAARWYETVSAAVASRFPGKAVGVNLPAGSAPAAAAPADEAEDDDDLDLFGDETEEDKKAADERAAAAKASSKKKESGKSSVLMDVKPWDDETDMKKLEEAVRSVQMEGLTWGASKLVPVGYGIKKMTIMLTIVDDLVSIDTLIEDHLTQEPINEYVQSCDIVAFNKI

SEQ ID NO: 46974 - protein, 426 aa, Zea mays
  Clone ID: 700348959_FLI.pep
WGRGRGARGLWPWRSPSRFSPALAPSLSPGRRIPSGSKVLDLAWPGSAGDVLEDDPVGRLKVYVYELPTKYNKKMVAKDSRCLSHMFAAEIFMHRFLLSSAIRTLNPEEADWFYTPVYTTCDLTPWGHPLPFKSPRIMRSAIQFISNRWPYWNRTEGADHFFVVPHDFGACFHYQEEKAIERGVLPLLRRATLVQTFGQKDHVCLKEGSITIPPYAPPQKMKTHLVPPGTPRSIFVYFRGLFYDTANDPEGGYYARGARASVWENFKNNPLFDISTDHPPTYYEDMQRAVFCLCPLGWAPWSPRLVEAVVFGCIPVIIADDIVLPFADAIPWEEIGVFVAEDDVPRLDTILTSIPMEVILRKQRLLANPSMKQAMLFPQPAQAGDAFHQILNGLARKLPHGEDVFLKPGQKVLNWTEGPRGDLKPW

SEQ ID NO: 46975 - protein, 485 aa, Zea mays
  Clone ID: 700348987_FLI.pep
EEEMALTRIGLAGLAVMGQNLALNIAEKGFPISVYNRTTSKVDETVQRAKAEGNLPVYGFHDPASFVNSIQKPRVVIMLVKAGAPVDQTIATLAAHLEQGDCIIDGGNEWYENTERREKAMEERGLLYLGMGVSGGEEGARNGPSLMPGGSFDAYKYVEDIVLKVAAQVPDSGPCVTYIGKGGSGNFVKMVHNGIEYGDMQLISEAYDVLKSVGKLTNSELHQVFSEWNKGELLSFLIEITADIFGIKDEHGDGYLVDKVLDKTGMKGTGKWTVQQAAELSVAAPTIEASLDSRFLSGLKDERVEASKIFQGDYYSTGSPVDKAQLVEDVRQALYASKICSYAQGMNIIKAKSAEKGWGLNLGELARIWKGGCIIRAIFLDRIKKAYDRNPGLASLLVDPEFAQEIMDRQAAWRRVVCLAINNGVSTPGMSASLAYFDSYRRDRLPANLVQAQRDYFGAHTYERVDMPGSFHTEWFKIARNISNN

SEQ ID NO: 46976 - protein, 257 aa, Zea mays
  Clone ID: 700349153_FLI.pep
PPSLSFPYLASSPLLEISRVRAHSRFWPPPPPSGKMAGLGKAMYAVGFWIRETGQALDRLGCRLQGKYFFHEQISRHRTIMNIFDKTPHVHKDAFVAPSASLIGDVQVGSGASIWYGCVLRGDANIIQIGSGTNIQDNSLIHVAKSNLSGKVFPTTIGNNVTVGHSAVLQGCTVEDEAFVGIGATLLDGVVVEKHGMVAAGALVRQNTRIPCGEVEHTSSTVLCFGFLIKPSQAPLPFLFHRLVSPRQGFLVMMEPQ

SEQ ID NO: 46977 - protein, 171 aa, Zea mays
  Clone ID: 700349187_FLI.pep
QKLRPLLRPPPRRRLGPLPTDAAGELDVLGHNGDALGVNGAEVGVLEEPDEVGLGRLLQRSDGGALEAKVGLEVLGDLTNQALERQLADQQLRALLILADLPERDGAGAETVGLLHSAGRRGRLARRLRGQLLPWRLAASGLPRRLLRAGHRDSTKGLALCFARGSAARDC

SEQ ID NO: 46978 - protein, 401 aa, Zea mays
  Clone ID: 700349430_FLI.pep
KSKEREVYFSRTSMVFPSVPVYLDPHPPDWNNQQQQGQQPRASGGADAPLLPVGPMAATAAASEPGGLPRSSSTSSAALAMHARPNSMAERARLARLPNPEPALKCPRCESTNTKFCYYNNYSLSQPRHFCKTCRRYWTRGGSLRNVPIGGGCRRNKRSSKSSAAGSSSSSKPFSSGRLLGGPSAMSSTTQGATGAIIAPGLSSFSHHLPFLGSMHPPGPNLGLGFSVGLPLLGMQHLEMVDQFPVASGGGTTIGASLEQWRVQQQQQQQFPFMTRGILDLPQPSTYQLGLEASRGGSGSDAVAFTLGQSTTSAATITTRQEGSAMKMGDDSKGQDASLQKQYTAALHHGSGSHGVWDGNAGGSGSGGGGGTGSGNSSWPMNIVSAFHSSSTSGGNGDGLS

SEQ ID NO: 46979 - protein, 287 aa, Zea mays
  Clone ID: 700349916_FLI.pep
AELLCCLLPAIDSFVPRDGRWRYGPRRCCFSSDRRWEVALAHLRCLVDDVGGAGEVAGSDGPALALVVVVEGVGCVRDHGVGLEARRAGLDGLAVRAAGAARVVQRRLEPMLPGHRVRHAPRLPGRHLHPARRVGAGAARPAAVLLPPEAAVALAGAAAAEDELDVVHLLLVRVEDAVVALGGRPGLLVLVEEREEVHVDVGVGAARGAGVAGEHAAGQVAVVRRGVGRRSARLVGVALGRPPRLGDHDAHAVVALPEPADRGEHGVQLRVEEAVVLEAVPGVEHAG

SEQ ID NO: 46980 - protein, 275 aa, Zea mays; identical to SEQ ID NO: 39239
  Clone ID: 700350050_FLI.pep

SEQ ID NO: 46981 - protein, 140 aa, Zea mays
  Clone ID: 700350139_FLI.pep
RGTSEPPDATCVESWAQRIPKQTNRVEVEGEERRGEERRGWVWDTMAPMKLYGAVMSWNVTRCATALEEAGSDYEIVPINFATAEHKSPEHLVRNPFGQVPALQDGDLYLFESRAICKSSSVRCLGEPPTRKLWMRTLRS

SEQ ID NO: 46982 - protein, 230 aa, Zea mays
  Clone ID: 700350304_FLI.pep
ETRANSGEPVRCGGGGRGRRRREKEHQEEAAEMDPDSVKSTLSNLAFGNVIAAAARDLQKEMVAKDKAQAAPASHDEVDLDELLDDPELEKLHAERIAALKKEVEKREVLKRQGHGEYREITEGDFLGEVTGSEKVICHFYHREFYRCKIMDKHLKALAPVYVGTKFVKLDAENAPFFVAKLAIKTLPCVILFKKGIAVDRLVGFQDLRSKDDFPTRALENILKTKGIID

SEQ ID NO: 46983 - protein, 350 aa, Zea mays
  Clone ID: 700350369_FLI.pep
NWGRLLEGLTCWIQRRLFQSPGALCHSVLRSPHRGNRLVRVAMAVAKVKSVALSVSHKCRNILAAGWEAHLNTVKADNKGSKNEIYTSRVHYMIHKGTPYLIVPENDMHNINIIIDERGSLAVFSPIRGRVASLLKPSKTPPRVAMTGDVLRLKDSKVPIIADSLKQTILKEHEAASKASYGVSAILSSAGATCRSRSEGLLSLLSEESSYNILKFDIGSCVYIDFNGSSHNIELDSFEAPKADLLMPFSAKLVDGINQNDSRRRALVMFCFAYFNVIARSAVMLSIDHHGFDVLAKVPQGDILTNPQYHWKEFRFTFKEPAKDAEDFCRMLVGLEEEGLQTVKSCSGYG

SEQ ID NO: 46984 - protein, 135 aa, Zea mays
  Clone ID: 700350386_FLI.pep
PPSCARYPSPSRPLPAKSAQSPTRMKFVAAYLLAVLAGNSSPSAEDLTAILESVGCEVDNEKMELLLSQLSGKDITELIAAGREKFASVPCGGGGVAVAAAAPAAGGAPAAEAKKEEKVEEKEESDDDMGFSLFD

SEQ ID NO: 46985 - protein, 290 aa, Zea mays
  Clone ID: 700350805_FLI.pep
HRHRKMQALLLPARAAPPTPAMLRQRAVSASACASQVCRPLFGAASCISCGVHGSVRRHLTVAVAAAPPSPSSSPSSGPLYPTPPPTEQEVERVKLEQVMRRLEKTARYFKNLGTLGFWSQLVCTIISAGILAFSTVVTGKVTSPFTFYATAAGIAAAFISVFWSFGYIRLSERLRKTSKEPAKAPPRADVVKSLKNGIVVNILGMGAAVLGMQATVGALVAKALTTSAVPYYQAAGQSPVLALDVFLVQASANTILSHFLGVASSLELLRSVSLPPAEAAVPAPAPARA

SEQ ID NO: 46986 - protein, 177 aa, Zea mays
  Clone ID: 700351156_FLI.pep
LRKLDDYRSAKKSDAGRLELCPLPAFLLLEPLEEVAAMSTSITSSSLSSSLSSLPASAGSSPLATCGPLKSSSMSQSFSILSCEMLPKYFLSFDKARASMGYSECSASGCFILLGRMPTNLITPSDDPETKVSSSSFSIVSTDCVCPRKRSLQSLKYPHEYNKSAPLGVPHTTFLPC

SEQ ID NO: 46987 - protein, 233 aa, Zea mays
  Clone ID: 700351221_FLI.pep
PRSHAPNTTTKEGENAPLPLQSPGPSPRLLIYRCSPSLGSENRREARATMASSASRFIKCVTVGDGAVGKTCMLICYTSNKFPTDYIPTVFDNFSANVVVDGTTVNLGLWDTAGQEDYNRLRPLSYRGADVFVLAFSLVSRASYENIMKKWIPELQHYAPGVPVVLAGTKLDLREDKHYLMDHPGLVPVTTAQGEELRRQIGAMYYIECSSKTQQNVKAVFDAAIKVVIQPPT

SEQ ID NO: 46988 - protein, 429 aa, Zea mays
  Clone ID: 700351818_FLI.pep
SHGHASSSSPPPSPRREKPVAARPPHMATALGGEPNPTADAMEVDPPRASADEKHVATIIAGGSDAVTGHIISTTIGGKNGEPKRTISYMAERVVGTGSFGVVFQAKCIETGETVAIKKVLQDKRYKNRELQIMRSIDHCNVISLKHCFFSTTSRDELFLNLVMEFVPESLYRVLKHYKDMKQRMPLIYVKLYMYQIFRGLAYIHTVPGICHRDIKPQNILVDPLSHQVKVCDFGSAKILIKGEANISYICSRYYRAPELIFGATEYTTSIDIWSAGCVLAELLLSQPLFPGESAVDQLVEIIKVLGTPTREEIRCMNPNYTEFKFPQIKACPWHKIFHKRMPPEAIDLVSRLLQYSPNLRCSALEACAHSFFDELRESHARLPNGRPFPPLFNFKQELANAPPELVSRLLPEHARRHSGFGSLFGSGP

SEQ ID NO: 46989 - protein, 420 aa, Zea mays
  Clone ID: 700351932_FLI.pep
VYGICGPLCCPCERRACVAPVLRVMPLTRVAADAFGVLTIALFALFAALGLFCIFQSVYFRCRIRRGPSFLPLGYFNGPWVTRIALILITIWWGVGEIVRLSFLKKKLFSSLTWQRNICDVYILSNLGFAEPGIFFAFAFLLHGSLQKRELGTLNQRWNWKTMAYLLVFCIPVFSVQAILVFVGPKFVREENHDLGRRKIAKYFIRTYTPVGDTSVCTYPLFGTLFLGLVDAFLMSYVSYVGLRVLSLVINKSLRRRVYLLMLSVLCFLPIRVLLLGFSVLLKPGHVAFEGIIFLSFLMMLSCTTVGILLLVYYPVADSLALRDIGQRDIAEMVPYDDYYYEGTSLVANQSFREIERNSDTSTKPGSISFRTMIREDQLQQDGTDEIGFSSRSGVHIGSPSGSSPSAAVPMLPLKEIPRY

SEQ ID NO: 46990 - protein, 161 aa, Zea mays
  Clone ID: 700352436_FLI.pep
AKPKRPFPFALFDPSKKAAAEMVYYALLVGAELDGLTNLQPSGGCDDPSFPYYLKCKLCGRDGTIVMIPGQGTPLTIEQSQKEEKTCLMVFDCRGYEPVEFSFGAGWKAESVHGTPFEIDCSEDEFSEYDEKGECPVELSKLQSTFKVVKKHEKGGKIRFV

SEQ ID NO: 46991 - protein, 162 aa, Zea mays
  Clone ID: 700380994_FLI.pep
ARHETNPPSSNITTTNSSATAQALSPLMRRASWMSLGMMVTLLAWMAQRLVSSKSPTRYASAASCSAATADDWNRRSVLKSCAISRTRRWKGSLRMSSSVLFWYLRISRSATVPGRKRCGFFTPPVAGADLRAALVASCFRGALPPVDLRAVCFVRAIRSGA

SEQ ID NO: 46992 - protein, 167 aa, Zea mays; identical to SEQ ID NO: 37637
  Clone ID: 700381065_FLI.pep

SEQ ID NO: 46993 - protein, 315 aa, Zea mays; identical to SEQ ID NO: 38959
  Clone ID: 700381594_FLI.pep

SEQ ID NO: 46994 - protein, 388 aa, Zea mays
  Clone ID: 700381617_FLI.pep
SHRRKPATSLRGLTVISAWHPKAVKIREAGGTKRRASDPTSSSARAARRRREMGADYYKVLGVDRGASDDDLKKAYRKLAMRWHPDKNSTNKKEAETKFKEISVAYEVLSDPKKRAIYDQLGEEGLKGQPPPGAGGPGTSPFFPGGVHSTAHHFNPRSADDIFKEFFGSPGMGGMRTEPGFQRSVFGNDIFSSRFRAEGSTSMQQPLRKAAAIENPLPVGLADLYKGVTKKMKISRETIDASGRISNTEDILTIQVKAGWKKGTRITFPDKGNEAPNMKPADIVFIIDEKPHDVFTREGNDLVVTEKISLVEALTGYTARVTTLDGRSLSLHINSIIHPKYEEVMPGEGMPMPKDPTKKGNLRIKFNIMFPSRLTSDQKAGIKRLLGS

SEQ ID NO: 46995 - protein, 187 aa, Zea mays
  Clone ID: 700381713_FLI.pep
HSPGHQSFLSGRDLHLAVVNLLLQVLGVLAVDGAPDADAGTEDLLDGAGQFLGHGPVPHGPGDLDDVVEADVAAVLDVLDLLAVPLWLLERLDDERRGGGDDGDLGLPVLDGELDGDAEALPVLGRLLGDVLSDLLGGKTERADLGGQRRRCADLAAGHTDEHLHHLRRVELGRHGCERGSGGGSCG

SEQ ID NO: 46996 - protein, 101 aa, Zea mays
  Clone ID: 700381722_FLI.pep
LTLLPLMNTCSRCEMSPSCRLINKNEEKYSGEQNPWGSISDPKVAQAERVYLSGEGNVLELAILVILALEWTVGTPRRSSTPPSPRDPLSHGGTSPGSSGS

SEQ ID NO: 46997 - protein, 463 aa, Zea mays
  Clone ID: 700381837_FLI.pep
PPPPFPSATATSPPHSPAGAAAAAAARSYPTSASGGGTAGGKGKMFGRAPKKSDNTKYYEILGVPKSASQDDLKKAYRKAAIKNHPDKGGDPEKFKELAQAYEVLSDPEKREIYDQYGEDALKEGMGGGGSHVDPFDIFSSFFGPSFGGGGGSSRGRRQRRGEDVVHPLKVSLEDLYNGTSKKLSLSRNVICSKCKGKGSKSGASMRCPGCQGSGMKVTIRQLGPSMIQQMQQPCNECKGTGESINEKDRCPGCKGEKVVQEKKVLEVHVEKGMQHNQKITFPGEADEAPDTVTGDIVFVLQQKDHSKFKRKGEDLFYEHTLSLTEALCGFQFVLTHLDNRQLLIKSDPGEVVKPDQFKAINDEGMPIYQRPFMKGKLYIHFTVEFPDSLAPEQCKALETVLPPRPSSKLTDMEIDECEETTMHDVNNIEEEMRRKQAHAAQEAYEEDDEMPGGAQRVQCAQQ

SEQ ID NO: 46998 - protein, 172 aa, Zea mays; identical to SEQ ID NO: 45169
  Clone ID: 700381887_FLI.pep

SEQ ID NO: 46999 - protein, 198 aa, Zea mays
  Clone ID: 700381918_FLI.pep
PVSPFSGLGESEMASSASRFIKCVTVGDGAVGKTCMLICYTSNKFPTDYIPTVFDNFSANVVVDGTTVNLGLWDTAGQEDYNRLRPLSYRGADVFVLAFSLVSRASYENIMKKWIPELQHYARGVPVVLVGTKFDLREDKHYLMDHPGLVPVTTAQGEELRRQIGAMYYIECSSKTQQNVKAVFDAAIKVVIQPPTKL

SEQ ID NO: 47000 - protein, 206 aa, Zea mays
  Clone ID: 700548408_FLI.pep
ASATIPLLALERRGCAMGDTGSSSILVHILVVALCLTAFGFAVAAERRRSTGSIVTDSSNATFCVYDSDIATGYGVGAFLFLLSGHSLLMGVTRCMCFGAPLAPGGSRAWSIIYFASSWITFAVAEACLIAGATKNAYHTKYRDMVYAGNWTCQTLRKGVFIAGAVFVVFTMILDVYFYMYYSKATSQATKRISKTTPSVGMTGYA

SEQ ID NO: 47001 - protein, 337 aa, Zea mays
  Clone ID: 700549002_FLI.pep
SRRRELRSLKSEMLLEKLLFVRSRSASRRPRMRRRRRRLRCPSPCASRRGFVTFGGGAARFSPTLRSGRGFSGVQTHVAAVEQAIVKDATKLEAPVVVVTGASRGIGKATALALGKAGCKVLVNYARSSKEAEEVSKEIEASGGEAITFGGDVSKEADVESMMKAALDKWGTIDVLVNNAGITRDTLLMRMKKSQWQDVIDLNLTGVFLCTQAATKVMMKKRKGKIINIASVVGLTGNVGQANYSAAKAGVIGFTKTVAREYASRNINVNAIAPGFIASDMTAELGEELEKKILSTIPLGRYGQPEEVAGLVEFLALNPAASYMTGQVLTIDGGMVM

SEQ ID NO: 47002 - protein, 238 aa, Zea mays; identical to SEQ ID NO: 44918
  Clone ID: 700550008_FLI.pep

SEQ ID NO: 47003 - protein, 208 aa, Zea mays
  Clone ID: 700550176_FLI.pep
RSSYRSRAAPTEKPATSNYNTRRTSTQEKPTKGERASLGGGELGDGLGALRDGVLGELAGEHEAHGGLDLAGGDGGLLVVARELGGLAGQLLEDVVDEGVHDGHGLGGDADVRVHLLQHLEDVDLVRLHALLALLLATLALAALLAGGLARGDPLLRLGLLPGGRLLGRGLLLRRLLRRGLLLGLGRHRSLVGRGIGNRLQGKCEEIC

SEQ ID NO: 47004 - protein, 135 aa, Zea mays; identical to SEQ ID NO: 36896
  Clone ID: 700550605_FLI.pep

SEQ ID NO: 47005 - protein, 224 aa, Zea mays
  Clone ID: 700551130_FLI.pep
SQKVSDVGRQLLNQHVVELLDVEQHPLVVAGHKVDGNTLPTETTTTTNAMQVILWLGGEIIVDDQGHLLNINTTSKQVGGDEHTGGARPELPHDDVSSVLVHVTMSGRNSVVPAPHLVSEPVHLAAGVDKDDTLGDGKGLVQVTQCVQLPVFLIHIHIELLDTLKSQLISLHEDSHWLVHELAGNLKGLRGHGSREDSNLNLGWEKLEDVVNLILETTRKHFIS

SEQ ID NO: 47006 - protein, 137 aa, Zea mays
  Clone ID: 700551208_FLI.pep
PHRLLHNTLLTSRRLLPSIPPRKTHPLQGELIEKRWWTWVRSSTPRSTSTTPTSTGTSSSRQRSPSSSPRTASSPRTSGARSECSRAAGGCTTRSTARSRTSCCSAARSTTSSSRRRLPRRCWPSEPLVARAATRNV

SEQ ID NO: 47007 - protein, 168 aa, Zea mays
  Clone ID: 700551407_FLI.pep
RSPTSRLLPACLPACKKEFVMASKRILKELKDLQKDPPTSCSAGPAGEDMFHWQATIMGPPDSPYAGGVFLVNIHFPPDYPFKPPKVSFKTKVFHPNINSNGSICLDILKEQWSPALTISKVLLSICSLLTDPNPDDPLVPEIAHMYKTDRPKYESTARSWTQKYAMG

SEQ ID NO: 47008 - protein, 171 aa, Zea mays; identical to SEQ ID NO: 46977
  Clone ID: 700551504_FLI.pep

SEQ ID NO: 47009 - protein, 47 aa, Zea mays
  Clone ID: 700552064_FLI.pep
SYALHLVHIEVMFPVIKWNCTIFVVQFKLTAGISVFFLWFFCVFTFF

SEQ ID NO: 47010 - protein, 63 aa, Zea mays
  Clone ID: 700552229_FLI.pep
HNVPIGVSMYIFIGHNDYQLHLLSSSFLPKKMKASEVGSHNVPIGVSMYIFIGHNDNSNQVMI

SEQ ID NO: 47011 - protein, 279 aa, Zea mays
  Clone ID: 700552458_FLI.pep
AALAGLVARRRRSRGRGGAAIVRGMSYGGSSSLAPGAKRPFEYGRTHVVRPKGTHKATIVWLHGLGDNGTSWSQLLETLPLPNIKWICPTAPSRPVSLFGGFPCTAWFDVADLSEDAPDDTEGMDASAAHVANLLSTEPADIKLGVGGFSMGAATALYSATCFAHGKYGNGNPYPVNLSLAVGLSGWLPCARTLKNRIEASPEAAQRASTIPLLLCHGKADDVVLYKHGQRSTDALKANGFSNVLFKSYNSLGHYTVPEEMDEVCKWLTANLGLGTSSS

SEQ ID NO: 47012 - protein, 73 aa, Zea mays
  Clone ID: 700552877_FLI.pep
GREGRQEVKQPNFVACFVLFSHSEMLLPSSACSKFFLGAGNRDQSNILVSYCLIPCICLRTQLSNGLMNSWRR

SEQ ID NO: 47013 - protein, 100 aa, Zea mays
  Clone ID: 700553155_FLI.pep
TRAAELKNTHANFNLLHRIRFGCVHMHADGYHHDGEYAEVEDGVDEDGEGAGAHVAELHNPDPRRQLEQEPRRQQDEQHHRHDDRPPVRRHHLSLCLRLA

SEQ ID NO: 47014 - protein, 192 aa, Zea mays
  Clone ID: 700610806_FLI.pep
PHCPLLLSFSLSPVPLPDFLHSRFASLPSCLLPSLRQIPARVAMADQLTDEQIAEFKEAFSLFDKDGDGCITTKELGTVMRSLGQNPTEAELQDMINEVDADGNGTIDFPEFLNLMARKMKDTDSEEELKEAFRVFDKDQNGFISAAELRHVMTNLGEKLTDEEVDEMIREADVDGDGQINYDEFVKVMMAK

SEQ ID NO: 47015 - protein, 419 aa, Zea mays
  Clone ID: 700611548_FLI.pep
MMQQAQAHTSALAGAPSASAVAPTVAHPHDPVGGDAPPKQVAQAMERLGRAGRFIADIRLGADRLLEALFVSGDAPPYSVRQHVDRMERIIVKEDAAMRLHFQDLRALGRQLEESGVLNGALKAQGNSWGLHMPLVCPDGAVVAYAWKRQLAGQAGASAVDRTRLALKAFTDQKRRFFPHLEDEVVSHLHDGQPGDTKKSKLFTSNGYLEEKSLSEILKNLEHEVPNIKIFTYWHLDWSKRASSLASLLDDDFVDPSKELNLQNMDKSRSDALTTTIDQVAVIELLVPSIFRAVVSLHPAGSTDPDAVAFFSPTEGGSYLHARGTSVHHVFKHVKEHADKALQYFINAEPSKALPLLLRWIASYQTLFTKVCSKCRRLLMMDKSLALLLPPVHRPYHQTSNVGPDLQEAYHIGCSSYDG

SEQ ID NO: 47016 - protein, 148 aa, Zea mays
  Clone ID: 700612082_FLI.pep
SRRSEVVAGAGGRASSKMSWQAYVDDHLLCDIEGQHLSAAAIVGHDGSVWAQSENFPELKPEEVAGMIKDFDEPGTLAPTGLFVGGTKYMVIQGEPGVVIRGKKGTGGITIKKTGMSLIIGIYDEPMTPGQCNMVVERLGDYLIEQGF

SEQ ID NO: 47017 - protein, 234 aa, Zea mays
  Clone ID: 700342352_FLI.pep
PPPARAPATTRRNQGWSRRATTRRRSRRGRRSPNPHCARVYARGSMVGGGARRAALGRWCLVILAVASALGVSGPAFYWRYKKGFSSSSPSSTAAAVASSPSCPPCSCDCPAPLSLKSIAPGLANFSITDCGKNNPELAKEMEKQFVDLLNEELKLQQVVAEEHSHHMNATLVEAKRQATQYQREAEKCNAATETCEEAREQSEVAISKEKKLTAMWEQRARQLGWHDSRATSM

SEQ ID NO: 47018 - protein, 180 aa, Zea mays
  Clone ID: 700342403_FLI.pep
KAFGNDILLEGGEINRAYLGQIVFSDPSKRQLLNRLLAPHISWGIMWEMAKLWMKGYKVIILDIPLLFETKIDRWTNPVTVVWVNPETQIQRLMSRDGCSEEQAQNRVNAQLALDWKRSEADIVINNSGSLDDTRLQFQDVLRKVSEPLTWKERLRSRDGLISVVVCTAVGVLLARKNLL

SEQ ID NO: 47019 - protein, 322 aa, Zea mays
  Clone ID: 700342440_FLI.pep
PVQDVRIPYQQKRMFGFVTFVYAETVKIILSKGNPHFVCDARVLVKPYKEKGKVPDRFRKLQHPHHGDFAGCTSPTGLLDSRDPFDLQQPQIGPRMMYGNVAGHEAFLRRKLEEQQQAAELQQAIELEGRRFMGLHLLDLKSRGHHHLGSSPAAMATTTLGQGDDGCKGRSANGNDNAVAFHLEDANIQDTPTKMNSNSLAMSGGPAAGAGGEHEEQQQDGDGDGSPKQAVNPGKEEKTESGPVTATPIVACGFQESGVVEHILPDSPFASPSKASTQNGSIISNAASSLFPPPASTMELPPYSSCFFQAPRFSPGHEAIGL

SEQ ID NO: 47020 - protein, 282 aa, Zea mays
  Clone ID: 700343123_FLI.pep
ERGEGGFPQREPEPKPKPKQSTLAFPHQGVHPSSHGDGVQDGDGGDEREGGVPALVHGDEVEEGAPLRGVQDRRAVARRAGGQGGRPRGRVRGARGRAARRRLPLRRLRLRLRHRRQLPEEQDLLHRLVTGGVEDQGQDPVRDIEARPAAAAGRGPLRGAGHRPLRDGLRRHQRPRAMRPPLRSAPIYVLTCAWACSPTTHCSVVSSHLRSCVCVCDRPDANWRWCAPVAIDAANLTRLRVCLLCYFRFSGEMVQAWCVDVDGWSRSSGEWQRTNETSTSAT

SEQ ID NO: 47021 - protein, 228 aa, Zea mays
  Clone ID: 700343966_FLI.pep
AGRLPAPPPSRRHECVLGFRRPARAVAAIPMEADTGCRLEVDDVISFADDLVAVLRRSDDADANAQVIAGAGLLRTACRSESDHLHLQLKDYQQKICSCKDRTDKAKAETIAADELSVLQNKMEENLQEDKQLREELRATHNDLENLDHQRASIQDRKNAIKKKDENMRKATYKLSMCVSVTNIIPNLEDRDKISSYTVDKNGKKIQKFEFEKTTPPVEICNTLWKTI

SEQ ID NO: 47022 - protein, 264 aa, Zea mays
  Clone ID: 700343971_FLI.pep
IKPPSMHLGQLLLQLSGIPASGSNRVTVLQAFVHLLCIVMNNESNGVLVVQKFLPLLPDAYLSGFIGSIFCPNSNSFLLPTHTDNCATNFITIVELFTNHSQQSVQPKCIRFSSSTADGPFTTIRTNRVFPFWLDLVLEAMEISSHDQFARVINVIVKPPEFLDGGEGVYGADGAPPGGLLGLALRVVEPEGPGVLERVRGGRGRSAGEVGDLALLPVVVLGRGAASGARGGRPGVGLLGHGVAAVVREAFLYAGRTETETETE

SEQ ID NO: 47023 - protein, 153 aa, Zea mays; identical to SEQ ID NO: 44873
  Clone ID: 700344278_FLI.pep

SEQ ID NO: 47024 - protein, 167 aa, Zea mays
  Clone ID: 700344454_FLI.pep
GWDREGLSQYHFIYCAPQEPDGAPHDCWGCEFIPVSSGGGLGLAYSAKITHPSRNFPSFPSIPLAASSVVAYLTKPNPLENPLTRSVTTRACKTSPNSAKASLSPSLVVRLLKPETKRLGDGSALGRAAGAFGGAKAETENMRRNPDLATAAAIAAGNLVPRDWRWD

SEQ ID NO: 47025 - protein, 150 aa, Zea mays
  Clone ID: 700344808_FLI.pep
SPSPAFLFLFNSPQRFVSSALISAVPVPDFSSSSSLPPATAQRKGRRLSTQRSPSTPQPRIGTPALRNPPMAEESGRPLPKFGDWDVNDPASADGFTVIFNKARDEKKGGNGQDTESPSKDTRTERVESYAAKPSTKKWFCCVTASPTQS

SEQ ID NO: 47026 - protein, 147 aa, Zea mays
  Clone ID: 700345268_FLI.pep
CYFLFHLFVVSLLLFRGGSRGFPPPPCLLKLPSLAPVWLCGTPNAEPKSFTVSLTMDNGQRRGTRHPRSESVPTQPPSLQILRRPSCRQSRFLPPSMKLMRRWSERGRAVGLANEVPLEDHGVEAVQLEEELEVCSALGLLVPAGGD

SEQ ID NO: 47027 - protein, 220 aa, Zea mays
  Clone ID: 700345290_FLI.pep
LPGTTGGREGYDHVTWNSNNLRRRIISMEQSPAVGCLKSNATQVIYRGSTTGLSLLDRVLYVIGVASAQVSILWNPVLASVRARHLVPLQNKLAFLVSLALLMCSIIFPPNYGSTANTEDIRNSMHSCDHHAVFFYSRSHVDNLMEEVRLAVLALEGLGDDVAGNAEVGLAVFAAVDVAVQVHQEQAPHRRLLSHLPQLRSKPSLSASRQFHPRTRRGPL

SEQ ID NO: 47028 - protein, 185 aa, Zea mays
  Clone ID: 700345357_FLI.pep
EIFLGVLRLHCHKVRVRHRLVRLCEGGRGEEKMQIFVKTLTGKTITLEVESSDTVDNVKAKIQDKEGIPPDQQRLIFAGKQLEDGRTLADYNIQKESTLHLVLRLRGGTMIKVKTLTGKEIEIDIEPTDSIDRIKERVEEKEGIPPVQQRLIYAGKQLADDKTAKDYNIEGGSVLHLVLALRGGY

SEQ ID NO: 47029 - protein, 206 aa, Zea mays
  Clone ID: 700345436_FLI.pep
PTCSILCFSLARLALAATLCDRVSVCYQHHPSTPPRLGFPAPMAAAGADGERRIGVAIDYSESAKKALDWAIDNLLHHGDTLVVVHVLHHGAEETKHTLWAKSGSPLIPLSEFREPEVMQGYGVRPDAEVLDAIDTAARQKQLKVVAKLYWGDAREKLCDAVEDLKIDSLVMGSRGLGPIQRILLGSVTNYVLSNASCPVTVVKGK

SEQ ID NO: 47030 - protein, 116 aa, Zea mays
  Clone ID: 700345546_FLI.pep
KGFVLMAPPQPKSGLFVGINKGHVVTKRELPPRPCHRKGKSTKRVSMVRGLIREVAGFAPYEKRITELLKVGKDKRALKLAKRKLGTHKRAKKKREEMAGVLRKMRSAGTHTDKKK

SEQ ID NO: 47031 - protein, 254 aa, Zea mays
  Clone ID: 700346134_FLI.pep
GLLYPVEIETANHLVQSFIATPVQFDEISSTSKCSIGSNTKWNSSYASAVSNLPMGYPVLPQPIMPAPGQPHMDPMACGLSNGHVVNGIPAPGGYHPMRMNSGNDMVVDNGAPEAPHAGATGSVMSSEMAVSPSSAASSNHAPFMPPEIPGMAMDVPGLDSTFGSDVGNGPLQLGPDGSSRDSIRSLGQLWNFSLSDLTADLTSLGDLDVLENYTGTPFLPSDSDILLDSPDQDDIVEYFADAINGSQSDEERS

SEQ ID NO: 47032 - protein, 302 aa, Zea mays
  Clone ID: 700346418_FLI.pep
SCSSSISSISLHPLSRCLRRTACPCSLFRSSPRPARHPQTSFQAGMDDYAREMMELKTLVTRTLEKKGVLAKIRAELRASVFEAIEEEDRVENDDGGNPALLGSCNDRAKQLHASPSGRLLTALVCEYLEWAQLSHTMKVYLPECNLPKDFWKNELKDFSNKSGAEGSRSAESGPMLLDVLEGYLKYENLSQTRMGGRRMMSSESDPSLNVEHRSMRRAPLSSAGNLPPMGRPISSSQQASDRRGGSSASNTRKDEYNWRYDTTDDISEEVLRASTALESVQLDRKSRNLPTSWRHSGDGAE

SEQ ID NO: 47033 - protein, 413 aa, Zea mays
  Clone ID: 700346514_FLI.pep
VVEMVTGALRRSLMLCSSSAGAGVREPEQEEDGATPPGGMQIGGPTDVRHVSHVTFDRFVGFLGLPADLEPDVPRPVPSASVSVFGVSPTSMQCSYDRRGNSVPTILLTMQKKLYSLGGLQAEGIFRINADNSQELYVRDQLNRGIVPDGVDLHCLAGLMKAWFRELPSGVLDSLTPEQVMHCNTEEECSHLASTLPPVEAALLEWAISLMADVVENESYNKMNARNIAMVFAPNMTKMADPLTALIHAVQVMNFLKTLILRTVKEREEAAKVARAFPSSSGSPSDKDEPQTVEQLDMLFVCSSQQNVEYPMVDEAKFDQFLFRVEEALHHETQGSTDGPKNHDSGRGDQRSNSEITPLDTGLTGQNEFSNNSEEGLFDKFKFRKGVGRLCRHPVFQLSRSMKKSDEAEQACV

SEQ ID NO: 47034 - protein, 57 aa, Zea mays
  Clone ID: 700346634_FLI.pep
RNDWAKIYTVQKAKQQNSHHVRLHRRSATKNLTRNNIYLLVPTNLNKVCLLHIWLVP

SEQ ID NO: 47035 - protein, 275 aa, Zea mays
  Clone ID: 700347045_FLI.pep
SCGRRLPFGTPSPPSGEMAPKRGGRAPVPAKKKTDKVTNPLFEKRPKQFGIGGALPPKKDLHRFVKWPKVVRIQRQRRILKQRLKVPPALNQFTRTLDKNLATNLFKMLLKYRPEDKAAKKERLLKRAQAENEGKTVESKKPIVVKYGLNHVTYLIEQNKAQLVVIAHDVDPIELVVWLPALCRKMEVPYCIVKGKARLGSIVHKKNASVLCLTTVKNEDKLEFSKILEAIKANFNDKFDEVRKKWGGGIMGSKSQAKTKAREKLLAKEAAQRMT

SEQ ID NO: 47036 - protein, 180 aa, Zea mays
  Clone ID: 700379722_FLI.pep
SLPHIKRGSDEAFLPIPPIAAEIPLRLSRVTKLSSFLAPTAMDEVTEAVNNLNISGVGAAGVAGAEGHKKNRIQVSNTKKPLFFYVNLAKRYMQLHNEVELSALGMAIATVVTVAEILKNNGLAVAKSIMTSTVDIKDETRTRPIQKAKIEILLGKTEKFDELMAAAAEEREANGAEEQS

SEQ ID NO: 47037 - protein, 283 aa, Zea mays
  Clone ID: 700379756_FLI.pep
PDIHPPEPVDPFETIRERFHDLGLLTFPHRTVPLPPARRTSRCFLLLPSRSQGVVLAGGSGAPLQEEEGGGEDTRMASRSASKDIITLRGSAAIVSEFFGYAANSILYNRAVYPEESFSKVKKYGLTMLLTQDEGVKNFIASLTSQLSEWLEAGKLQRIVLVIMSKATSEVLERWNFNIVTDAEVVEKGAIKEKSDKEIMREIQAIMRQIASCITYLPCLDEPCVFDVLAYTDTDVDAPGTWVESDAKLIDNPQMVKLHSFDTKIHKVDTLVSYKKDEWDEEE

SEQ ID NO: 47038 - protein, 250 aa, Zea mays
  Clone ID: 700380222_FLI.pep
NLAEARAATASRNKEGTRNTMPKSKRNRPVTLSKTKKKPGLERKGKVVAEIKDAVDKYTSAYVFTYDNMRNQKLKDLREQLKSSSRIFLAGKKVMQIALGRSAADEAKTGLHKLSKFLQGNSGLLFTNLPRDDVERMFREFEEHDFARTGSTAADTVELKEGPLEQFTHEMEPFLRKQGLPVRLNKGVVELVADHVVCEEGKPLSPEAAQILRLLGIQMATFRLYLVCRWSSDEFEAYKEGLMHRADDSS

SEQ ID NO: 47039 - protein, 72 aa, Zea mays
  Clone ID: 700337918_FLI.pep
RYKFCTQNSEILTYIRSITSTTRTSSSLTQVKSTNRISSTYWGSPTRATTQEETATLTSHQIYYTRKQDYLL

SEQ ID NO: 47040 - protein, 115 aa, Zea mays
  Clone ID: 700337981_FLI.pep
LFLIETRTFWQMSAGGAFGGNRGVRPVPPEKGVFPLDHLHECDLEKKDYLGCLKSTGFQSEKCRQFSKKYLECRMERNLMAKQDMSELGFRIVDEAGTSPDKNSKPESPPNQPKD

SEQ ID NO: 47041 - protein, 70 aa, Zea mays
  Clone ID: 700338048_FLI.pep
QGQASPLQELMLIIIPLDTIMVCRKRKLQFLTRRTLTISCDAKVMWGSSIKQQSVLWEETDPFVFILFTF

SEQ ID NO: 47042 - protein, 89 aa, Zea mays
  Clone ID: 700339004_FLI.pep
FKQGHAFLYFDADHYSTEHRQWIRRANTTHRRALASPHAYIATTRNVASRRRRQTEHVGAFLHTKEEPLSFLTGITCAPSAAWQTAAPP

SEQ ID NO: 47043 - protein, 90 aa, Zea mays
  Clone ID: 700339971_FLI.pep
KKEEEEKEKQPPLDCIALHCKERFFEEAGFTHSHALQCKQKAASASWTRGWVNGRSHPSSPSHRSECELRIGRRFFRIGRLWQHPRSRLV

SEQ ID NO: 47044 - protein, 33 aa, Zea mays
  Clone ID: 700340971_FLI.pep
YVGCVVSSMHVLLSRTRYSVMLKMSNDPAVLSH

SEQ ID NO: 47045 - protein, 64 aa, Zea mays
  Clone ID: 700341469_FLI.pep
LEKLYFETERVVTFCTSTAKKKETFFLYYLGLHHWFRLFQIVQDPGCPKDTTPVHRVSCELAQS

SEQ ID NO: 47046 - protein, 74 aa, Zea mays
  Clone ID: 700341516_FLI.pep
EVTQMAKGKESAQGNDFSIMRCIYVLRSMNVTEDEKIKAAEVFDIPNNRETVISFSIDEPKTALLWLRRKIDKL

SEQ ID NO: 47047 - protein, 61 aa, Zea mays
  Clone ID: 700341920_FLI.pep
KVFSIASQKSNKFYPHDMMFHHKFMTSRQGTVLSGVCSQLQILRISPPACPRSESVHKCAQ

SEQ ID NO: 47048 - protein, 58 aa, Zea mays
  Clone ID: 700378485_FLI.pep
MPLLQFSIFIVMVFSSIVANAMIHCKWGRYITEVSIQRYSHPLYFLHIQVNHFPQDKN

SEQ ID NO: 47049 - protein, 55 aa, Zea mays
  Clone ID: 700379382_FLI.pep
KRESRLLPDWRFLLHQARQQLSSEEPQQAGVSFQQPWLLLAIFRHALVLLQHIFS

SEQ ID NO: 47050 - protein, 116 aa, Zea mays
  Clone ID: 700379520_FLI.pep
SPLTRPSPVAVAVAAVATAAVAAAAAVMVAGAVTAVMAAVAATAVGAKVAAAATEAVAATAVGARVAVAATAAVAAAAGGTDVWAHPGFGRVILSIYSIVLPFASVTVLVSVLPLD

SEQ ID NO: 47051 - protein, 377 aa, Zea mays
  Clone ID: 700331916_FLI.pep
ANSSATHRHQYAMGSIMEQRCNNDPQALLDAQLELWHSTFAFIKSMAFKSALELGIADAIHCHGGTATLTQIATKAALHPSKTPCLRRLMRALTVAGIFSVAKNSSDDDSDQHVYGLTPASRLLVGSSQNLAPTLSLILNNVFVAPFLDLGTWFESALAATDLPLFELSHRKNVWDVVGHDPSVSQLFNAGMVADTRFLMDIAVRECGDVFQGIRSLVDVGGGHGAAAQAISAAFPAIQCTVLDLAHVVATAPACAGLSFVAGDMFEAIPPANAVFLKWIMHDWGDTECVTILKNCKKAIPPRDAGGKVIIVDTVVGAGPPNLKNKETQVMSDLFFMIVNGLERDEQEWRNIIFEAGFSDYIIIPVLGVRSIIELYP

SEQ ID NO: 47052 - protein, 96 aa, Zea mays
  Clone ID: 700332036_FLI.pep
SPEMSSSAVNVATASSTRSGPAGTFNRRSKLLVGRPSWAFASKAAQPSRQPVSSLLSRRRCVLTRSLLSRQPVLKVSRSAAQLRLQQLSNMKRAEE

SEQ ID NO: 47053 - protein, 244 aa, Zea mays
  Clone ID: 700332080_FLI.pep
EHEPAVQLPVRDLGEACPLGSRVTDRGVERNGGGSSNKSRSVGRGVAPGGHRGGGAAGLGVGAVRVHDHADQPVPVPQLHQRQRVGAAVLVLLAARQRRADQPAVPLRRAQRRLLVPRRRHRRQDARAPAPPGVQRQDPAGEQVQLCWRRQRSGRRDAGHAVGRRTIDRRNRHWIEGDADGPVPDVRRRVDPGGGEPGAGIRDCCRLRHLGRVTILAHLALLPTAFGDTDIRHSGFVVSLFRIG

SEQ ID NO: 47054 - protein, 309 aa, Zea mays
  Clone ID: 700332215_FLI.pep
MASEKSKILVVGGTGYLGRHVVAASARLGHPTSALVRDTAPSDPAKAALLKTFQDAGVTLLKGDLYDQASLVSAVKGADVVISVLGSMQIADQSRLVDAIKEAGNVKRFFPSEFGLDVDRTGIVEPAKSILGAKVGIRRATEAAGIPYTYAVAGFFAGFALPNIGQLLAPGPPADKAVVLGDGDTKAVFVEEGDIATYTVLAADDPRAENKVLYIKPPANTLSHNELLSLWEKKTGKTFQREYVPEEAVLKQIQESPIPLNIILAIGHAAFVRGEQTGFEIDPAKGVDASELYPDVKYTTVDEYLNRFL

SEQ ID NO: 47055 - protein, 335 aa, Zea mays
  Clone ID: 700332286_FLI.pep
TPDKSAPSYNTSNCWFSCKSALQPYYLYHRFCVAMAGLSLEHPWAFAFGLLGNVISFMTFLAPIPTFYRIYKSKSTEGFQSVPYVVALFSAMLWIFYALIKSNETFLITINAAGCVIETIYIVMYFVYAPKKAKLFTAKIMALLNGGVFGVILLLTLLLFKGSKRVVLLGWICVGFSVSVFVAPLSIMRRVIQTKSVEYMPFSLSLSLTLSAVVWFLYGLLIKDKYVALPNVLGFIFGVVQMVLYVFYMNKTPVAAAVGKDAGKLPSAADEHVLVNIAKLNPALPERTSGMHPVTQMAAVPARSCAAEATAPAMLPNRDVVDVFVSRHSPAVHVV

SEQ ID NO: 47056 - protein, 239 aa, Zea mays
  Clone ID: 700223407_FLI.pep
RAHLPRRPPSRACSLCFIFLVVPSSARGARSLIQLPGVRPSSLLVVPISTAMDRQSELSHPSSIHDRVFFPVQQLRSKPNGAPPWASSSSDLGGPWMLLPSTPAIVPQLRQSLWSQKLAPFQYLSLSLLGPPRSQLCALSGGRQPCLPCLLASTCSVVSARSASISSVLPCSLVPAELAPSSISSSPAAPHDHQAELLPAVRDARAMDAMKTLCVLVSSSTAPVMPLVFGRRAVRQNCS

SEQ ID NO: 47057 - protein, 233 aa, Zea mays
  Clone ID: 700223409_FLI.pep
TMAAGGTADFFYRESQRLGYVARSAFKLIQMQKQHKLIAPGAAVLDLGCAPGAWLQVACQNLGPLEKGGIVVGVDVKKVKVPSAHCDSRVRTVCADVMTLMKRQARAMSPQERGFSVILSDMCPPVSGITTKDGAISCELGMRALSLAVGKIKLKDSNYSDTLEKYLSSTEPESDEDGVLRRGGNLVVKFLENEDISGFGKFCKVKFKKVSLLRPKATRPSSREIYMICEGLR

SEQ ID NO: 47058 - protein, 216 aa, Zea mays
  Clone ID: 700223677_FLI.pep
YCVIDNMVKHNIRPICSVNKHGSTTKQKYSTTLSMKLTSSNTSVLDLLLGPQLVAVTTLLLAAVDSPRVQPCIAFAADHLVLVVLASERLQRGLNDATAEPEHEVERRLLLDVIVRKGAAILQLLPGKDQPLLVRRDPFLVLDLGLDIVDGVAALDLEGDGLPCQRLHEDLHLVGPGRSPGCCDCCDGGFSSPRNRTAAAARAVFLYVVAEAVLGL

SEQ ID NO: 47059 - protein, 147 aa, Zea mays
  Clone ID: 700223931_FLI.pep
QLVNCSTTSRLLHLRKTGRRAAKVRRKSVGMRRNSPPTASGNRLAVIASHLSLPPLGSPAAISGEKEAALATDLNSTPTIFDKIIRKEIPSEVVYEDEKVLACRDISPQAPTHIIIIAKVKYGLSRLSKHANGRPVQTSHDLCHESF

SEQ ID NO: 47060 - protein, 377 aa, Zea mays
  Clone ID: 700223971_FLI.pep
AKPAQLRRLADVSGSPSVCRRFPDIGGQQPTLWLVHSLPAGYVADHFAQLLATAACTLIWVGRMPDIQLGCHTIRSHGTKVATLHMYDWIILLCLAVLDGLLNIIEPFHRFVGRDMMTDLSYPLKGNTIPFWAVPVCSALLIAIVLPLVIFAVIYFKKKNVYLHHGILGILYSVLITAVITDAIKDGVGRPRPDFFWRCFPDGKPNFNNITTDVICHGEKSVIKEGHKSFPSGHSSWSFAGLGFLAWYLAGKLKAFDRKGHIAKLCLVFLPLLVASLVAVSRVDDYWHHWQDVFAGGIIGLTVASFCYLQFFPYPFDNDALWPHAYFQQLAETHSNGNANSINIRPTEFEDEPDDHGDIVLRDTSPILESMESGRRP

SEQ ID NO: 47061 - protein, 438 aa, Zea mays
  Clone ID: 700224086_FLI.pep
SFDLCSRSEVPGDREAASIVGMALVLHSGAGNKNAFKALIAAEYSGIKVELTKDFEMGVSNKTPEFLKMNPLGKVPVLETPDGPVFESNAIARYVARLKDDNPLFGSSRIEQAHVEQWMDFAATEVDPGVAWYLYPRLGYLPYVSTTEETAISSLKRSLGALNTHLASNTYLVGHAVTLADIVMTCNLYHGIARILTKTFTSDFPHVERYFWTMVNQPNFKKVIGEVKQAESAPPIPKKAAPSKEPKAKDVKKEAPKEAPKPKVVEAPAEEEAPKPKPKNPLDLLPPSKMVLDDWKRLYSNTKTNFREVAIKGFWDMYDPEGYSLWFCDYKYNDENTVSFVTLNKVGGFLQRMDLCRKYAFGKMLVIGSEPPFKLKGLWLFRGQDVPKFVMDEVYDMELYEWTKVDISDEAQKERVNAMIEDQEPFEGEALLDAKCFK

SEQ ID NO: 47062 - protein, 237 aa, Zea mays
  Clone ID: 700224410_FLI.pep
KKQISFPLRQQTTITEAGMQDKQSGYPATEQLSIPKILRTSTMVPRCHCHQKGNQEKHKSYKQARSNNDAACGERSQPRSGPLAPDTARELDVLGHDGDALGVDGTEVSVLKEPHKVGLGGLLQRGDGGGLEAEIGLEVLRDLTDEALEGQLADEQLRALLVLADLPERDGAGAEAVGLLHAAGGRRRLARRLGRQLLAGRLAARRLARRLFSAGHRSFGAWRGGRRVGGSVDLGRS

SEQ ID NO: 47063 - protein, 279 aa, Zea mays; identical to SEQ ID NO: 37620
  Clone ID: 700224470_FLI.pep

SEQ ID NO: 47064 - protein, 193 aa, Zea mays
  Clone ID: 700224619_FLI.pep
SLDLACFFGMPGTNNDVNVLHRSPVFDPMTSSRMPHVHYTINGNAYNFGYYLADGIYPNWPTFVKAIRHPYEQKKVYFTQMQESCRKDIERAFGVLQARWAVLRGPAYGWDRNRLTEIITACIIMHNMIVEDEGAFAANIDFGDNSSTIEPSQLIAEGRAEWVINHLDLRRQERSCSLQNDLVEHLWAWRGSM

SEQ ID NO: 47065 - protein, 163 aa, Zea mays
  Clone ID: 700224708_FLI.pep
AVSTRARPPSGIPHLQPVSCCEPIQWRFHSSPCGRKDSVNHFQILAASPVPMATPLIAGLAVAAAALAGRYSIQAWNAYKARPVVPRMRKFYEGGFQPTMTRREAALILGVRETASAEKVKEAHKRVMVANHPDAGGSHYLASKINEAKDVMTGKTKGGGSAF

SEQ ID NO: 47066 - protein, 395 aa, Zea mays
  Clone ID: 700224857_FLI.pep
LFTIPPQNTSCDPRSLRRASIMSAYCGKYADELIKNAAYIGTPGKGILAADESTGTIGKRLSSINVENVEENRRALRELLFCCPGALQYISGVILFEETLYQKTKDGKPFVDVLKEGGVLPGIKVDKGTIEVVGTDKETTTQGHDDLGKRCAKYYEAGARFAKWRAVLKIGPNEPSQLAIDLNAQGLARYAIICQENGLVPIVEPEILVDGPHDIDRCAYVTETVLAACYKALNEHHVLLEGTLLKPNMVTPGSDSKKVTPEVIAQYTVRTLQRTVPAAVPAVVFLSGGQSEEEATLNLNAMNKLSTKKPWALSFSFGRALQASTLKAGLARWRTWRRLERPSSPGARPTPRLPSAPTRVMLPPTPRAFTSRTTSTELLLFAIPLFWNSCLRVGC

SEQ ID NO: 47067 - protein, 323 aa, Zea mays
  Clone ID: 700224866_FLI.pep
AKRSFKLVSAALEDDGQGRRDRERRWRRRVRCQGLHGPSPGAADRRGGAGVLVAVPRRDRRVHRHAAVPVHHGGHRDRVQAPDGRVGVGRRRGVRRRGRAGHRLGLRRHDLRPRLLHRRHLGGPHQPRRHLRPLPGAQGLPGARAALHRGAVPRRHLRRRPRQGVPERLLRQVRRRRQLARLRLLPRHRPRRRDHRHLRARLHRLLRHRPQAQRPRLPRPGSGSPPHRLRRVHGAPGHHPRHRHRHQPGQEPGRRRHLQQGQALGRPLDLLGGPSRGRCHRGLLPPVHPPGWRHQGPRLLQEQRVMSGAWLWSNGGRPTGGGP

SEQ ID NO: 47068 - protein, 224 aa, Zea mays
  Clone ID: 700102209_FLI.pep
SQSQQDGDSRAAAAGFDDFSFHTATSNAVRAHTTTTSLPSFEEQQQQVEKAAVPSSNRASGGGNGNTKLEDGYNWRKYGQKQVKGSENPRSYYKCTYHSCSMKKKVERALADGRITQIVYKGAHNHPKPLSTRRNSSGGGAAAEELQAGNSSLSAAAAAGCTGPEHSGATAENSSVTFGDDEAENGSQRSDGDEPDAKRWYVRDPARASERDSLFATRGPRFTS

SEQ ID NO: 47069 - protein, 260 aa, Zea mays
  Clone ID: 700102324_FLI.pep
DAAHAGSNGGGDEEGPGAAGLLGEPVRAALPHRAGGEGHRLRVLGAGAAGRRQERHPPPLQPGAQEDPRAPPRRPPRLRVPRHPRVPRGGLPGGLPQAAPRRRLRARAGPLLGGLLRQGLRGRHAAVEAQGRRAGAGARRDRAGGPEPRRRARGQGLLRRRGVRVRGRGARALRAVAPQLRAVRGLQRGGDRAQAGGVGAPVRAAGERGQDPSPAGKGGRVHQPAQEDLRHRVVERTTTSRGDGTGRTYVAAMQFLFRFV

SEQ ID NO: 47070 - protein, 246 aa, Zea mays
  Clone ID: 700102592_FLI.pep
QATEAAKDAPSSNAPATDPWRSSRSTQEVSLVEGQALKMSSTVPKSSNIFWHDCLVGKTDRQKLLNQKGCVVWITGLSGSGKSTLACTLGRELHTRGKLAYVLDGDNLRHGLNKDLGFKAEDRAENIRRVGEVAKLFSDAGLVCIASLISPYRRDRESCRALLSDGSFIEVFLNMSLELCEARDPKGLYKLARAGKIKGFTGIDDPYEAPLNCEIEIKEIDGVCPSPSDMAGQVVTYLEEKGFLHE

SEQ ID NO: 47071 - protein, 356 aa, Zea mays
  Clone ID: 700102692_FLI.pep
FFSEDSVTSGDLVVKDQEFIEATKEPGLTFMVAKFDGILGLGFQEISVGNATPVWYNMVKQGLISDPVFSFWFNRHADEGEGGEIVFGGMDSSHYKGDHTFVPVTRKGYWQFNMGDVLVDGKSTGFCAGGCAAIADSGTSLLAGPTAIITEINEKIGAAGVVSQECKTVVSQYGQQILDLLLAETQPTKICSQVGLCTFDGTHGVSAGIRSVVDDEAGKSNGGLKSDPMCNACEMAVVWMQNQLAQNKTQELILNYINQLCERLPSPMGESAVDCGSLASMPDIAFTIGGKKFKLKPEQYILKVGEGQAAQCISGFTAMDIPPPRGPLWILGDVFMGVYHTVFDYGKLRVGFAEST

SEQ ID NO: 47072 - protein, 240 aa, Zea mays
  Clone ID: 700102990_FLI.pep
SDKRELIRHIFSPRLLFINRRQHSAHNFKHELTSYPDRGSLFVQDLNQILDSIFLRWGSLAGRFRSSHWGSSILKKYCSTASSGTCSNLGGIHSGLLSFSSSTALNPSDKSRLKVPRRTWQTTLYSRRRHSPRVCVLPSLIDLREIFRLVGEAFFRDLIVAATHLSETFEISCSRASMISSTVLLEKHLLMVSILFKELLSFTNGLCENWSIIPDTAKVLDVSSFLSDSSSNGNLFDGTK

SEQ ID NO: 47073 - protein, 333 aa, Zea mays
  Clone ID: 700103129_FLI.pep
LVMGGSQYDDDWVLPSADITLVLVGKLGYGKSATGNSILGREAFVSEYSHASVTNTCQLGSTTLKDGRTINVIDTPGLFDMSITSDEAGKEIVKCMNMAKDGIHAVLMVFSATSRFSREDASTVETIKVFFGERIVDHMILVFTYGDLVGESKLKKMLNNAPEYLQNVVELCQNRVVVFDNVTEDRRLQAQQLDKLLDVVDSVCAKNGGKPFSDQMFTSIKEVHDREKEVHTSGYSDEQISELKKEIHRTRDEQLAHITNMVEEKLNCTVEKLQQQLMEEQNARLEAEKVAYEARLKSEAEIQKLKESLKKAQMENDEFRRMAQSQGSKCAIL

SEQ ID NO: 47074 - protein, 452 aa, Zea mays; identical to SEQ ID NO: 44998
  Clone ID: 700103212_FLI.pep

SEQ ID NO: 47075 - protein, 319 aa, Zea mays
  Clone ID: 700103446_FLI.pep
KESTLHLVLRLRGGMQIFVKTLTGKTITLEVESSDTIDNVKAKIQDKEGIPPDQQRLIFAGKQLEDGRTLADYNIQKESTLHLVLRLRGGMQIFVKTLTGKTITLEVESSDTIDNVKAKIQDKEGIPPDQQRLIFAGKQLEDGRTLADYNIQKESTLHLVLRLRGGMQIFVKTLTGKTITLEVESSDTIDNVKAKIQDKEGIPPDQQRLIFAGKQLEDGRTLADYNIQKESTLHLVLRLRGGMQIFVKTLTGKTITLEVESSDTIDNVKAKIQDKEGIPPDQQRLIFAGKQLEDGRPLADYNIQKESTLHLVLRLRGGY

SEQ ID NO: 47076 - protein, 280 aa, Zea mays
  Clone ID: 700103605_FLI.pep
QSRSTPLPLSLFAVRSSAPQSNRHLTEMGRKFFVGGNWKCNGTTDQVEKIVKTLNEGQVPPSDVVEVVVSPPYVFLPVVKSQLRQEFHVAAQNCWVKKGGAFTGEVSAEMLVNLGVPWVILGHSERRALLGESNEFVGDKVAYALSQGLKVIACVGETLEQREAGSTMDVVAAQTKAIAEKIKDWSNVVVAYEPVWAIGTGKVATPAQAQEVHASLRDWLKTNASPEVAESTRIIYGGSVTAANCKELAAQPDVDGFLVGGASLKPEFIDIINAATVKSA

SEQ ID NO: 47077 - protein, 275 aa, Zea mays
  Clone ID: 700103773_FLI.pep
DRRPSRAGARDGNGTGPQNLRSFLPARPCPSTRRSCRPRPTSALSSSRGIGYATGCAMVLWVFGYGSLIWNPGFDFDDKILGFIKGYKRTFNLACIDHRGTPEHPARTCTLETDDEAICWGIAYCVKGGPEKELKAMQYLERRECEYDQKISIDFYKEGDPLKPAVTGVLVFVSTPDPIGNKYYLGPAPLQDMAMQIATANGPTGYNRDYLFSMEKALASISHEDDSIIELANEVRKVLNRTKETKITGANASLKSHAPLVHLSALPEGTVVDSR

SEQ ID NO: 47078 - protein, 186 aa, Glycine max
  Clone ID: 700844629_FLI.pep
GCSDIYVHNVNCGPGHGISIGSLGRENTKACVRNVTVRDVTIQNTLTGVRIKTWQGGSGSVQNIMFSNVQVSGVQTPISIDQYYCDGGRCRNESSAVAVSGIHYVNVKGTYTKEPIYFACSDNLPCSGITLDTIQLESAQETKNSNVPFCWEAYGELKTTTVPPVECLQRGNPSKEGGINSNIDSC

SEQ ID NO: 47079 - protein, 404 aa, Glycine max
  Clone ID: LIB3051-030-A2_FLI.pep
NIHLFSWPEHCRTYLTRVAACRMRHPQWQTNTPGNDIADEESFNDSLKDVQDMSLRLSIDADLAGLSSGPDMQDQVKRLLSRMKKPDSGGSNDTDGGNKMPDNVTGKYPLLWRRRRLIVIALDLYDNNGAPDKKMIQIVQRIIKASQLDPQNARVSGFALSTAMPIRETIEFLKSGNIQVNDFDVLICSSGSEVYYPGTYTEDGKLLPDPDYEAHIDYRWGCEGLKKTIWNLMNTAEGEDKKSSSPIVEDSKSSNAHCISYKIKDLSKAKRVDDLRQKLRMRGLRCHPMYCRGSSSMQVIPLLASRAQALRYLFVRWGLNVANMFVFLGETGDTDYEELISGTHKTIILKDVVSNGSEGILRGPGSYHREDVVPNESPLVASISETTEDKIANTLKELSKSGAM

SEQ ID NO: 47080 - protein, 307 aa, Glycine max
  Clone ID: 700841015_FLI.pep
STDAESDSEFPSREPEVPVDAYSCDHFRMFEFKVRRCACGRSHDWTECPYAHPGEKARRRDPRKYHYSGTACPDFRKGSCKKGDACEYAHGVFECWLHPARYRTQPCKDGTSCRRRVCFFAHTPEQLRVLPQQSPRSADSYDGSPLRHAIESSCAKTLAPAPFVSSPGSVSPPLESPPMSPMTVSVNEMVASLRNLQLGKVKSLPSSWNVMGPSGFGSPRGPMIRPGFFSLPTTPTQAPTRGGVNYFDKWDQSCEEEPVMERVESGRNIRARMFAKLSKENHLDGSDSGSGQIGDPDVGWVSELVSR

SEQ ID NO: 47081 - protein, 102 aa, Zea mays
  Clone ID: 700612382_FLI.pep
ISDGAQFLEQLRHRRPLVGVLAGASRADLRQLGGLGRRVIIPLQVAVDELIDVLVRQLRMRRRHLALAGEHLEHDDPERVHVALLREAAHGGVLRRQVPHGG

SEQ ID NO: 47082 - protein, 565 aa, Zea mays
  Clone ID: 700336683_FLI.pep
AARDVAGRPDARVLLPALLPADRARAVGDRGHLGGPAAARREVRRAAVAIMPPPVGMPHRRYGRRLLQGDMGGAHGDRGQGSHPPALPRPHPQRRRARGAPVARRPAEGVRAVRVPRPGRYAAPGHCSCRSDAGRETEHDEAVAADGEQLLREPERVAAPPVDDAVGAQRRGRPRHGAPQHGPGAAQRRGAQRGHVHLAAGPVRPGVRLRPRRAHALPVGRAVAREPGAGGVAHPQRLPPRELHLLAQRPEREPEQHADPAGELHRRDGVAGGVRADRHPGGQRGDERRGPVRDPAPAVGLHHPAGRAARRAVVLERRRPAGGLPRGGGVAGDGGVPDPGEQPAVVEAERRVGGHGQQPHQHHCGANQGGLELCQPLMEPRLMDPWNLVRACVRACMRARWSRSPLLSSPSRPPAACLVAAARSEFPSRRWFATELLVGRGGFNAGWPFKEAGAAAMVSPAWGSPAAVTAPSDHRPMIIQLCLSLSTSTPFSACMITFPVTGFEACLPARLCTKRGSQERTMLVSFLLLPSRSSVVNSIPLCVSPPLVSAADLQSRSHSVVCSRG

SEQ ID NO: 47083 - protein, 136 aa, Zea mays
  Clone ID: 700341257_FLI.pep
SHLTYEKWTEVATNQHQELIIKSLLAARDACLEIRLHMREMGIAAGVPIEPDSQTRLLDATMNMEGVLLAGVPGAGGFDAVFSVTLGDASNAVANAWSSAGVLPLLVREDCRGVSLEDADPRTREVSAAVSSIQIN

SEQ ID NO: 47084 - protein, 358 aa, Glycine max
  Clone ID: 700855394_FLI.pep
LILVSTLLMLLQLHFTPSKAAIKGGYWYSESGLAVSNINPSHFTHLFCAFAHLDPNTNKVTISSSDSSQFSTFTQTLQAKNPSVKTLLSIGGGFGPSLAANFSRMARQANTRKSFIDSSIQQARSNNFLGLDLDWEYPSSDTDKTNFASLIKEWKEAVTKESRTSGKAPLFLSAAVAGSDQITPLKYYPGKDVANNLDFVNVMAYDLFTSEGYPTVTQPPAPWNNPRGQFSAEQGVTEWNKTLGVPLNKLNLGLPFYGYKWSLSDSNKNGLFAPAKQGLGAVKYKDIKNVAAQVVFDSTYVTNYCFKGTDWFGYDDTQSISAKVVNAKQKGLVGYFAWHIEQDSNWALSQAASQAWGM

SEQ ID NO: 47085 - protein, 357 aa, Glycine max
  Clone ID: 700892511_FLI.pep
DGMTMQGIGTQSWDVGFIVQALLATNLIDDFGPTIAKAHDFIKKSQVRENPSGDFKSMYRHICKGSWTLADRDHAWQVSDTTAECLKCCLLLSVLPQDIVGEKMELEKLHDSINLILSLQSKNGGMTAWEPAGAYKWLELLNPTEFFADIVVEHEYLECTASAIQVLVLFKKLYPEHRKEEIENFIAKAVTFIEDTQLENGSWYGNWAVCFTYSSWFALGGLVAAGKTYTNCVTIRKAVKFLLKIQNKDGGWGESYLSCPRKMYVPLEGSRSNVVQTSWALMALIHAEQAERDPTPLHHAAKLLINSQLEDGDWPQQETLGVYLRNCLVHYSFYRNIFPMWALAEYRTNVLLPSFTI

SEQ ID NO: 47086 - protein, 234 aa, Glycine max
  Clone ID: 700790469_FLI.pep
IMDQKVDFSAPHSMGTTIIGVTYNGGVVLGADSRTSTGVYVANRASDKITQLTDNVYVCRSGSAADSQIVSDYVRYFLHQHTIQLGQPATVKVAANLVRLLSYNNKNFLETGLIVGGWDKYEGGQIYGVPLGGTIVQQPFAIGGSGSSYLYGFFDQAWKEGMTKDEAEDLVKKAVSLAIARDGASGGVVRTVIINSEGVTRNFYPGDQLPLWHEEMEPHNSLLDILGAPEPMSM

SEQ ID NO: 47087 - protein, 174 aa, Glycine max
  Clone ID: 700746535_FLI.pep
KRYSKCLAVPSLSSSTTRIGRLRCGLDSILVKLMFLNANAESTLKSTEVPLSCANTMLVLKGRSVRGMIGSRASITNRVTLFGSSWIPCDQFEAAFQAVELWIADRAVLPVENSLGGSIHRNYDLLLRHRLHIVGEVQLPVHHCLLALPGVRKEFLTRVISHPQALAQCGTPCG

SEQ ID NO: 47088 - protein, 450 aa, Glycine max
  Clone ID: 700748156_FLI.pep
RDIKGSNLLVNNEGILKVADFGLANFSNSGNKQPLTSRVVTLWYRPPELLLGSTAYGPSVDLWSVGCVFAELLIGKPILQGRTEVEQLHKIFKLCGSPPEEYWKKTRLPHATLFKPQQPYDSSLRETFKDFHASTVNLLQTLLSVEPSKRGTASSALSLEYFKIKPYACEPSSLPIYPPSKEIDAKHEEESRRKKIGGRACKPESRKPSRKPLALSKLAPAEDLTSQTQTSHKMNDRSVHIIKQEDTNTCEEAPKQSSGKPEDASSYMKNASQVDIPFPGPLQVSKSSGFAWAKRRRDDTSVRSHSRSISRGFIFNSLETSTLNSRDNSESRNHENKEFFGARTNSRGNHLLEISKLAMQNQWSKFDRPDSFDTCDEYHSQELSLAIYNRQDSLSKRSNLSYQDQEEKVEFSGPLLSQMHTVDELLERHERHIRHTVRRSWFQRGKKQGK

SEQ ID NO: 47089 - protein, 243 aa, Zea mays
  Clone ID: 700336084_FLI.pep
HQGAAREGVPRRGVLRRHRRARRPRLRRRHRRSVLERADGEARRHRVHQAGGAGPDPRAHHELHPTPPVLPEQEPQPRRPRLALRGSHDRHLPMQLLQRAPVQLHGARRARRRGPVAGPAVRREVAAQVQDADGQHDDRGDGPRQLPHLRPELLPRRAQAAGPVPVRRRAHHRRRLQGRHPQRDQRAARGVLPGLRGLHGQDGRHRGQDRLRGRDQEALRPRQQALGGGIHAGDGSIARKKSL

SEQ ID NO: 47090 - protein, 42 aa, Zea mays
  Clone ID: 700340431_FLI.pep
STNSSIQDFIYYLNPQRTTQKKEGTKKKKKKQHPGYSFYTTL

SEQ ID NO: 47091 - protein, 334 aa, Zea mays
  Clone ID: 700345841_FLI.pep
GVEGQPPIFHLGGLPTRWIDAAALLVPRRPASARRARPSNRSLPTFGVLGVNISVQPIPKISHRLCRFAMEPGSPAPKKSRLVHSADCEMEEAQAPSSSNAAGGVNQSSHWTQWQILDSILPTGGFAHSYGLEAAMQSRVVNDQEDLRSFVVQVLDSAGSLLLPFVHCACAGKSPGDAAAWAKLDRLLDATLTNEVARKASAAQGSALLRVAASVFAEVPALQELRRTLLGSKSVSFHHAPVFGLVCGLVGFDGETAQRAYMFVTMRDVLSAATRLNLIGPLAASVLQHQLAPDAERMVRKWRDRDVSEASQTAPLLDAVQGCHAYMFSRLFCS

SEQ ID NO: 47092 - protein, 81 aa, Zea mays
  Clone ID: 700351484_FLI.pep
EHPAAELHNVQRMAMGNTTAIPIPPQKSHVHGGLTTKDHQCVPACSLLSWYPKANRIAHLLHLWYRRPKFTDLVSSAKVGI

SEQ ID NO: 47093 - protein, 188 aa, Zea mays
  Clone ID: 700450908_FLI.pep
LNSMVLANNSENVLLPLNEPVHGTKRRSQIQTFLDHHGGPGVQHMALASDDVLRTLREMQARSAMGGFEFMAPPTSDYYDGVRRRAGDVLTEAQIKECQELGVLVDRDDQGVLLQIFTKPVGDRPTLFLEIIQRIGCMEKDEKGQEYQKGGCGGFGKGNFSQLFKSIEDYEKSLEAKQAAAAAAAQGS

SEQ ID NO: 47094 - protein, 225 aa, Zea mays
  Clone ID: 700451924_FLI.pep
PCSDSRGFRGGSRSREINLEVGPHIFMAFDCNKERGVSSPDSCSRICTEGTLVQANPLSHYWKPKRLENFNKLENQKSSYESAPSGSDPKQDAEASDEATASLCGFRCFTDLPASLVCEVLARLDAKDLGIVSCVSTLLHALATDHQGWKKLYCERWGLPDLPTTLNGPLLPGVPLDGKFWKTFFVEREFRSKSFMGRFNLDILRGHNEDVRAVSLLVSANLIFT

SEQ ID NO: 47095 - protein, 187 aa, Zea mays
  Clone ID: 700452115_FLI.pep
VRRGDHPGQAHADEQQRAAGAVARRAQAGRHERVHRARPGRRDRRQVRRPPARLALEDVVDGREEGDHDHDRDARVVEADQQQVQPVRVARQQVARAAAQQAEHGPRQEHEEGPPRRLRRHRRAVRGQARVRLDEHGRALDVRIWRMAWHASNQVNIVIDLMACKGYQKNQLKRDDYSTSSSSSMLE

SEQ ID NO: 47096 - protein, 130 aa, Zea mays
  Clone ID: 700452322_FLI.pep
SSKPYSVAKDSMMDGNYSLPDNVAIVTLQNLDDGTTLLRLAHLFQAGEDPRYSEVAEVDLKKVFGKRTIKELTETNLSANQKKSEMKQLNWRVIEDAESGPAPVKGGPVDCRALVVALGPMEIRTFLLKF

SEQ ID NO: 47097 - protein, 330 aa, Zea mays
  Clone ID: 700454849_FLI.pep
YAAPEVISGKLYAGPEVDVWSCGVILYALLCGTLPFDDENIPNLFKKIKGGIYTLPSHLSALARDLIPRMLVVEPMKRITIREIREHQWFQIRLPRYLAVPPPDTTQQAKMIDEDTLRDVVNMGFNKNHVCESLCSRLQNEATVAYYLLLDNRFRATSGYLGADYQESMDRNLNQLASSESSSSGTRNYVPGSSDPHSSGLRPYYPVERKWALGLQSRAHPREIMVEVLKALQELNVRWKKNGHYNVKCRWCPGFPEVNDTLDASNSFLGDSTIMDNDDANGRLPTVIKFEFQLYKTKDDKYLLDMQRVTGPQLLFLDFCAAFLTKLRVL

SEQ ID NO: 47098 - protein, 534 aa, Zea mays
  Clone ID: 700455187_FLI.pep
RAAAMEGQPLHLLIAQFHHPCLRGLIPNYPTHYLPTSRLRLRVQRRKPKQLAAVPSRRPSGSQADAPGLVPVPNTVAALVLQLTVCSLLFLFPNRARALALPPPPGAAAVVEATQEEEEEDQEWEAALQKWKTKTYALSVPLRVVALRGSFPPSWIKDFVEAQGKRLKFSPELRANLDGIFSEMSQCMDKGQVQPKSAMAADVVSLGDSWLGYAIRKGLLEPIKNAEEQDWFHSLSDRWKVHLCRNQNGEADPNGTIWGVPYRWGTMVIAYKKDKFKRHNLKPIQDWEDLWRPELAGRISMVDSPREVIGAVLKHLGSSYNTVDMEMDVNGGRAAVLNSFTQLQKQVQLFDSMNYLKSFSVGDVWVAVGWSSDVIPAAKRMSNVAVVVPKSGSSLWADLWAIPCATRFQTDQIGSRARGPSPLVHQWFDFCLQSARSLPFRQDVIPGASPLHLESPVPEVPQDENKRKPKLDTNLVRGVPPPEILERCEFLEPLSDKALEDYQWLMSRVQRPRLGLFGNMLQKMSAVLDFKRRS

SEQ ID NO: 47099 - protein, 442 aa, Zea mays
  Clone ID: 700456113_FLI.pep
HPLCSRETKMAPKRKTSGDGVVESPADEFAKPADDTKGSPAEFAKPVYLVAARDDDPAAYSVLEIDAAAGGDEPPRIRTVAGLTGFISEPGMSFVAAHSKHGSWIVGVGGGLRAGTIIFDPRTLKTFRGPRLRYPKREPVLISHGSEIYAISRRPLVVRPIDCEPWFECLSFNKGVPSKDCGLCVHWSILPPPPFFPCFLNPYEFRNPPKITVSSYAVVGSYILISPQPELVVGTYAFHVVNKTWEKIHDENLPFVGQAVPLCGSLFAACPISNNSITASASVFHMSIKVPPSTLVAAVSTPSLSIQGFKVVASEYKIPWPLFCPRGKGSFCFIRLGSSCRRQSRKALKRLKVSLTALWIENIEAIMTHCQSQGAKAKDLLVAVQVKEQSHTCKSKGLFGMAVVAAFSMDTENVELGDETMDTNASCATNSTVFEAPVIRIG

SEQ ID NO: 47100 - protein, 279 aa, Zea mays
  Clone ID: 700457290_FLI.pep
VSSFCLLWGEGERESERDLVERLARWSSNEDVGGVQRAGGGGAGGAGGGGQPDAVAQDEGVAAGGALPGRLRAGRVRAARRPRPPRLLPHQPGAPPPQVVRGEGRGVLPVRGGAGQPGSSEPAARAVKQGRQRGAPRHRGLQDAARPRALPGQLHARPAHRLLRLRPLRQVHQLPARRIRPRGQGAALLGDHRRRLRRLLRRHRHAQRLMRQVARAVPARLLLLQRPRRAQVLREPQAQGHRCPRRRRRDLRCHFQGGGRVYCPDGAALIYHHQAEAMR

SEQ ID NO: 47101 - protein, 153 aa, Zea mays
  Clone ID: 700458196_FLI.pep
KLPDDAFVVYQGHHGDKAVYRANVILPSSAFSEKEGTYENTEGCTQWTIPAVPTVGDARDDWKIIRALSEVAGALLPYDSLSAVRDRISTVAPNLVHVDEREPSTISVEVKPPVKQKVSSTPFKTVVENFYMTDAITRASKIMAQCSATLLKK

SEQ ID NO: 47102 - protein, 545 aa, Zea mays
  Clone ID: 700468961_FLI.pep
GRPWREMTRIFVQRGTAGSSSSSGRSGTQPVQPAAAAREEELPLQPQPQLPELLAIDDTTDNLNEGSENISNKPLRTDDTISESSSSAEERAAREKPLKDDSNVINPTFLVEEPVGIQIPDQIEHENSVLSVTGSSQMAGAASHPPPPPAPPPKPLLGNNGLRRMGPGSSNSVRIGSSRRPVAWPLVAARTSASGSRPSSPRSLVDGEGYNSADEQGPCYALSYDDSERERMFDHDLRRVKGLEIRKMAEDGNCLFRAVADQVYGDAEAYDMARQMCVDYMERERDHFSQFITEIESFTLYCKRKRRDKVYGNNVEIQAFAEMYNRPIHIYSYSTEPINIFQGSYNTDVPPIRLSYHHGNHYNSVVDPRRQTVGAGLGFSSLRGTNNVDRDQVKAAIKAQQDQQIENALLAEGRFYSDLELTEREIERMVMESSRSEYLAKEKKLNIRESSTSRAEPSSSAAISGSSRSVAGADRGKEDYFVLPDTALTRSMQLLLAMGFSYIQVMEAYSIFGEDVDSMVCYLLETGGTGASAGGSNHRKGKAAE

SEQ ID NO: 47103 - protein, 294 aa, Zea mays
  Clone ID: 700470902_FLI.pep
LGGLNSLLQVEASSSIPHVSQVPTIILGMDVSHGHPGQDRPSVAAVVSSRQWPLISRYRASVHTQSARLEMMSSLFKPRGTDDDGLIRESLIDFYTSSGKRKPEHIIIFRDGVSESQFTQVINIELDQIIEACKFLDEKWSPKFTVIVAQKNHHTKFFQTASPDNVLPGTVVDSKVCHPKNFDFYMCAHAGMIGTTRPTHYHVLHDEIGFNADEMQEFVHSLSYVYQRSTTAISVVAPVCYAHLAAAQVSTFLRLEEMSDASSSQGGGHTSAGSAPVPELPRLHDKVRSSMFFC

SEQ ID NO: 47104 - protein, 483 aa, Zea mays
  Clone ID: 700472680_FLI.pep
STCKDSRLNNNSLSGQIPKTLTNINTLQVLDLSNNNLSGGVPSSGSFSLFTPISFANNPNLCGPGTTKPCPGAPPFSPPPPYNPPAPTSSKGVSSTGAVAGGVAAGTALLIAVPAIGYALWRRRKPEEQFFDVPAEEDPEVHLGQLKRFSLRELQVATDNFNNRNVLGRGGFGKVYKGRLTDGSLVAVKRLKEERTPGGELQFQTEVELISMAVHRNLLRLRGFCMTPTERLLVYPYMANGSVASRLRERAPNEPPLEWETRARIALGSARGLSYLHDHCDPKIIHRDVKAANILLDEDFEAVVGDFGLAKLMDYKDTHVTTAVRGTIGHIAPEYLSTGKSSEKTDVFGYGIMLLELITGQRAFDLARLANDDDVMLLDWVKALLKEKKLEQLVDPDLQGRYVDQEVESLIQVALLCTQGSPMERPKMSEVARMLEGDGLAERWEQWQKVEVMRQEAELAPRHNDWIVDSTYNLRAVELSGPR

SEQ ID NO: 47105 - protein, 117 aa, Zea mays
  Clone ID: 700550656_FLI.pep
NHGASRQAPIGVDGTTSTSATASTLHERWGCVQLNWAPLKVWPKDQPRGAALLESTERPSLVVTRKDRACPSRSVLLCQFWPQLRDRACHPGERSAFTATACTSPAPPTLVTSTRLK

SEQ ID NO: 47106 - protein, 66 aa, Glycine max
  Clone ID: 700556009_FLI.pep
LGEASGSNHLPLECVHVMTVGADRPVNSSIFESFNATSTRGASASFESLPIFDGSFSYCSMYNRIV

SEQ ID NO: 47107 - protein, 536 aa, Glycine max
  Clone ID: 700556451_FLI.pep
SGETVSNKLFNFSVVWLPMASNNHSPPLEILVRGPEDFSLWTGPPFANGQPSIKLEKVKCINAKFSDDGSKLMVTKSNSLISVYDCRIAEEIRAFEVPNVVAAALSPNGTYLQTFQKPSAPQEKNVTLWSIETGAAVHQQSQKNMTKANWPAIQFSSDEATACRLATNEVQFFDTGDFSKGVVCRLRVPGVAAAELSSLPGSHVAAFVPESKGVPASVQIFACGNASQSQPVARRSFFRCSTTQLKWNHGSTGLLVVVQSDVDKTNQSYYGESKLCYLTTDGMHEGLVPLRKDGPIHDAQWSYSGLEFAVVYGFMPAKATLFDKKCNPLLELGTGPYNTIRWNPKGKFLCLAGFGNLPGDMVFWDYIDKKQLGATKAEWSVTSEWSPDGCYFMTATTAPRLQVDNGIKIFHYNGSLYFKKMFDKLYQVDWKPESPGKFGDIAELIKSLNLVQLEDKKPSGQGPPKSTQTSTKASSANPTTQKPAAYRPPHAKNASAIQAELFGETTAETLSKNALRNKKKREKQKEKKAASDASSS

SEQ ID NO: 47108 - protein, 411 aa, Glycine max
  Clone ID: 700556462_FLI.pep
LSDNSSLNVVSLSLRNCQSCQRLPPLGLLPFLKELSIEGLDGIVSINADFFGSSSCSFTSLESLRFSNMKEWEEWECKGVTGAFPRLQRLSIGYCPKLKGLPPLGLLPFLKELSIEGLDGIVSINADFFGSSSCSFTSLESLKFSDMKEWEEWECKGVTGAFPRLQRLSIYNCPKLKWHLPEQLSHLNRLGISGWDSLTTIPLDIFPILRELDIRECLNLQGISQGQTHNHLQRLSMRECPQLESLPEGMHVLLPSLDYLGIIRCPKVEMFPEGGLPSNLKNMHLYGSYKLMSSLKSALGGNHSLETLRIGGVDVECLPEEGVLPHSLVTLDISHCEDLKRLDYKGLCHLSSLKELTLWNCRRLQCLPEEGLPKSISTLTIRRCGFLKQRCREPQGEDWPKIAHIEDVDIR

SEQ ID NO: 47109 - protein, 350 aa, Glycine max
  Clone ID: 700556983_FLI.pep
SIMVKGLHGQNLPAHVAQLVDQLERHCFAPDGSLISKPLFNDLQLARDEMCRERLRYLEAMAIYSEAIAMVEEYQQAISVSNLGGIRDTGNLYPQLGLKNSPQVYQTLEHQMVVAEAAQRLRLPLISKDGEVHDEDIEKLSVVSRSSLDSTVSGANSSNYNTPSSSVSGANTALAASDPVEVGVGGVANRFLGITPSYLWQTQHQKAPLSVDMTEYRLSVSREVEARLKMKCEKLSDAFVLDDNDSSSSGSHSSSSRLPERVKLLIEEIEREETALRDDLYSADRKFAEYYNVLEQILAVLIKLVKDLKLEHQHKYDEMQKTWLCKRCETMSAKLRFYHNCDIFHYMSVF

SEQ ID NO: 47110 - protein, 342 aa, Glycine max
  Clone ID: 700557213_FLI.pep
SLCLFQVLGVLLKMLVANSFDLWRKDGFFSAAEEVQESADIMESAYRAWLREKRERSTPEELNELCRELQTALGTAKWQLEEFDKAVRLSYRHHGDDNTSTRHRQFISAIESQITQVEAALRESYIEEGKQPLRWVNLDEEERDDLAAFLSGTCQTTQSTNDDCMEVKQAKKEDKIVDINTFRNRDISASEKSSKDVISVNKDTDYVIEIKADAVSRSNDDVVSQTDRTTSTRKTWSPPNYGALKIVIADEDEQRDKPTRTVDATPKEKGFRNLFWKLKFEEYPQAMRVVHMFNQRFGRIGICQSQRQFQSPLHLRYGCSVQVTLALMLTIFLIVPFVLYST

SEQ ID NO: 47111 - protein, 142 aa, Glycine max
  Clone ID: 700558335_FLI.pep
NSFLVDETPIRVHTNLEHKGIPFPKDQAMGVYSSIWNADDWATQGGRVKTDWSHAPFVATYKDFQIDACACPVPVTSADSAKNCSSSEDKKYWWDEPTLSELNLHQSHQLMWVRANHMVYDYCADTARFPVIPAECVHHRHH

SEQ ID NO: 47112 - protein, 99 aa, Glycine max
  Clone ID: 700558355_FLI.pep
YFPGPTDCFLFFIGTFTLSNLGMFGVDRFDAILPPGTGAIMAVGASEPTVVATKDGRIGMKNQMQVNVTADHRVIYGADLASFLQTLTQIIEDPKDLTF

SEQ ID NO: 47113 - protein, 204 aa, Glycine max
  Clone ID: 700558722_FLI.pep
HWSSHSHESIITLPFLLSFHPENMDAMTLSLPLPPVPVCTVPASASTSSSVSLTHSWSATARQRLSSHRTRPIFRNYSSAVPKLTVVTCGAAVTEINETQFKDTVLKANRPVLVEFVATWCGPCRLISPSMESLAKEYEDRLTVVKIDHDANPRLIEEYKVYGLPTLILFKNGQEVPESRREGAITKVKLKEYVDALLESISVS

SEQ ID NO: 47114 - protein, 315 aa, Glycine max
  Clone ID: 700559366_FLI.pep
SSDVSCLGKLRDGRSVAVKRLYENNFKRVAQFMNEIKILAKLVHPNLVKLYGCTSRHSRELLLVYEYIPNGTVADHLHGQRSKPGKLPWHIRMKIAVETASALNFLHHKDVIHRDVKTNNILLDSDFCVKVADFGLSRLFPDHVTHVSTAPQGTPGYVDPEYHQCYQLTKQSDVYSFGVVLVELISSLPAVDITRHRHEINLSNMAINKIHNQALHELVDPTLGFESDFKVRKMINAVAELAFQCLQSSKEMRPSMEEVVETLKDIQSDGKHKSQPEVMDITSTADDVVLLKDDPPPPSPDSNAVSKSTTPNASG

SEQ ID NO: 47115 - protein, 112 aa, Glycine max
  Clone ID: 700560077_FLI.pep
LCIACFIFSFFHITVCITNMDDRYAIATGKSYSYILQFAISLGQLYGTAVYYITAILEGDNFSTNSFYYYAYYIGANASWIVIPLIIAIRCWRKICAAFRVQGGQTKKPKVR

SEQ ID NO: 47116 - protein, 256 aa, Glycine max
  Clone ID: 700560421_FLI.pep
QQMNILGQSFNESNNGSYSCSSPETGSSSNIPNTFHSDEEVHTLASARPKKRAGRRIFKETRHPVYRGVRRRNNNKWVCEVRVPNDKSTRIWLGTYPVPEMAARAHDVAALALRGKSACLNFADSAWRLPLPASTNAKEIRRVAAAAAVAIAAEDSCGEQLQNSIVNDAVADDCEVSRSDVSFDEDSNSNKGLRVFCDLDEITMADAPVFEDMREWLQSMADEPLRSPTFVTYVNVRDVWNFVEDDAEVSLWSFTI

SEQ ID NO: 47117 - protein, 134 aa, Glycine max
  Clone ID: 700564741_FLI.pep
LEYAWSHAVISDQQYDKAKQLCDFKQFEWSNECNKAMNEVFQDYLEIDIYNIYAPACLLNSTSSIADDGDSNGPESLTKERNDYRLKRMRIFGGYDPCYSNYAEEYFNRKDVQSSFHADTKRDTNVAWKVCKWP

SEQ ID NO: 47118 - protein, 295 aa, Glycine max
  Clone ID: 700565101_FLI.pep
LVNILYAENGPDFGAASDGDGDRNMILGRSFFVTPSDSVAVIAANAREAIPYFKNGVKGLARSMPTSGALDRVAKKLNLPFFEVPTGWKFFGNLMDAGNLSVCGEESFGTGSDHIREKDGIWAVLAWLSIIAHRNKDKNPGEKLISVSDVVMEHWATYGRNFFSRYDYEECESEGANKMIEYLRDILSKSKPGDQYGSYVLQFADDFTYTDPVDGSVVSKQGVRFVFTDGSRIIYRLSGTGSAGATVRVYIEQFEPDVSKHDVDAQIALKPLIDLAISVSKLKDFTGREKPTVIT

SEQ ID NO: 47119 - protein, 186 aa, Glycine max
  Clone ID: 700565722_FLI.pep
FLARACVRRQTMENIGEDQYGYLPETDLFFPNEDLGSWAIMDGEAVSWYYDSSSPDGTGASSSVASKNIVSERNRRKKLNDRLLALTSQAGIVESLDVLVKEFVAASDEEKKFVFTRMEEEVEKLKGSASRHGKIYLKAAKNYLEKGSDYAKNEIQRLQRILDKSISPAKADELTLKKNILSTYAA

SEQ ID NO: 47120 - protein, 374 aa, Glycine max
  Clone ID: 700565743_FLI.pep
IEHQRRKVKLLSMLDEVDRRYNHYCEQMQMVVNSFDLMMGFGAAVPYTALAQKAMSRHFRCLKEAITAQLKQSCEVLGDKDGAGSSGGLTKGETPRLKMLEQSLRQQRAFHQMGMMEQEAWRPQRGLPERSVNILRAWLFEHFLHPYPSDADKHLLARQTGLSRNQVSNWFINARVRLWKPMVEEMYQQELKEAESAEEREKDQSNNISGNQAQIPTTPSAATTSTATATAPPPPPSTTTKTTKPTGKRSDTINAPESDPSQHLAMNNRQGFSENQAKKSTASTTTTTIASEVAPPVSQCFDDSDLPAHRLMASDDTCHLVTADFGTASASADIGSTLIRFGTTPGDVSLTLGLRHAGNMPEKSPFSVRDFGAI

SEQ ID NO: 47121 - protein, 67 aa, Zea mays
  Clone ID: UC-ZMFLMO17256B01_FLI.pep
TDHSQAITLNPQLAEAYKARGKIYWQLGEQAQAIADLEAALALFSDQENLVSQREAWEQLQTWHGNP

SEQ ID NO: 47122 - protein, 404 aa, Zea mays
  Clone ID: UC-ZMFLMO17255H06_FLI.pep
KIIMFNRIKDKLKFKLAKVLAPEIDKKLAVEEKLSSVQFFGIAPWYQENLWEPPVQIVLRDQNSHRRGVAITILSKQELNREVNQGLLLVVGSFIIGIVVILLLLGLLIRYAVLLPLGKLHRALINYDNTEQFNLPPLPSNEIGFLGQTLVQTFNQLQIYQREALEIAERKYVEIAQRYELASQATRVWVWECQPKIHYFEVDPNLITWLGFEQPLEPADGDFFIHLGDRPMFWQAIEQSLEDPTMELSTELRLEAANGEIYHCLLRGQIHQEQGEAFVKIIGTIADITEIKKAEEQLKLSNKILAKATQLKDEFLANMSHELRTPLNSILGMIETLQNQVYGPLNGKQVQSLEIVENSGRHLLSLINDILDLSKIEAGRMDLDLNPTSVSALVNHSLTFVQQF

SEQ ID NO: 47123 - protein, 153 aa, Zea mays
  Clone ID: UC-ZMFLMO17256H02_FLI.pep
ADQDTFEMTHLADYLRGNPHQQVCRPSQSSWGYKGFHEYWLNDTNAWIYPHLHKAAERMIELSHREAVDELEEKALNQAARELLLAQSSDWAFIMRTGTMVPYAVRRTRSHLLRFDKLFDDIRANKVDAGWLEKVEVMDNIFPKIDYRVYRPL

SEQ ID NO: 47124 - protein, 39 aa, Zea mays
  Clone ID: UC-ZMFLMO17256H12_FLI.pep
KSAVNLTNTTGNQGVIFDRAKTLRWVSKVSGQANFPQLS

SEQ ID NO: 47125 - protein, 156 aa, Zea mays
  Clone ID: 700087978_FLI.pep
LPHFNSSFTEANECELKIKDEPVAAPRKGRAPAPRWYISTEELDSLSSYMRGRLTLEKVNIAINEVASYADANAHLVTCPKKKLSEDTWEKALELRDIAASGAVKGNHFFLEADIKGPGLKLDNTGKAILTVLRHLGRFHEVRIGHHRVFILSKQA

SEQ ID NO: 47126 - protein, 152 aa, Zea mays
  Clone ID: LIB3062-056-G9_FLI.pep
QNERWNDKYSRVETMMLFWNRSRPSCRKRHREPPPVQCGHRKKSSHLYFQSWIADMVASPRSTSTHTQHTGTLHRRYVHLDTSCMVWSHTMSPLILLCFTGHPFYLPTGMSSSETPQQINLSLPPLPPTAIREYSHMEENMYKDHLSTNLEK

SEQ ID NO: 47127 - protein, 284 aa, Zea mays
  Clone ID: LIB3069-015-D12_FLI.pep
GMLQCHPYPHEYADPSRQCAHCAFFMGLSRKEGVKIQEGQQFDIRGTVDEFRHEINMYMFWKPGMELAVSHVRRKQVPAYVFPEGYKRPRPSRHVNHQSDKNDTEDGTATRSPDSQLKRKHDSVGTDDIRYAKRSSTSPVHPKNSPQSGSTGDETRCNNQIKRAPSDASGGSPASPQASERSPDTILSAPRCTTTGAVCSGDAISKHSSVPLVENCTTPTVAVCTTLKRVAEKVVSELVGSERLGSNNSAELLESMEKEDVLAENVRFGGNGVAQGGLPEELEV

SEQ ID NO: 47128 - protein, 352 aa, Zea mays
  Clone ID: LIB3075-022-D9_FLI.pep
HTAFAADDAIIAAAAAITSQPGRRFTSYPPARARGGCRLAPAAAARQATDDPGAAVSWPELVVPRHADFDDWMEKHPSALAAFESVLAAAKGKKIVMFLDYDGTLSPIVRDPDSAVMSEEMRDAVRGVAEHFPTAIVSGRCRDKVFNFVKLAELYYAGSHGMDIKGPTAQSKHTKAKAGAVLCQPARAFLPVIEEVYRALTASTAPIPGATVENNKFCLSVHFRCVQEEKWRALEEQVRSVLKEYPDLRLTKGRKVLEIRPSIKWDKGNALQFLLESLGFAGSNSVFPIYIGDDSTDEDAFKVLRNLGQGIGILVSKIPKETRASYSLREPSEVEEFLRKLVSWSKESRQRD

SEQ ID NO: 47129 - protein, 308 aa, Zea mays
  Clone ID: LIB3079-040-E12_FLI.pep
VEALWNPFFKLLVSSIMTGYTLRNAEYRLSFERNLELPEEGVECLKSDVTEDNHHNINLGRPVTIFRLSEEDMPQDPGKTDEASSYENMGEELGDLTPQAEEYIIQMQSHLNAMKKELHDLRRKNSALQMQQFVGEEKNDLLDYLRSLTPEKVAELSESTSPGVQETIHSVVHGLLATLSPKVHSKAPPPLDNISGGVLNLGGEDDDRAELVENASLPFQPLISVPRDYLARLLFWCMLLGHYIRGLEYRLELARLLRISSVGSFSGGDDHVLRVPRLLIFLTGKNGKESPGQEMGHMAELQRCPLHC

SEQ ID NO: 47130 - protein, 307 aa, Zea mays
  Clone ID: LIB3591-077-E7_FLI.pep
SFLVSSSRPVSNMAANLKWAPVLALVVVVAAMVGTTSAGNIAVYWGQNGNEGSLADACNSGLYAYVNIAFLTTFGNGQTPVLNLAGHCDPGSGSCTGQSSDIQTCQSLGIKVLLSIGGASGSYGLSSTDDANSVADYLWDNFLGGSGSSRPLGAAVLDGIDFDIENGQSAHYDDLANALKGKGSVLLTAAPQCPYPDASLGPALQTGQFDNVWIQFYNNPGCAYANGDDTNLVNAWNTWTSSITAGSFYLGVPASPQAAGSGYIDPGTLTGTVIPAIRGIGNYGGIMVWDRFNDVQNNYSSQVKGSV

SEQ ID NO: 47131 - protein, 393 aa, Zea mays
  Clone ID: LIB3594-032-A8_FLI.pep
SIADARLAASMGSMRRSSVRLLIGFLLIRLNWCSAVGDKGAEKVGVAFPVVVSTWPFREAVRAAWKVVSTGEGWGSAVDAVVAGCSACEDLRCDGTVGPGGSPDENGETTLDALVMNGATMEIGAVAAMRYVKDGIKAAKLVMEHSEHTLLVGEKATAFAISMGLPGPTNLSSPESIEKWEKWKQNHCQPNFWKNVDPVGKCGPYHPINLASVEVEGSVKNEVVGSQGGLCQGYFESDNLLEPIKSNLKVVNRHNHDTISMAVIDKMGHIAVGTSTNGATFKIPGRVGDGPIPGSSSYGDDEVGACGATGDGDIMMRFLPCYQVVESMRQGMDPRDAATDAISRIARKYPDFIGAVFAVNKEGVHAGACHGWTFQYSVRNSSMQDVEVITVYP

SEQ ID NO: 47132 - protein, 394 aa, Zea mays
  Clone ID: LIB3594-037-A7_FLI.pep
RSIADARLAASMGSMRRSSVRLLIGFLLIRLNWCSAVGDKGAEKVGVAFPVVVSTWPFREAVRAAWKVVSTGEGWGSAVDAVVAGCSACEDLRCDGTVGPGGSPDENGETTLDALVMNGATMEIGAVAAMRYVKDGIKAAKLVMEHSEHTLLVGEKATAFAISMGLPGPTNLSSPESIEKWEKWKQNHCQPNFWKNVDPVGKCGPYHPINLASVEVEGSVKNEVVGSQGGLCQGYFESDNLLEPIKSNLKVVNRHNHDTISMAVIDKMGHIAVGTSTNGATFKIPGRVGDGPIPGSSSYGDDEVGACGATGDGDIMMRFLPCYQVVESMRQGMDPRDAATDAISRIARKYPDFIGAVFAVNKEGVHAGACHGWTFQYSVRNSSMQDVEVITVYP

SEQ ID NO: 47133 - protein, 365 aa, Zea mays
  Clone ID: LIB3594-046-F12_FLI.pep
VGRWESRQHCNGVRARPCRSPSSPFARRRSMGWALALHGGAGDVPRTLPPESREPRLATLRRCLDIGTAALREGRTALDVVELVVRELEDCPHFNAGRGSVLTSAGTVEMEACVMEGATLHCGAVSGLSTVANAVSLARLVMEKTPHIYLAFDGAEAFAREQGVETKDPSHFITDNNIERLRQAKEANRVQIDYTQPAAGQSQKAQAVVDDNCQTGTVGCVAVDAAGNLATATSTGGLVNKMPGRIGDTPLVGAGTYANALCAVSATGKGEEIIRRTVARDVAALMERGDALPLRDAAARVVAGAARGAVGLVAVSRQGEVCMAHNTTAMFRACATEAGHTEVGIWTDAADAGTGADGETVSVAL

SEQ ID NO: 47134 - protein, 259 aa, Zea mays
  Clone ID: LIB3595-038-A6_FLI.pep
AESGWDFSSRWMRNSTDMTTLATTYTIPVDLNTFLFKMELDIGALAKVVGDNATSEFFLNASKARHIAIDSILWNSEMEQWLDYWLPGDADCQEVHEWKPNSQNRNIFASNFVPLWLNAYHSEFVRFADEAKSNRVMASLKASGLLHAAGIATSLTNTSQQWDFPNGWAPLQHLIAEGLLHSGSEAKKLAEDIATRWVRTNYAAYKATGAMHEKYDVEACGESGGGGEYKPQTGFGWSNGVVLSFLEEFGWPEGKEIAC

SEQ ID NO: 47135 - protein, 344 aa, Zea mays; identical to SEQ ID NO: 38418
  Clone ID: LIB3634-001-C7_FLI.pep

SEQ ID NO: 47136 - protein, 242 aa, Zea mays
  Clone ID: LIB3732-031-B5_FLI.pep
NVVFIVSGRGRDSLDEWFSPCEKLRLAAEHGYFIRWSKEAAWESSYSSPRQEWKHIAEPVMQVYTETTDGSSVESKESALVWHYLDADHDFGSFQAKELKDHLERVLSNEPVVVKCGHYIVEVKPQGVSKGRAVDKLIQALANNNGKAQDFLMCVGNDRSDEDMFECINGMASNDASSPAVPEVFACSVGQKPSKAKYYVDDTSEVIRLLRDATRFSSSQRREDVNTSRGRVTFRDALDYVD

SEQ ID NO: 47137 - protein, 585 aa, Zea mays
  Clone ID: LIB3912-002-E4_FLI.pep
FGRTVGIKIMPVGVHMGQLESGLRLPDREWRLSELQQQFQGKTVLLGVDDMDIFKGINLKLLAFENMLRTHPKWQGRAVLVQIANPARGRGKDLEAIQAEIEQSCQRINVDFGQSGYSPVVFINRDVSSVEKVAYYTIAECVVVTAVRDGMNLTPYEYIVCRQGAPGSESVSEVSGPKKSMLVVSEFIGCSPSLSGAIRVNPWNIEATAEAMNEAISMPEQEKQLRHEKHYRYVSSHDVAYWSKSFILDLERACRDHFKRTCWGIGLGFGFRVVALDPHFRKLNMDSIVNAYEISESRAILLDYDGTLVPQTSINKEPSPEVLNIINTLCSDSRNIVFLVSGRDKDTLGKWFSSCPKLGIAAEHGYILRWSSKEEWQTCTQAMDFGWMQMAKPVMNLYTEATDGSYIERKESALVWHHQDADPGFGSSQAKELLDHLESVLANEPVSVKSGQFIVEVKPQGVSKGIVAERILASVKERGKQADFVLCIGDDRSDEDMFENIADIIKRNMVAPRTSLFACTVGQKPSKAKFYLDDTFEVVAMLSALADATGAELKSDSADELAASISSLDIGDEQSESSDTPIGGS

SEQ ID NO: 47138 - protein, 90 aa, Zea mays
  Clone ID: 700335976_FLI.pep
GQVRARRTHRPYRRSDRDFQQRGIQGGAAPYDGEQGEDADVMADVRGAAGGARRRAAPQAGHGGEPGQVQGQEVQGLPALQDQQAPHVIM

SEQ ID NO: 47139 - protein, 115 aa, Zea mays
  Clone ID: 701165540_FLI.pep
TAMAGRLLANLIVMGGTVVGRAMLQAYRQAIVNANKTGAAQEAINGIRRASKAMTEQEARQILGISENSTWEEIVQKYDTMFERNNKNGSFYLQSKVHRAKECLEPLYQKPDVLN

SEQ ID NO: 47140 - protein, 472 aa, Glycine max
  Clone ID: 701014010_FLI.pep
LRLNNNSLTGSCPQSLSNIEGLTLVDLSYNNLSGSLPRISARTLKIVGNSLICGPKANNCSTILPEPLSFPPDALRGQSDSGKKSHHVALAFGASFGAAFVLVIIVGFLVWWRYRRNQQIFFDVNEHYDPEVRLGHLKRFSFKELRAATDHFNSKNILGRGGFGIVYKACLNDGSVVAVKRLKDYNAAGGEIQFQTEVETISLAVHRNLLRLSGFCSTQHERLLVYPYMSNGSVASRLKDHIHGRPALDWTRRKRIALGTARGLVYLHEQCDPKIIHRDVKAANILLDEDFEAVVGDFGLAKLLDHRDSHVTTAVRGTVGHIAPEYLSTGQSSEKTDVFGFGILLLELITGHKALDFGRAANQKGVMLDWVKKLHQDGRLSQMVDKDLKGNFDLIELEEMVQVALLCTQFNPSHRPKMSEVLKMLEGDGLAERWEASQRIETPRFRSCEPQRYSDLIEESSLVVEAHGAFWS

SEQ ID NO: 47141 - protein, 369 aa, Glycine max
  Clone ID: 701039094_FLI.pep
HPQMGNSHGHRHRKHGNSVPPNTVPPPYKYNPHPTTSNSTMLSLPYTHVDTTLRSLAAQAEGFGRFAIGGLHGPLHPVTSLADDGPGSLRDACRRKEPLWIVFEVSGTIQLSSYLNVSSHKTIDGRGQRIKLSGKGLRLKECEHVIICNLEFEGGRGHDVDAIQIKPNSKHIWIDRCTLSDFDDGLIDITRESTDITISRCHFSQHDKAMLIGADPTHVGDRCMRVTIHHCFFNGTRQRQPRVRFAKVHLYNNYIRNWGIYAVCASVESQIFSQHNIYEAGQKKVAFKYLTEKAADKEVGATGTIRSEGDIFLNGAQKGLMTEDVGCNMFHPSEHYPSWTVEAPTDDLKQILHHCTGWQSLAKPADQTL

SEQ ID NO: 47142 - protein, 289 aa, Glycine max
  Clone ID: 701010007_FLI.pep
IIFANEMKVPRLKSLTANLHRMGVSNTVVCNYDGKELPKVLGVNAVDRVLLDAPCSGTGVISKDESVKTSKSLEDIQKCAHLQKELILAAIDMVDANSKSGGYVVYSTCSIMVAENESVIDYALKKRDVKLVPCGLDFGRPGFTKFREQRFHPSLEKTRRFYPHVQNMDGFFVAKLKKMSSSKPGAISSETAEKEDTTSFVEEKEKSSDGIKENGNVSSESEKGKKRKFPSKPSNGLKSNGKESSESEPKKRNKRQFPSKEEISKAREDKRNALREKRRKGGKQQKNKK

SEQ ID NO: 47143 - protein, 240 aa, Glycine max
  Clone ID: 700742805_FLI.pep
WKEIEGEKGESSNWRTIDAHTVVPIDRPPIAEPDRPLWFPGSTPPPWLDGTLPGDFGFDPLGLGSDPESLRWNVQAELVHCRWAMLGAAGIFIPEFLTKIGVLNTPSWYSAGELEYFTDTTTLFIVELFFIGWAEGRRWADIIKPGCVNTDPIFPNNKLTGTDVGYPGGLWFDPLGWGTGSPQKIKDLRTKEIKNGRLAMLAVMGAWFQHIYTATGPIDNLFAHLADPGHATIFAAFTPK

SEQ ID NO: 47144 - protein, 113 aa, Zea mays
  Clone ID: 700618213_FLI.pep
PQAQARSQTRQRNLVLHADDAADALPLGHQVERLVDLGERDAVRDELLHLQLLFHVQLHHIWQISAWLVVAKEGPLQGPFVQEVHRVGLELSVLMWHTHQHSNTPAIMNTFES

SEQ ID NO: 47145 - protein, 122 aa, Zea mays
  Clone ID: 701160857_FLI.pep
SLPYPWVLGPRDYSHNCPVKQRRTYPRLYNKLLPALAVPPKQNHTVQEGPGPSRDLVLRSFARKMLRSKPQRSESRIVFFTPRCCSLCSGAGWRSASAAPGASQEAPGTTAVAAGRFPSSSG

SEQ ID NO: 47146 - protein, 90 aa, Zea mays
  Clone ID: 701160947_FLI.pep
STHVRRRTSSGHECTLYVLIWGSDVAVKMPFCAGLLQADSSQRTGQEDRCVLGLRRHPVADRRRSRQSVHVPCGKPEPPVCFKYLALSDQ

SEQ ID NO: 47147 - protein, 261 aa, Zea mays
  Clone ID: 701161251_FLI.pep
AVISDPSLVYGGCRSSWSICTVTEVEELKILIRLLPIWVTGIFFAAAISQMHTTFIQQGTVMDTKIGSLSIPPASLYSFEVICVTLWVLAVNKVLVPAIRTYFANGVELTQLQRIGIGRFLMIFAIAMAALLETKRLHIVQEGELLSIVWQLPQYFVIAGAECFGIITQLEFFHGQAPDSMKSILTAFALLTTALGNYLSSAIITLIAGVTRVWHSPGWIPDDLNKGHLDYYYWCLTTLSLVNFVVYLYFASKYKLKKVVC

SEQ ID NO: 47148 - protein, 133 aa, Zea mays
  Clone ID: 701165180_FLI.pep
ATINRIGKSSGLNSFGLMWCNGLVCGPSVLFLTYIQGDLKRTMEFPYLHSLGFQVVLLFSCILAFLLNYTIFWNTILNSALTQSMCGNLKDFFTVGIGWVLFGGLPFDLLNVIGQGLGFLGSGLYAYCKIRGK

SEQ ID NO: 47149 - protein, 170 aa, Zea mays
  Clone ID: 701165460_FLI.pep
PFDCRRPPLAAARRSPRPMMARGRRGPGGRGRFGGGPLGDERPVRHGVRVEENPYFPLPRRASGWGVAPPSRHLWVGGLAPSVTASDLSELFLRCGDVEGVAREPGRNFAFVSFLREGDAVAAVRELQGARLAGAPVRIEFSKGVSVEHPLFIICLFNLTPSNYRCGVLL

SEQ ID NO: 47150 - protein, 111 aa, Zea mays
  Clone ID: 701165490_FLI.pep
APQAHGAARPARRHRRRRVRSAREAQGQEGPGERARPPGQGGGGRRRRRGLRRVRLPRASREEGRQEARPQLIRRRLPQPKQQHIVAVAVSSVLPASSSSTVCRAGLDLRL

SEQ ID NO: 47151 - protein, 138 aa, Zea mays
  Clone ID: 701177501_FLI.pep
KYKGYTYVQRYEKKESMRRTYREYSQTMTSLAYTGHRTTCAWWLRRTQTCRSTRVYADGVGAANGMGTVGTDGIGGKTTLGTTDGTTTGIGGRVSLGSTDGTAGIGGNGTDTLGAAGMGGSVIWGTVTAGTAGMGGSA

SEQ ID NO: 47152 - protein, 646 aa, Glycine max
  Clone ID: 701062116_FLI.pep
AFNMTSFLKPENALKRAEELINVGQKQDALQTLHDLITSKRYRAWQKTLERIMFKYVELCVDMRKGRFAKDGLIQYRIICQQVNVSSLEEVIKHFMQLSTEKAEQARSQAQALEEALDVDDLEADKRPEDLMLSYVSGEKGKDRSDRETVTPWFKFLWETYRTVLEILRNNSKLEALYAMTAHRAFQFCKQYKRTTELRRLCEIIRNHLANLNKYRDQRDRPDLSAPESLQLYLDTRFEQLKIATELGLWQEAFRSVEDIHGLMCLVKKTPKPSLMVVYYVKLTEIFWISSSHLYHAYAWFKLFLLQKSFNKNLSQKDLQLIASSVVLAALSVPPHDRTHGASHLELEHEKERNLRMANLIGFNLETKPESREMLSRASLLAELASKGVMSCVTQEVKDIYHLLEHEFYPSDLALKALPLITKISKLGGKLSTASSVPEVQLAQYVPALERLATMRLLQQVSNVYQSMKIETLSGMIPFFDFAQVEKISVDAVKQKFVSMKVDHMKNAVIFSKKSLESDGLRDHLGNFAEQLNKARQMIYPPDGRPSKLGALLPTLTEVVAKEHKRLLARKSIIEKRKEEQERQLLEMEREEESKRLRLQKITEEAEQRRLATEYEQRKNQRILREIEERENEEAQALLQEAEKRI

SEQ ID NO: 47153 - protein, 113 aa, Zea mays
  Clone ID: UC-ZMROB73022H02_FLI.pep
PPALAALSEPANALSLPTWAVHVSSVAEWVTAMWLVWDYGEKTGLKGWKGLSWGMVPLLGGAMCACTWHFFYNSESLEVLVALQGALTVVGNITMCIAAYRIFKASQEGSKTS

SEQ ID NO: 47154 - protein, 308 aa, Zea mays
  Clone ID: UC-ZMROB73015C07_FLI.pep
LPGQEIDLAKVVAKAAGPRAGGGLGLPLPLLVRFPDVLRHRVETLNAAFGYAVRSTGYGSRYQGVYPVKCNQDRYVVEDIVEFGAPFGFGLEAGSKPELLLAMSCLAARGGLDALLICNGYKDDGYVSLALMARSMGLNTVIVLEQEEELDIVVEASRRLGVRPVVGMRAKLRTKHAGHFGSTSGEKGKFGLSAAQILSVVTKLKAIGMLDCLQLLHFHIGSQIPTTALLSDGVGEAAQIYCELARLGADMRVIDVGGGLGIDYDGTHSAQTDMSVAYSLEEYAGAVVAAVGRVCDRKGVQHPIICSE

SEQ ID NO: 47155 - protein, 278 aa, Glycine max
  Clone ID: 700675327_FLI.pep
EDEDDEDEQIPSHPPRRPSHGKREQDEDEDEDEDKPRPSRPSQGKREQDQDQDEDEDEDEDQPRKSREWRSKKTQPRRPRQEEPRERGCETRNGVEENICTLKLHENIARPSRADFYNPKAGRISTLNSLTLPALRQFQLSAQYVVLYKNGIYSPHWNLNANSVIYVTRGQGKVRVVNCQGNAVFDGELRRGQLLVVPQNFVVAEQAGEQGFEYIVFKTHHNAVTSYLKDVFRAIPSEVLAHSYNLRQSQVSELKYEGNWGPLVNPESQQGSPRVKVA

SEQ ID NO: 47156 - protein, 333 aa, Zea mays
  Clone ID: UC-ZMFLMO17227A06_FLI.pep
SEAKALGIKMGVPLFKIRDLVERHNIQVFSSNYCLYGDLSHRIMTSLQLFSPVVEIYSIDEAFLELTPNQSNTNYGEEIRRCLKQWVGIPVSIGIAPTKVLAKVATDVAKQSGAGTFCLDKAEAADTILATMPIADIWGIGRRLEKWFTTRGVSTALQFKQANPELIRKKMGVVGQRLLLELQGISCLPLELIPNPKQETCVSRSFAQAVTTLDELQTAIAFFVSRAAEKLRRQQQTPAVMIIFARTSFFIEQPISISQTIALPTPTHYTPELLKLAQTSLKQIFRPHHPYKKAGVIMTGLQSERIVQGDRHRCDVIWPQFWSCFGHRSGGIN

SEQ ID NO: 47157 - protein, 84 aa, Zea mays
  Clone ID: UC-ZMFLMO17225G01_FLI.pep
QFPKLFWRQIKFNQGLQPVDRDAHGFPFLLICINACLVCDGVSGIYCIAEGITPGHSGSCLQLSEQIYSSGSSMNQSFPLTSLK

SEQ ID NO: 47158 - protein, 218 aa, Zea mays
  Clone ID: UC-ZMFLMO17226B12_FLI.pep
GVRTPMLRKLSLVWGLGALMAIAGGGGEALAEPGGKIEPLQFGQSVEEMDSNPMGQITSVSELRDVQPTAWAYEALKSLVERYGCIVGYPDRTFRGDGALSRWEFAAGLNACMNVMERLIQENVAVLREDVDKLKRLAQEFQGELAALGARVDNLEVRTAYLEDHQFSTTTKLSGQVVTALSGIVSGDKNNGTESITRNTTLGYRTRLELNTSFRGDD

SEQ ID NO: 47159 - protein, 116 aa, Zea mays
  Clone ID: UC-ZMFLMO17227A02_FLI.pep
NDGARKFITGTLLASGAWQDLGKAPVQAAVEFTYLLEGCQFNLKVNQATLQIPDRQAVSALLFAGNFNYSLNNPNPQERVSVAKQYIEAWQSDLDTFRGIVHEKFLAEQQPQTVFG

SEQ ID NO: 47160 - protein, 113 aa, Zea mays
  Clone ID: UC-ZMFLMO17228F04_FLI.pep
PIDKGLAFTHLKGTIQAFIKQMFGEALPIRFRASYFPFTEPSAEVDVQWQGKWLEVMGCGMVDPNVMEAVGYDPEVYTGFAAGFGVERFAMVLHQIDDIRRLYNSDLRFLRQF

SEQ ID NO: 47161 - protein, 196 aa, Zea mays
  Clone ID: UC-ZMFLMO17229C05_FLI.pep
EELRTSLKELLFKEGSFRWNRLENLLRNAKNSPGFDFDYVLNEATEFLLSDRGQFIRDRLVAELVNSIDQLGRNTWQQVSHNIQERISFLGDLGNGNGKAHQTKTIKVVPQPAIAQQEETWQHLQNLWQILKETPGFDPLKFVPVLSQIIVNPTSRRMGQQVAEGLLQKAIARVIRQWALALESQPNPAIKIRNAA

SEQ ID NO: 47162 - protein, 105 aa, Zea mays
  Clone ID: UC-ZMFLMO17229A08_FLI.pep
RKLRRTYQAQMMDMTQAICNYFPKMTRVSRPKGGYILWIEMPEIVDTLQLYEDALRHNIAIAPGSMFSSSGGYRNCFRLNFGLPFTEEIQQAMIVLGQLLHEQTK

SEQ ID NO: 47163 - protein, 128 aa, Zea mays
  Clone ID: UC-ZMFLMO17230A09_FLI.pep
FKDLVNDVAMQIAACPNVEYVSVADIPQEMVAKEKEIEMGRDDLGKKPANIKEKIVQGRIDKRLKELSLLDQPYIKDQNLTIEELVKQAIAELGENIQVRRFIRFNLGEGIEKAETNFAEEVAAAAKG

SEQ ID NO: 47164 - protein, 408 aa, Zea mays
  Clone ID: UC-ZMFLMO17251H09_FLI.pep
ITSSPSLMPIQVKWTMFVLPMAPIALKIVPLAIEISMICDLRSIFCPREVSFPQPLASPLTREFSPPMGSLISKMVEQRREDFRRTYPLTHRIQLGIALSGRFGVDYIRDLSESDTNGALGIGLCIDSILKLDPETFRGHDIILDECEQLIWELLDSSRGNLGKHKPAILARFQEILIAAADSGGKIILSDADLSPVTIKYVQDLIGGKAECYIVVNTFKPVQDKRNLIVYNSPEDLLTSAINTVANGKKIQICTGAQKAQSIYSTTNLGDLFKMLFPDKSVGVLDAHTVSDKTNPAYGCMDNLDRYLEDKDIVITSPVIETGISIDKPYFDEVYGFGQGTQTVEQFCQGLERYRPDVDPNRFNDNYRRYIEKQFRKQLGFFGSPIRLFWRGKKVREMEGSRNRATKV

SEQ ID NO: 47165 - protein, 104 aa, Zea mays
  Clone ID: LIB189-002-B6_FLI.pep
RATLSVPDRPLFGLGMFLGAVAVRHGFDAGCKRAELLAINDTPLYHDKLVRFYMRMGFKAVHEVDGSSISDLGHMLVWGGRGTRMDADIEELLIKWGNRFRLQD

SEQ ID NO: 47166 - protein, 83 aa, Zea mays
  Clone ID: UC-ZMFLMO17253F09_FLI.pep
KVPPAINKLAEFGGQLQSVFQQGQQIQASQASASSNMSPEYYQRMSDIYRMGHETSMGILNNIRSDGEWHYNYSTGRDEYQYY

SEQ ID NO: 47167 - protein, 129 aa, Zea mays
  Clone ID: UC-ZMFLMO17226A05_FLI.pep
ASASVKIGDRRLPLAPLERRGYGYLLDFVVIWLFSSLATGWVQLLIFLVGWFALRVVLVSANQGQSLGGWAFDTRVVHLKMKRLPGILELSQREGILGAASYLAMVGLNINFANGVSFLLLVAPLFGDL

SEQ ID NO: 47168 - protein, 100 aa, Zea mays
  Clone ID: UC-ZMFLMO17252C10_FLI.pep
YFPPKLGGLGGHLKQTLISKPMAKKLLLVGGGHSNALVLKHWCRHPLADVELTLVSDVRQTPYSGMLPGYLAGFYSYGESHIDLAPLCASAGAIFVQDKA

SEQ ID NO: 47169 - protein, 331 aa, Zea mays
  Clone ID: LIB3354-083-D10_FLI.pep
FAQDLERACRDHYSRRCWAIGFGLNFRVIALSPGFRKLSSEHFVSSYNRASRRAIFLDYDGTLVPQSSINKAPSEEVISILNTLCNDPKNVVFIVSGRGRDSLDEWFSPCEKLRLAAEHGYFIRWSKEAAWESSYSSPRQEWKHIAEPVMQVYTETTDGSSVESKESALVWHYLDADHDFGSFQAKELKDHLERVLSNEPVVVKCGHYIVEVKPQGVSKGRAVDKLIQALANNNGKAQDFLMCVGNDRSDEDMFECINGMASNDASSPAVPEVFACSVGQKPSKAKYYVDDTSEVIRLLRDATRFSSSQRREDVNTSRGRVTFRDALDYVD

SEQ ID NO: 47170 - protein, 136 aa, Zea mays
  Clone ID: LIB3587-273-H7_FLI.pep
GVLGRALRAGPRRAEGPPGPAPHPGPQGAGGPPHDPLGQGQGAGVPAPRPRLRRRRRPRRRLPHLRRRRPHRRGRLQGAARARARRRDPRVQVPQGHQRVLHATRPRRGQGVPAQARRRQRRQLMIRPAIRFPFPP

SEQ ID NO: 47171 - protein, 372 aa, Zea mays
  Clone ID: LIB3732-056-A5_FLI.pep
PIPMDMGSGSSPVITDPISISPPLLGGLTSNLMPFSVMSGGCSSSPSMSNSSRRKIEEVLVNGLLDAMKSSSPRKKHNLAFGQDNSPDEDPAYTAWLSKCPSALASFKHIVANAKGRRIAVFLDYDGTLSPIVDDPDKAFMSPVMRAAVRNVAKYFPTAIVSGRSRKKVFEFVKLTELYYAGSHGMDIVTSAAAHATEKCKEANLFQPACEFLPMINEVSKCLMEVTSSIEGARVENNKFCVSVHYRNVAEKDWKVVAGLVKQVLEAFPRLKVTNGRMVLEVRPVIDWDKGKAVEFLLRSLGLSDSEDVVPIYIGDDRTDEDAFKVLRERSCGYGILVSQVPKDTEAFYSLRDPSEVMGFLNSLVRWKKHPL

SEQ ID NO: 47172 - protein, 473 aa, Zea mays
  Clone ID: UC-ZMFLB73264F02_FLI.pep
PTSLSLAARAATRAAAAAAAPLRRGGLATACQPARSLAFAAGDARLAVHVASRCRQAFSGRGTRAMATMAKKSVGELTEADLEGKRVFVRADLNVPLDENQNITDDTRIRAAIPTIQYILSKGAKVILSSHLGRPKGFTPKFSLAPLVGRLSELLGIQVQKADDVIGPEVEKLVAALPNGGVLLLENVRFYKEEEKNDPEFAQKLASLADLYVNDAFGTAHRAHASTEGVTKFLQPSVAGFLLQKELDYLVGAVSSPKRPFAAIVGGSKVSSKIGVIESLLEKCDILLLGGGMIFTFYKAQGLPVGASLVEEDKLELATSLLAKAKEKGVSLMLPTDVVIADKFAPDANSQIVPASAIPDGWMGLDIGPDSVASFNAALDTTKTVIWNGPMGVFEFDKFAVGTEAVAKKLAELSGKGVTTIIGGGDSVAAVEKVGVADVMSHISTGGGASLELLEGKELPGVVALNEAATVTV

SEQ ID NO: 47173 - protein, 276 aa, Zea mays
  Clone ID: LIB3900-009-B5_FLI.pep
DLIGAGAMAGQNQRLNVVPTVTMLGVMKARLVGATRGHALLKKKSDALTVQFRAILKKIVAAKESMGETMRASSFSLAEAKYVAGDGVRHVILQSVRAASVRVRSHQENVAGVKLPKFTHFVDPAAASGAPSNASPSLTGLARGGQQVAACRSAHVKAIEVLVELASLQTSFLTLDEAIKTTNRRVNALENVVKPRIENTISYIKGELDELEREDFFRLKKIQGYKKREIERQMAAARLFAEEQLAEDLALKRGISVGAAANLLVAGGEKDDDIIF

SEQ ID NO: 47174 - protein, 458 aa, Zea mays
  Clone ID: LIB189-010-A6_FLI.pep
AKLRATTACSTQRPSISLLPRLSSQRRPPPPFSYYSKHDEARRGDRPGGRRGGAAFLVPAAEDGGGRRVVQEAGGAGGPRPRRRGVLARLHEGLVAQAQAHGARARRRRRGARRLDGAAPVGIGPLRRAGGGGQGEAGRGVPGLRRHAVPDRGGPRPRRHDGRDEGRGARRGGALPDSDRQRAVPGQGVQLRAASGALLRGEPRDGHPGAHRRRQPPPRQRQGGGGGGGVVGALPAGERVPAGDAGGVRGAGGQGGARHPGRQGGGQQVLPVGPLPVRGGGVLGRALRAGPRRAEGPPGPAPHPGPQGAGGPPHDPLGQGQGAGVPAPRPRLRRRRRRPRRRLPHLRRRRPHRRGRLQGAARARAGRRDPRVQVPQGDKRVLHATRPRRGQGVPAQARRRQRRQLMIPRFVSRRDQLRSACVKPLTQPRLPTCCTGRGLPCCCNCISIEQLALGQEQT

SEQ ID NO: 47175 - protein, 276 aa, Zea mays
  Clone ID: UC-ZMFLMO17240D03_FLI.pep
DYIFSYVKTFRAHPDRLLPDRALVGMAQHFMRSYSHLLIHTCHRRGVHAMGGMAAQIPIKDDAAANEAALELVRKDKLREVRAGHDGTWAAHPGLIPAIREVFEGHLGGRPNQIGDAAGHEGASVKEEDLIQPPRGARTVDGLRLNVRVGVQYLAAWLAGSGSVPLYNLMEDAATAEISRVQNWQWLRHGAALDAGGVEVRATPELLARVVEEEMARVEAEVGPDRFRKGRYAEAGRIFSRQCTAPELDDFLTLDAYNLIVAHHPAIEIRTDDQQT

SEQ ID NO: 47176 - protein, 455 aa, Zea mays
  Clone ID: LIB3151-061-F2_FLI.pep
RATTACSTQRPSISLLPRLSSQRRPPPPFSYYSKHDEARRGDRPGGRRGGAAFLVPAAEDGGGRRVVQEAGGAGGPRPRRRGVLARLHEGLVAQAQAHGARARRRRRGARRLDGAAPVGIGPLRRAGGGGQGEAGRGVPGLRRHAVPDRGGPRPRRHDGRDEGRGARRGGALPDSDRQRAVPGQGVQLRAASGALLRGEPRDGHPGAHRRRQPPPRQRQGGGGGGGVVGALPAGERVPAGDAGGVRGAGGQGGARHPGRQGGGQQVLPVGPLPVRGGGVLGRALRAGPRRAEGPPGPAPHPGPQGAGGPPHDPLGQGQGAGVPAPRPRLRRRRRRPRRRLPHLRRRRPHRRGRLQGAARARAGRRDPRVQVPQGDKRVLHATRPRRGQGVPAQARRRQRRQLMIPRFVSRRDQLRSACVKPLTQPRLPTCCTGRGLPCCCNCISIEQLALGQEQT

SEQ ID NO: 47177 - protein, 339 aa, Zea mays
  Clone ID: LIB3608-008-E7_FLI.pep
EASSSNKKPSSIHVSTNGGARRTAEEGVVSGPPASLVGGGPGLPGRPSHGRGEQDRAGDRVLGPEQGRGHAARGLRLGPLHHGDHVLPRRLRPAARRLPPVPPGPVGAPDGRHRGRHQALPVRGRAGDALRRRLRLRLLAPVHAGGAGPVRLPLERLPRRVEARRAPPLRRRVARRRRPVPGARLARRPLRRAGARARQAQHPRRARQAAAPDGHAALRLPARRLPAPRARHGHLRARPRPDLRRRRLRGQVAPRVGRVDGGVPGHQVLRRPHGVGDDARLGAPQERLLRRRAVRAEGGQLRRLHDLGPLLRQTLQLHQHGQGLRLIGFLDSVQSRHAC

SEQ ID NO: 47178 - protein, 363 aa, Glycine max
  Clone ID: 701210095_FLI.pep
NTEGSRSATNGVLPLARKVALITGITGQDGSYLTEFLLDKGYEVHGLIRRSSNFNTQRIDHIYVDPHNAHKARMKLHYADLSDASSLRRWLDTILPDEVYNLAAQSHVAVSFEIPDYTADVVATGALRLLEAVRSHIAASGRSHIRYYQAGSSEMFGATPPPQSETTPFHPRSPYAASKCAAHWYTVNYREAYSLFACNGILFNHESPRRGENFVTRKITRAVGRIKVGLQSKLFLGNLQASRDWGFAGDYVEAMWLMLQQEKPDDYVVATEESHTVEEFLEVAFGYVGLNWRDHVVIDKRYFRPSEVDNLKGDASKAKKVLGWKPKVGFEQLVKMMVDRDIEMAKKEKVLVDAGYIDAQQQP

SEQ ID NO: 47179 - protein, 265 aa, Zea mays
  Clone ID: 700099110_FLI.pep
SHSTTPSSCHPPAAVQAYGAPCQPAPRRGAPRRRRCRGGAADVRAHRVPAVRGGGQRQRVRDPAVHGRHVDHHGAHRGHLLRRRHAHRLPPAVRLHPGQERVQRDDRDDGAGADAGVAQRRALLRLRLRRELLRAGQEPGGPAAGRGPARGPLGRGQVRGRAPLRRLRGGRRRRGAGGAPRGQPPGHPVGRRRQRRAQGRPGLALHRRAVQLALRVHRQGQRDLDALRRRRRGRRRQYVMRFQACSRGTEAFREGRACTCAAVLQ

SEQ ID NO: 47180 - protein, 291 aa, Zea mays
  Clone ID: 700093324_FLI.pep
LPSRQAPARHPPTPPLHRAGIQRRTGQAEKSRPDETSCVASSLPFPFFSSPAAAAAAALRPRPDPATPTDLPASSMAAGAGARAKAAGALALALVLALAGANSEGDALSALRRSLRDPGGVLQSWDPTLVNPCTWFHVTCDRDNRVTRLDLGNLNLSGHLVPELGKLEHLQYLELYKNSIQGTIPSELGNLKNLISLDLYKNNISGTIPPSLGKLKSLVFLRLNGNHLTGPIPRELSGISSLKVVDVSSNDLCGTIPTSGPFEHIPLSNFEKNPRLEGPELQGLAIYDTNC

SEQ ID NO: 47181 - protein, 440 aa, Zea mays
  Clone ID: 700334655_FLI.pep
FDTMDGRRTILMGRYEIGKQLGQGTFAKVFYARNLTTGLAVAIKMINKDKVMKVGLMEQIKREISIMRLVKHPNILQLYEVMASKSKIYFVLEYAKGGELFNKIAKGGKLSEDVARKYFQQLVSAVDFCHSRGVYHRDLKPENLLLDENENLKVSDFGLSALAESKRQDGLLHTTCGTPAYVAPEVLSRKGYDGAKADVWSCGVILFVLVAGYLPFHDTNLIEMYRKISRAEFRCPRFFSTELKDLLHKILVPDPSTRISISRIKRSAWYRKPVEAHAKKNEAETSENTCTGEGTTSVSTECSTSEGNQGPLSLPNLNAFDIICLSTGFNLSGFFEDKYGRREERFTTRQPVTTVFTKLKELAKRLKLKVNKKENGTLKLAAPKEGKKGMLELDAEIFEVAPSLLLVELKKNQWGHAGVSKASERGDKAGTEGYCLGLAR

SEQ ID NO: 47182 - protein, 324 aa, Zea mays
  Clone ID: LIB3079-035-G4_FLI.pep
LQAPPTFMAVRPPISVSPPGATPPQGPIALTPPNMPTMYRGQHPPVPNFTGSAPLVSRPPGGGAQSFPTAAPQGPSSVAFPGGPSLRPPYPPAPDQARGPPPAFSPVGSTPGMVPPPIASSGLPAPRPANTSCIQTQVVAPLRPPLPAAGDFTFRPAIPPAHAPEFAAPGSQMGAIHGRTHHPGPFSSHPGDQKNPSQGFQGPFDGSRPMYTTNQARMHAPPPPHFHGAFPRNASPLEFPAGFRGAWPSVQAPPMPAPSHPSSFPPFQLRPPPPPQQDMSGAGGTRWPGGNQIYNPFAPTAAAAAQRAEADPEYEDLMASVGMK

SEQ ID NO: 47183 - protein, 128 aa, Zea mays
  Clone ID: LIB3079-037-H5_FLI.pep
SANRRSEERPAAVEHLGRGLLLLPGGGRLLHRGRVGTSGVCAGCGCCGTALPAATVVYVQGWKLHFGQGIRELLHTLHVHVHDLVPVHLHLLLDVDADHRLVHGSLRRGAGRVRRRDLLDGAGRVDLR

SEQ ID NO: 47184 - protein, 280 aa, Zea mays
  Clone ID: LIB3079-050-D4_FLI.pep
QQSQRKVVLMSTVTLPTLSRCLVELEGLHHLPGEVGVVTAEVAVGGGLDEPVAALLQVEVDADHPGPEVEVLLHDLEDLLVGDRAGAVRVDEHGQGLRHADGVRHLHEAAAGEAAGHDALGGLPGHVGAAAVHLGGVLAGEGATAVGSPAAVRVDDDLAAGEAGVTVGPADDEAPGRVEVEDGLLVEVLLRDHGLDDVLLEVGGDLVVGDGLVVLGGDEHGVHADGHHGAALVHVLHRHLGLAVGPQPGAGAVLAHLGEARAQLGGQHVAQRHQLGGLVG

SEQ ID NO: 47185 - protein, 418 aa, Zea mays
  Clone ID: LIB143-064-E11_FLI.pep
TCTKSSCLRAEAGSVSHAGGVQIMEDFGGWNMQYAAELCLPSRRDDDDDGLLGDFLGGGGLDIRSDHGGLNLPSSHPAVQNLVPCHGGVSLSVSDAFMGLDTADMLASVTGALDCSLLDTFACGSDAVVVAEEPAAQPTASSNAFSGYSSTTGGNYGNISSGESNTYGGSGGGHDTEVASPTCASKRKLAGKYPAIAASASATATTTTAEGQVAAPRRGTKRDSATSSSSTSTTVAGHGGGNHAAGGGGSSSVGDGNGYEPDSEAIAQVKEMIYRAAAMRPVHQLVCGAAGGEPPSSSQNKPRRRNVRISSDPQTVAARLRRERVSERLRVLQRLVPGGSRMDTASMLDEAAGYLKFLKSQVKALERANPSSNGGYNDSSFLPQNYTGCLCVDGGTSVAFGSDGAIGGYVKPGRNMHR

SEQ ID NO: 47186 - protein, 155 aa, Zea mays
  Clone ID: LIB3150-021-H12_FLI.pep
FILLNHLWLLIYHLSKLCLCQLLIEPCLHEILLQITWNSLMGEVFGVVVEALGVEGCTAGCRLVRTSVVLLHGIDLRTGAARGVDGLLILLGGGGGCLLPHNDRLPVLPDRSDPGHPLIPPSQSLSLRSLHGSLSRVSHSSLSLSLLSLFSLSLS

SEQ ID NO: 47187 - protein, 597 aa, Glycine max
  Clone ID: 700894129_FLI.pep
KHKKKVSGPKIQQECKMVVAEFTSGGLRGMKAFSYHVLTGRWFMLFASLLIMSVAGATYMFGIYSNEVKTSLGYDQSTLNLLSFFKDLGANVGVISGLVNEVTPPFVVLSIGVIMNFFGYFMIFLAVSGRIAKPQVWQMCLYICIGANSQTFANTGALVTCVKNFPGSRGSILGLLKGYVGLSGAIITQLYHAFYGNHNSQALILLIAWLPAAVSSLFLPTIRIMNTVLHQPKEGNRVFYHLLYISLGLAAFLMVLILVQNKLSFSRIEYIVDGLVVFFFLLLPLVVVFREEINQLKANTQCLTDSPPQLKVVTEAIPPPNVEQEEVPPTTTSSHEKSSCLRNIFNPPKRGEDYTILQALFSIDMLILFIATTFGAGGTLTAIDNLGQIGHSLGYPNKSTTTFVSLVSIWNYLGRVASGYASEIFLTKYKIPRPYMLTLVLLVSCVGHVLIALGVPNSLYFASVIIGFCFGAQWPLMFAIISEVFGLKYYSTLYNFGAAASPLGSYILNVKVAGVLYDKEALKQLKAKGLTREEGKDLTCVGVQCYKMAFIIITASTLVGCLASVILALRTRKFYKGDIYRKFRMEHEAMEITKTAN

SEQ ID NO: 47188 - protein, 456 aa, Zea mays
  Clone ID: UC-ZMFLMO17047E05_FLI.pep
QRPSLAPYILPPPARARACTLASCRSPRHHGVRRERQQVGGGGVGEPSPRDPDARVRAAGARGAVVDGVREPAHHGVLRRDVHLRELLRHAQVVARVRPAHAQHRVLLQGPRRQPGRLLGAHQRGDPAVGGAGHGRRHEPVRVPHGVPGRVRAHRAAAAVARVPLLLRGRQLAVVRQHRRARDLRQELPRQPRGGARHPQGLRRPQRRRVHAAVPGPVRRRRRRVADPPRRLAPRGGVRRVRPHHPVHAVPAPPWRRAGDEQLRLRPLLLLPLPLHRAGVLPPRHDRGAEAGALLPRRVRLGRHAAAHPPPHAPRRRRQAGVQDLPGAPARRRRPAAADHRLRVGNGRHQENRAAAGVVVVLWVREDHVPSAGSWGGLHDPAGAGERGHAGAVRGDNLRRGRDADGDRQHGADRRVAGLPRQERQHVRVPDQHLELRGARDGGLRLGGGAGPVPRA

SEQ ID NO: 47189 - protein, 481 aa, Glycine max
  Clone ID: 700653979_FLI.pep
PSGKYLFAGVVDGRNIWANDLAASLTTLQGLEGIVGKDKLVVSTSSSLLHTAVDLVNETKLDDEIKSWLAFAAQKIVEVNALAKALSGNKDVAFFSANAAAQASRKSSPRVTNEAVQKAAAALKGSDHRRATNVSARLDAQQKKLNLPILPTTTIGSFPQTVELRRVRREFKANKISEEEYVKSIKEEIRKVVELQEELDIDVLVHGEPERNDMVEYFGEQLSGFAFTVNGWVQSYGSRCVKPPIIYGDVSRPKPMTVFWSSLAQSFTKRPMKGMLTGPVTILNWSFVRNDQPRSETTYQIALAIKDEVEDLEKAGITVIQIDEAALREGLPLRKSEQAHYLDWAVHAFRITNVGVQDTTQIHTHMCYSNFNDIIHSIIDMDADVITIENSRSDEKLLSVFREGVKYGAGIGPGVYDIHSPRIPPTEEIADRINKMLAVLEKNILWVNPDCGLKTRKYTEVKPALTNMVAAAKLIRNELAK

SEQ ID NO: 47190 - protein, 63 aa, Glycine max
  Clone ID: 701059739_FLI.pep
IIQRILMALKSIFNRCLSNNYVMLGSSSFCGYDALFASKKLIHYSNASMQLLIKLCGTINKIA

SEQ ID NO: 47191 - protein, 530 aa, Zea mays
  Clone ID: 700806549_FLI.pep
SNWRKSDDPFSPEPNGYLHIGHAKAMFIDFGLAKERNGHCYLRFDDTNPEAEKKEYIDHIQEIVHWMGWEPYKVTYTSDYFQALYEHAVELIQKGLAYVDHQTAEEIKEYREKKMDSPWRGRPIEESLKLFEDMRRGLIAEGAATLRMKQDMQNENKNMSDLIAYRIKFTPHPHAGDKWCVYPSYDYAHCMVDSLENITHSLCTLEFDIRRPSYYWLLVALGLYQPYVWEYSRLNISNTVMSKRKLNRLVTEKWVDGWDDPRLLTLAGLRRRGVSSTAINSFIRGIGITRSDNSLIRVDRLEYHIREELNKTAPRTMVVLRPLKVVITNLEEGKVLDLDGKMWPDASDTDASSHYKVPFSRTVYIEKTDFRLKDSKDYYGLAPGKSVMLRYAFPIKCTDVISGDSPDDIVEIRAEYDPLKTSKLKGVLHWIAEPAPGVEPLKVEVRLFEKLFMSENPAELEDWLGDLNPHSKEVIKDAYAVPSLATAVLGDKFQFERLGYFAVDTDSTPEKLVFNRTVTLRDSFGKAGPK

SEQ ID NO: 47192 - protein, 355 aa, Glycine max
  Clone ID: 700872389_FLI.pep
GVLVCAAGQEFRGDVALCTVPLGVLKKGDIEFVPELPQRKKDAIHRLGFGLLNKVAILFPYNFWGGDIDTFGHLTEDLSMRGEFFLFYSYSSVSGGPLLVALVAGEAAIRFEMMLPVESVKRVLDILKDIFNPKGIVVPDPVQAVCTRWGKDHFAYGSYSYVAVGSSGDDYDILAESVGDGRVFFAGEATSKQYPATMHGAFLSGMREAANILRVAKRRSSMTIDTTKSVNQENDDLNKLFVKPDLTFGSFSALFDLNLNDHDSSSLLRVKIGGVVLDSGSLYLYAWLSKKRVIELSQVEGDENRMRMLNRNFGVSLVGRKGLSSAAESLIANIKLSRPNFNETENGLMAEKENS

SEQ ID NO: 47193 - protein, 85 aa, Zea mays
  Clone ID: LIB3078-047-F6_FLI.pep
MEKEGSSEGVGIISDSSEPNEEMSGGYRKEKCKERRPGMDISSFRRLSIYSFFVDLTRFLYSWDEIVYWLYVHCMQHETFICSVV

SEQ ID NO: 47194 - protein, 161 aa, Glycine max
  Clone ID: 700739717_FLI.pep
SSSMEEEHQCSGSGEEPQTQEPDGEDQQLQHQCQVPRAEEKFVLQFMDSMDNYLSLFDAVSSTLRQGWFDLASARHSMGASRINSSLLDLKFHSAATTLKITNYDGTQPCFMLRKWVSSEHESSQLEDENVQSQDGSSVKSSGMVFLSLCISIIQFFFIRC

SEQ ID NO: 47195 - protein, 765 aa, Glycine max
  Clone ID: 700725166_FLI.pep
GSGMWRLKIADGGNDPYIFSTNNFVGRQTWEFDPEAGSPEERAQVEAARQHFYHNRFKVKPCADLLWRFQVLRENNFKQTIPRVTIEDGEEITYQKVTSAVRRGAHHLAALQTSDGHWPAQIAGPLFFLPPLVFCMYITGNLESVFPEEHRKEILRYTYYHQNEDGGWGLHIEGHSTMFCTALNYICMRMLGEGPNGGHDNACARARKWIRDHGGVTHIPSWGKTWLSILGVFDWCGSNPMPPEFWILPSFLPMHPAKMWCYCRLVYMPMSYLYGKRFVGPITPLILQLREELFTQPYEKVNWKKARHQCAKEDLYYPHPLIQDLIWDSLYIFTEPLLTRWPFNKLIREKALQVTMKHIHYEDETSRYITIGCVEKVLCMLACWVEDPNGDAFKKHLARVPDYLWVSEDGMTMQSFGSQEWDAGFAVQALLATNIIEEIGPTFAKGHDFIKKSQVKDNPFGDFKSMHRHISKGSWTFSDQDHGWQVSDCTAEGLKCCLLLSMLPPEIVGEKMEPERLYDSVNVLLSLQSKKGGLAAWEPAGAQEWLELLNPTEFFADIVVEHEYVECTGSAIQALVLFKKLYPGHRKKEIENFITNAVRFLEDTQTADGSWYGNWGVCFTYGSWFALGGLAAAGKTYTNCAAIRKAVKFLLTTQREDGGWGESYLSSPKKIYVPLEGSRSNVVHTAWALMGLIHAGQADRDPMPLHRAAKLLINSQLEEGDWPQQEITGVFMKNCMLHYPMYRDIYPMWALAEYRRRVPLPSTEV

SEQ ID NO: 47196 - protein, 289 aa, Glycine max
  Clone ID: 700855803_FLI.pep
EDLKVSDFGLSTLPEQRRADGMLVTPCGTPAYVAPEVLKKKGYDGSKADLWSCGVILFALLCGYLPFQGENVMRIYRKAFRAEYEFPEWISPQAKNLISNLLVADPGKRYSIPDIMRDPWFQVGFMRPIAFSIKESYVEDNIDFDDVENNQEEEVTMRKPARPFYNAFEIISSLSHGFDLRSLFETRKRSPSMFICKFSASAVLAKVEAVAKKLNFRVTGKKEFVVRMQGTEEGRKGKLAMTVEVFEVAPEVAVAEFTKSAGDTLEYVKFCEEQVRPSLKDIVWSWQGD

SEQ ID NO: 47197 - protein, 314 aa, Zea mays
  Clone ID: LIB3079-023-G5_FLI.pep
RRSFAQFWSSGQQGRGGTRGSEARERASGGRRRMMHAKSESDVTSLAASSPPRSPKRGVAAAGTGGGGGGYYVQSPSRESHDGGGGGRKVLNDKGWPECSVIEEEGPYEGLGAGDSGLSRRCQIVLGFLTFVLLFTVFCLVIWGAARPYEPEVVVKSLVMDDFYAGEGTDHSGVPTKLVTTNCSLHVSVYNPATMFGIHVTSGPIRLIYSEISIAVGQVRRYYQPRKSHRTVTAVIHGEKVPLYGAGGGLTLSTSAGGGAVPLTLDFDLTSRGYVIGRLVRVTHRAHVTCPVVVDARRTKPVRFSKKACAVYKA

SEQ ID NO: 47198 - protein, 272 aa, Zea mays
  Clone ID: LIB3079-043-G3_FLI.pep
SPVPLPPAGRAAPANLTHRNTKAPKAQTHHLPMENGDETLASPTAAAETDALNGGVAEEEQVPITHPAKSYVTLADDNPAPNGGVVKEEEGGAHTTAKSYAAVAAQAEIEDLRAAKLDLEEKLAEARRENKSLAEETHRSEGIFTQAREEVTIAEFAATSAEKEVASLRAEVERLDAVLRIEKGEHELDKQRHEKVAKEVDAVRQEKLKLEEEIRALKASATAAATTKEREAAPASEAPKEGEVAWLGMAVAAAAGAAGTAAIMLVYLRLKR

SEQ ID NO: 47199 - protein, 298 aa, Zea mays
  Clone ID: LIB3079-043-H2_FLI.pep
PARGVVAPAAVAPARAGGRRRRLNRQAGRAVVRRPRRRAAGPGPAAHPHAPRRQVHCRLLRRRRRRWWRGAEDIRVGVRRVPERVRGARARPAVAQLLPRLPHRLHRHVAAGQRAVPLLPERRHAAGDPVGAARPGGGGGGPSHQQAPGRRARQRKHCDRGARGAREVVQQQPRDDDDDAPAPAAEAAGAAVQQGGGERRRRGHRHEEDGRGVRGAALAAVRLPGLLLRQAPLRVHPGAPRHAKVGRRRRRSTVSPAGRPTASCASFQDGRPLPLRTRRSSDLFCAPDQAAINDAGVG

SEQ ID NO: 47200 - protein, 239 aa, Zea mays
  Clone ID: LIB3088-043-B6_FLI.pep
ASFICRTYVWYSCDGLGLHRQGPHHREQRRAREGAGRGAARRRRPLRGVPVRHPGVPGHALRALRPPVLRRRRHRRHGGLHLRQRRRGAPELRHPGPEAEPRAEGHGDGAGPHRPQPELRHLHPPLQDHRRAGPRRHAGVPGPSVAEVLADGRHGELPRPLALAGRVARVVGPVRSEHVVLRGVRQYRAWCRNESASDVDWGAHVTVQVRCREVYRGGIHPRRRMVGWHWSQLYFRTVR

SEQ ID NO: 47201 - protein, 144 aa, Zea mays
  Clone ID: LIB3115-001-B7_FLI.pep
RRALQALEAGEGARCGAGGHGHGEEARVLLQQPAAAAAPAPVEVLELRVSEVGDRVLVVNVTCSKGRDAMARVCRAVEELRLRVITASVTSVAGCLMHTIFVEVRRRQVDSDQTNRIQIKHMIEAALAQLDDASASPPSVMSYY

SEQ ID NO: 47202 - protein, 185 aa, Zea mays
  Clone ID: LIB3115-024-C1_FLI.pep
FASPHLHQRAETTRSRPSKARRTRERQQAPGRDQSSVHGEPKGAAGPRRGGRQRLDDGAGVRGLGHEERRAAGLLHGLLQDPRDAQAEQEGALPRQPRRRRRPPRPRPEAAAQYRPAQARPPPPRPRRRPLPNGREEVPELLPVLYQGLKRCCSSACSPCVFFSQQNTCEQSGLGFVKYPVSKNV

SEQ ID NO: 47203 - protein, 148 aa, Zea mays
  Clone ID: LIB3079-043-C9_FLI.pep
HDRIIMQSFFDRKKPKMNLKKKFRELSQSRAVKAIQGRFQTPRSKVIWQTAIAFVLLGVLTLAFPTEEGPTLQVAISCAANIYFIYQRVKSGWRAFFYGFGSFFASWFLGTFLMVSVIPPILPGPRNLEVSTACVTYVLLFISSTFLK

SEQ ID NO: 47204 - protein, 64 aa, Zea mays
  Clone ID: LIB3088-038-E5_FLI.pep
YTHYRRVQHSGGFLTVPMERYTHTQRQSPLNNVFYNTMAFTIYALHMYYVASDASSEEERKALL

SEQ ID NO: 47205 - protein, 343 aa, Zea mays
  Clone ID: LIB3117-013-A12_FLI.pep
EEPAGWFQGTADSIRKFIWVLEDYYSHKSIDNIVILSGDQLYRMNYMELVQKHVEDDADITISCAPVDESRASKNGLVKIDHTGRVLQFFEKPKGADLNSMRVETNFLSYAIDDAQKYPYLASMGIYVFKKDALLDLLKSKYIQLHDFGSEILPRAVLDHSVQACIFTGYWEDVGTIKSFFDANLALTEQPSKFDFYDPKTPFFTAPRCLPPTQLDKCKMKDAFISDGCLLRECNIEHSVIGVCSRVSSGCELKDSVMMGADTYETEEEASKLLLAGKVPVGIGRNTKIRNCIIDMNARIGKNVVITNSKGIQEADHPEEGYYIRSGIVVILKNATINDGSVI

SEQ ID NO: 47206 - protein, 85 aa, Zea mays
  Clone ID: LIB3116-016-D1_FLI.pep
YIYYNIHVMIALQSNNDQHCTLWYTYIKVHLVFAHSPPTQPVLFLTMLYVLYIYTHGLNCLSLHEGHDGTHREPRWGTSCGSLGN

SEQ ID NO: 47207 - protein, 103 aa, Zea mays
  Clone ID: LIB3079-015-H10_FLI.pep
GRGIERVDVSADGGKTWVEARRYQKDNVAYVSDGPQSDKWAWVLFEATLDVPANPEIVVKAVDSAANVQPEKVEDIWNLRGILNTSWHRIKIQRSSCVERSKL

SEQ ID NO: 47208 - protein, 423 aa, Zea mays
  Clone ID: LIB3079-026-F3_FLI.pep
QDSPVLAHPPGLATMRGLLACATLARRAAASSAPARVRHLAGAAEAAEAELKRTALYDFHVAHGGKMVPFAGWSMPIQYRDSIMDSTVNCRANGSLFDVAHMCGLSLKGRGAIPFLESLVVADVAALRDGTGTLTVFTNEQGGAIDDSVIAKVTDHHIYLVVNAGCRDKDLAHIEAHMEAFNKKGGDVKWHIHDDRSLLALQGPLAAPTLQLLTKEDLSKMYFSDFKMIDINGYACFLTRTGYTGEDGFEISVPSENAVDLAEAILERSEGKVRLTGLGARDSLRLEAGLCLYGNDMEQHITPVEAGLSWAIGKRRRAEGGFLGADVILKQLQEGPKIRRVGMVTQGPPARSHSELVSGSGERIGEVTSGGFSPCLKKNIAMGYVKSGMHKAGTELKVVVRGKSYDAVVTKMPFVPTKYYKPS

SEQ ID NO: 47209 - protein, 160 aa, Zea mays
  Clone ID: LIB3079-037-B8_FLI.pep
FLLWTVRVCVVQGRGGVAVAAGSDDGLAVTEQQVAKLMEEDMGTAMQYLQGKGLCLMPVSLASAISSATCHMRPPVGGPGLGVAAAAAHHMAAMRLPPHAMNGGAGAGADAVPASPSMSVLTAQSAMAPNGAGGGTDGEGSHSQQQQRHHPKDAASVSKP

SEQ ID NO: 47210 - protein, 218 aa, Zea mays
  Clone ID: LIB3088-011-F5_FLI.pep
PAPALDWCVRYDIALGTAHGLAYLHDDCRPAIIHRDIKPSNILLDKDMVPHISDFGIAKLLEQPSTAPQTTGVVGTIGYMAPELAFSTKSSMESDVYSYGVVLLELLTRRAAVDPSFPDGTDIVSWASSALNGTDKIEAVCDPALMEEVFGTVEMEEVSKVLSVALRCAAREASQRPSMTAVVKELTDARPATGGGRSLSKSKQGKPGSQSNSSAYRQ

SEQ ID NO: 47211 - protein, 490 aa, Zea mays
  Clone ID: LIB3150-030-D3_FLI.pep
RGSQTILFRFRLRTLGFLCLASEAMQPPHQPPMNGQHSQPPPQGPGVPMPPQQQAPPLPYYQQQQAPQYYQQALPQPWGQQQQYAAPPPQYPPPPQTQQYATPPQQYAPLPQQQYAPPPQQQYAPSPYGTTPGSGEVRTLWIGDLQHWMDENYLHYNAFAAVAQQIASVKIIRNKQTGHSEGYGFIEFYSRAAAEHTLMNFNGQMMPNVEMTFKLNWASASTGDKRGDSGSDHTIFVGDLAHDVTDSMLEDVFRAKYPSVRGANVVVDRMTGWPKGFGFVRFGDLNEQARAMTEMNGMLLSTRQMRIGAAANKKNRDAQQTYATDGAYQSSQGNSSENYPNNTTVFVGGLDSNVNEEYLRQIFTLYGEISYVKIPVGKHCGFVQFTSRSCAEEAIRMLNGSQVGGQKVRLSWGRSPQNRQASQHDANNQYNGNSYYGYQQPGYEGYGYGASSAQDPSIQNYYGYSGCGNYEQQQPTQEQQLQQPPPPQQQ

SEQ ID NO: 47212 - protein, 351 aa, Zea mays
  Clone ID: LIB3136-044-A1_FLI.pep
VRRSPSIRTFWRKPPRLPPRLPPNEIYKNNSLLQQSPSEWTSRQKKVKEAFEHAWSGYQKYAMGYDELMPLSHRGTDGLGGLGATIVDSLDTAIIMGADDVVSEASKWIEDNLMKRISEKGQVNLFETTIRVLGGLLSAYHLSGGDHPGAGDSGVTVTYKKANPERLLEVSKDLADRLLLAFTSSPTAIPLSDVILRDHTAHAAPDGLSSTSEASTLQLEFSYLSKVLGDPKYDRAAMKVLEHIHTLPKVEGLVPIYINPSSGQFSGENIRLGSRGDSYYEYLLKVWVQQEEYRHSSLKYLFEMYTEAMRGVKHLLVRKTVPNGLVFVGELPFGRNGGFSPKMDHLVCSCR

SEQ ID NO: 47213 - protein, 123 aa, Zea mays
  Clone ID: LIB3136-035-C12_FLI.pep
ENQTVCTYITVKLKLHNVLHLPTIQYSIIRSTRLGSRSIKITIVKGKITHREKSPKAENIPAHTNQFLKWLRHCSSSPAWSIRCGMNPDSQCAHRCVHQTDPSALGSDLQAIDLICRYRSTKG

SEQ ID NO: 47214 - protein, 331 aa, Zea mays
  Clone ID: LIB143-040-B1_FLI.pep
NLQPDAGAGAAARLLVTFPGARQAPRPGLPSSIHQPPAAAEMAAPTTLRSAAARARARAAELVRGRWPQRRLGTTSAAETESKKNKEEEEEGAGWELSAAREYYDYRKSIYGDVTHRALLVDAVGTLVVPAQPTAQVYKSIGEKYGVKYSEDEILMRYRRAYEQPWGGSRLRYVDDGRTFWQHIVTSSTGCSDAQYFEELYQYFMTEKAWKLCDPDAESVFKALRKAGVKTAVVSNFDTRLRPLLQALKCDHWFDAVAVSAEVAAEKPNPIIFLKACELLGVKPEEAVHVGDDRRNDIWGARDAGCDAWLWGSDVRSFKEVAERIGVEVTK

SEQ ID NO: 47215 - protein, 491 aa, Zea mays
  Clone ID: LIB3115-029-F11_FLI.pep
SWPASRRQQERGRMGRAFVYVILGGGVAAGYAALEFARRGGYSRGELCIISEEAVAPYERPALSKGYLLPEGAARLPGFHTCVGANDELLTPKWYKEQGIELVLGTKVISADVRRKTLLTGTGETISYKTLIIATGARALKLQEFGIQGSDASNICYLRNIDDADKLVSVMKSCPGGNAVVIGGGYIGMECAAALVTNKIRVTMVFPEKHCMGRLFTPKIAEFYENYYTSKGVTFVKGTVLTSFEKDTTGKVTAVILKDGRHLPADMVVVGIGIRANTSLFEGQLMMSTENGGIKVNGQLQTSDSSVYAVGDVAAFPIKLFDDDIRRLEHVDSARRTGRHAVASILDPSKTRDIDYLPFFYSRVFTLSWQFYGDNVGEVVHFGDFTSSSPRFGAYWVNKGRIAGAFLEGGSREEYEAISIAVRREAVVTDMGELEKQGLALAIQESQKEVPDSGLAVVGKPTYAWHATAGVIAAVSIAAIGYWYGRKRRRW

SEQ ID NO: 47216 - protein, 269 aa, Zea mays
  Clone ID: LIB3079-054-E6_FLI.pep
VIEESVQESAKKLLSKLTEFSDTTIDPSLPKPAFQVARKAQGSVGKGRETTAVEMKKGDWLCTNCNFLNFARNRHCLECKADGPKKIEAAVDAMKMGDWICTQCQFMNFSRNKICFKCEEPHPKRQLNPGEWECPSCDFVNFRRNAICKKCNQDRPEDDTRDSQRGLRKTRGAGKFRRFDYIDQKSDDDDDNAWFQKRGASMRSKPDQRTTTAKSRGSDGLDDILVTTKRRSTKQDEDDEVLPYEGARKHVVSRRATPSQRRFTAARNQ

SEQ ID NO: 47217 - protein, 516 aa, Glycine max
  Clone ID: LIB3030-002-C9_FLI.pep
CACLLVLSASDPNGPLFYMGWYHVFYQYNPDSAVWGNITWGHAVSRDLIHWLYLPIALFPDKWFDVNGVWSGSATLLPDGKILMLYTGSTDQNVQVQNLAYPANLSDPLLLDWVKYADNPVLAPPPGIGPKDFRDPTTAWFGPDEKWRITIGSKLNGTGLSLVYKTQDFIHYEQNDHYLHQVPGTGMWECVDFYPVSVNGPNDVKHVLKASLDDTKVDHYAIGTYFIENDTWVPDNPHEDVGIGFKLDYGRYYASKTFYDQHKNRRILWGWINESDSETADLKKGWASLQTIPRTVVFDKKTRTNLVHWPVEEVESLRLGSSEFEGVVVKPGSVVPLDIGPATQLDVFAEFEIEFLASKGSGKDNIGCGNGAVDRSALGPFGILAIADDHLSELTPIYFHLSSTTKDGSSTTSFCVDETRSSKAPDVSKLVFGSKVPVLSDEKLSMRVLVDHSIIESFAQGGRTVISSRVYPTEAIYGAARLFLFNNATDINIKVSLKIWQLNSAFIRPFPFDQKL

SEQ ID NO: 47218 - protein, 55 aa, Zea mays
  Clone ID: LIB3088-020-H9_FLI.pep
LQLASINSFNLTQTSSNTRATLHGLRKKQRLHCYATLFRIVKATADKKLQCTRRF

SEQ ID NO: 47219 - protein, 242 aa, Zea mays
  Clone ID: LIB3137-050-C2_FLI.pep
FAKNALVKPVTVNVGRAGAANLDVIQEVEYVKEDARIIYLLECLQKTPPPVLIFCENKADVDYIHEYLLLKGVEAVAIHGGKDQEERQNAIDSFKTGRKDVLVATDVASKGLDFPDIQHVINYDMPAEIENYVHRIGRTGRCGKTGIATTFINKNQTETTLLDLKHLLKEAKQRIPPVLAELNDPLDDEEIIAKESGVKGCAYCGGLGHRVSDCPKLEHQKSMAIAGSRKDYFGGGGYRGEI

SEQ ID NO: 47220 - protein, 503 aa, Zea mays
  Clone ID: 700151728_FLI.pep
PASLTRDQDRWTSHRMDSPPEVFFTHIDGQNRSPPSIIVIGGGISGIAAARALSTASFNVTLLESRDRLGGRVHTDYSFGCPIDMGASWLHGVCNENSLAPLIRMLGLRLYRTSGDNSVLYDHDLESYALFDKHGQQVPQEIVSKVGETFERILKETVIVRDEHANDMPLFQAIGIVLDRNPHMKLQGLEYEVLQWCICRLEAWFATDMDNISLKTWDQEHVLTGGHGLMVNGYDPVIRALAQGLDIHLNHRVTKIIQRYNKVIVCVEDGASFVADAAIVTVPLGVLKANIIKFEPQLPKEKLSAIADLGVGIENKIALKFDTVFWPDVEVIGRVAPTSNACGYFLNLNKATGNPVLVCMVAGRFAYEIEKLSDEESVNFVMSQLRNMLPQATDPVQYLVSRWGSDPNSLGSYSCDLVGKPADLYERFCAPVGSLFFAGEAACIDHSGSVHGAYSSGIAAAEDCRRRLSAQLGISAGLFQVGKAAMREEMTAEAMVPFQISRL

SEQ ID NO: 47221 - protein, 347 aa, Zea mays
  Clone ID: 700150364_FLI.pep
ILAARTLSVSVSAAAGSSSIPVKMTARSALDEVTDTGAFDRSPSTFRSSVSRDGRFPAVAGRYHLYVSYACPWASRCLAFLKLKGLDHAIGVTAVKPIFERTKESDEHLGWVFPAAADEEPGAEPDPLNGARSVRELYEIASSNYAGKPTVPVLWDKQLKTVVNNESSEIIRMLNAEFNGIARNPGLDLYPAHLRASIDEANELVYDAINNGVYKCGFAKKQGPYDEAVTRLYEALDRCEEILGKRRYICGDQLTEADIRLFVTLIRFDEVYAVHFKCNKKLLREYPNLFNYTKDIYQIPGISSTVNMEHIRKHYYGSHPSINPYGIIPAGPNIDYNAPHDRERFSA

SEQ ID NO: 47222 - protein, 849 aa, Zea mays
  Clone ID: 700095546_FLI.pep
LAITVVINHGDLALAARLEPDAAAAGRLTARRTRRGGHGSDLAPRHAPRHHLRGRVALQPAPRHWRRPQVHPQACGRDRGHRGCRQGRHQDICHRRSREGRVGRTRMISNEPVNPRWYESFHIYCAHMAADVIFTVKIDNPIGASLIGRAYLPVQDLLGGEEIDKWLEICDEKREPVGDSKIHVKLQYFDVCKDRNWARGVRSTKYPGVPYTFFSQRQGCKVTLYQDAHVPDNFVPRIQLADGKNYEPHRCWEDIFDAISKAQHLIYITGWSVYTEITLVRDTNRPKPGGDVTLGELLKRKASEGVRVLMLVWDDRTSVGLLKKDGLMATHDEETANYFHGTDVNCVLCPRNPDDSGSFVQDLQISTMFTHHQKIVVVDHEMPNQGSQQRRIVSFIGGIDLCDGRYDTQYHSLFRTLDTVHHDDFHQPNFEGGSIKKGGPREPWHDIHSRLEGPIAWDVLYNFEQRWRKQGGKDLLVRLRDLSDIIIPPSPVMFPEDRETWNVQLFRSIDGGAAFGFPETPEEAARAGLVSGKDQIIDRSIQDAYVNAIRRAKNFIYIENQYFLGSSYGWKPEGIKPEEIGALHLIPKELSLKIVSKIEAGERFTVYVVVPMWPEGVPESASVQAILDWQRRTMEMMYTDIAQALEANGIEANPKDYLTFFCLGNREVKQEGEYEPEEHPEPDTDYIRAQEARRFMIYVHTKMMIVDDEYIIIGSANINQRSMDGARDSEIAMGAYQPYHLATRQPARGQIHGFRMSLWYEHLGMLEDVFQRPESVECVQKVNEVAEKYWDLYSSDDLEQDLPGHLLSYPIGVTADGSVTELPGMENFPDTRARVLGNKSDYLPPILTT

SEQ ID NO: 47223 - protein, 689 aa, Zea mays
  Clone ID: 700099305_FLI.pep
MDKSQMKMFVALRNHNDCLKEVAENASQAISIINEKHKRYLDEIEAFKSNHSRELQEIKRISGELEESIAELEESQRKLVVLQLQRHGSVMDASGANAVNGGISTHKSSDKSMSWQDLKDAVDAAKTLAGNRLLELHQTQEDNLILSKELGDLEGQLKDEKYVLVSKPYMILNDKLQHLNAEIERYRGLVEVLQNDKDQLMQREKEISAKAESLDSVKQTIITYEKKIEELETQIQILFSEKNDLETKVEETLQDSGKKDFKNEIHVMAAALSNELGMMENQLSRSKDAASEALALREQAESLRSLVAKKIEEHKKISDKYNSQVIEIKSLKALVEELEQEKQELEFIADMYVKESSESRTIADIEESETRARNQAEYLRSNLEEHSLELRVKAANEAEAACQQRLSFAEVELEELRTKVDASERDVVELKEAIRIKEAEGDAYISDIETVGQAYEDMQTQNQHLLQQLTDRDDFNIKLVSDSVKMKQACSSLLSDKLMLEKQLQQVNTSLESSKLKIARGEEQMKTCVAQAIKTSAENRHLTISLERIALELSNTDKELKWLRSSVGSSEKEYEQTQQKISELRALLEHERSERRRLEEQYEEVKNEVMELTSETEETTVRKLEDEIKECKGILKCGVCFDRPKEVVITKCFHLFCSLCIQRNLEIRHRKCPGCGTPFGQNDVREVKI

SEQ ID NO: 47224 - protein, 780 aa, Zea mays
  Clone ID: LIB143-064-F2_FLI.pep
ARLQLVEGIEDTVGIGKGTTKIYATVDLEKARVGRTRMVSNEPVNPRWYESFHIYCAHMAADVVFTVKIDNPIGASLIGRAYLPVEDILGGDEIDKWLEICDEKREPIGDSKIHVKLQYFDVGKDRNWARGVRSTKYPGVPYTFFSQRQGCKVTLYQDAHVPDNFVPRIPLADGKNYEPHRCWEDIFDAISKAQHLIYITGWSVYTEITLVRDTSRPKPGGDVTLGELLKRKASEGVRVLMLVWDDRTSVGLLKKDGLMATHDEETANYFHGTDVNCVLCPRNPDDSGSFVQDLQISTMFTHHQKIVVVDHELPNEGSQQRRIVSFVGGIDLCDGRYDTQYHSLFRTLDTVHHDDFHQPNFEGGSIKKGGPREPWHDIHSRLEGPIAWDVLYNFEQRWRKQGGKDLLVRLRDLSDIIIPPSPVMFPEDRDTWNVQLFRSIDGGAAFGFPETPDEAARAGLVSGKDQIIDRSIQDAYINAIRRAKNFIYIENQYFLGSSYDWKPEGIKPEDIDCLHLIPKELSLKIVSKIEAGERFTVYVVVPMWPEGVPESASVQAILDWQRRTMDMMYTDITQALEANGIQTNPKDYLTFFCLGNREVKQEGEYQPEEHPEPGTDYIRAQEARRFMIYVHAKMMIVDDEYIIIGSANINQRSMDGARDSEIAMGAYQPYHLATRQPARGQIHGFRMSLWYEHLGMLDDVFQRPESVECVQKVNKIAEKYWDLYSSDDLEQDLPGHLLSYPIGVTADGTVTELPGMENFPDTRARVLGNKSDYLPPILTT

SEQ ID NO: 47225 - protein, 186 aa, Zea mays
  Clone ID: LIB3079-024-H1_FLI.pep
VPQYPSNYQPHTANQAYAPQTSNYVAPWAQTGAYPPQPPAYASGYAYPAPPWVAPTHPVDSNPFLSVNYQDPRPAATSVAQTATYAPPPASYPPSISYAQFATPQSIQHSNSVASPSNGQIANQAQMNVNQQPKDSSAASSRPYYIPDNLFSDLIDAKSFGGGNKMGGPTTMGSSNGGQPMIGGKK

SEQ ID NO: 47226 - protein, 121 aa, Zea mays
  Clone ID: LIB3115-032-H10_FLI.pep
HRELSTSVYFVRCKLYNEPPICTFYGSGASAFSSMFYSQRTCAERREDTTLPVHPRHLALEGLDLSSTRLPIQTCVHDLRPIDQDQAQAERDDAEPGHDQGREEETDGALALQRRSCFRDY

SEQ ID NO: 47227 - protein, 49 aa, Zea mays
  Clone ID: LIB3079-014-F11_FLI.pep
FFVYSLDYARTRLANDAKAAKGGGERQFNGLVDVYRKTLKSDGIAAGIT

SEQ ID NO: 47228 - protein, 460 aa, Zea mays
  Clone ID: 700172475_FLI.pep
LLRLPHLRRPLLLERQALHPPPLGTLRRLAHRLVQCCRTVGGDHQRGLLPGAADPGDHPARHRRQERRRLPGVQVHGDRLPRRHPAQPRRHQQPPHHLPLLFRPVRRGLEHARCVCPDGCRADRCHREGQRRVRVHPLQHRQRRRHPQQLVHLCPGPAHEPVHAHRIRRLGAYDRRDEERGQERPHRHHQRHRHLHPRGLGLHPRRHLRGEGHTLPAEPRQRRRRLRHRRGVLPRLQEPLRQRRRRDRLPGGRRRRRLLLRHELRHQQLQDGLRLLQGRRHALLLRLAQGQQAGGAHQRRLALGSRRALHGAAVSGQPGGVPGHGFHRDDRAVHLVRAADPVPGDAGAQVLRAGAIQPGPLRRPGRLGRRALGGHHHRALLAAGHVPGHQGHAQLHPRRRRRPPLPRPRVLAAQRQALVQGPRHQSGRMNMYNWTCIVERLAETEELLPTTCCNYFVPKN

SEQ ID NO: 47229 - protein, 535 aa, Zea mays
  Clone ID: 700208540_FLI.pep
VHALRSSVAISRSVVTPGSGRPAPLDFEPRKKAAAHRFPSPIAAQEPEPRRRSAKITPPSPSSVPISSRAREAAGLGACIRALDMDQPEENPEFPSCDAYFEAIQSKKKLPLTLQESLTAAFAQIPVSSFPEVPAGRVIEIPGDTSVIDAVRTLSEQNIRAAPVLNPEPGAPTDWQGRYLGVIDYSAIILWVLENAELAAVALSAASATAAGVGMGAVGAVGVAALGTTGPAAVAGLTAAAIGASVAGGLTAEKGVAKDGLTAADHLGEDFYKVLLQQEPFRSTTVRSIVESYRWSPFVPITLDTSMLTVLLLLSKYRLRNVPVIEPEKPIIRNFITQTGVVKGLQQCKGRDWFDYISALPLSDLGLPFMSIDEVITVNSDDLILEAFKCMKDNKIGGVPVVEGPKRKLVGSVSIRDIRFLLLRPNLFSNFRQLTVIEFMKTLGSTLPDSESNCLVKPPPTCTPDASLGSVIDSIASRITHRIYVVDDDLEVVGVVTLRDVISCFIHEPPGYCDNYLASAMEKLEGKGVRSVEKI

SEQ ID NO: 47230 - protein, 334 aa, Zea mays
  Clone ID: 700201996_FLI.pep
FFSQIMVENLSVLRFSNLGFEPLWSRQYISCTFLIYCLDQRGSKQYIRNVQLIFSEDFGTEGRGGYFDGYGIIRDIMQNHLIQILALFAMETPISLEAEDIRNEKVKVLRSMKPLQLEDVVVGQYKSHTKGGTTYPGYTDDKTVPKDSVTPTFAAAALFINNARWDGVPFLMKAGKALHTKRAEIRVQFRHVPGNLYKGSFGTDLDRATNELVIRVQPDEAIYLKINNKIPGLGMRLDRSNLNLHYAARYSKEIPDAYERLLLDAIEGERRLFIRSDELDAAWSLFTPLLKELEEKRIAPELYPYGSRGPVGAHYLAAKYNVRWGDLSAEHYKA

SEQ ID NO: 47231 - protein, 275 aa, Zea mays
  Clone ID: 700238129_FLI.pep
VGLLSTMNHNIAYNLTWRKFTDPTRMTSNSVQEELGHSLLSSIKYAYKVDQRDSSIRPTRGYAFMSTSQVGGLAPESKYSRFLRQEFDLRVALPLGVLNGALNAGVAAGVIHPLERGSTGSVSPLVERFNLGGNRPLVCRLGGSSSLLGFKTRGLRATESRTHDLDNSDSGTSPNGDVAVTAFADLSFDLPLKPLRELGIHGHAFVCAGNLGKLTECDLGKFPVTDFLQTFRSSAGFGVVVPTRLFRIEMNYCCILKQLDHDRAKTGVQFNFSSS

SEQ ID NO: 47232 - protein, 608 aa, Zea mays
  Clone ID: 700244379_FLI.pep
EVSHNVEKCGVSDQACHGKCQSCGIDAKPFCAGVNEVSLLTGSHTGVEASKENCGACSFNNDRADALEEEAKVSTARIGHVESADPGGSVGVEKEIFMAVNEESEGEQAGATLEDLFFFNGEEDDDSDWEPASRLVVNRWFCLNCTMPNVDKITYCMNCRELPGSVVDGYDVFKKQIAQTALLSADTGLLPVSTAIGFDERMLLHSELEVKPNPHPERPDRLRAIAASLAAAGIFPSKCALVPPREITKEELLMVHSPDHIESVEQTKNMLYSYFTSDTYANGHSACAAKLAAGLCADLASLIVSGHVRNGFALVRPPGHHAGVKQAMGFCLHNNAAVAALAAKRAGAKKVLIVDWDVHHGNGTQEIFDRDKTVLYISLHRHEDGNFYPGTGAAHEVGVLDGQGFSVNIPWSRGGVGDDDYIFAFQTVVLPIASEFAADITIISAGFDAARGDPLGCCDVTPTGYSWMTSLLAGSSNGRLLVILEGGYNLRSISSSATEVVKVLLGEGPNRASFVVSPSKEALRTVSQVLKIQQQFWPVLGPTYASLQAQQGSVSSNHSNELKKRKRSGGGPGPFWWKMGSKRLLYEALIEPRSRPRKLKGSTGSAAP

SEQ ID NO: 47233 - protein, 565 aa, Zea mays
  Clone ID: 700256795_FLI.pep
GELDSYYHKTNRCRFRLDLSLFSSAIRLAQFVYCSSSSSAAPPVAARHRRRRADAESRTSPRGSGNAVLPSRGRSEVRCSPAGSAPSPPPMATVAPVVSDLVDFLNASPTAFHAVDEAKRRLKAAGFVQLSEREEWAGLEPGRKYFFTRNHSTIVAFAIGAKYVAGNGFHIIGAHTDSPCLKLKPVSKVTKGGYLEVGVQTYGGGLWYTWFDRDLTVAGRVIIREKKDGVVSYAHKLVRVQEPIMRIPTLAIHLDRTISSEGLKVNNQSHLVPVLATCIKNEMQKFVADNGPKQASENANTKHHPLLLQLIAKEANCEPGEICDFELQLCDTQPSVVAGATKEFIFSGRLDNLCMSFCSLKALIDSSSVEHSLDHESGVRMVALFDHEEVGSDSAQGAGSPAMLDALSRITGSFNSSGSKLLEKAIQRSFLVSADMAHALHPNYMDKHEENHQPKLHGGLVIKHNANQRYATNAVTAFIFREIAERHQLPIQDFVVRNDMACGSTIGPILASGVGIRTVDIGAPQLSMHSIREMCAADDISYSYEHFKAYFEEFTELDGKVKVDY

SEQ ID NO: 47234 - protein, 332 aa, Zea mays
  Clone ID: 700236583_FLI.pep
DRAAMVSDLELVERLQEVLRSSDLNTTTTAALRRRLEEDFGADLSHKKAFIREQVDLFLAEVAAKAEPEEPKEEEELEDAPVPKAEEAEEGEGVEEEGEGEEGGEEEEEEEEEEVDSSSARKKQRGNDGKKRGGGFTKLCSLSPALQEFVGASELARTEVVKKLWAYIRENNLQDQNNRRKILPDERLKKIFNVNSIDMFQMNKALTKHIWPLNSEGPVSPDRSTPKEKPQKKDRNEGKKQKGGSSGAGSGLLVPLQLSDDLMKFIGTGESMLSRSDVVKRMWDYIKENNLQDPSDRRKIICDEKLKDLLGVETFTGFTVSKLLAPHFTKTK

SEQ ID NO: 47235 - protein, 406 aa, Zea mays
  Clone ID: 700236927_FLI.pep
LLLFLDVAFLASRGVKRARVESKEPSVRVIYSDLTRESKRKLMQLMQQWSEWQARRMHHLEEAVEVTLESGEETYYPALHVGSEKSCAVSFWVDNQARESDTVDDGSVPLYDREFTLHSTPLGGSSNTERVDKDDSRCFNCGSYSHAMKDCPKPRDNVAISNARKQHNLKRNQSNVNRVQNRYYQKTPGKFDDLKAGVLGPETRQCLGIGENDPPPWLHRMRELGYPPGYLDVVDDEDRPSGITIFGDGEVKLEYEEGELSEQGEASPPKKKMTVEFPGINAPIPENGDQWLWGSTPPQSSGRHHSLDSRDFHDRGPPGADHYSPRYHSHDFGPLRPSIGRSHSDRGWRSPPRYDNPPADDGAWTPHSYPSRQHLGHYSSSSEMSSRHSRDKDRDRHDSRHYHHRR

SEQ ID NO: 47236 - protein, 227 aa, Zea mays
  Clone ID: 700222133_FLI.pep
VWGEVQIIEEDTPLRTPRDAFAQVAACNTFNLHASSSVISLDRSPMKQDHIDSELECNTPSPNSKISNPSSMDSRLCHLGSQSSDSMKSSSDEDGDLMPKQFWKRKQHSVRESGASSHSDKKTNMRNDNNLCLTPLQSSPIAKTRDAKRRRQYHAYSKQASHAPLSFWPRWVYEMYDSYTLARSAAGIEIQSHQPMFYICSFVKLFSCYSKISASCLRSHWNIWSIV

SEQ ID NO: 47237 - protein, 550 aa, Zea mays
  Clone ID: 700262322_FLI.pep
ASHSELVACPALFNALSPQQQRHLRTKSDPGHRRHCSDMAIRSKAWISLLLALAAVLSARAEEPAAAEAEAVLTLDVDSFDEAVAKHPFMVVEFYAPWCGHCKNLAPEYENAAKELSKHDPPIVLAKVDANEEKNRPLATKYEIQGFPTLKIFRNQGKNIQEYKGPREADGIVDYLKKQVGPASKEIKSAEGVAAHFDDKKIYIVGIFKEFSGTEFTNFMELAEKLRSDYDFGHTLHASHLPRGDASVEGPLIRLLKPFDDLVVDSKDFDVAALEKFIDASSTPRVVTFDNNPDNHPYLMKFFQSSAPKAMLFLNFSTGPLDSFKSVYYAAAEEFKDKEIKFLIGDIEASQGAFQYFGLKEDQTPLILIQDGDSKKFLKDHIEADQIVSWLKEYFDGKLTPFKKSEPIPEVNNEPVKVVVADNIHDVVFKSGKNVLIEFYAPWCGHCKKLAPILEEAATTLLSDEEVVIAKMDATANDVPSEFEVQGYPTMYFVTPSGKVTSYDSGRTADDIVDFINKSKETASAVQATATASGKAADAAEKTEPVKDEL

SEQ ID NO: 47238 - protein, 548 aa, Zea mays; identical to SEQ ID NO: 43486
  Clone ID: 700266070_FLI.pep

SEQ ID NO: 47239 - protein, 183 aa, Zea mays
  Clone ID: 700449630_FLI.pep
IGKGADQSGGYYSQLMKEYDGVIISSDLAKMSALPLSREAGTNQPLCIIIAQGESSRLHIPSLSQEHASRAIVLADSPVTVEPAGVEVAVFRQIDLESILQLLAQRGLCSVLVDFREAGESFASLLNDFQEDKLVQKVVVEVLPFWLASDGLSNLAFGGSQSFPLKNLEPRDVNGSVLLEGYV

SEQ ID NO: 47240 - protein, 192 aa, Zea mays; identical to SEQ ID NO: 45499
  Clone ID: 700449890_FLI.pep

SEQ ID NO: 47241 - protein, 914 aa, Zea mays
  Clone ID: 700355693_FLI.pep
AAHKDIKDKEKMIQDLRQSLDVQRKELNDCRAEITALKMYIEGTQSIKQLFVGTSDGVKSHSFANSVGASSLNNEDEDSKGSEAITNKLASAVNITDDTQKDRQVLESSAEGSSVSETPVSFTAVENDSYGTSKEDKSVSNISSNNVCFQSNLHGASMTGKSQGSSDGISMYLSIEKLESPSKQKSSDKIALETIKIVSDALPKIVPYVLINHREELLPLIICAIEKHPDSDVRDSLTHTLFNLIKRPDGEQRRIIMDACVELAKSVGEMRTETELLPQCWEQINHQYEERRLLVAQSCGELAVYVRPEIRDSLILSIVQQLVEDAATVVREAATHNLALLLPMFPNLDKYYKVEELMFQLVCDPSGAVVEVALKELVPAVVRWGDKLDQISRVLLAHILASAQRCPPISGVEGTIDSHLRVLGEQERWNIGVLLRMLTELLPFIHQKAIQTCPFASADPTSSTPENFSASCLKSYATGDSEWSAFEWMHTDCLPDLIKLACLLPVKEDNLRTIITKYLLEVSGLYGKDYLEHIMLPVFLVAAGDIDSGDFTYFPLSIQPKVRGLRPKTSTAEKLAIMCVFPLLLSGILGSPSSRQQLEEYLRKVLIQNTKDGSFSMHHTTEIINAVRFLCLFVEHHSVIFNILWEMVASSDTSLKINAAALLRALVPYTDVKIASTHILPALVTLGSDQNLKVKYASIDAFGAVAQHFKNDMVVDKIRIQMDAFLEDGSHEASVSVIRALAVAVPHSTDRLREYLLTKIFKMTCITPVGNDIERRRERANVLCEALRALDATDLPAMGIRDLLLPSIQNLLKDLDALDPAHKEALEIISRERSGGTLESISKVMGAHLGIASSVSSFFGENSLLTKKEGGEEHDPAGPTAPEQNLQAQPESTRFGRIMRSGFGDILRGQSKGQ

SEQ ID NO: 47242 - protein, 307 aa, Zea mays
  Clone ID: 700472844_FLI.pep
TAAQLRRELHTALGTAKWQLDELARAVRSNDLVMSAGKDTRARHDDFVTAIGYRILEVENYLKESNLADGRGPLSWVHLDEDERDDLAAFLSASPFQQKDKVVTIPSAGDIEVGSNAARMKNDISTDSSKDSAGSTDLISGTAKQDLHRGHRRAASASADIGSWSMSIPNECEGTTEQLSDGSDKLPLHKIVKTCALTSTLQSKTRTKWKNGAVRWAGSNQQDVEEAIPLNTSQLSQGLEECFERNKSCLSTCDEHTYNKKLHGWLGALRRQLQRSQYQIQYGHHIQLIVLALAALVIIVCIVRTIW

SEQ ID NO: 47243 - protein, 814 aa, Glycine max
  Clone ID: 700556776_FLI.pep
RMILSTVGRGGEGDVGQRIRDEILVIQRNNDCKGGMMEEWHQKLHNNTSPDDVVICQALIDYINSDFDIGVYWKTLNANGITKERLLSYDRAIHSEPNFRRDQKEGLLRDLGNYMRTLKAVHSGADLESAISNCMGYKSEGQGFMVGVQINPVPGLPNGFPELLEFVAEHVEEKNVEPLLEGLLEARQELQPSLSKSQSRLKDLIFLDVALDSTVRTAVERSYEELNNAGPEKIMYFISLVLENLALSSDDNEDLIYCLKGWDVALSMCKSKDTHWALYAKSVLDRTRLALTNKAHLYQEILQPSAEYLGSLLGVDRWAVEIFTEEIIRAGSAASLSTLLNRLDPVLRKTAHLGSWQVISPVETVGYVEVIDELLAVQNKSYERPTILIAKSVRGEEEIPDGTVAVLTPDMPDVLSHVSVRARNSKVCFATCFDPNILANLQENKGKLLRLKPTSADVVYSEVKEGELIDDKSTQLKDVGSVSPISLARKKFSGRYAVSSEEFTGEMVGAKSRNISYLKGKVASWIGIPTSVAIPFGVFEHVLSDKPNQAVAERVNNLKKKLIEGDFSVLKEIRETVLQLNAPSHLVEELKTKMKSSGMPWPGDEGEQRWEQAWIAIKKVWGSKWNERAYFSTRKVKLDHEYLSMAVLVQEVINADYAFVIHTTNPASGDSSEIYAEVVKGLGETLVGAYPGRALSFICKKRDLNSPQVLGYPSKPVGLFIRRSIIFRSDSNGEDLEGYAGAGLYDSVPMDEAEKVVLDYSSDKLILDGSFRQSILSSIARAGNEIEELYGTPQDIEGVIKDGKVYVVQTRPQM

SEQ ID NO: 47244 - protein, 475 aa, Glycine max
  Clone ID: 700559333_FLI.pep
DRFPFVLRWKGKQSGPTANRDVVFYRKALDSLKPCDVEWLPYRNMDSMVIPEHIKSTLILGRSKTMLICFDKAERHLPNRCLRQYGMLQSIPDDVERWERKSRGVDGGVDLSGKMESELNDWMDRQVSIVDGDEGVDESEYMEWYLRITRKFIGRPISLSSEFQRTKINKSLQNAGLRDIAHIADTFSTKGLDPQQIESISRIRYIAHECLRDQFGGPVMASGSTQVELGKRVRGKERVRRKGGTGKRLRKDGVVQYNAVSEDEQAQYYGTAIEVGQLHLSHIERELNHAQLCTVDNEVSVVQLIHANADGENMQLCDPHIEVDESDLGYAAGEENNEDPDDVAAEFSHEELKHRAGEEIKQELNHLTGEENIEELNAANEIHFVQPSELCDVSHDIDSTLADAAAEVNHSQLGDSSVINPQQSSPTDNLVNSQLSHINPESELPSAKGAMEVSQHSSIETREDISQNGDCTVAV

SEQ ID NO: 47245 - protein, 965 aa, Glycine max
  Clone ID: 700555358_FLI.pep
GELESLLKDSYLKPQVLPTFFDISKGIEGSLEKALNKLCEAADEAVRNGSQLLILSDHSEALEPTHPAIPILLAVGTVHQHLIQNGLRMSASIVADTAQCFSTHQFACLIGYGASAVCPYLALETCRQWRLSNKTVNLMRNGKMPTVSIEQAQKNYCKAVKAGLLKILSKMGISLLSSYCGAQIFEVYGLGKEVVDLAFRGSVSKIGGLTFDEVARETLSFWVKAFSEDTAKRLENFGFIQFRPGGEYHANNPEMSKLLHKAVRQKSQSAFSVYQQYLANRPVNVLRDLLEFKSDRAPIPVGKVEPASSIVQRFCTGGMSLGAISRETHEAIAIAMNRIGGKSNSGEGGEDPVRWKPLTDVVDGYSPTLPHLKGLQNGDTATSAIKQVASGRFGVTPTFLANADQLEIKIAQGAKPGEGGQLPGKKVSMYIARLRNSKPGVPLISPPPHHDIYSIEDLAQLIFDLHQVNPKAKVSVKLVAEAGIGTVASGVAKGNADIIQISGHDGGTGASPISSIKHAGGPWELGLTESHQTLIENGLRERVILRVDGGFRSGVDVMMAAIMGADEYGFGSVAMIATGCVMARICHTNNCPVGVASQREELRARFPGVPGDLVNYFLYVAEEVRGILAQLGYEKLDDVIGRTDLFQPRDISLAKTQHLDLNYILSNVGLPKWSSTEIRNQEPHTNGPVLDDVLLADPEVADAIENEKVVNKTIKIYNIDRAVCGRIAGVIAKKYGDTGFAGQLNITFTGSAGQSFACFLTPGMNIRLVGEANDYVGKGIAGGELVITPVDKTGFEPEDAAIVGNTCLYGATGGQVFVRGRAGERFAVRNSLAEAVVEGAGDHCCEYMTGGCVVVLGKVGRNVAAGMTGGLAYILDEDDTFIPKVNREIVKIQRVSAPVGQMQLKSLIEAHVEKTCSTKGAAILKDWDKYLSLFWQLVPPSEEDTPEANAKYDTTTADQVTYQSA

SEQ ID NO: 47246 - protein, 247 aa, Glycine max
  Clone ID: 700563377_FLI.pep
RALRSRYKPEVGDIVIGRVVEVAQKRWRLEINYNQDAVLLLSSMNMPDGVQRRRTAVDELNMRCIFEENDVVCAEVRGFQHDGLHLQARSRKYGKLNRGQLLTVPPYLVKRQKQHFHHLEEFGIDLILGCNGFIWVGEHVEAKDDMIEDQVSQSDSQVLFPNKNCVSLEEQEKNYTILETRKYISRAANAVRVLSTLGFNITLEIIKGIIDLSLSMNLDIHDMLGSEFCVLVAEKEAERRSSMKKRR

SEQ ID NO: 47247 - protein, 161 aa, Glycine max
  Clone ID: 700657811_FLI.pep
AAFIFSNDYFVFNGVCLFCRYELGRQPANTKLSSNKTVRRIRVRGGNVKWRALRLDTGNYSWGSEAATRKTRILDVVYNASNNELVRTQTLVKSAIVQVDAAPFKQWYLQHYGVEVGRKKKSAAASAKKEGEVQQVELNCVLNANTCLFVMYSFCFRCFPR

SEQ ID NO: 47248 - protein, 459 aa, Glycine max
  Clone ID: 700558352_FLI.pep
KALAFPTTPNTKTSSSMAASVSTVGAVNRALLNLNGSGAGASAPSSAFFGTSLKKVIASRVPNSKVSGGSFKIVAVEEKKEIEETQQTDKDRWKGLAYDISDDQQDITRGKGLVDSLFQAPQDAGTHYAVMSSYEYLSTGLRQYLDNKMDGFYIAPAFMDKLVVHISKNFMTLPNIKVPLILGIWGGKGQGKSFQCELVFAKMGINPIMMSAGELESGNAGEPAKLIRQRYREAADMIKKGKMCALFINDLDAGAGRLGGTTQYTVNNQMVNATLMNIADNPTNVQLPGMYNKEENPRVPIIVTGNDFSTLYAPLIRDGRMEKFYWAPTREDRIGVCTGIFRTDGIPEQDIVKLVDTFPGQSIDFFGALRARVYDDEVRKWISGVGVDSVGKKLVNSKDGPPTFEQPKMTLEKLLLYGNMLVQEQENVKRVQLADKYLNEAALGNANEDAIQRGTFFQS

SEQ ID NO: 47249 - protein, 244 aa, Glycine max
  Clone ID: 700666157_FLI.pep
VEDHELADVAAASAGNDYSVGNMISEALHKVGRMGVVTIETGRSTENCLEIVEGMQFDRGYLSPYFVNNRRKMTVELHNCKLLLVDKKITKTKELINILNNSAKEKYPVLIVAEGIEQEALAPVIKNKLRGALKVAAIKAPAFGERKTHYLEDIAILTGGTVIREDMGFTLEKAHKNDLGSATKVVITKNSTLIVTDGSTREAVEKRVHQLRRLVENTVENFQKNILNERIARLSGGIAILQQL

SEQ ID NO: 47250 - protein, 517 aa, Glycine max
  Clone ID: 700557079_FLI.pep
PTSQLQHPLSLSLVFTKQTNSTHRVKTTTMEMLRRSSRRIFVSACVWLLLSLSPSPPSVVNASHGVFNVKCKYQDRSLSALKAHDYRRQLSLLAGVDLPLGGSGRPDAVGLYYAKIGIGTPPKNYYLQVDTGSDIMWVNCIQCKECPTRSSLGMDLTLYDIKESSSGKLVPCDQEFCKEINGGLLTGCTANISCPYLEIYGDGSSTAGYFVKDIVLYDQVSGDLKTDSANGSIVFGCGARQSGDLSSSNEEALDGILGFGKANSSMISQLASSGKVKKMFAHCLNGVNGGGIFAIGHVVQPKVNMTPLLPDQPHYSVNMTAVQVGHTFLSLSTDTSAQGDRKGTIIDSGTTLAYLPEGIYEPLVYKMISQHPDLKVQTLHDEYTCFQYSESVDDGFPAVTFFFENGLSLKVYPHDYLFPSGDFWCIGWQNSGTQSRDSKNMTLLGDLVLSNKLVFYDLENQAIGWAEYNCSSSIKVRDERTGTVHLVGSHYISFACVFNINWVVILSLLALLHKLIY

SEQ ID NO: 47251 - protein, 148 aa, Glycine max
  Clone ID: 700559571_FLI.pep
MIGAWRDRIIMCTGTYGPTPALIKAFLDSGAKAIVCSSSEPPESQSITVDGHIEWNVMENGKFEIGEDEADDENVPASPVSDWEDSDAERNVNRTFSFWDDDEEELSHFVCHLYDSLFREGASINVALQHALASYRRMRYVCHLPGIQ

SEQ ID NO: 47252 - protein, 252 aa, Glycine max
  Clone ID: 700657072_FLI.pep
LEASFSVLHTTPSQTPRRMERGRRSSSFGPMSSTVPCFLLLLFCLSGSAEAYKNYTVGDSLGWFDNTEKSNVNYQKWADSKEFSLGDFLIFNSDTNHSVVQTYNFTTYKECDYDDAQDKDTTQWSASDPSNTQTHPVTVAVPLVKEGMTYFFSGDYDGDQCKSGQHFKINVTYGQGLPKSLKSPEDAPSPASPVAGDDDSAPDTIVPSNFSHPKEENDDDKASDDQKSSSSVSILMHAQLHIVLLGILLFLF

SEQ ID NO: 47253 - protein, 244 aa, Glycine max
  Clone ID: 700665019_FLI.pep
KNPENAEGWRLLGIAHAENDDDQQAIAAMMRAQEANPTNLEVLLALGVSHTNELEQTAALKYLYGWLRHHPKYGTLAPPEMADSLYYADVARLFNEAAELSPDDADVHIVLGVMYNLSREYDKAIASFERALKLKPQDYSLWNKLGATQANSVQSADAIMAYQQALDLKPNYVRAWANMGISYANQGMYDESIRYYVRALAMNPKAENAWQYLRISLSCASRNDMLEACDSRNLDLLQKEFPLQ

SEQ ID NO: 47254 - protein, 565 aa, Glycine max; identical to SEQ ID NO: 43888
  Clone ID: 700645775_FLI.pep

SEQ ID NO: 47255 - protein, 217 aa, Glycine max
  Clone ID: 700682665_FLI.pep
HKSIYFLSWKEQGAQLSLLAKDFGSLDCFATEFLIDGSTLSLMVSDDNRNIQIFYYAPKMSESWKGQKLLSRAEFHVGAHVTKFLRLQMLSTSDRAGSVPGSDKTNRFALLFGTLDGSIGCIAPLDEITFRRLQSLQRKLVDAVPHVAGLNPRAFRLFRSNGKAHRPGPDSIVDCELLCHYEMLPLEEQLEIANQIGTTRSQILSNLSDLSLGTSFL

SEQ ID NO: 47256 - protein, 91 aa, Glycine max
  Clone ID: 700677523_FLI.pep
KLEPGVYYKYFTISENSVSGKLHYIAVAYRQFKQQLVRELKEGPDFQQEFQQTRTGELGIHLQTLSQSPIELPQSCQSPRGCSLFGSTQFH

SEQ ID NO: 47257 - protein, 642 aa, Glycine max
  Clone ID: 700684108_FLI.pep
EPLVPVFSYSYQIMRSLQRNMCDNETGHVLYETMFVWNEFLTRGIRNHLQNTIWTVALVYGFFKQEMLMISRREFTLTLIARRSRHYAGTRYLRRGVNEKGRVANDVETEQIVFEDVAEGLPIQISSIIQNRGSIPLFWSQETSKLNIKPDIILSKKDQSYQATRYHFENLVKRYGNPIIILNLIKTHEKKPRESILRQEFANAIDFINKDLSDENRLRFLHWDLHKHFQSKATNVLQLLGKVAAYALTLTGFFYCQTTPTLRPEECLKWPSTKVDNRDADENYSVKPPMLQRGVLRTNCIDCLDRTNVAQYAYGLAALGHQLHALGVIDHPKIDLDEPVADDLMGFYERMGDTLAHQYGGSAAHNKIFSERRGQWRAATQSQEFFRTLQRYYSNAYMDAMKQDAINVFLGHFQPQQGKPALWELGSDQLYDAGRHGDDDARSFFKRSFSDGNILNESSTPMSAPKAKHEKFPSQGGLPDRSEEGSKGLCESSPEISTTDSDISFSRYTPSMPRRQLFGDMQRERCLESEHIYYSDHGDSFSCSNFVDLDWLSSSGNSCEEEPFERSSITNSPIAGVSSENVINGMMVGEATASTSDWGASSLKGREQTESELSYDDARSNTPEEFPDTFVNWVTYGQTLCH

SEQ ID NO: 47258 - protein, 728 aa, Glycine max
  Clone ID: 700728773_FLI.pep
SIVNLSVTNMSGAVLVAVAAAIGNLLQGWDNATIAGSILYIKREFNLQSEPTIEGLIVAMSLIGATVVTTCSGPLSDLLGRRPMLIISSILYFVGSLVMLWSPNVYILLFARLLDGLGIGLAVTLVPLYISETAPPEIRGLLNTLPQFTGSAGMFFSYCMVFAISLTKAPNWRLMLGVLSIPSLIYFALTLFFLPESPRWLVSKGRMLEAKKVLQRLRGRQDVAGEMALLVEGLGVGGDTVIEEYIISPANEFSDAEQIKLYGTAEGQSWIAKPVTGQSSIGLVSRKGSMANQSALVDPLVKLFGSVHEKLPETGSTLFPHFGSMFSVGGNQPRNEDWDEESIAREGDDYVSDAADTDDSDDNLQSPLISRQATSAERDMPAPAQGSMRQGSLLQGEPAGNSGIGGGWQLAWKWSETEGVFKRIYLHQEGGPGSRRGSIISLPGCDAPTLTDGEIVQAAALVSQSALYNKELMHQQPVGPAMIHPSQTAAKGPSWSDLLEPGVKHALIVGVGIQILQQFSGINGVLYYTPQILEQAGVGYLLSNLGLGSTSASFLISSVTTLLMLPCIAVAMRLMDISGRRPLLLTTIPVLIVSLLILVIGSLVELDSTINAFISTSSVIVYFCCFVMGFGPIPNILCSEIFPTRVRGLCIAICALTFWICDIIVTYSLPVMLNSVGLGGVFGMYAVVCIIAWVFVFLKVPETKGMPLEVIIEFFSVGAKQAQVANNT

SEQ ID NO: 47259 - protein, 989 aa, Zea mays
  Clone ID: 700097293_FLI.pep
AARRAAPTVSLPCLASRRAMASTKAPGPGEKHHSIDAQLRQLVPGKVSEDDKLIEYDALLVDRFLNILQDLHGPSLREFVQECYEVSADYEGKGDTTKLGELGAKLTGLAPADAILVASSILHMLNLANLAEEVQIAHRRRNSKLKKGGFADEGSATTESDIEETLKRLVSEVGKSPEEVFEALKNQTVDLVFTAHPTQSARRSLLQKNARIRNCLTQLNAKDITDDDKQELDEALQREIQAAFRTDEIRRAQPTPQDEMRYGMSYIHETVWKGVPKFLRRVDTALKNIGINERLPYNVSLIRFSSWMGGDRDGNPRVTPEVTRDVCLLARMMAANLYIDQIEELMFELSMWRCNDELRVRAEELHSSSGSKVTKYYIEFWKQIPPNEPYRVILGHVRDKLYNTRERARHLLASGVSEISAESSFTSIEEFLEPLELCYKSLCDCGDKAIADGSLLDLLRQVFTFGLSLVKLDIRQESERHTDVIDAITTHLGIGSYREWPEDKRQEWLLSELRGKRPLLPPDLPQTDEIADVIGAFHVLAELPPDSFGPYIISMATAPSDVLAVELLQRECGVRQPLPVVPLFERLADLQSAPASVERLFSVDWYMDRIKGKQQVMVGYSDSGKDAGRLSAAWQLYRAQEEMAQVAKRYGVKLTLFHGRGGTVGRGGGPTHLAILSQPPDTINGSIRVTVQGEVIEFCFGEEHLCFQTLQRFTAATLEHGMHPPVSPKPEWRKLMDEMAVVATEEYRSVVVKEPRFVEYFRSATPETEYGRMNIGSRPAKRRPGGGITTLRAIPWIFSWTQTRFHLPVWLGVGAAFKFAIDKDVRNFQVLKEMYNEWPFFRVTLDLLEMVFAKGDPGIAGLYDELLVAEELKPFGKQLRDKYVETQQLLLQIAGHKDILEGDPFLKQGLVLRNPYITTLNVFQAYTLKRIRDPNFKVTPQPPLSKEFADENKPAGLVKLNPASEYPPGLEDTLILTMKGIAAGMQNTG

SEQ ID NO: 47260 - protein, 289 aa, Zea mays
  Clone ID: 700240681_FLI.pep
VTLQKHSSLRPPPPTSIPSHTIPFHTTREEPVSLAPNSQAKPDPKSAQRTHSARSLRSPPSSIHPSSHGRQGLRQPRRGRPAAVVPAPASDPPSPGPDRGRDRADHLPGGPAHAPALLPTGRVAPAARPVQLHHRLLPLRVLVPPLHDAAGDAGLAQPERARGGVLRPAGRVRVVQVPAGDGGRGAAGRVPGPRRRGRVVARAVGRARRPLRALPRRRAPPGLPGGLPRPPGQGRRPRAVEGRQLDLRPLPPLRHLPRVPRHRRRQRRPRRFRVQVPDHHLLPRRSLID

SEQ ID NO: 47261 - protein, 369 aa, Zea mays; identical to SEQ ID NO: 39123
  Clone ID: 700266090_FLI.pep

SEQ ID NO: 47262 - protein, 253 aa, Glycine max
  Clone ID: 700838396_FLI.pep
LTFTTAAHTDKDNLVCLQSKPFKLAFENQDNPVREIKPKNRRIMGAGGPDDEDNNRWPPWLKPLLKESFFVQCKLHADSHKSECNMYCLDCMNGALCSLCLAYHKDHRAIQIRRSSYHDVIRVNEIQKVLDITGVQTYIINSARVVFLNERPQPRPGKGVTNTCEVCERSLLDSYRFCSLGCKIVGTSRNFLKKKSAAMVSDSEDSYSSNSSHGKKNSFTPSTPPPTFVNYRTAKRRKGIPHRAPMGGLVIEY

SEQ ID NO: 47263 - protein, 560 aa, Glycine max
  Clone ID: 700786957_FLI.pep
PREPLVEFARYVFFKHHAFRDFRDDPFLWNALLRSHSHGCDPRGALVLLCLMIENGVRVDGYSFSLVLKACARVGLVREGMQVYGLLWKMNFGSDVFLQNCLIGLFVRCGCVELARQLFDRMADRDVVSYNSMIDGYVKCGAVERARELFDSMEERNLITWNSMIGGYVRWEEGVEFAWSLFVKMPEKDLVSWNTMIDGCVKNGRMEDARVLFDEMPERDSVSWVTMIDGYVKLGDVLAARRLFDEMPSRDVISCNSMMAGYVQNGCCIEALKIFYDMKRATNVVPDDTTLLIVITAFAQLGHVEDGVVIHHYLMDKGYSLNGKLGVALIDMYSKCGSIDNAISVFENVEQKCVDHWNAMIGGLAIHGMGLMAFDFLMEMGRLSVIPDDITFIGVLSACRHAGMLKEGLICFELMQKVYNLEPKVQHYGCMVDMLSRAGHIEEAKKLIEEMPVEPNDVIWKTLLSACQNYENFSIGEPIAQQLTQLYSCSPSSYVLLSNIYASLGMWDNVKRVRTEMKERQLKKIPGCSWIELGGIVHQFSVQDRTHPQVTEIYSLLSSL

SEQ ID NO: 47264 - protein, 265 aa, Glycine max
  Clone ID: 700892070_FLI.pep
ALTTLLQLLHFATKAHHLIPKTTLTTIPALNATPLTSDFIDSLRSLNSKEYPAIAPLTVDHSLFFSITVGLNPCHTCLTGARLVSAINNITFLMPTTTSLLEAHYYNIKGVFTDDFPSFPPIAFNYTGTQPANIQTNNGTRLYRLDFNSTVQIILQGTAMIAPENHPFHLHGYNFFVVGQGLGNFDPEKDPLSFNLVDPVERNTIGVPNGGWAAIRFRANNPGVWFLHCHLEVHTTWGLKMAFIVDNGNGPHESSLPPPKDLPMC

SEQ ID NO: 47265 - protein, 817 aa, Glycine max
  Clone ID: 700849627_FLI.pep
SFLRQHPFLLMAQILLHGTLHATIYEVDKLKIGGGNFLTKIVQNIEETVGIGKGVTKLYATIDLEKARVGRTRIIEKEIKNPRWYESFHIYCAHMASNIIFTVKDDNPIGATLIGRAYVPVQEILHGEEIDRWVEILDEHKNPIHGHSKIHVKLQYFDVSKDRNWALGIRSPKFPGVPYTFFSQRRGCKVSLYQDAHVPDNFVPKIQLSGGQTYQAHRCWEDVFDAITKAQHLIYITGWSVYTEISLVRDSRRPKPGGDETLGELLKKKAREGVRVLMLVWDDRTSVPLLKKDGLMATHDQETEEYFRGTEVHCVLCPRNPDDGGSFVQDLEISTMFTHHQKIVVVDGELPSGDSNKRRIVSFVGGIDLCDGRYDTQFHSLFRTLDTAHHDDFHQPNFGGSSIKKGGPREPWHDIHSRLEGPIAWDVLFNFEQRWRKQGGKDLLVPLRDLEDVIIPPSPVTYIDDHETWNVQLFRSIDGGAAFGFPETPEDAARVGLVSGKDNIIDRSIQDAYVNAIRRAKNFIYIENQYFLGSSYDWSADGIKPEAIDALHIIPKELSLKIVSKIEAGERFSVYVVVPMWPEGVPESASVQAILDWQRRTMDMMYKDVVQALRAKGIVENPRNYLTFFCLGNREVKKQGEYEPPERPDPDTDYIRAQEARRFMIYVHAKMMIVDDEYIIVGSANINQRSMDGARDSEIAMGAYQPFHLAARQPARGQIHGFRMSLWYEHLGLLHDSFLHPENEECIKKVNQIADKYWDIYSSESLEHDLPGHLLRYPIGVSNEGVVTELPGFEFFPDTKARVLGDKVDYLPPILTT

SEQ ID NO: 47266 - protein, 585 aa, Glycine max; identical to SEQ ID NO: 45583
  Clone ID: 700870268_FLI.pep

SEQ ID NO: 47267 - protein, 229 aa, Glycine max
  Clone ID: 700897181_FLI.pep
ASLSSLVLLLAALILSPQVLANYENPPVYKPPTEKPPVYKPPVEKPPVYKPPVENPPIYKPPVEKPPVYKPPVEKPPVYKPPVEKPPVYKPPVEKPPVYKPPVEKPPVYKPPVEKPPVYKPPVEKPPVYKPPVEKPPVYKPPVEKPPVYKPPVEKPPVYKPPVEKPPVYKPPVEKPPVYKPPVEKPPVYKPPVEKPPIYKPPVEKPPVYKPPYGKPPYPKYPPTDDTHF

SEQ ID NO: 47268 - protein, 1003 aa, Glycine max
  Clone ID: 700856585_FLI.pep
FWEETGHEYACGDMLEPRESDIPVLFLVLVVLPLVAYILLGKWSETSKKRDRINLLAHLAAEEALRAEEMAVADVIPPVSASKNEHHVCARCSAPARTRCSRCKIVRYCSGNCQIIHWRLIHKQECQQLEPHKSSSFPLAVSVEEFGHGDGSYFYENLNNQFLGPSLKQTLRESAPLDYLVHPLTGTAASTTADFSVFNNFQHSAFERTSHKSNRETLRRDNGSIYESSIESSDYKASSSLSSVVPKEAFMRQKSRKSSDSVLEEEISNVSSGGFGVYINRFDASKNMIHENDSHQSQYGNALVTRHKYGRSNVSSAANNDNGVDEFETDITTKGVSVVKGGNYHSDEAAQYKRPSESTIKGSMKAKKILHTPKTKSSKSPKSTSKTSADFCCSEIEKKGKTADELKVAGNSDTIPLHGNGSNGTANTGIMKMMGLRKSTKPTPLASTESMDVKCKKVKKIKMLFPYDEFVKIFQSDVFGIYPRGLLNCGNSCYANAVLQCLTSTKPLVVYLLYRSHSKACCAKDWCLMCELEKHIMVLRENGDPLSPSRILWHMRSINCHMGEGNQEDAHEFLRLLIASMQSICLEALGGEKKVDPRLQETTFIQHTFGGRLQSKVKCLKCNHESERYENIMDLTLEILGWVESLEDALTQFTSPEDLDGENMYRCGRCTSYVRARKQLSIHEAPNILTIVLKRFQEGRYGKINKCITFPEMLDMIPFMTGTGDIPPLYMLYAVVVHLDTLNASFSGHYVSYVKDLQGNWFRIDDIEVQPVLVNQVMSEGAYILFYMRSCPRPPVEHTVKAVQQSVYDSSKHNPMEMQKPNKPGHSRHGSHQFFVSESSPNARPEISTHIIDTTNGFLRKSTNRNALPVTQTYAKNVRSEFSDTTSSDWSLFTSSDEASFTTESTRDSFSTVDYGDSGNMDPISSIFNYTPEKSYLKFSHSRPVTRVFPEKGHVEQVQRIDHSKRVGHSSNEHPPNGNCGLYVYYGSNPVCGTTRTSSQCEF

SEQ ID NO: 47269 - protein, 232 aa, Zea mays
  Clone ID: 701172318_FLI.pep
LLLVLTLTAIPYATKLAGGMRMPSWFDIHDAPITSRSVRGEEDVLRAVQIVHTMIDREIASGTGPEDVFVFGLSQGGALSIASVLLYPKTLGGCAVFSGFLPFDSSSSSSFAARVTDEAKKTPVLWIHGGADSLIPVQEGWKGETGSSSCGDSAWHASSRNTTGSATLWRRTNWSTASGGRRRPFWEWERTNTDEDKARGRRRRRVARPGTGTGTGSKSKSLFCGVFNLFSR

SEQ ID NO: 47270 - protein, 565 aa, Glycine max; identical to SEQ ID NO: 43888
  Clone ID: 700733187_FLI.pep

SEQ ID NO: 47271 - protein, 467 aa, Glycine max
  Clone ID: 700992605_FLI.pep
RQPQAQHVIDGFLTHQPPNHTVAPIPSLIPPMASTTTTFSLSLRTNQQTPFPKPSFFSNNNHLHFNSNNWAWASVSTARKSRICVTSSQVLDSLAAKSEPALPTTVEVDLGNRSYPIYIGSGLLNQPDYLQRHVHGKRVLVVTNKTVAPLYLDKVVDALTSGNPNVSVESVILPDGEQYKDMDTLMKVFDKAIELRLDRRCTFVALGGGVIGDMCGCAAALFLRGVNFIQIPTTVMAQVDSSVGGKTGINHRLGKNLIGAFYQPQCVLIDTDTLNTLPDRELASGLAEVIKYGLIRDAEFFEWQEKNMHLLLARDPSAMAYAIKRSCENKAEVVSLDEKESGLRATLNLGHTFGHAIETGVGYGQWLHGEAVAAGTVMAVDMSYRLGWIDDSLVKRVGDILKQAKLPKAPPETVTVDMFKSVMAVDKKVADGLLRLILLKGPLGNCVFTGDYDRKALDDTLRAFCKS

SEQ ID NO: 47272 - protein, 115 aa, Glycine max
  Clone ID: 700960601_FLI.pep
YVHMLCSLPKLLCHSDNIYPVMSHYHQLLVLSLLGLRSIIGYQFLHSFSLLLFFLIHYVQGQTKSSHLELINLGLTQEKRLVSTLLEAADLIPQFWAPTCPQVLHRLEVEVQAGN

SEQ ID NO: 47273 - protein, 585 aa, Glycine max
  Clone ID: 700943365_FLI.pep
QPVIVLFNVSRVETTPFDGQKPGTSGLRKKVKVFVQPHYLHNFVQSTFNALTVEKVRGATLVVSGDGRYFSKEAIQIITKMSAANGVRRVWIGQNGLLSTPAVSAVIRERVGADGSRATGAFILTASHNPGGPHEDFGIKYNMENGGPAPEGITDKIYENTTTINEYLIASDLPDVDITTTGVTSFTGPEGPFDVEVFDSASDYIKLMKSIFDFESIRKLLSSPKFTFCYDALHGVGGAYAKSIFVDELGAQESSLLNCTPKEDFGGGHPDPNLTYAKELVARMGLGKSEPQDDPPEFGAASDGDAGRNMILGKRFFVTPSDSVAIIAANAVEAIPYFSAGLKGVARSMPTSAALDVVAKHLNLKFFEVPTGWKFFGNLMDAGLCSVCGEESFGTGSDHIREKDGIWAVLAWLSILAYKNKDKLEDKLVTVEDIVRQHWATYGRHYYTRYDYENVDAGAAKELMAYLVKLQSSLSEVNQIIKGIRSDVSNVVHGDEFEYNDPVDGSISSHQGIRYLFEDGSRLIFRLSGTGSEGATIRLYIEQYEKDPSKIGRLSNEALAPLVEVALKLSKMEEFTGRSAPTVIT

SEQ ID NO: 47274 - protein, 340 aa, Glycine max; identical to SEQ ID NO: 38619
  Clone ID: 700975823_FLI.pep

SEQ ID NO: 47275 - protein, 394 aa, Glycine max
  Clone ID: 700980321_FLI.pep
FKYAWVLDKLKAERERGITIDIALWKFETTKYYCTVIDAPGHRDFIKNMITGTSQADCAVLIIDSTTGGFEAGISKDGQTREHALLSFTLGVKQMICCCNKMDATTPKYSKARYDEIVKEVSSYLKKVGYNPDKIPFVPISGFEGDNMIERSTNLDWYKGPTLLDALDQISEPKRPSDKPLRLPLQDVYKIGGIGTVPVGRVETGVLKPGMVVTFAPTGLTTEVKSVEMHHESLTEAHPGDNVGFNVKNVAVKDLKRGYVASNSKDDPAKEAANFTAQVIIMNHPGQIGNGYAPVLDCHTSHIAVKFAELMTKIDRRSGKELEKEPKFLKNGDAGFVKMIPTKPMVVETFSEYPPLGRFAVRDMRQTVAVGVIKNVEKKDPTGAKVTKAAQKKK

SEQ ID NO: 47276 - protein, 222 aa, Glycine max
  Clone ID: 700983756_FLI.pep
VTARQDLHHRNRPSDHYRLLKSNVDALNLIQVGLTLTDAAGNLPDLAGNRSIWEFNFRDFDVARDAYAPDSIDLLRRQGIDFARNTADGVDSTCFAELMMSSGLVCNDAVSWVTFHSAYDFGYLVKILTRRNLPTRLEEFLKTVKVFFGDNVYDVKHMMRFCDTLYGGLDRVARTLNVDRAVGKCHQAGSDSLLTWHAFQKIVDIYFVKEEHRKHAGVLFGL

SEQ ID NO: 47277 - protein, 110 aa, Glycine max
  Clone ID: 700995857_FLI.pep
NLLYRVKMTFLLQALLACNYSLGNYEQASLVIFRVMQIGLGAGITLSMILFFGFGAFSSLFSTDSEVLDVARSGIWFVAGSQPVNALAFVIDGIYYGVSDFGYAAYSMLD

SEQ ID NO: 47278 - protein, 395 aa, Glycine max
  Clone ID: 700953664_FLI.pep
ILVLRGTIGVNLGSSDNDAVNQNLIEETNRILAEIRSDADPSDPDDQQFFNPNDTFTLGPKIDNWDTERKNWLHQNPEYPNVIGGKPRILLLTGSPPKPCDNPIGDHYLLKSIKNKIDYCRLHGIEIVYNLAHLDVELAGYWAKLPMIRRLMLSHPEVEWIWWMDSDAFFTDMVFELPMSKYDEYNLVLHGYPDLLFEQKSWIAVNTGSFLFRNCQWSLDLLDAWAPMGPKGPVREEAGKILTANLKGRPAFEADDQSALIYLLLSKKEKWMDRTFLENSFYLHGYWAGLVDRYEEMIEKYHPGLGDERWPFVTHFVGCKPCGSYGDYPVERCLSSMERAFNFADNQVLKLYGFRHRGLLSPKIKRIRNETVSPLEFVDQFDIRRHSTENTESKS

SEQ ID NO: 47279 - protein, 338 aa, Glycine max
  Clone ID: 700961519_FLI.pep
NRAQKKIHKLIQKMSSGAGKVVCVTGASGYIASWIVKFLLNRGYTVKATVRDTSDPKKINHLVGLDGAKERLHLYKANLLEEGSFNSVVQGCHAVFHTASPFYHNVKDPQAELLDPALKGTLNVLKSCVNLPTLERVVLTSSVAAVAYNGKPRTPDVVVDETWFSDPGFCRESQMWYTLSKTLAEDAAWKFVKENNIDMVTINPAMVIGPLLQPVLNTSAASILNVINGAQTFPNASFGWVNVKDVANAHILAYENASANGRYCLVERVAHYSEIVKILRDLYPTLLLPEKCADDNPYVPIYQVSKEKAKSLGIEYTPLEVSLKETVDSLKEKKFTNF

SEQ ID NO: 47280 - protein, 289 aa, Glycine max
  Clone ID: 701012537_FLI.pep
LQIAMAKHDVEGGSFSAKDYHDPPPAPLIDAEELTQWSFYRALIAEFIATLLFLYITVLTVIGYKSQSDVKAGGDVCGGVGILGIAWAFGGMIFILVYCTAGISGGHINPAVTFGLFLARKVSLIRAIMYMVAQCLGAICGVGLVKAFQKAYYNRYGGGANELSEGYSTGVGLGAEIIGTFVLVYTVFSATDPKRNARDSHVPVLAPLPIGFAVFMVHLATIPVTGTGINPARSLGAAVMYNQQKAWDDHWIFWVGPFIGAAIAAFYHQFILRAGAAKALGSFRSNPTI

SEQ ID NO: 47281 - protein, 715 aa, Glycine max
  Clone ID: 701003125_FLI.pep
SEANAANTNFCVNVSNNGYISANDPLNWGAAAEAMAGSHLDEVKRMLEEYRRPVVKLGGETLTISQVAAIAAHDQGVKVELAESSRAGVKASSDWVMESMNKGTDSYGVTTGFGATSHRRTKQGAALQKELIRFLNAGIFGNGTESNCTLPHTATRAAMLVRINTLLQGYSGIRFEILEAITKLLNNNITPCLPLRGTITASGDLVPLSYIAGLLTGRPNSKAVGPSGEILNAKEAFELANIGAEFFELQPKEGLALVNGTAVGSGLASIVLFEANIIAVLSEVISAIFAEVMQGKPEFTDHLTHKLKHHPGQIEAAAIMEHILEGSSYVKAAKKLHEIDPLQKPKQDRYALRTSPQWLGPLIEVIRFSTKSIEREINSVNDNPLIDVSRNKALHGGNFQGTPIGVSMDNTRLALASIGKLMFAQFSELVNDYYNNGLPSNLTASRNPSLDYGFKGAEIAMASYCSELQYLANPVTSHVQSAEQHNQDVNSLGLISSRKTHEAIEILKLMSSTFLVALCQAIDLRHLEENLKNTVKNVVSQVAKRTLTTGVNGELHPSRFCEKDLLKVVDREYTFAYIDDPCSGTYPLMQKLRQVLVDYALANGENEKNTNTSIFQKIATFEEELKTLLPKEVEGARVAYENDQCAIPNKIKECRSYPLYKFVREELGTALLTGERVISPGEECDKVFTALCQGKIIDPLLECLGEWNGAPLPIC

SEQ ID NO: 47282 - protein, 131 aa, Glycine max
  Clone ID: 700999386_FLI.pep
YVPRQIYTKNQSATTVSTALAALAYFSDRVNAVVVRTALDPENGSVPAPTDWRIWLAGRPWLLRRYTKNAFRSPLKLLIGLTATNEKTVICPLGPLYSLNCLPATVTVAMALPVEEMGPAPPRAESQIMTR

SEQ ID NO: 47283 - protein, 511 aa, Glycine max
  Clone ID: 701058042_FLI.pep
IYSLGFSQVCKESANVLAVLGAVASEALDLTGFYYSGKPSIIKRANKSNQTSTGRDTSLRDLRASSVDLVRIGNSNEMLNSVVNQDKETDMNHKNKKDNFGSDAPHFQSGVLRTNCIDCLDRTNVAQYAYGLQALGRQLHAMGLTDVPKVDPDSSIAAALMDMYQSMGDALAQQYGGSAAHNTVFPERQGKWKATTQSREFLKSIKRYYSNAYTDGEKQDAINLFLGYFQPQEGKPALWELDSDYYLHVSGIGDDLIPEKCSEPNLSSSGRGGMIFTPIPACREDFSRIKLTSFDKLIEKTCSTIKNVRLCREPDQRPGGVSGNSGVAPDAAEIQLKSPNWLFGQRKYEEGSSAAKVASCESDVEGSHANGFCDLNWLSSGNAMNEEDVFQRYLTMTSANEANGWYGGSLLGDQDENSEIYEHYAELCQGPALELFQNDPDREQHYADALSTSSYEIVNDAAVAAEMEATLKEYDQVGADLGIIPKSCKFFADDPSWLTRWLTGDEKVPRI

SEQ ID NO: 47284 - protein, 520 aa, Glycine max
  Clone ID: 701060719_FLI.pep
LRIILHWYFKRKLEEVSAIMDGEFCDDASQNKDGMNLDEKGKICNKVGEMDVDECYSDHRFSENSRLVKNIGKVVLDLRNLGFTSMAEDAYASAIFLLLKAKVHDVAGDDFRSSVLQSIKSWIQAVPLQFLHALLVYLGDVVSYESTSSGLKSPLAPQPSSCCPGIDTPSEGLVRWKLRLEYFAYETLQDLRIAKLFEIIVDYPESSPAIEDLKLCLEYTGQHSKLVESFISALRYRLLTAGASTNDILHQYVSTIKALRTIDPAGVFLEAVGEPIRDYLRGRRDTIKCIVTMMTDGTGAHSSSSGNPGDSLLEELNRDEEIQENAGVDDFNTDDRQAWINAMRWQPDPVEADPLKGSRNQRKVDILGMIVSIIGSKDQLVHEYRTMLAEKLLNKSDYDIDSEIRTLELLKIHFGESSLQKCEIMLNDLIGSKRTNSNIKATINQPSQTSVEVGDNAISMDAISATIISSNFWPPIQDEPLNLPEPVDQLLSDYAKRFNEIKTPRKLQWKKSLGTIKLDL

SEQ ID NO: 47285 - protein, 507 aa, Glycine max
  Clone ID: 700863165_FLI.pep
EDLIEAIINKTETPAIVHAVPEKRNIVQELEASFLKNFLGVGSNSKKLETYNIFEHDPDFKNPIGWSTAVTKKQLKSLKRTNIGFLMVNLNMGSILGPHWNAKATELTVGVDGEGMVRVVCGSGNENETECQNMRFKVKEGDAFLVPRFHPMAQMSFNNGPFVFLGFSTSAKKNHPQFLAGKGSVLHILDKKILARSLGVSNRTIDELLRSPEDSIIFRCSSCAEEEEKIMKEEEEEEESKKEEEERKKKEEEEEEEEKKKKEERKREEEEAKRQQEEREKKRGEEEAKREREEEKARMEKERERKGEEEAEREEEEARREQEWRRKKEEAAAKREQEKRERRRQEEEAKKWAEEKAEREQEQATREAEEAQREQEQAKREAAQREQERAKREQERRRREEVAGKGEEEEEHAGRGHERRKEEEETARREQEQEQAERQQQKREKRRQKEEQGEGEEEEEEDEEEPTWWERRERRKQKGKSPEEGVEWEQEEARTASREGEKKTPRE

SEQ ID NO: 47286 - protein, 344 aa, Zea mays
  Clone ID: LIB3732-009-D3_FLI.pep
QRLAHCFAMGLEARLAGTGSQAYQSLMAQHTSVVEFLKAYSLYMAASCFMKVRFIFSNMTICNAVAGRSKLHIVEYGVQHGFQYPGLFHLLARREGGPPEVRVTAIAVPQPGFRPAHQIEETGRRLSNIAREMGVPFKFRGIAAKWEAVRAKDLNIDPDEVLAVNSECYIGNLMDESVLVDSPSPRDTVLNNIREMRPNVFVHTVVNGTYGAPFFLTRFREALFFFSAQFDMIDATIPRDNNERLLIERDIFGTFALNVIACEGADRVERPETYKQWQVRNHRAGLRQLPLNPEVVKASRDKVKNYYHRDFLIDEDNRWLLLGWKGRVLYAMSTWVAEDNKPIF

SEQ ID NO: 47287 - protein, 661 aa, Zea mays
  Clone ID: LIB3067-040-G3_FLI.pep
NPLGTFVIWMLLGYSIAAAYSRYDKVTEDCRKMEELKTQAEAADVAKSQFLATVSHEIRTPMNGVLGMLDMLLGTDLTMTQKDYAQTAQMCGRALITLINDVLDRAKIEAGKLELEAVPFDLRSLMDDVVSLFSSKSREKCIELAVFVCDNVPKVVIGDPWRFRQILTNLVGNAVKFTERGHVFVRVCLAENSNMEANQVLHGAMNGKGGRVESTANGAFNTLSGFEAADRRNSWQYFKLLLSDKESLLDDLESENSNQSDSDRVTLAISIEDTGVGIPLQAQDRVFTPFMQADSSTSRNYGGTGIGLSISKCLAELMGGQISFTSHPSVGSTFTFSATLKHSYKDISGDSSRSLTEALPTAFKGMKAILVDGRPVRSAVTRYHLKRLGILLQVVNNMNAVVKAFPGQNGAAGSREKASILFIESDFWRPETDVQLLNHLREQKNGQLSDGHKVVLLVTSEADKDKYGSIFDIVMCKPIRASTIASSIQQLLKVEIAERKDNQNRPSFLRSLLVGKNILVVDDNKVNLRVAAAALKKYGANVSCVESGKDAISLLQPPHRFDACFMDVQMPEMDGFEATGQIRQMELKANEERKNKLASIEGSTTAEYHLPVLAMTADVIQATYEECIKSGMDGYVSKPFDEEQLYQAVSRLVVGTTDSAV

SEQ ID NO: 47288 - protein, 662 aa, Zea mays
  Clone ID: LIB3180-062-A12_FLI.pep
EPLAACVETTVSQSLLRVRKKKKVYLFGTQSSGSGSESGIQTQKCTKSKGANESGNNSGSNDDEAGMGLNARDDSDNGSGTQAQNSWTKLAVEIDSPQAMSLDQLADPANSTCAQVIHSKSEICSHRWLPGSSNRNCKKQKYTNDDFKGKDLEIDGPGNLYMDHQSSPNERPIKAADHENNSKESMMGNLGDATVRAADLIGSMAKNMDAQQAARAADTPNFSSEVPEGKGKNDDFKGKDLEIGGPRNLYMDHQSSPNERPIKAADHENNSKESMIENLEEPTVRAADLIGSMAKNMDTQQAARAAEDTPNFSSKVPEGKGKNDQHDNYVLPSLELSLKRSRSCGDGANDTVNDDEQRNSALRRSNLSAFTRYHTSAASNQGGTGLVGSCSPHDNSSEAVKTDSTYNMKSNSDAAAIKQGSNGSSNNNDMGSTTKDVVTKPSTNNERVMLPSAIKANGYTSTFHPVQQWMVPDNATAGKAKADEVANNAGRNSHPGDVQSNLTQQHRPTLHYVHFENSGSGALQCGSSNVFDPPLEGQATNNYGVKAGSNSGSNKGQNNGSTAGASTAAANAGRTDTEIRAIDKSGPGGGSGSGNDTYVRRLAASMTPRQEQLKKYREKKKDRNFGKKVRYQSRKRLADQRPRVRGQFVKQAVQNQEGDGER

SEQ ID NO: 47289 - protein, 359 aa, Glycine max
  Clone ID: 700686668_FLI.pep
QNRPAELIAKFLDEKLRAGNKGTSEEELEGTLDKVLVLFRFIQGKDVFEAFYKKDLAKRLLLGKSASIDAEKSMISKLKTECGSQFTNKLEGMFKDIELSKEINESFKQSSQARTKLPSGIEMSVHVLTTGYWPTYPPMDVRLPHELNVYQDIFKEFYLSKYSGRRLMWQNSLGHCVLKAEFPKGKKELAVSLFQTVVLMLFNDAEKLSFQDIKDSTGIEGKELRRTLQSLACGKVRVLQKLPKGRDVEDDDSFVFNEGFTAPLYRIKVNAIQLKETVEENTSTTERVFQDRQYQVDAAIVRIMKTRKVLSHTLLITELFQQLKFPIKPADLKKRIESLIDREYLERDKNNPQIYNYLA

SEQ ID NO: 47290 - protein, 440 aa, Glycine max; identical to SEQ ID NO: 45590
  Clone ID: 700732264_FLI.pep

SEQ ID NO: 47291 - protein, 339 aa, Glycine max
  Clone ID: 700738702_FLI.pep
PQDAGTHYAVMSSYEYLSTGLRQYLDNKMDGFYIAPAFMDKLVVHISKNFMTLPNIKVPLILGIWGGKGQGKSFQCELVFAKMGINPIMMSAGELESGNAGEPAKLIRQRYREAADMIKKGKMCALFINDLDAGAGRLGGTTQYTVNNQMVNATLMNIADNPTNVQLPGMYNKEENPRVPIIVTGNDFSTLYAPLIRDGRMEKFYWAPTREDRIGVCTGIFRTDGIPEQDIVKLVDTFPGQSIDFFGALRARVYDDEVRKWISGVGVDSVGKKLVNSKDGPPTFEQPKMTLEKLLLYGNMLVQEQENVKRVQLADKYLNEAALGNANEDAIQRGTFFQS

SEQ ID NO: 47292 - protein, 519 aa, Glycine max; identical to SEQ ID NO: 43902
  Clone ID: 700675120_FLI.pep

SEQ ID NO: 47293 - protein, 579 aa, Glycine max
  Clone ID: 701010364_FLI.pep
CIFGFAIESESDRKKNKKEQMGSSGFSWKLADHPKLPKGKTVAVVVLDGWGEATPNEYNCIHKAETPCMDSLKKGAPERWRLVRAHGTAVGLPTEDDMGNSEVGHNALGAGRIFAQGAKLVDLALASGKIFEGEGFKYIKECFENGTLHLIGLLSDGGVHSRLDQLQLLLKGVSERGVKRVRVHILTDGRDVLDGSSVGFVETLENDLANLRAKGVDARIASGGGRMNVTMDRYENDWSVVKRGWDAQVLGEAPYKFTNALEAVKKLRAEPKANDQYLPPFVIVDESGKPVGPIVDGDAVVTFNFRADRMTMIAKALEYENFDKFDRVRYPKIRYAGMLEYDGELKLPSHYLVSPPEIDRTSGEYLVYNGIRTFACSETVKFGHVTFFWNGNRSGYFNAELEEYVEIPSDSGITFNEQPLMKALQIAEKARDAILSGKFDQVRVNLPNGDMVGHTGDIEATVVACKAADAAVKMILDAIEQVGGIYVVTADHGNAEDMVKRDKSGKPLLGKDGKIQILTSHTLEPVPIAIGGPGLAPGVRFRNDVPTGGLANVAATVMNLHGFEAPSDYETTLIEVVDN

SEQ ID NO: 47294 - protein, 418 aa, Zea mays
  Clone ID: 700456128_FLI.pep
REISLNRMNALAATSRNFKQAAKLLGLDSKLEKSLLIPFREIKVECTIPKDDGTLASYVGFRVQHDNARGPMKGGIRYHHEVDPDEVNALAQLMTWKTAVANIPYGGAKGGIGCSPGDLSISELERLTRVFTQKIHDLIGIHTDVPAPDMGTNSQTMAWILDEYSKFHGYSPAVVTGKPVDLGGSLGRDAATGRGVLFATEALLAEHGKGIAGQRFVIQGFGNVGSWAAQLISEAGGKVIAISDVTGAVKNVDGLDIAQLVKHSAENKGIKGFKGGDAIAPDSLLTEECDVLIPAALGGVINKDNANDIKAKYIIEAANHPTDPEADEILSKKGVLILPDILANSGGVTVSYFEWVQNIQGFMWDEEKVNAELRTYMTRAFGDVKQMCRSHSCDLRMGAFTLGVNRVARATVLRGWEA

SEQ ID NO: 47295 - protein, 483 aa, Glycine max; identical to SEQ ID NO: 43780
  Clone ID: 701105714_FLI.pep

SEQ ID NO: 47296 - protein, 415 aa, Glycine max
  Clone ID: 701105189_FLI.pep
VESSSSLSFAMAAAARPLVTVQALDSDMATDASATVPIPDVMKSSIRPDIVNFVHSNISKNSRQPYAVSRRAGHQTSAESWGTGRAVSRIPRVPGGGTHRAGQGAFGNMCRGGRMFAPTKIWRRWHRKINVNQKRYAVVSAIAASAIPSLVLARGHRIESVPELPLVVSDSAESVEKTKEAIKVLKQIGAFPDAEKAKDSRSIRPGKGKMRNRRYISRRGPLIVYGTEGAKAVKAFRNVPGVEVANVERLNLLKLAPGGHLGRFVVWTKSAFEKLDSIYGSFDKPSEKKKGYLLPRPKMVNSDLARIINSDEVQSVVRPIKKDVKKATLKKNPLKNLNSMLKLNPYAKTAKRMALLAEAQRVKAKKEKLDKKRKTVSKEEASAIKSAGKAWYHTMVSDSDYTEFDNFSKWLGVSQ

SEQ ID NO: 47297 - protein, 360 aa, Glycine max; identical to SEQ ID NO: 43048
  Clone ID: 701117634_FLI.pep

SEQ ID NO: 47298 - protein, 626 aa, Glycine max
  Clone ID: 701123142_FLI.pep
IHIFSPWKMMMMFDEMGLCNNLDMISAPLGEEDITTRQTDPEVIVEDDFTDEEIGVDELEQRMWKDKMRLKRLKEQSKSKEGIDAVKQRQSQEQARRKKMSRAQDGILKYMLKMMEVCKAQGFVYGIIPEKGKPVTGASDNLREWWKDKVRFDRNGPAAIAKYQADNTIPGRNDGCNSIGPTPHTLQELQDTTLGSLLSALMQHCDPPQRRFPLEKGVPPPWWPTGNEEWWPQIGLSKDQNSPPYKKPHDLKKAWKVGVLTAVIKHMSPDIAKIRKLVRQSKCLQDKMTAKESATWLAIINQEEALARELYPDYIPPLASAGGSGSLVINDSNEYDVEGGEDEPNFDVEDCKHENLHTSNLGMERVRVTLPVQQPSFSIKGETVTNLDFIRKRKVSNDFNMMDLKIYTCEHPQCPYSQVRLGFPDRISRDNHQLICAYRGTSDFGGPSFPVNEIKPVVHPPSFVQPKSTAQPGSMVPPVIDLTGLEVSDNGQKMITDLMTNYDTNVRGNKKTSSCNHLAAENFDLPQHAMQQQQDNFIRGQGITAEGNIFDEANMPNNHHMFAREEGQFDRFKALNAPFETNHNNNNFHSMFGSLCDLASFDFKEDMQGVGMDTLQKQPDISIWYQ

SEQ ID NO: 47299 - protein, 267 aa, Glycine max
  Clone ID: 701123743_FLI.pep
IPPNDTGFQKKLLYLESIGIDSFLLIENHPTVITTSLADIRSTVEYITSLDFTAIEFRRMVGMCPEILTTQVSDLIPVFTFLHREVHVPGSDIKRVINRRPRLLVSSVSKRLRPTLYFLQSIGIEEVNKHTDLLSCSVEEKFMPRIDYFENIGFSRRDATSMFRRFPQLFCYSIKNNLEPKYSYFVVEMGRDLKELKEFPQYFSFSLENRIKPRHKQCVEMGVCFPLPALLKTSEVKFQSRLDVCVNSSTPLKTSPLWSAGCDVYDV

SEQ ID NO: 47300 - protein, 191 aa, Glycine max
  Clone ID: 701126378_FLI.pep
LPLFLYNYSTHQLHGIFEANNNEATKTAAEKKFKTLPPSESLPKNETIGGYIFVCNNDTMAENLQRQLFGLPPRYRDSVRTITPGLPLFLYNYSTHQLHGIFEAASFGGSNIDPTAWEDKKCPGESRFPAQVQVITRKVCEPLEEDSFRPILHHYDGPKFRLELSVPEALSLLDIFANQNSFDDIFKVIPA

SEQ ID NO: 47301 - protein, 100 aa, Glycine max
  Clone ID: 701129246_FLI.pep
KYRPTMPVLSVVIPRLKTNQLKWSFSGAFEARQSLIVRGLFPMLADPRHPAESTSGTNESILKVALDHGKASGVIKSHDRVVVCQKVGDASVVKIIELED

SEQ ID NO: 47302 - protein, 585 aa, Glycine max; identical to SEQ ID NO: 45583
  Clone ID: 701133880_FLI.pep

SEQ ID NO: 47303 - protein, 224 aa, Glycine max
  Clone ID: 701065703_FLI.pep
LVLLLAALILSPQVLANYENPPVYKPPTEKPPVYKPPVEKPPVYKPPVENPPIYKPPVEKPPVYKPPVEKPPVYKPPVEKPPVYKPPVEKPPVYKPPVEKPPVYKPPVEKPPVYKPPVEKPPVYKPPVEKPPVYKPPVEKPPVYKPPVEKPPVYKPPVEKPPVYKPPVEKPPVYKPPVEKPPVYKPPVEKPPIYKPPVEKPPVYKPPYGKPPYPKYPPTDDTHF

SEQ ID NO: 47304 - protein, 495 aa, Glycine max
  Clone ID: 701129024_FLI.pep
VMMEMDSMCMWVVLVAIAGALLVLRSMLKNVNWWLYESKLGVKQYSLPPGDMGWPFIGNMWSFLRAFKSKDPDSFISSFVSRYGRTGMYKTLMFGNPSVIVTTPETCKRVLTDDDKFTTGWPQSTIELIGKRSFISMSYEEHKRLRRLTSSSINGMESLSLYLTYIEENVKNSLEKWANMGQIEFLTEIRKLTFKIIMHIFLSSESEPVMEALEREYTALNHGVRAMCINIPGFAYHKAFKARKNLVAIFQSIVDERRNLRKGYLPGKAKDMMDALIDVEDDDGRKLSDEDIIDIMLMYLNAGHESSGHITMWATFFLQKHPEYLQKAKAEQEEIIRRRPPTQKGLTLKEVREMDFLYKVIDETLRVITFSLVVFREAKSDVNINGYTIPKGWKALVWFRSVHLDPEIYPNPKEFNPYRWNKEHKAGEFLPFGGGSRLCPGNDLAKMEIAVFLHHFLLNYRFEQHNPNCPVRYLPHTRPMDNCLGRVRKCSSTTT

SEQ ID NO: 47305 - protein, 388 aa, Glycine max
  Clone ID: 701150011_FLI.pep
FSPYIISNPSHRMGSAGGTDYGAYTYENLEREPYWPSEKLKISITGAGGFIASHIARRLKTEGHYIIASDWKKNEHMTEDMFCDEFHLVDLRVMNNCLKVTEGVDHVFNLAADMGGMGFIQSNHSVIMYNNTMISFNMIEAARINGIKRFFYASSACIYPEFKQLETNVSLKESDAWPAEPQDACGLEKLATEELCKHYNKDFGIECRIGRFHNIYGPFGTWKGGREKAPAAFCRKVITSSDRFEMWGDGLQTRSFTFIDECVEGVLRLTKSDFREPVNIGSDEMVSMNEMAEIILGFENKNIPIHHIPGPEGVRGRNSDNTLIKEKLGWAPTMRSKDGLRITYFWIKEQIEKEKAQGIDISVYGSSKVVQTQAPVQLGSLRAADGKE

SEQ ID NO: 47306 - protein, 215 aa, Glycine max
  Clone ID: 701203384_FLI.pep
FLRSTTIRLSSSSSSLQFFSNPNRTLFRPFLHTSFKPLPSSFSFRTDHTMATSNAKSVHDFTVKDAKGNDINLGDYKGKVLIIVNVASQCGLTNSNYTELSQLYEKYKQKGLEILAFPCNQFGAQEPGSNEQIQEFVCTRFKAEFPVFDKVDVNGDKAAPLYKYLKSSKGGLLGDGIKWNFAKFLVDKEGNVVDRYAPTTSPLSIEKDLLKLLDA

SEQ ID NO: 47307 - protein, 383 aa, Glycine max; identical to SEQ ID NO: 45637
  Clone ID: 701213327_FLI.pep

SEQ ID NO: 47308 - protein, 254 aa, Glycine max
  Clone ID: 701142035_FLI.pep
WRSVCGMPRWIRVPSMMLFLLVVLLGFPRFNSCCRTSSTERNFARVLTQKFDEKENIVFITVVCCSPEKIRDKLCYKGGGSIKSIEILEPPKPKPAGPEKKEAEKPKAEPEKKKDPEKPKADPPKAEKPKTEPEKKKDGGGEKPKEEPEKKKDGGEKPKPGPEKPKDKPTPAPLPVQPHIAAPMAVPVGMLYAPPPCYGGRPVGPGYEYGGPMLCYDGYYARPVYDSYSGGRPCYGNRCDQYFSEENPQGCTIM

SEQ ID NO: 47309 - protein, 355 aa, Glycine max
  Clone ID: 701157358_FLI.pep
YGCICFLFLADLGGWTRVVVEKPFGKDLESAEELSTEIGKLFEEPQIYRIDHYLGKELVQNLLVLRFANRFFLPLWNRDNIDNVQIVFREDFGTDGRGGYFDQYGIIRDIIQNHLLQVLCLVAMEKPVSLRPEHIRDEKVKVLESVLPINDDEVVLGQYEGYKDDPTVPDESNTPTFATVALRIHNERWEGVPFILKAGKALNSRKAEIRVQFKDVPGDIFKCKKQGRNECVIRLQPSEAIYMKLTVKQPGLEMSTVQSELDLSYGQRYQGVTIPEAYERLILDTIRGDQQHFVRRDELKASWQIFTPLLHRIDEGEFKPLPCKPGSRGPAEADQLLEKAGYVQTHGYIWIPPTL

SEQ ID NO: 47310 - protein, 558 aa, Zea mays
  Clone ID: LIB3150-054-B10_FLI.pep
GKMSLISQNAVQKRCLRKSEADNCNDEDIGSPTSIDAEVGKEAKLKNHNKERKKKKTKLLESQQNKEEEEMRQLESSLFGSLYAPLEFGTEVGAAVAPDRDAPLFFTDRSAGGGMDYFPTYEEDMAHEDEEDMVGIKRRKPVWVDEEEEMTEVDIVKVPRLRKLRKEEDEHLISGKEYEARLRGQHAKLNPFTGWADMDQKTSLPAASDGESDDEGCVDDILRNNDELVAKDTVKLLPGMLEFSRLVDANIQDPSSGPINSVQFHRNGQLMLAAGLDKHLRFFQIDGKRNPKIQSIFIGDCPVHKASFLPDGSEVILSGRRKFFYSFDLVNAAVSKIGPLTGREEKSLETFEISPDSRTIAFVGNEGYILLISAKTKQLITTLKMNGSVRSLAFADGGNQLLSSGGDGHVYHWDLGTRKCIHKATDDGSLAGLSLCTSRDSSLFATGSSSGIVNVYKRDDFLGGKRKPLKTIENLTTDIGEMKFNHDAQILAISSRKERNGMRLVHVPSFSVFQNWPGPRFSLHYPRCLDFSPGSGFLSVGHAGGKVLLYKLHHYENA

SEQ ID NO: 47311 - protein, 349 aa, Zea mays
  Clone ID: LIB3060-039-H5_FLI.pep
RNPLPNEHIYSFNASPAISSPCMFLSNPKQHHHSSHDATRRRRVVVAERPAAPVGPARRWQRADGRAVQPAAAVAPAAFVVALVARRAARAPARPHGRRRRPRRDLHRRDHALCRHRRRHRRWRRPLVPRHRRVVLWLRRRRRGRQVHGGPHLLGRGRHGWLRLQLRSGRPLLHVLRLGHHRRHPAVRRRRRVVVDVDRGRRHHRLGRRRSRRCLRRRRRRRRRRPLGRRRLLLLVLVLVLVLALPAAPHWRRRRRGWPVVRHVLWRRRLAAAAAAAVGVDDVDVPHHLAALAAELAREPLRVERAHHGDRLALVVEGDGADPLMVLQLAENLADLVVALAAIKVNHDD

SEQ ID NO: 47312 - protein, 505 aa, Glycine max
  Clone ID: 701214664_FLI.pep
GNQGGTVIALFLGFILRLIMAQPTTRIGLAGLAVMGQNLALNIAEKGFPISVYNRTTSKVDETVERAKQEGNLPVYGYHDPEAFVHSIQKPRVIIMLVKAGAPVDQTIKTLSAYMEKGDCIIDGGNEWYENTERREKEVAELGLLYLGMGVSGGEEGARNGPSLMPGGSFEAFKYIEDILLKVAAQVPDSGPCVTYIGKGGSGNFVKMIHNGIEYGDMQLIAEAYDVLKSVGKLSNEELQSVFSEWNKGELLSFLIEITADIFGIKDDKGDGYLVDKVLDKTGMKGTGKWTVQQAAELSIAAPTIEASLDARFLSGLKEERVEAAKVFKSGGIGDIVTDQPVDKQKLIDDVRKALYAAKICSYAQGMNLIRAKSIEKGWDLKLGELARIWKGGCIIRAIFLDRIKQAYERNPNLANLLVDPEFAKEIIDYQSAWRRVVCLAINSGISTPGMSASLAYFDTYRRERLPANLVQAQRDYFGAHTYERVDIEGSYHTEWFKLAKQSRN

SEQ ID NO: 47313 - protein, 181 aa, Glycine max; identical to SEQ ID NO: 44160
  Clone ID: 701210780_FLI.pep

SEQ ID NO: 47314 - protein, 266 aa, Glycine max
  Clone ID: 700961924_FLI.pep
RCLQWRLNPKTPWLTICHQIKLALAINLLIKSQVHNLGQQHSIPLPGQLQPHQQLLSQNVQNNVASQPNLPPVSSLAQTPSQNIVQNSNIQNITGPNSVGTTISQNSNLQNMFPGSQRQMPGRQQIVPPQNSQQYLYQQQFKQKLQLQSQMQQQQQNLLQPNQLQSSQQSIMQTSSVMQPSMMQTSSLSSIPQNQQSTNVQQPMQSMPQQHSQVIRHQQQTAVTHQPSLPSQQQQQLMGHQPNTTNMQHAQMLGQQNNVGDIQQRK

SEQ ID NO: 47315 - protein, 315 aa, Zea mays
  Clone ID: 700046203_FLI.pep
KQTWLMLCDPDDRLAPRPVLARTPDEVIAAKGVKPTLSPNLNTLALVEAAGVKRLLFCGVGCQVQALRSVEKYLGLEKLYVLGTNCVDNGTREGLDKFLKAASSEPETVMHYEFMQDYKVHLKHLDGHIEEVPYFCLPANDLVDVIAPSCYSCFDYTNGLADLVVGYMGVPKYAGVSMTQHPQYITVRNDRGQEMLNLVAGLLESTPTISSGSRQPFVMETVKADDAAKLGKGPSKPAPRFVGDILAFLLNLVGPKGLEFARYSLDYHTIRNYLHVRRAWGKQRAEQHIPGYAKKIVEAYDKDGRIEAMVTQSGD

SEQ ID NO: 47316 - protein, 490 aa, Zea mays
  Clone ID: 700152577_FLI.pep
LVFSARGRMASWLEQLQRELAARGLTVASIPGKGRGLIATCTFFPGDVILNQEPYASTPNKILVGSSCDHCFTSGNLRKCSMCRVMWYCSSNCQKEEWKLHQLECRAMAALTEDRKKMLTPTIRLMVRLALKRKLQNEKVIPSSSIDNYNLVDGLESHISKVDENQLVLYAQMANLVSLILPFIELDLKEIAQTFSKFACNAHTICDPELRPLGTGLYPVISIINHSCVPNAVLIFDGRTAYVRALQPINKDEEVSISYIETAAVTKKRNNDLKQYFFTCTCPRCVKGFDEDALLEGFRCKNQACDGFLLPNSGKKAYTCQKCGASRDVEEIKNMRSEILQLSDKASSFLSSGNKAEAGSIYKIIEQLERNLYHAFSTTLLHTCETLLKIYLELQDWWTALTYCRLTIPVYERVYPPFHPMIGLQFYTCGKLEWLLEFTEDALKSLTRAADILKVTHGVKSQFMKELFGKLEEARAEVSFRLSSRHGHDE

SEQ ID NO: 47317 - protein, 258 aa, Zea mays
  Clone ID: 700099647_FLI.pep
PSSTSGHPHPHLRLPRPNRNARWCRTLTRTRIRTRGRAHHLARRATAASRRHRRRRSRRRHSRRRASATAASRRHRRRRSRRHSRRRASATAVSLRHHRRRSRRRASATAVSLRHRRRRSRRHSRRRAASSARTRTTRINASVAHHARRAHRARRVHRARPTTGRHTRGPASAHHRTASAPSCDPRTLPFLQSAACCDRRVICPSNLALVMSHVLGSRVRCVVWVVWRVSVLSCITILSFRTCVTLIDDVFIHFMLLS

SEQ ID NO: 47318 - protein, 137 aa, Zea mays
  Clone ID: 700051079_FLI.pep
RWSGWRTPSTSWAGCARSAPPPSSPSGRPRRRKRKTATRRRPATRRATTRSPRRPRCTRTRTRGTRTPPRSTSTSTTPGRTRPSTSSTAPRRTPTPASSADLMPAWRSSHHLLFLHIPIFVVVGLLAYLLDRPPRRR

SEQ ID NO: 47319 - protein, 298 aa, Zea mays
  Clone ID: 700103624_FLI.pep
RKAYLIQNLMTSRWIAAQQKSPQPSVEGHNGCTRRPGCVASYRDPGKQIFGCEHYKRNCKLVAACCDKLFTCRFCHDKVSDHTMDRKSVMEMMCMQCLNVQPVGPNCQSPSCNGLSMAKYYCSICKFFDDERSVYHCPFCNLCRLGSGLGTDFFHCMKCNCCLGIKMIEHKCREKMLEMNCPICCDFLFTSSAPVKGLPCGHFMHSACFQAYTCTHYTCPICCKSLGDMTVYFGMLDGLLAAEQLPEEYQDRCQDILCNDCERKGRSRFHWLYHKCGFCGSYNTRVIKTDTAECSRPL

SEQ ID NO: 47320 - protein, 522 aa, Zea mays
  Clone ID: 700050063_FLI.pep
ARERISHRSRRGPREKRTRERDSRRLLPMAMAARLLRATEVASRFLSASHGFVQRAAYTAGGIVDVGQPTPQSHPELLADGEITPGITNEEYISRRKKLLEVLPEKSLAIIASADQQMMTDVVPYPFRQNGDYLYITGCTQPGGVAVLSEETGFCMFMPDTNKEDLVWQGETAGVEAAVDFFKADKAFPLSQMQKILPELIEQSKGVYHNVNTTSSYKNLDAFRRASLNNKVKDLTNYTDELRWVKSKSEIKLMRESASIVSQSLLQTMLMSRTHREESQLAAKIEYECKMRGAQRMAFHPVVGGGANGSIIHYSRNDRKIRTGDLLLMDVGCEYHGYLSDLTRTWPPCGRFSPAQEELYSLILETNKECIKLCKPGTSINEIHNHSVKLLIKGFQELRILEKGKSIQYNYLNPTAIGHSLGMDIHDSMTLPKDKPLEPGVVITIEPGVYIPAAPVLNERAPSRYRGMGIRIEDEVLITDDGHEVLTASVPKEVSHLTTLMNMGRGGSAADAHGHELRAACS

SEQ ID NO: 47321 - protein, 216 aa, Zea mays
  Clone ID: 700150494_FLI.pep
HRSGGGGANAGEGEGVREGAPAMVHVNFYRNYGKTFKKPRRPYEKERLDAELKLVGEYGLRCKRELWRVQYALSRIRNAARHLLTLDEKNPRRIFEGEALLRRMNRYGLLAEGQNKLDYVLALTAENFLARRLQTLVFKAGMAKSIHHARVLIKQRHIRVGRQIVNVPSFMVRVESEKHIDFSLSSPFGGGPAGRVKRKNQKKASGGGDAGDEDEE

SEQ ID NO: 47322 - protein, 339 aa, Zea mays
  Clone ID: 700084742_FLI.pep
SSSPQRAAGAAVAGVLLVAAAALCSCGAMAQLTADYYDCTCPDAYNIVKQVLIEAHKSDVRIYASLTRLHFHDCFVQGCDGSVLLDAVPGVANSTEKLAPANNNSARGFPVVDKVKAALEDACPGVVSCADILALAAEISVELSGGPKWAVLLGRLDSKKADFKSAENLPSPFDNLTVLEQKFAAVGLHTVDLVALSGAHTFGRVQCQFVTGRLYNFSGTNRPDPTLNSGYRAFLAQRCPQNGSPSALNYLDPTTPNLFDNHYYTNLEVNRGFLGSDQELKSAPQAQGVTAPVVDQFATSQAAFFSSFAQSMINMGNIQPLTDPAKGEVRCDCRVANDD

SEQ ID NO: 47323 - protein, 315 aa, Zea mays
  Clone ID: 700045263_FLI.pep
DTERHVIRDCVDFASSGLADPGLSDVSELLLSPAFVFPDQSLLSIFFGISIVPFAFPVAAALLSSLLLLFTSLLPLLLSLPPLLLASLIDLRELMSLDVGTPLSSSSVVIVVAADLELPMELPFSLGRSERTADGSPDVELASLLAEATDDDARTCSKKRTCTTTRRGRRSFCTACMHASCDSCLQSISPHSFFFSLFDRLGCSCVSMEGTVIKYIQTPYNGSTRWRHREIPSDTCQWHDRARHALAGVEKTPFRRVRSTLEEEGWDLWRSRQDIHRSALQLQALTRWKQMSTSRCPRFLHRLEISPYHYHHSVT

SEQ ID NO: 47324 - protein, 283 aa, Zea mays
  Clone ID: 700046058_FLI.pep
RSLALVYSGMYLGSVTGLSLSPLLISRFGWPSVFYAFGSLGTVWFALWQSKAHSSPDDDPELSKAEKRHILGGSALKEPVTSIPWRLILSKAPVWALIISHFCHNWGTFILLTWMPTYYNQVLKFNLTESGLLCVLPWLTMAVFANIGGWIADTLVQRGVSVTNVRKIMQSIGFLGPALFLTLLSKVRTPAMAVLCMACSQGSDAFSQSGLYSNHQDIGPRYAGVLLGLSNTAGVLAGVFGTAATGYILQKGSWDSVFKVSVVLYIVGTVVWNVFSTGEKILE

SEQ ID NO: 47325 - protein, 473 aa, Zea mays
  Clone ID: 700333572_FLI.pep
LSIPAAIKDMPKMNPQGIYVNKNVKLDDLQVYGFDYDYTLSHYSEHLQCLIYDLAKRHLVNELKYPESCLQYEYDRTFPIRGLYYDRLKGCLLKLDFFGSIEPDGCFFGRQRLSLSEIKELYGTRHIGRDQARHLVGLMDVFCFSEACLIADIVQHFIDAKLEFDPSYIYEDVNQSIQHVHRSGLIHRQILSEPEKFLIKKSQVFRFLKMLKEKGKKLFLLTNSPFYFVDGGMRYLLEDQHFDGNSWRELFDVVIAQANKPTFYNSDHPFRVYDTQKDTLTFTAVDKFLPDQVYYHGCLKSFLQITKWKGSEVIYFGDHLLSDLRGPSKAGWRTAAVIRELEDEIEIQNGDSYRFQQAKLSIIHDLLGKVHAAVVSTEKGQVYKALLNELNAERRQCRSGMRDLFNTSFGATFLTDTGRESSFSYHIHQYADIYTSKLENFLSYAPESWLHPPHDIKIMPHNAKVPASLFSTS

SEQ ID NO: 47326 - protein, 846 aa, Zea mays
  Clone ID: 700321661_FLI.pep
RMATKATNISSAVGTSMTAGSDEVETKRSSTGKKIKKEKNDLASELRDLGWSDADLRDETKAAPMSLEGELTQILREVAPKPLEGKRTGGIDKSQVNALKRQALLLKREGRLAEAKEELKKAKILEKQLEEQEILGEAENSDDDLAAIIRNMDDDKNDDIFIDDSKFPAFNFEQIMVASNDLATDGHFDVTDDDMNDPDMAAALKSFGWSEEDDKQLENLEPVSSNQEGLKEQVLSLKREAVANRRSGNVVEAMSLLKKAKLLEKDLKTEEPDSKVPSLERQKTTHAEDATYAGTNVRPIPTPKSKLAIQRELLALKKKALALRREGKVDESEEELRKGSVLEKQLEELENSSKPPVAKETRSFPSNPPYKVEPPNINLADEVYEPEVTDKDMQDPALLSVLKNMGWEDAGSDSVETTDKASFSAHVVHHKSSKTKGQLQKELLGIKRKALALRRGGKNTEAEEELEKAKVLEQQLAEMEESNNLSASQGVTTAGGDEILLVHASESGTPVVTLCGSPSKPQIETTNPNQGDVGEESRAGRSPALSQPAFTDPLGSEKGSHSPSVVHDRNEHQKTQGDDTLKDEILLHKRKAVAFKREGKMAEAREELKLAKQLEKHLEGAQQDTMDGVGDSITPAVEQNSLVQQPASSSNHTDDITSPPPTQASKRTQPQKAMSSRDRLKIQRESLAHKRNALKLRREGKTAEADAEFELAKELESQLEESDNQSSSSGGKSSEPNDTSVENLLDPQIMSALRSIGWSDMDLSMQSSSAQPLKPVQSSSSQPPQKVEAKSSVAATSKPQSERSQLEEQIKAEKLKALNLKREGKQAEALEALRSAKRLEKKLNSA

SEQ ID NO: 47327 - protein, 363 aa, Zea mays
  Clone ID: 700321691_FLI.pep
DRQDDHRHGLLPRHDGHGAVVRCHDPGVRIRQVVAHLHAGPVLGDQPLRGALRRAAAVLPLHLHQQPLHHEHPVHRRRHAAEADRPGAAHCMELPLPPGLPRVDHHALLPVDAAQHAGDGHPAAQGHVRRLLRQPHGADRGAPVHHLVHADAVHVRVPRRQDPHHRAVPRHGGRHRLHRGGPRRGVAGRAQRRHRDGGRGEGGRQDTRHRAALQRVALGHLLPAVHGVLQHHAAAQQPDQRRDLLAAVVEEPHAAGLQLQPHRLLLHGRPQLQLRRRGRVRPAHGRHAQAVQLRGGPAGQGEQVRPVPGAQPGHGGAARQGPQEGGQWAGQGRGRQGPTHVRVELQRVARVRRVRQWRRRVQR

SEQ ID NO: 47328 - protein, 578 aa, Zea mays
  Clone ID: 700334006_FLI.pep
MNLLEDRLQHANGAVVLATIKVFLHLTMSMTDVHQQVYERIKAPLLTLVGAGSPEQSYSVLCHLHLLVMRAPMLFSSDYKSFYCQFSDPSYVKKLKLEMLTAIANESNTYEIVTELCEYAGNVDVPIARESIRAVGKIALQQYDVNAIVDRLLQFLEMDKDYVTAETLVLVKDLLRKYPQWSHDCIAVVGNISSKNIQEPKGKAALIWMLGEYSQDMHDAPYILESLVENWDEEHSPEVRLHLLTAVMKCFFKRPPETQKALGDTLAAGLSDTHQDVHDRALFYYRLLQYSPNVAERVVNPPKQAVSVFADTQSSEIKDRIFDEFNSLSVVYQKPSYMFTDKEHRGPFEYSEDLTGLTEDPENVISAQRYQENDNDLLLSTSDKEDNGTRASNGSSTSTYNAPSDLISPSLISSQAPAETSLVNTGGTYSSQSNFSLDDLLGLSVTEAPALPQPTLALNSKPVLDPGTFQRKWGQLALALSQECSLSPQGAVALMNPQSLIRHMQSNHIQCIASGGQPPNYKFFFYAQKDGAAAFFLVECIVNTASAKAQLKIKADDGTAAEAFSSLFQSALSKFGLS

SEQ ID NO: 47329 - protein, 230 aa, Zea mays
  Clone ID: 700206564_FLI.pep
EDAAKVVDGLALKAADRQSSIEQIKKLYELFCKCDCTLLEINPLAETADNKLVAADAKLNFDDNAAFRQKEIFALRDTTQEDPREVAAAKADLNYIGLDGEIGCMVNGAGLAMATMDIIKLHGGTPANFLDVGGSASEGQVVEAFKILTSDDRVKAILVNIFGGIMKCDVIASGIVNAAKQVDLKVPVVVRLEGTNVDQGKRILKESGMTLITAEDLDDAAEKAVKASVK

SEQ ID NO: 47330 - protein, 766 aa, Zea mays
  Clone ID: 700332927_FLI.pep
RKGKKMMRLSTPARTCFPSTLPPPQLPPPQLPSRSPHLLASALAPRSAAWRRGLPPPPPPVVSAMRRRGRRRAAPPPAAAGGGGGGELAASDSQEKRAGTDLKTLSTRFWKVAAPYWWSEDKTQARLRLAAVFALTLGTTGISVGFNFLGRDFYNALADKDQEKFTTQLLYYLGAFAGGIPFFVLRDYARETLSLRWRSWMTSYYMKRYFKNRTFYKIQSQSIIDNPDQRINDDLSAFTGTALAFSLTLFNAAVDLVSFSNILYGIYPPLFIVLVVYSLGGTAISVFLGKNLVNLNFMQEKKEADFRYGLVRVRENAESIAFYGGEENELQLLLDRFRRAFENLSELLIASRNLEFFTNGYRYLIQILPAAVVAPMYFSGKIEFGVINQSVSAFNHILSDFSLIVFQFQSISAFSAVIDRLGEFDDLLDGNESSLSSQRDSIDGINIVFKSSGPCVPSSNGSLTQSDPCMVLEIHNLTLLTPRSGNVLITGLTMELKDKDHLLVMGPSGSGKTSLLRALAGLWTSGTGEIIYHVRGSTQLQKPNPSSDKPSSMNLKGEEESLQSSKQRRDNGIFFVPQRPYMVLGTLRQQLLYPTWTEEVQHSPDNDDKNSDPLPFLSEVSTSDLVGAKSEVPSTAELIEVLEDVKLGYILPRFNGLDSTHDWASVLSLGEQQRLAFARLLLATPTLVLLDESTSALDEANEAHLYSQIEAAGITYVSIGHRKTLHKFHNKALYISMSDSTDTNPRNWELKPADKLPAEEPSQFPS

SEQ ID NO: 47331 - protein, 183 aa, Zea mays
  Clone ID: 700333062_FLI.pep
GGWPIEFPFRQAVTAASLTFTGDTIAQVRSRIVDRRRCCPDSNTKELIPDILLNHDWIRALRMASYGFLLYGPGSYEWYQLLDRCMPKQTFVNLSAKVILNQIVLGPCVIAVIFAWNNLWLGKLSELPSKYQNDALPTLLYGFKFWIPVSIVNFGVIPLPARVAFMSSCSIFWNFYLSTTMSK

SEQ ID NO: 47332 - protein, 209 aa, Zea mays
  Clone ID: 700445470_FLI.pep
HEVVPGVVESLKVITKFCSERIAKYAFEYAYLNNRKKVTAVHKANIMKLADGLFLESCREVASKYPGIQYNEMIVDNCSMQLVSKPEQFDVMVTPNLYGNLVANTAAGIVGGTGIMPGGNVGQDYAIFEQGASAGNVGNENLVEQKKANPVALLLSSAMMLRHLQFPSFADRLETAVKRVVAEGTYRTKDLGGSSTTQEVTDAVVANLD

SEQ ID NO: 47333 - protein, 335 aa, Zea mays
  Clone ID: 700433856_FLI.pep
LIDCSLYPINSTHLLLGRRRALGRRALREPVLIGAVVVDHVAGLRPAELLLGGAVELLRHPCAVGARAGGGVRRGAPGGGVPAVRRDEGRLGPVGPDAAPLRGPLLRVPHAGVHPHRLRRRERHGPVAAAPELPDGDAVHVEDDVGGVPQHGVGVEGRRGVEPHPELLLPPALPLAVHVRVHRVRLPARVPQELEVDLVVLRTLRRKIEGGDGAGGVPRDELELHVEAAVEVLGLGLEARAGGPVHGQRQELAVVEDLAAAVAPGDVHVLVEVAAGARGSPVLLLQQQQQHRHQNQRLHGSSLARSIDRSVHFRLQFVSQQDWLTAIDRQDDGAC

SEQ ID NO: 47334 - protein, 473 aa, Zea mays; identical to SEQ ID NO: 47172
  Clone ID: 700434564_FLI.pep

SEQ ID NO: 47335 - protein, 473 aa, Zea mays
  Clone ID: 700454665_FLI.pep
HIVGGIMACDETRFDAIIENKIPLVLSVGALDMVNFGARDTIPLAFADRNIHVHNEQVSLMRTTVEENKKFARFIADKINKSSSKVTVCLPQKGISAIDAPGMPFYDPEATSTLLGELNTLIQRTDIREVKLFPYHINDPEFANALVDAFLSMDVQASSSAQPKQDLNIGKSCSGQKISDSSIIWRTPVDFPDAKPEILRRTRSILHKLKEQISDGTPVIGAGAGTGISAKFEEAGGVDLIVLYNSGRFRMAGRGSLAGLLPFGDANDIVLQMANEVLPVVKGVPVLAGVCATDPFRRMEYFLRQLETIGFCGVQNFPTVGLFDGNFRQNLEETGMGYSMEVEMISMAHRMGFLTTPYAFNPDEAAAMAKAGAHIVVAHMGLTTAGSIGAMTAATLDDSVLRVQAIADAAFGVNPDIIVLCHGGPISGPLEAEFVLKNTKRVHGFYGASSMERLPVEQAITNTMREYKRISLK

SEQ ID NO: 47336 - protein, 312 aa, Zea mays
  Clone ID: 700438448_FLI.pep
QRKVYAARTLLFLDGEDSSMLRPLAIELSSPHPEKEQLGAVSTVYTPPDSGDDGITAGRFSTWELAKVYASANDAAENNFVTHWLNTHASMEPIVIAANRQLSVLHPIHRLLKPHFRKTLHINAVARQIIVGSGDQRKDGSVFRGIDEVTYFPSKYNMEMSSKAYKAWNFTDLALPNDLIKRGLAKGDPKKPETLELAIKDYPYAVDGLDMWAAIKKWVADYCAIYYADDGAVARDSELQGWWSEVRNVGHGDLADAPWWPAMDCVADLVETCATVVWLSSASGGRPRRWRSSGRGWRRSRATSTGGTRTLR

SEQ ID NO: 47337 - protein, 169 aa, Glycine max
  Clone ID: 701064730_FLI.pep
KKESEKQKHQPQPPIIFIFPTTNSSTLTTNPSCQLNILGHNGYTLGVNGTQVSVLKEPNKVCLSSFLQCKHGVALETQISLEVLSNFTNQPLEGELPDQKLGTLLVFPNLTKSNGTRTITVGLLHTTSSWCRLTCSLGCKLLPRSLSSCGLTSGLLRTSHLCLLPKRST

SEQ ID NO: 47338 - protein, 432 aa, Glycine max
  Clone ID: 701065776_FLI.pep
IPPSPALSRPNSSHRRFRYGGYRMGKILRENAKPSANSSSAYPSAAPATTSSTSVTETVRGSHQFKITGYSLSKGIGIGKYMASDVFSVGGYNWAIYFYPDGKSVEDNATYVSLFIALASEGTDVRALFELTLLDQSGKERHKVHSHFERTLESGPYTLKYRGSMGYKRFFKRTALETSDYLKDDCLSVNCSVGVVRSHTEGPKIYTIAIPPSSIGQKFGQLLESGKGSDVNFEVNGDIFAAHKLVLAARSPVFRAQLFGPMKDQNTQRIKVEDMEAPVFKALLHFIYWDSLPDMQELTGLNSKWASTLMAQHLLAAADRYGLERLRLMCEASLCEDVAINTVATTLALAEQHHCFQLKAVCLKFIATSENLRAVMQTDGFEYLKESCPSVLTELLEYVARFTEHSDIMCKHRNEALLDGSDINGRRVKQRL

SEQ ID NO: 47339 - protein, 134 aa, Glycine max
  Clone ID: 701129032_FLI.pep
DVSCIYRKKNNAERTTLLRFIHWVMTVTRLRSQILIILPSLFRLNRLGNRILKSLKKRQNCELVFTWINSKLRQVYLSRSKYISKRIYLLTERWALQQLQYLFWRPFTLHQRILHESVNERILKLNLHIDIYLR

SEQ ID NO: 47340 - protein, 215 aa, Zea mays
  Clone ID: 700550082_FLI.pep
GWKGPCSNYRVMSTRYTGTMVRTKHDAHNSIVTARAGKDLVSSLVSGLLTIGPRFGGAIDDAARYFKDACDRGLTPYEFVEGMKKKGIRVPGIGHRIKSRDNRDKRVQLLQKYAHTHFPSVKYMEYAVQVETYTLSKANNLVMNVDGAIGSLFLDLLSGSGMFTKQEIDEIVEIGYLNGLFVLARSIGLIGHTFDQKRLKQPLYRHPWEDVLYTK

SEQ ID NO: 47341 - protein, 414 aa, Zea mays
  Clone ID: 700475101_FLI.pep
TRQFTMAAPAQAQAQVLPLLRWSRSASFLCASSRRLFSALQRPSAAARCEAGSKAMLKGMDYSELENWVQAQGFRPGQAMMLWKCLYGNNVWAHCYDELAGLNKDFRKMITEHADLKALTMKDIHIASDGTRKILFSLEDGSVIETVIIPCARGRTTICVSSQVGCAMNCQFCFTGRMGLRKHLSTAEIVEQAVFARRLFSDELGSINNVVFMGMGEPFHNIDNVIKASAIMVDEQGLHFSPRKVTVSTSGLVPQLKRFLQESNCSLAVSLNATTDEVRNWIMPINRKYNLNLLLGTLREELNLRQKQIVLFEYVMLSGVNDSMDDAKRLIELVQGIPCKINLISFNPHGGSQFKPTPDDKIIEFRNVLIQGGLTVFVRLSRGDDQMAACGQLGEPGGYQLPLLRVPEKFQVAL

SEQ ID NO: 47342 - protein, 318 aa, Zea mays
  Clone ID: 700620909_FLI.pep
RALLEREWRVQHRGRLLCQVHRPVAGERAQARHPLAALRLQYGQGRRRRPLLWPLRYREDDAVDGSQQASDRRRRALLENVVFDEHTREVDYADKSVTENTRAAYPIEYIPNAKIPCVGPHPKNVILLACDAFGVLPPVSKLDLAQTMYHFISGYTALVAGTEDGIKEPQATFSACFGAAFIMLHPTKYAAMLAEKMQKYGATGWLVNTGWSGGRYGVGKRIRLPYTRKIIDAIHSGELLTANYQKTEVFGLEIPTEIKGVPSEILDPINTWTDKAAYKETLLRLAGLFKKNFEVFASYKIGDDSNLTDEILAAGPNF

SEQ ID NO: 47343 - protein, 239 aa, Zea mays
  Clone ID: 700552621_FLI.pep
KNFFFFYIWGSPPFWASPPPGLFFLPGLPGLSFFSFLGFFFALGVFLCFLVSLLILFSFPLSSPLSSRRRYGLSSGVPTCGPPLPFLGWFSVPFFCGGPFFPSPLFWFPPPPGGGLFAFLPSSRFFFSPVVRPPPFFPSPRGAFFSLRFAPPPFFPPSPRFPFGLWFSRVFFFALFFFSIFLPFSCLFCLFFFGPAFCCFGAPLALLSPFFSAAAPHFFGVASSPPFSPFLRALLPPLP

SEQ ID NO: 47344 - protein, 136 aa, Zea mays
  Clone ID: 700571984_FLI.pep
FCLCPLGWAPWSPRLVEAVVFGCIPVIIADDIVLPFADAIPWEEIGVFVAEEDVPKLDSILTSIPTDVILRKQRLLANSSMKQAMLFPQPAQAGDAFHQILNGLARKLPHGDNVFLKPGERVLNWTAGPPGDLKPW

SEQ ID NO: 47345 - protein, 95 aa, Zea mays
  Clone ID: 700381390_FLI.pep
FLVEQSYKVSQHHVYKVGLHHMVIANAHQVLSSLARPCLFPLQNHQALHQLVVDNNEIINGAIPWQHFSVTSMRHCSKCTVEWNLNMYAFAIAHL

SEQ ID NO: 47346 - protein, 584 aa, Glycine max
  Clone ID: 701043069_FLI.pep
PSLAHRCLLLHTRRIMEALKTLFLAIFVVLASALYSANAKIQEHEFVIQATPVKRLCNTHSTITVNGQFPGPTLEVNNGDTLVVKVTNKARYNVTIHWHGIRQMRTGWADGPEFVTQCPIRPGESYTYRFTIQGQEGTLWWHAHSSWLRATVYGALIIHPREGEAYPFTKPKRETPILLGEWWDANPIDVVRQASQTGAAPNISDAYTINGQPGDLYKCSSQGTTIVPIDSGETNLLRVINAALNQPLFFTVANHKLTVVGADASYLKPFTTNVIMLGPGQTTDVLIQGDQPPTRYYMAARAYQSAQNAPFDNTTTTAILEYKSAPCPAKGSSIKPVMPSLPAYNDTNTVTAFSKSFRSPRKVEVPAEIDDNLFFTIGLGLNNCPKNFNANQCQGPNGTRFTASMNNVSFVLPNNVSILQAHHLGVQGVFTTDFPTQPPVKFDYTGNVSRSLWQPVQGTKVTKLKFGSRVQIVLQDTSIVTPENHPIHLHGYDFYIVAEGFGNFDPNKDTSKFNLVDPPMRNTVAVPVNGWAVIRFVADNPGAWIMHCHLDVHIGWGLAAVLLVDNGVGLLQSIEPPPEDLPLC

SEQ ID NO: 47347 - protein, 271 aa, Glycine max
  Clone ID: 701058804_FLI.pep
TEVDYLGQLHHQNLVKLIGYCVEGENRLLVYEFMSKGSLENHLFRRGPQPLSWSVRMKVAIGAARGLSFLHNAKSQVIYRDFKASNILLDAEFNAKLSDFGLAKAGPTGDRTHVSTQVMGTQGYAAPEYVATGRLTAKSDVYSFGVVLLELLSGRRAVDRSKAGEEQNLVEWAKAYLGDKRRLFRIMDTKLGGQYPQKGAYMAATLALKCLNREAKARPPMTEVLETLELIATSKPAGRNCQLEQKRVHAPDRKSSVQKGSHLNHTPTAFP

SEQ ID NO: 47348 - protein, 863 aa, Glycine max; identical to SEQ ID NO: 39883
  Clone ID: 701059108_FLI.pep

SEQ ID NO: 47349 - protein, 480 aa, Zea mays
  Clone ID: UC-ZMFLMO17074E01_FLI.pep
PSRSRSCIAAEMGASTTPLASAAAALLLLLLAPLAAAADMSIVSYGERSEEEARRMYAEWMAAHGRTYNAVGEEERRFEVFRDNLRYVDAHNAAADAGVHSFRLGLNRFADLTNDEYRATYLGVRSRPQRERRLGDRYLAGDNEDLPESVDWRAKGAVAEIKDQGSCGSCWAFSTIAAVEGINQIVTGDMISLSEQELVDCDTSYNQGCNGGLMDYAFEFIINNGGIDTEEDYPYKGTDGRCDVNRKNAKVVTIDSYEDVPANSEKSLQKAVANQPISVAIEAGGRAFQLYNSGIFTGTCGTALDHGVTAVGYGTENGKDYWIVKNSWGSSWGESGYVRMERNIKASSGKCGIAVEPSYPLKKGANPPNPGPTPPSPTPPPTVCDNYYSCPDSTTCCCIYEYGKYCFAWGCCPLEGATCCDDHYSCCPHDYPVCNVKQGTCLMGKDSPLSLSVKATKRTLAKPHWAFSGNTAADGMKSSA

SEQ ID NO: 47350 - protein, 351 aa, Zea mays
  Clone ID: UC-ZMFLMO17070G09_FLI.pep
ISEKMARSAGTRRRVARQLKSTHPIPSYRWKSKPMKKPMKKSNRKQVLPTLQKMDWEDANCSVCMEYPHNAVLILCSSHDKGCRPYMCGTSYRHSNCLDQFKKAYTKGALLEEVPANSVGSNLDSAPLAAEKTDSIDLACPLCRGKVKGWTVVEPARSYLNGKRRTCMQDGCSFVGTYKELRKHVKLEHPLAKPREVDPVLEQKWRLLEIERERQDALSTITATMGRAVVFGDYVLDLEDGMDSEDVDSDADNDGRGTENTRRMLLFIMRQVAQHHQNQRLQNATGASDNAEDNYVVSSGANGTTPYSYPLEGEDENGMVVAGGRSTDVLRPERRRRRRRRNRGRLFLGAN

SEQ ID NO: 47351 - protein, 856 aa, Zea mays
  Clone ID: 700805988_FLI.pep
NFMETSISPPGTSKQSAVRKPSPGSSLKDLCLVSKQGSIAEVESALALLKKSGGNIDGRNAFGLSALHLATWRNHLPIVRRLLDAGADPDARDGESGWSSLHRALHFGHLCIAGVLLQFGASLALEDTKGRTPVDLISCPVSQANGDFPDAVATEVFSWGSGTNYQLGTGNAHIQKLPCKVEALHGSYIKTVAASKFHSVAVSSNGELYTWGFGRGGRLGHPDIHSGQTTAVITPRQVTVGLGRKRVNAVAAAKHHTVIATELGELFTWGSNREGQLGYPSVDTQPTPRRVGSLKQRIISVAAANKHSAAVADTGEVFTWGCNKEGQLGYGTSNSASNCIPRMVEYLKGKVLRGVSAAKYHTIVLGADGEVFTWGHRLVTPRRVVVARCLKKGGNTNLKFHRMERLQVISVAAGTTHNTALTADGALFYWVSSDPDLKCQQIFSMCGRNIVNISAGKYWTAVATSTGDVFMWDAKKRKDETPIFTRVHGVKRATFVCVGETHMLVLSSIYHPEYPPKPKSQGLKSMLEWNGGTEELGEDILFDDVQPNSGLSGSSGEMSKGVPSLKSLCEKVAVEYLLEPKNSIQLLEIADSLEAKELKKHCEDLAIRNLDYIFTVGASSIMNASSEILVNLEKLLDEKSSEPWSQHRLPTMTATYPAVIDSDVEEDEAREFPKTRKCGKSASRPSAMSSDDSFLQKDCTAEQAVSKQIRALRKKLQQIEILEAKQLAGHQLDSQQVAKLESRAALEGELAELGIPSEIYSTSSACPAEGRTNRKPEVSKKQKRKNKQSTQTPSVKNEPGQQIPITELQVLQVNVSAEKEAYAADPIKPMEAAAFSNTKDTASPPEKKPSQPTPSK

SEQ ID NO: 47352 - protein, 262 aa, Glycine max
  Clone ID: 700670974_FLI.pep
IQFTMSSSSEYSQFSGQKPARSPEKSSFSQTCSLLSQYIKEKGSFGDLTLGMTSCGSPETSCQSATTMNLFPTKENNVTPKDLTAMDLFSPQASSYRPSEEIPTLINSSAIKSVSKSAKTAQMTIFYGGQVVVFDDFPADKASEIMSYATKGIPQSQNNSVFTYTPSQPSFPANLVRTSADSSAPIIPSVNITNSIHEHPQASSRPVVCDLPIARKASLHRFLEKRKDRIASKAPYQLANGSSNQPAESMPWLGLSASSPRI

SEQ ID NO: 47353 - protein, 239 aa, Glycine max
  Clone ID: 701098049_FLI.pep
IYTIYIYIYIYIYNIPLHQRRESRNNDNDDSIITDKLTSGLEFSKAARQVILVDLVGFLGRNGVSGGLGEADGDLEAVVVGDLLHEAVDLSFGSGEGGGSRHGALHELGLDLHVHELLLERVHGLRHLLEVPRGQRRLQRFDDVAHRLADRRHLRLRVEAGHDGVQARGKPEVVHLLRALTDRVLRVDPRSVHVAFLDRLLHLQLLRFLLLLALTRLPLQRFRRELQFHDLVHQLLRVP

SEQ ID NO: 47354 - protein, 166 aa, Glycine max
  Clone ID: 701100139_FLI.pep
FIHNEKPIAESLVIVEYIDETWKNNPILPSDPYQRALARFWSKFIDDKVFGAAWKSVFTADEKEREKNVEEAIEALQFLENEIKDKKFFGGEEIGLVDIAAVYIAFWVPMVQEIAGLELFTSEKFPKLHNWSQEFLNHPIVKESLPPRDPVFSFFKGLYESLFGSK

SEQ ID NO: 47355 - protein, 318 aa, Glycine max
  Clone ID: 701120878_FLI.pep
VPSAPPFLLLLQSMAATSTSLFFSNLHSLNPQPFSSSLSFFRNVHSTLSFPSSSKPSRGVVAMAGSGKFFVGGNWKCNGTKDSISKLVSDLNSATLEPDVDVVVAPPFVYIDQVKNSITDRIEISAQNSWVGKGGAFTGEISVEQLKDLGCKWVILGHSERRHVIGENDEFIGKKTAYALSEGLGVIACIGELLQEREAGQTFDICFQQLKAFADAVPSWDNIVIAYEPVWAIGTGKVATPEQAQEVHAAVRDWLKKNVSAKVVSKTRIIYGGSVNASNSAELAKQEDIDGFLVGGASLKGPEFATIINSVTSKKVAA

SEQ ID NO: 47356 - protein, 320 aa, Glycine max
  Clone ID: 701067675_FLI.pep
LFNFSFLIFVSLCQVFSFLVDLMYFHSVSADGKFEKSAIADFVFSNKLPLVTIFTRESAPSVFENPIKKQLLLFATSNDSETLVPAFKEAAKSFKGKLIFVYVEMDNEDVGKPVSEYFGISGNAPKVLGYTGNDDGKKFVLDGEVTTDKIKAFGEDFVEDKLKPFYKSDPVPESNDGDVKIVVGNNFDEIVLDESKDVLLEIYAPWCGHCQSLEPIYNKLAKHLRNIDSLVIAKMDGTTNEHPRAKPDGFPTLLFFPAGNKSFDPITVDTDRTVVAFYKFLKKHASIPFKLQKPTSTSESDSKGSSDAKESQSSDVKDEL

SEQ ID NO: 47357 - protein, 575 aa, Zea mays
  Clone ID: UC-ZMFLMO17132E07_FLI.pep
PATFPEGLKSLDLSGNRLSGGIPPGLGSCATLRRLRLSSNWLAGTIPPRIGELARLRVLDLSGNRLTGGVPPELLHCRGLVRMDLSRNLLHGRLPSGLAQLKNLRFLSLSGNNFSGEIPSGLGQLGSLEFLNLSNNSLSREVPADLVALRNRTVLLLGNNKLSGEEEITAAAPGSPVHVVTAHSVTGELFPVSPIATAIRKLIDTGPGTSNGSTTTTSSSNGGDGGLGTKEIAAIASASAIVVLLLVALTLCICTRKWRLKPSERSFASKEVKVFADVDIGAPLTYETVVRATGNFNASNCIGNGGFGATYRAEVAPGVLVAIKRLAIGKQHGDKEFQAEVRILGQCRHPHLVTLLGYHINESEMFLIYNYLPGGNLERFIQERGRRPISWRRLHKIALDVARALAYMHDECVPRVLHRDVKPNNILLDNECNAYLSDFGLARLLRNSETHATTDVAGTFGYVAPEYAMTCRVSDKADVYSYGVVLLELISDKKALDPSFSPYGNGFNIVSWAVRLIQRGRVREFFVEGLWEKAPHDDLVEFLNLAVRCTQESLASRPTMKHVLRCLRELRPPSY

SEQ ID NO: 47358 - protein, 192 aa, Zea mays
  Clone ID: LIB189-024-G8_FLI.pep
GLLFFSARRKGKRSSVPAGQRVPAHDRGGARAPGTDDALHTGGQGGEQQVLRLRPLQTRRRKDVGRAVRVGEGRAAGVPEAAADARADGAGGAAHHQVGQGQGPGVPARVARLRGLQQRAARVHRRRPHRRGRLQGPAAPRPGPGRRHPRVQAPQGDERLLLAPRARRGDGVLAAARRVEAPLQGKAQAAMR

SEQ ID NO: 47359 - protein, 154 aa, Zea mays
  Clone ID: LIB3062-024-G11_FLI.pep
QDLNLINWHLAVSLIRCIVVRVHVRQLRHLISLQPEPCPGEALPLDEPQQELHHLGGPLERVGGARLLGVLGHEDADALVLAAAPQDLEGVLVGAVVADVHGQHAAAVREAERLEQELQGLALVPLDGGPHLQHHPPVRQPQPRVPPQHAPHRL

SEQ ID NO: 47360 - protein, 403 aa, Zea mays
  Clone ID: LIB3151-024-E3_FLI.pep
HGALGHCHPRRRGRGPEPPGAPAGGGEARAGAVPAGGRGPAARGRAGAGRRGGRGARAGDGPLLQLGARVRAHPRRHRGDGGQHHGRPRPPLRRRVRRLHRQEPRVPGAPRHGQLAPLVPRLRRRRGVRPCAGPGDRGQQLLHHGGQRRHAQARQGGRQHPVRLPDPAGRDGHVQRAGGRGGQQRRRRAQGGDGHERAAHQRVRAGDGGVRGGGRDGGLRGGHVHGRAHEQDGRPHRGLAAHRLRHLRVRRLRRVVHGRGRGHHPLHARARRGRRHGVQGPAPAAGRRLLRQGAPRPGIRRPHRRLRHRRGGVRIQLHRHVPGLRHRGRVHGGRHLGVSWRPRHLNTNQNQCACSCMWPSCDCHVFNLRVTGVVDDPPLVVAIAWRLVLGSIMMVIVTECPGK

SEQ ID NO: 47361 - protein, 362 aa, Zea mays
  Clone ID: 701158370_FLI.pep
LSQTLGRGGLTEGAVSGVSTIDSMRGGYSGRCGFAGGRHSSSRSNDGRGYHGNPCLTMHQPWASLLVHGIKRVEGRSWPSPITGRLWIHAASKVPDPDTIKAMEDFYREIYAVDGITGIKFPDHYPVSRLLGCVEVVGCLRSEELVCWEHVPESVRLEGLTDFCWLCENPQKLVVPFEMRGYQGVYNLERRIYDGAVRGLLPVQGPLPVKFPLPDPRDPFSLKPGSLTFAASKPTLQKSESVAAAIAGARAAATQFSKKDRKAAASSEIGTEEQSWGSHGGSSSVDCNGLSIVHGSYAHLQNQNRPSIFPSTQANSQNPNSEPRRSPRLEFGASNRLVAVALSELKQLSLSKKGTGQAVPRS

SEQ ID NO: 47362 - protein, 496 aa, Glycine max
  Clone ID: 701048816_FLI.pep
KTNTKRKTRASLSLSLCFSPQKQRMHRFIVLTILLSLTLADGGSIGVNYGRIANNLPSAVKVVHLLKSQGLTRVKVYDTDPAVLRALSGSGIRVTVDLPNQQLFAAAKAPSFASSWVERNVAAYYPHTQIEAIAVGNEVFVDPHNTTKFLVPAMKNIQKALTKHNLDKDIKVSSPIALSALANSYPSSAGSFRPELVEPVFKPMLDFLRETGSYLMVNVYPFFAYESNADVISLDYALFRDNPGVVDPGNGLRYYNLFDAQIDAVFSALSALKYDDVKIVVTETGWPSKGDSNEVGASVDNAAAYNGNLVRKILTAGGTPLRPKADLIVFLFALFNENQKPGPTSERNFGLFYPDERRVYNVPLTTEELKDYHDRPAPVSGGGQQKGTPAPAPVVSGGVSKSTTGNTWCVANPDADKVKLQAALDFACGEGGADCRPIQRGSTCYDPNTLVAHASFAFNSYYQKQSRKGGSCYFGGTSYVVTQEPKYGSCEFPTGY

SEQ ID NO: 47363 - protein, 171 aa, Glycine max
  Clone ID: 701102546_FLI.pep
FALRALASTLNEEELADIKDQFDAIDVDKNGSISLEEMRQALAKDLPWKLKESRVLEILQAIDNNTDGLVDFREFVAATLHVHQLEEDSDKWQQLSQAAFEKFDLDKDGYITPEELRMHTCLRGSVDPLLEEADIDKDGKISLPEFRRLLRTASMGSQNVSSPSVHRRQRF

SEQ ID NO: 47364 - protein, 216 aa, Zea mays
  Clone ID: UC-ZMFLMO17225H10_FLI.pep
LPLPMTAVPPSCQILDGKALAQKMQGELQRDIAQLVAQGHRSPGLAVLMVGDNPASAVYVRNKEKACEKLGMVSFGKHFSADTDQETLTAAIASLNEDERVDGILVQLPLPDHLDAVKLLHTIDPSKDADGLHPVNLGHLVRGEEGLRSCTPAGVMALLAEYNLDLTGKNAVVLGRSILVGKPLALMLLEKNCTVTIAHSRTQNLADITRQADILV

SEQ ID NO: 47365 - protein, 260 aa, Zea mays
  Clone ID: 700049389_FLI.pep
STHARTQTQRSVTTELKPWRLQLRRALWASRRCCWSAAGRSPCTAVTGRAVPSSGSSATTFQVVHLTSDSEFAQIAGGLRRAVVELTDVASASFAARALGGRAEEALRSYLRERILPEIGDREFVVVYMHSRVDRGHNFPGVGAIRGAYETLPAAAKERLRAVYFVHPALQSRIFFATFGRFLFSSGLYEKLRYMSRLEYVWAHIDKEQLEVPDCVREHDDELERRPLMDYGIEATETRCMYDAASMDTSASLHSLRCVS

SEQ ID NO: 47366 - protein, 317 aa, Zea mays
  Clone ID: UC-ZMFLB73275G10_FLI.pep
PSTSTTRATRYFSGFARMSWCTIESDPGVFTELIQQMQVKGVQVEELYSLDVGSLSQLRPVYGLIFLFKWIPGEKDERPVVRDPNPNLFFAHQVITNACATQAILSVLMNRPEIDIGPELSQLKEFTGAFTPDLKGLAISNSESIRTAHNSFARPEPFISDEQRAATKDDDVYHFISYLPFEGVLYELDGLKEGPVNLGQCDGADDLDWLRMVQPVIQERIERYSQSEIRFNLMAIIKNRKEVYSAELEELEKRREQILQEMNNASSTESLSSSLTEVISAIELSRRRSSWKKRSSRSGRRRTFGGNITTSLSCSTC

SEQ ID NO: 47367 - protein, 244 aa, Glycine max
  Clone ID: 701120876_FLI.pep
HVPMRLLVVRHVTIWPSKPRNLPIRGIQVRSIWPPEAIRHVRIKAPRTILFHSRNIGPLRQNLQLTAMQFRFIQQESLLNSLSFNKFHISKTFRLAKLVCQDSDPVYSTTGLKVLLHFFWCACIINIANKNRPSICLLLVCLRSSCISRILNAANLLLDLGLHLAKRCGFLFHFLQSALHLVELLDGGVIVDGGFIVGGGHVNVSFHLSLVRDLSSVHLVLFLFHLPILRNLPYTPYQHNCNEN

SEQ ID NO: 47368 - protein, 399 aa, Glycine max
  Clone ID: 701202570_FLI.pep
RLLRTCSEQEKSIAGLQDGFSEELHKNHPMESVDKHIANHHMENVDKHIAKMRMEQMRLTGVELALRKELESCRFQADSLRHENIILLNRLKGDGKESVAATYRLDKELWARIYCLQNQGLTMLNESTYLCSKLLEFVKRKGSHLRQNVQLDREVIGNGLDGQFIVESETKIQGLKSGTEGLTRSLQLMSSLLKDKSNPLTSKFQSEIIDAGKLATLNDQSSEDILRTELKAECLVTSLLREKLYSKELQVEQMEAELATAVRGNDILRSEVQNALDNLSSVTHKLKDHELQMLKKDESRNCLQNDLQESNRELTIMRGKLPKVTEERDYMWEQVKQYSEQNMLLNAEVNVLKKKIETLEENNLEKEGQISILQDSLAKRSYDDLLGSPAHDFFSTKLL

SEQ ID NO: 47369 - protein, 332 aa, Glycine max
  Clone ID: 701155302_FLI.pep
ETDKVTIDVSSPESGVILKLLANEGDTVEPGNKIAIISRSADATHVAPSETISEKAAPQPTQKVSEEKKAPKVETAPAKEKPKTPPATLKSPTEPQLPPKERERRVPMTRLRKRVATRLKDSQNTFAMLTTFNEVDMTNLMKLRSDYKDAFVEKHGVKLGLMSGFVKAAVNALQHQPIVNAVIDGDDIIYRDYIDISIAVGTPKGLVVPVIRNADTMNFADIEKQINTFAKKANDGSLSIDEMAGGTLTISNGGVYGSLLSTPIINPPQSAILGMHSIVSRPTVVGGNIVPRPMMYVALTYDHRIIDGREAVFFLRRIKDIVEDPRRLLLDI

SEQ ID NO: 47370 - protein, 335 aa, Zea mays
  Clone ID: LIB3592-007-B11_FLI.pep
ELSCPPLGLFFPAMGAGVLLGDAAGLGAHLAVRRRRTRLYLRNWASKPLRPSVWLGVAACVSQNRDRRGHVTRFSASASSGSDEPGELSEDEAQREWEAELNRRLKEAEEMEELERTAEQLQSQAAAEAPEESEEEKRERVRRELQKVAKEQAERRETAKQMFELGQKAYGKGMYGRSIEFLEAALTIIRPSSLLGGEIQIWLAMAYEANRRHKDCIALYKELESSHPMINIRRQAAELRYILEAPKLKISNDEVVTIPQIGSSWDWYAGTWSDKIKEQEDKKRKMSAASNQVQPSPNIFGDLSFLRPPNEWKKSAWVVVTLWILLIGTAIYLQS

SEQ ID NO: 47371 - protein, 261 aa, Zea mays
  Clone ID: JC-ZMXLIB3526P100BE05_FLI.pep
SQHEFSIEQVRSRCSSIARVVNRLVITMVGSSPLQAVLVAPGVKDRKVLAFKRDALKDKDAVSGLIHSILASSPAQRSAFYVFDLAKVVDLFRAWRRALPDARPCYAVKCNPDPALLGALAALGAGFDCASRAEIEAVLALGVRPGDIVYANPCKPEAHLEYAAEVGVNLTTYDSEEEVAKVRRCHPGCELLLRLKGPDGGDVRVDLGTKYGAHPDEVVPLLRAAQRAGVGVAGVSFHVGSGASNLHVYRGAIQAARAAFD

SEQ ID NO: 47372 - protein, 303 aa, Zea mays
  Clone ID: LIB3912-043-A1_FLI.pep
ANQRAAQTLAQYGTTRLNVDLLDGSVSYPESMPDHVEGSSVVKPLSYEEEQLTRVFYEQKIQEVCAAFKFPHKIQATAIIYFKRFYLQWSVMEHQPKHIMLTCVYASCKVEENHVSAEELGKGIQQDHQIILNNEMILLKTLDFDLIVYAPYRSIEGFIDDLEDFCRAGNGPFQRLKELRQAAISHVDKMMLTDAPLLYTPGQLALAALHKSNDLLRVVDFERYLEIIFSRQHSDCPIEQFVQSINEINYLVDQLNIPTVKDMRHVDRKLKHCWDPSSHDEHNKKKEKKSKHKSKRTSTDAQL

SEQ ID NO: 47373 - protein, 343 aa, Oryza sativa nipponbare
  Clone ID: LIB3434-040-E1_FLI.pep
VPFCAFNFTDLYINALSIQEQINTSFDIYRPSFFDSFADRADAFQLLAGLGGEHTDGGADGGEGAGGEAGGAEGADGEPPRRPRRHLLLHEVHLDGEVDGQRPEGEGAEQPDHLVEVGEPHGQRRRRRHVRRPEAQPVHVHAAAAPPPRRPRHRRRHRHLHHARPRAAHPPLHRREHWLRVHLIAAEEVDGDAEVGEVDEPVGLVEAEAGEEVTGRGVAEGRVAEAPAAEVEEGGHRDARPRRRPHRLALRRRRPQRVLDFQQNRREGVGERDVPDRLRDSPHLLRRGHHGDPPDSSLDHSISYDFGDAEAEADEGVGEGHGRRQDGEPRHVMEARYLREHHL

SEQ ID NO: 47374 - protein, 436 aa, Zea mays; identical to SEQ ID NO: 39450
  Clone ID: LIB3689-219-C2_FLI.pep

SEQ ID NO: 47375 - protein, 439 aa, Zea mays
  Clone ID: LIB3689-203-C3_FLI.pep
PRNTQKRGALLVGWILFSLAASPVKFQTHMGSIGRGTANCATVPQPPPSTGKLITILSIDGGGIRGLIPATIIAYLEAKLQELDGPDARIADYFDVIAGTSTGALLASMLAAPDENNRPLFAAKDLTTFYLENGPKIFPQKKAGLLTPLRNLLGLVRGPKYDGVFLHDKIKSLTHDVRVADTVTNVIVPAFDVKSLQPIIFSTYEAKTDTLKNAHLSDICISTSAAPTYFPAHFFKTEATDGRPPREYHLVDGGVAANNPTMVAMSMLTKEVHRRNPNFNAGSPTEYTNYLIISVGTGSAKQAEKYTAEQCAKWGLIQWLYNGGFTPIIDIFSHASSDMVDIHASILFQALHCEKKYLRIQDDTLTGNASSVDIATKENMESLISIGQELLNKPVARVNIDTGLYESCEGEGTNAQSLADFAKQLSDERKLRKSNLNSN

SEQ ID NO: 47376 - protein, 321 aa, Zea mays
  Clone ID: LIB3958-007-B9_FLI.pep
CCKTRTGILGWFFKILQTVKVMIRPKYDGKYLHKVTSDLLGGTRVEETLTNVVIPTFDVKCVKPTIFSTFKARSSALMNARLADVCIGTSAAPTVLPAHYFETVDHRTGASRSFNVIDGGLAANNPTLVAMGEITEQMRQKSKEFPETKPLDYHRYLVVSLGTGLPEQDIKFDACRVAKWGIFGWLGRRENTVPLLQMFMHASSDMTDSYVADLFKAIGCSDQLLLRVQDRNIPIAAVAADLSTEKNLRGLVKIAENLLHKPLGEDDYKTDDRVETTPRDGRAILTYAGMLARFAKLLSDERKLRLQNMGHCMPVIANREA

SEQ ID NO: 47377 - protein, 237 aa, Zea mays
  Clone ID: LIB3357-054-B7_FLI.pep
SKALADVLLDSSGTIPELLLAPKAPRPAPSAIEELLPMPSAPNTKSQAYLLLPSPGVAFEVLCNLKAGENHGLHVGNVEGRNDNIGQCPVQPHITKKPSELRMEVLAVVLGPTSHPQLADELGPHSILLPEDFGRVLDVEPRQVLGGEQRPFVRVRGREHRRQETAGARAGDDVEVVRDTSVWPVQFLELRFQEGEDGGRDDPSDAAAIDAQHGDQLEIDRQRPACTFCRATTTCHL

SEQ ID NO: 47378 - protein, 215 aa, Zea mays
  Clone ID: LIB3067-025-F12_FLI.pep
AKISQLELSFKEIIFGYRKQPQCKPQVFRSVYVHWPPRSRNGKTGEDHVDIITFYNEVFIPAVKSLLVEVGPGASPKKKEEEKGPADVGPFPESPRLARFPNLPDMSPKKVSATHNVYVSPLRSSKMDTLLSPSSKSYYACVGESTYAFQSPSKDLKAINNRLNSVSGGKKVSGRLNFDVVSDLVVASSLGSDRDAKPAADPAKTTPVKCEPSDS

SEQ ID NO: 47379 - protein, 216 aa, Glycine max
  Clone ID: 701002419_FLI.pep
CPGAVQHVRFKNDASLYSAVITGAVNVLSTVVSIYSVDKVGRRILLLEAGVQMFLSQVVIAIILGIKVTDHSDDLSKGIAILVVVMVCTFVSSFAWSWGPLGWLIPSETFPLETRSAGQSVTVCVNLLFTFVIAQAFLSMLCHFKFGIFLFFSGWVLVMSVFVLFLLPETKNVPIEEMTERVWKQHWFWKRFIDDAADEKVAHVSNGNGFDPTSRL

SEQ ID NO: 47380 - protein, 123 aa, Oryza sativa nipponbare
  Clone ID: LIB3479-009-D6_FLI.pep
VTDNLQRWVIEVAGAAGTLYAGETYQLQVDFPEHYPMEAPQVIFLHPAPMHPHIYSNGHICLDILYDSWSPAMTVSSVCISILSMLSSSPAKQRPADNDRYVRNCRNGRSPKETRWWFHDDKV

SEQ ID NO: 47381 - protein, 198 aa, Oryza sativa nipponbare
  Clone ID: LIB3432-043-C3_FLI.pep
PNPDKRIRIEEIRNDEWFKKNYEPTREIESEEVNLDDVNAAFDDPEEDADHTLDDEAGPLTLNAFDLIILSQGLNLAALFDRRQDYDKLQNRFLSRKPAKVIMSSMEVVAQSMGYKTHIRNYKMRVEGLNANKTSHLAVMLEIFEVAPSIFMIELQRAAGDTSDYNKFINNYCSKLDDIIWNFPIEKSKSRISRLSKR

SEQ ID NO: 47382 - protein, 292 aa, Zea mays
  Clone ID: LIB3245-503-A10_FLI.pep
ERSQDLGFLRSSPRMDPNPRAPLLLAIVVLALGVSVVASAEDDASGVSLGRRAGGFLHGLKKDALAEGDHGVALDEVGPGLFDALFASLSMILVSEIGDETFIIAALMAMRHPKSIVLSGALSALYVMTVLSTGLGRIVPNLISRKHTNSAATVLYLFFGLRLLYIAWKSDPKGSQKKEMEEVEEKLESGQGKSTIRRFFARFCTPIFLEAFILTFLAEWGDRSQIATIALATHKNAIGVAVGASLGHTVCTSLAVVGGSMLASKISQRTVATIGGVLFLGFSVSSYFYPPL

SEQ ID NO: 47383 - protein, 263 aa, Zea mays
  Clone ID: LIB3732-004-G9_FLI.pep
GAMASAAGAALCPCSFSTVLSSSPSTPFRPARTTPRPSLRPLPRRARLPLRPGHSRVGSCLQVLRCLPKCDSGKPDGGGDAGLSGRKAARPAGQGGPRRPAQFGASSCGLAFTTVVGVIMLQASQQALAATQFAGLQPADVLGDLGDVSTGFASAFLLIFFSELGDRTFFIAALLAARSSGAVIFLGTFGALAVMTIISVVLGRAFHYVDGIIPFSFGGTDFPVDDIAAACLLVYYGVTTLLDAASGDDEKINEEQEEAELAV

SEQ ID NO: 47384 - protein, 165 aa, Zea mays
  Clone ID: LIB4074-018-A2_FLI.pep
TARQSLNIKRRRRRRRQRWSSTALTVKWKHFLFLSPPAIHCSTRARSLLQAEQLAWARWHRPGRLLMMPMVLQAHSCDTALSALQQSALGSGAPGTRYARHARRRFSCGRHCPPACAPAPRSTDDGPVPPPRTSRTRHAARSARGAVAASSAIVASSCGGWGCGC

SEQ ID NO: 47385 - protein, 170 aa, Zea mays
  Clone ID: LIB4074-003-D7_FLI.pep
IAWSCMVWFYLFYYYYADDIDRKTESEYQKKKTTTTTTLELDCSHCEMETLLIPLPSCHPLQHACQVPASSGAVGLGEVAPAGQAVDDAHGAAGALVRHGAQRAAAVRAGVRRAGHQVRAARQEAVQLRQALPAGLRPGAAQHRRRAGAAAEDQQDEARGEECAGGGGCF

SEQ ID NO: 47386 - protein, 255 aa, Zea mays
  Clone ID: LIB3062-010-A11_FLI.pep
QRPDMITPGVDAQGQPIDPEKMQEHFEDFYEDIYEELGKFGEIENLNVCDNLADHMIGNVYVQFREEEQAAAAYNALQGRFYSGRPIIVEYSPVTDFREATCRQFEENSCNRGGYCNFMHVKQIGRDLRRKLYGRSASRRYHGRSRSRSPPPQRRGHRDRDDYHHRDRDDYRGGGGGGRGRGSRYDRYDDGAGRGGRHGRYDDGAGRGGRHDRYDDGGRRRHGSPSRRARSPVRESSEERRAKIEQWNREREGKQ

SEQ ID NO: 47387 - protein, 187 aa, Zea mays
  Clone ID: LIB3732-058-E12_FLI.pep
AAYNNKANTKRNAIPTLQYNAGKGVLGHKLARQTSGLRRRTDFQGLLPCTGTTETEPAAGDPGMPPKPLKAGEPPLKRGMLPMLPLLPGKNDPPGRLLPLPGMLNAGMLLPPDEVPGRPPDAGDAPPPRRSKGGKVCGCTTASSFFSVVVVVVLMFLASAVDAARTRASRAAAATAIILEADIAIAR

SEQ ID NO: 47388 - protein, 179 aa, Oryza sativa
  Clone ID: LIB4309-023-G4_FLI.pep
RYNARASYSHPYCMQRRALHRAHYPRSSGDAAGDGEVSHGFLACLSAAAGEPGMPPPRPGEPPPRPPNMGMLPKPPRPPGVEPLLPGRLNPGMLLPGMPPNAGTALPKRSNGGNVVGCTTVSLLSAAAAAAALMFLASAAPTTASTSTAATAIILLDFSISSSISLAKAKLSSSVQAAA

SEQ ID NO: 47389 - protein, 156 aa, Zea mays
  Clone ID: LIB3245-020-D2_FLI.pep
AERERELEAYMAMPFASLSPAADHRPSSLLPYCRAAPLSAVGEDAAAQAQQQQQQHAMSGRWAARPPALFTAAQYEELEHQALIYKYLVAGVPVPPDLLLPLRRGFVYHQPALGYGPYFGKKVDPEPGRCRRTDGKKWRCSKEAAPDSKYCERHMH

SEQ ID NO: 47390 - protein, 308 aa, Zea mays
  Clone ID: LIB3912-043-D12_FLI.pep
PTNIQEHGLFPQLLLRGGWRTGGKTDKGPERDDPRTISHRWATGSWPRRSRRTPWVWTSTAGSPGGTRRGWRSRRRGPARSPAPWATRRRSAAASGPPASRRRSPWPCRPRCRSLGRTRAAAASPSSAASSPCCSGRPGRPAPRDVGSSRAGTTSWGGATGSLSTSRWLLRSAGCARPPEILFRKRCTCGLAVEAGCEGVEAAADWNHEIRRNGHARHQVLVYERLLLQLLVLRRRERHHRPRGRPPRARLGVLLAQPAARGERSGAAEGDEGRRGCGGAVVGGACRGKRGIRHRHLNLSLSRAACSP

SEQ ID NO: 47391 - protein, 232 aa, Triticum aestivum
  Clone ID: LIB103-023-B8_FLI.pep
GEAILQAVGQEPGQELEGEAEESADREGNGDDAGKEDSGCKDLVLVEDPVLVEDPEEAFQEEMRALLASVPEGAGASFTAMQLQELEQQSRVYQYMAARVPVPTHLVFPIWKSVTGASSEGAQNYPTLMGLATLCLDFGKSPEPEPGRCRRTDGKRWRYWRKTIPNEKYCERHMHRGRKRPVQVIVEDDEPDSASESKSSSGKVTEGGKKTDDKSSSSKKLAVAAPAAVEFT

SEQ ID NO: 47392 - protein, 346 aa, Oryza sativa nipponbare
  Clone ID: LIB3433-053-D10_FLI.pep
PMEVTDEEKERKERKSSAQKEKEAGNAAYKKKDFETAIQHYTKAMELDDEDISYLTNRAAVYIEMGKYDECIKDCDKAVERGRELRADFKMISRALTRKGTALAKLAKTSKDYDIAIETFQKALTEHRNPDTLKKLNEAERAKKELEQQEYYDPKLADEEREKGNQLFKEQKYPDAVKHYTEAIRRNPKDPKVYSNRAACYTKLGAMPEGLKDAEKCIELDPTFSKGYTRKGAIQFFMKEYDKAMETYQAGLKHDPNNPELLDGVKRCIEQINKANRGDLTQEEIQERQNKAMQDPEIQNILTDPIMRQVLVDLQENPRASQEHLKNPGVMQKIQKLVSAGIVQMR

SEQ ID NO: 47393 - protein, 172 aa, Sorghum bicolor
  Clone ID: LIB3476-017-D6_FLI.pep
GYGRRKDVELLFPSTSPTQTVSVWTVDGILSHAQSKHSNPKVEKYGKITKLELKLGGDKAVGRKNYLAASKLYTQAIELDPDDATLYSNRSLCQLQIGEANKALLDANSCIKIRPEWLKGYYRKGVALMSLKEYKEACDAFLAGLKLDPTNVDMERMFMEAIEAMKKDHVTT

SEQ ID NO: 47394 - protein, 212 aa, Sorghum bicolor
  Clone ID: LIB3476-029-B12_FLI.pep
CCLGKLVHDVDVVLDGGVAGGEVEPVGAEQRVPTGEAERPRAADDGELADGVERAVASQQRQRAAVVVPRREHQVHGLEEAELGLVGPHVQALGAADDGAGALLRPVRQRVVHHVHHPEQRRRRRRRRAHHPHRRRRLAAHRVVEVEVQVRWRVPGAGGCLIRAPLMPGMAAAGGRSRLVVLQLGGLGCDDDCQHQEEQERRRRRSFLLDGH

SEQ ID NO: 47395 - protein, 210 aa, Sorghum bicolor
  Clone ID: LIB3476-035-D3_FLI.pep
SKVAVVDIECDKFVVPKMHIISGACLKRVLLAMVHMPTNIPPPPGQTQFMPGPPRTFAMPPSSHMPPMVNPIGIPQPPAPPLPPQPPAEEQPPPPDEPEPKRPRTDDASLIPVEQFLAQHPGPASISVSVPNLDEGNLRGQVLQIPVQSLSDTVGSLKEQIAGELQLPANKQKLSVRTSFLKDNLTLAYYNVGPGVVINLTLRERGGRKK

SEQ ID NO: 47396 - protein, 353 aa, Zea mays
  Clone ID: LIB3597-037-G12_FLI.pep
QKRKRKRAGELADPKTLTPRTHLAAAAAAMADGGGEGGPPAASAALKDQGNEQFKAGSYLKAAALYTQAIKLDPDNATLYSNRAAAFLQLVKLSKALADAETTVRLKPQWEKGHFRKGCVLEAMERYEEAIAAFQIALQHNSQNTEVSRKIKRLSQLAREKKRALDVENMRSNVDIAKNLESLKTELATKYGDAETGQSVFSFIVNVVESAVKVWHDTGKVDPRVHFLLDDQKTDTEKYAPVVNIDKAFESPNTHAECFTYLRQYAENCSAKAACMVAPKSIISYPQVWKGQGSRKWKLDQSDGFFVQFEAPALRKIWFVPSTKEKGRTLCRSPEALDIGIHEVLPRIFKEAA

SEQ ID NO: 47397 - protein, 347 aa, Zea mays
  Clone ID: LIB143-018-B1_FLI.pep
ASRYESDELDRSTSPIARQSAPATVAMTEEAEAKAKGNAAFAAGRFEEAVQHFSDAIALAPDNHVLYSNRSAAYASLWRYAEALDDAKRTVALKPDWAKGYSRLGAAHLGLGDAPKAVEAYEKGLALEPSNEALKSGLAQARQSASAPRRPVGSGADAVGKMFQGPELWSKVAADPTTRGYLDQPDFVQMLREVQRNPGRLNSYLSDQRMVQVLTLMLNIKFQNQSSGAPDPAAAQSNPPPPKQQPEAKAREPEPDPEPEPMEVTEEDKEQKERKASAQKEKEAGNAAYKRKDFDTAIQHYTEAMELDDEDISYITNRAAVYLEMGKVRTRRSLVLNHKLFTYICSL

SEQ ID NO: 47398 - protein, 379 aa, Zea mays
  Clone ID: LIB3357-047-E7_FLI.pep
LPSPRWEVSSAAAAEMGKAKGKQRQDKFYHLAKEQGYRSRAAFKLLQLDARFRFLPTARSVLDLCAAPGGWVQVAVNHAPVGAFVVGVDLVPIRPIRGAHSLTEDITATKCRAAVRRLMDSNGVSAFDVVLHDGSPNVGGAWAQEATSQSALVIDALRLATMFLAPKGAFITKVFRSQDYNAIMYCLKQLFEKVEATKPTASRSTSAEIYIICLKYKAPAKIQPELLDIKHLFSVVPEQTKSRDVMDGRKKRHRDGYEEGNTTLRKVGLASDFIWSDTQAPLEFLGSYNAISFDNPESLAIKNHELTTDDIKNFCEDLLLLDKHSFKHILKWRIRLRKSLSASSQVTPKVNDAVESTKVMDDDVLLQEMEELTSVIDRK

SEQ ID NO: 47399 - protein, 263 aa, Zea mays
  Clone ID: LIB3732-029-E9_FLI.pep
TSQTLAASCKFQSSGICAMASETETFAFQAEINQLLSLIINTFYSNKEIFLRELISNSSDALDKIRFESLTDKSKLDAQPELFIHLVPDKATNTLSIIDSGIGMTKSDLVNNLGTIARSGTKEFMEALAAGADVSMIGQFGVGFYSAYLVADRVVVTTKHNDDEQYVWESQAGGSFTVTRDTSGEQLGRGTKITLFLKDDQLEYLEERRLKDLVKKHSEFISYPISLWTEKTTEKEISDDEDEEEKKDAEEGKVEDVDEKEEK

SEQ ID NO: 47400 - protein, 283 aa, Zea mays
  Clone ID: LIB3059-047-C5_FLI.pep
NPHRAATHLRPTNPRLVPLSQSPLAAAYRSRSPRVREGRFAMASETETFAFQAEINQLLSLIINTFYSNKEIFLRELISNSSDALDKIRFESLTDKTKLDAQPELFIHIVPDKANNTLTIIDSGIGMTKSDLVNNLGTIARSGTKEFMEALAAGADVSMIGQFGVGFYSAYLVAERVVVTTKHNDDEQYVWESQAGGSFTVARDTSGEQLGRGTKMTLYLKDDQLEYLEERRLKDLIKKHSEFISYPISLWIEKTTEKEISDDEDEEDKKDEEGKVEDVDDEK

SEQ ID NO: 47401 - protein, 253 aa, Zea mays
  Clone ID: LIB143-014-G7_FLI.pep
RSPRVREGRFAMASETETFAFQAEINQLLSLIINTFYSNKEIFLRELISNSSDALDKIRFESLTDKTKLDAQPELFIHIVPDKANNTLTIIDSGIGMTKSDLVNNLGTIARSGTKEFMEALAAGADVSMIGQFGVGFYSAYLVAERVVVTTKHNDDEQYVWESQAGGSFTVARDTSGEQLGRGTKMTLYLKDDQLEYLEERRLKDLIKKHSEFISYPISLWIEKTTEKEISDDEDEEDKKDEEGKVEDVDDEK

SEQ ID NO: 47402 - protein, 241 aa, Zea mays
  Clone ID: 700096084_FLI.pep
IMDELASHPAVGPDGAGCAGEHLYGTHLDDGGDEVGLEGGGAVGVGEHLRGGGRVGEQRLVGGEQAAPGDQVGVVVGVEGGGRDGVHGQGRVGGAGPLRRALLRQRRQVGGVHGRVLPRAAWPVRVEAGREGAAARRAHRVRPRQRHHLGLAQPLGAERLRQLARARRRRRQVRARLLRRGDVAVPPPRRHLVRVAPDQREGVAGGEGEDVGAGDDAEAGLLQPRLGAVDDLEPAQAGVGR

SEQ ID NO: 47403 - protein, 77 aa, Glycine max
  Clone ID: LIB3039-026-C4_FLI.pep
GYWTHSSATAFLDRNLFCGVAMGHSNVWNSHPKNYGPGSRTCRVCGNPHGLIRKYGLMCCRQCFRSNAKEIGFIKYR

SEQ ID NO: 47404 - protein, 223 aa, Glycine max
  Clone ID: LIB3039-049-D10_FLI.pep
LQSERETKTMKVSIAKFHSLPLCFLLLLAINTQPLLAAEPEPVVDKQGNPLVPGVGYYVWPLWADNGGLTLGQTRNKTCPLDVIRDPSFIGSPVRFHASGLNHIPTLTDLTIDFPVVTVCNQPTVWRLSKEGSGFWFVSTRGNPQDLITKFKIERLEGDHAYEIYSFKFCSSVPGVLCAPVGTFVDADGTKVMAVGDNIDPYYVRFQKVSTFGQDKKQPFSIV

SEQ ID NO: 47405 - protein, 144 aa, Glycine max
  Clone ID: LIB3050-002-C10_FLI.pep
SSEADELERVPAGTYCVWRPNSPQASPGKCKKSNSTGSSSSKKWKLLDLLYRSNSEGKESFVFLTPAPAPEKKRANQRWSIEVAEKSKGKGFSGKKKAPVSVHEALYLRNRELRMVDKKKSFLPYKPGLVGFCTSRLGKAFPSF

SEQ ID NO: 47406 - protein, 96 aa, Glycine max
  Clone ID: LIB3050-008-F6_FLI.pep
GRDMESYGSGHGSGHRPHGGGRKMEVVSGKSHGWSSTKSPDSTQASEMPWRFGDPEAKRKKRIAKYKVYGVEGRVKATLKKGLRWIKKKCSQIHGY

SEQ ID NO: 47407 - protein, 142 aa, Glycine max
  Clone ID: LIB3050-022-D1_FLI.pep
EKSDVYSFGVLLLEAITGRDPVDYSRPATEVNLVDWLKMMVGNRRAEEVVDPNIETRPSTSSLKRALLTALRCVDPDSEKRPKMSQVVRMLESEEYPIPREDRRRRKSQAGNMELEAQKETSDTEMTENPDSKSNGRRNQRK

SEQ ID NO: 47408 - protein, 227 aa, Glycine max
  Clone ID: LIB3073-020-A10_FLI.pep
EAFEKEKPSIASQKMKSTTLFALFLLCALTSSYLPSATADVVLDMDGNPLGNGWQNEYFMLPVTRGSGGGIALAATGNERCPVTVVQSHIERDKGYAATFRAPFHLLFIAEGLPLTISFDNFEVLPRCVPTPLWWAIVDGLAEGPAVKIEYRDIVEGWFKIQKAYPLGYKLLFCPVPLEDSTCGDIGIYTDDKGFRRLVVTKNKPLVVQFQKFDPLAKNNLVLPASE

SEQ ID NO: 47409 - protein, 220 aa, Glycine max
  Clone ID: LIB3073-024-E3_FLI.pep
DTTEQDKLSIAAKEMKSTLFALFLLCALTSYLPSATAGDVVDTDGNPVENGGTYFVLPTIILNGGGIEYATFGNETCPVTVAQSRDQFCKGFPITISSPARIRHISEGLSLNIGFTFASPCSPASEWTIVKDQPEGLAVKLTGFKNTVPGVFTLKRVPADEIIGYNILFCPLDNNPCGYVAVHFDQFRNRRLVVSEVQEDGLWVMFQKLSYASGLTLSSA

SEQ ID NO: 47410 - protein, 137 aa, Glycine max
  Clone ID: LIB3072-012-B8_FLI.pep
KRRKMNGDDDKGLLWKLPVVKSDHFGKVGPAFGIGAGCGLGFGLGLLGGVGVGPGIPGFQVGFGFGAGCGVGLGFGYGVGKGIAQDDNKRYSNVGNPFRGSRSIISEDDITALVDDLVINTKKLIKATSKEIDKWRR

SEQ ID NO: 47411 - protein, 151 aa, Glycine max
  Clone ID: LIB3106-048-C3_FLI.pep
RGSVETEKQSRDRKKEKWKSISETLIVATRECPIRTRIASSTYGSDPLPSLFSHISIPTCGSSLISSIGMTKQCYMSNITGNRQGRRISHMSSCGTRPGTRTTGNITTTTGLFTFLRPLLFFLHTLSYLYFGCKPGSIDAPSPLPGSHAFL

SEQ ID NO: 47412 - protein, 302 aa, Glycine max
  Clone ID: LIB3074-031-B9_FLI.pep
LVVIAKSKGRMGNTFCLFCGCVAQSSVGVVEQWGRFHRLAQPGFHFFNPLAGECLSGILSTRISSLDVRIETKTKDNVFVQLLCSIQYRVIKENADDAFYELQNPQEQIQAYVFDVTRAIVPRMNLDELFEQKGEVAKAVLEELEKVMGEYGYSIEHILMVDIIPDPAVRKAMNEINAAQRMQLASQYKGEAEKILLVKKAEAEAEAKYLGGVGVARQRQAITDGLRENILNFSHKVEGTNAKEVMDLIMITQYFDTIKDLGNSSKNTTVFIPHGPGHVRDIGEQIRNGLMEAASAQVNVEE

SEQ ID NO: 47413 - protein, 155 aa, Glycine max
  Clone ID: LIB3074-036-C1_FLI.pep
DLRMATFPTLHGLHNPLPRSQFLGQDHPLTHQFPLKQQVHHKTAPTHEVLMPRAAKFNILEMMGGRGLCNGEKGLQQELKRQVVVPQSSISSQEEAPSGEKEEQEGEGGDDDEGSVKVPEDGFEKEMMGLTGGFPGGEKGLKKFIEKKQPSYKSN

SEQ ID NO: 47414 - protein, 234 aa, Glycine max
  Clone ID: LIB3030-010-D9_FLI.pep
GSSSSSLNMGGSVSKSRRMSSEKYVMNLKEKVRLLQEEIKEMMYEREKETRRYERDIMVFTFKEADSKQEGKRLREEVKQLRSLVEEKDEKIREIEVGMMEKNSEKEWELMGTKLLVEQMKEERARRDEAVEKWKQLYLAIKTELDELIQRTYDGDGLYWKAEENGIQMENLKKELQEKEETIKALKTQLLSMEKEKYKKEREFDLLRQSLRIMNGKKNSIQTKEKLLKSKLGK

SEQ ID NO: 47415 - protein, 186 aa, Glycine max
  Clone ID: 700556304_FLI.pep
SCAKKKKMALPLLRIPGIPLAKQHQSFPSNTRRKATTAQAELETAVARTGGTGYQSPSVDVPTHKVIVHDRQRGIVHEFVVPEDQYILHTAEAQNITLPFACRHGCCTSCAVRIKNGKIRQPEALGISAELRDKGYALLCVGFPTSDVEVETQDEDEVYWLQFGRYFARGPVERDDYALELAMADE

SEQ ID NO: 47416 - protein, 119 aa, Glycine max
  Clone ID: 700971908_FLI.pep
YSPLHPQDTQKASSLIGYVVGKPVQTLIETLPRGCTGALDVPVALSERVESQLVSNFSSIHCIGKILFVSKYKQYCISQFILIQHPVQLISGLNNSVPVIAVNNKNETLCILEVVPPQG

SEQ ID NO: 47417 - protein, 134 aa, Glycine max
  Clone ID: 700971981_FLI.pep
KEREKHRRREESRRYEDLRHLYNRNWKRGRKIEIENGSNGEVEDVRRSRASCRRFLSHRWLRSFSSCFCEAHVGFISGNQATSSTCFKRCGCRYDWKKVKVIYLTDTSANLLISLFELILILKCERNKSTEYWI

SEQ ID NO: 47418 - protein, 219 aa, Glycine max
  Clone ID: 700993477_FLI.pep
WLLQQWRSTPISNSRANATLNNQDTDKANWGWSWLERWMAAKPWESRLMEQTHHANATEKTPPPPPKKCVDSSNSKTSEPCNVKIRKNNVSTRISARPPLIWQANHLSSSPSSEFHYDESSNSSSICTSTTPISGSAALPCDRTEDTNNTRPSYMNLTESTKAKQKTNNHQYNRSHRQQSMDEFQFLKRTAVFSNGASDPSTNFCRPLYLPTYMDKRSQ

SEQ ID NO: 47419 - protein, 100 aa, Glycine max
  Clone ID: 700742589_FLI.pep
YEGEANGIEPLLVISMDAPRKQQVSLRGASAKEITRDALLQKVSQERELRNYAKRAAAAALFIQVLRLCFLSLILKNHHTSWCRNMINFTNYITRQTYNI

SEQ ID NO: 47420 - protein, 209 aa, Glycine max
  Clone ID: 700832734_FLI.pep
AKMSSSMMTLSRRLYCSLLRTPNAYRHFSTDHLFDSDEADSAPDPPAPDAVQEEEKFVIDRPLENGLDVGIYRAILVGKAGQAPLQKKLKSGTSVTLLSVGTGGIHNNRRPRVDENPKDYANRSAIQWHRVSVYPQKLGDLVTKHVVPGSMLYVEGNLETKCFTDPITGIARRIREIAVRRNGRIVFLGEGGDAELQTLPKDLRAVGYY

SEQ ID NO: 47421 - protein, 263 aa, Glycine max
  Clone ID: 701038136_FLI.pep
GNEKIDGSERGGTEHPTMALFSATATVLPRNLAFASSTKLSLSHSHSLLHHFLSFPTPKSSNPRNRVAISLQTPRAQSGASASASFHGLCYVVGDNIDTDQIIPAEYLTLVPSKPDEYEKLGSYALVGLPATYAARFVDPGETKTKYSIVIGGANFGCGSSREHAPVALGASGAAAVVAESYARIFFRNSVATGEVYPLESEGRLCEECTTGDVVTIELGESRLINHTTGKEYRLKPIGDAGPVIEAGGIFAYARKTGMIPSR

SEQ ID NO: 47422 - protein, 456 aa, Glycine max
  Clone ID: 701150795_FLI.pep
MQERMNGIGFSPAGYSPVIPSSSCFPKKLRVQPQRALSSDPYVLELAETLEDSFPSSPSTPLPLQNLRLSSSQSLLSTPWPSRRDEPFRFTDLSFIRQSRILPVSPTISLLTPTSHLPNDVYVGSLSSSSPSLLQRVSHFICPFPIGDLFFSINGIAAPDLTLVYVPEGCHVDIPIHLDYMLPPTPSTDDSGAAMHLSNPRVLVVVEKGAHVNIIEDFPASPENQNDSYWSNAAFEAVIGQGAKLTYSYIQTQSFRAAHIKWTSIRQEASSTYELTEVSTGGKLGRHNLHIQQLGPDTVTELSTLHLSVADQTQDLHSTLVLDHPRGYSRQLHKCIVTHSQGQAVFDGNIKVNRYAQQTDAGQLTRTLLLEPRATVNVKPNLQIVADDVKCSHGAAIGDLGESQLLYFQARGIDIETARRVLVFAFGSEVIDKFPYSSIRDRVRSQIKNLLDPSSN

SEQ ID NO: 47423 - protein, 94 aa, Glycine max
  Clone ID: 701151040_FLI.pep
IPEAIAIPLILTRSDDDVVNWNEDELNEKTHESHHNETDRGTHSNLGEFFAIGLVASLDEPDAVLGEFPERIEHRINSVHSLLCLSLLRFVWIS

SEQ ID NO: 47424 - protein, 170 aa, Glycine max
  Clone ID: 701151074_FLI.pep
DAKSFSFKMKMIRILFIFALLSFTSHASNVNDFCVADLKGPDSPTGYHCKPPKTVTSHDFVFHLGPGNTSNVFKSAITSAFVKDFPAVNGLSLSVARIDIAQGGVVPMHTHPGANEIVMMVAGEINAGFITTDAVYQNTLKPGDVMVIPQAQIHFLVNSGKGNAIFLRCL

SEQ ID NO: 47425 - protein, 199 aa, Glycine max
  Clone ID: 701064011_FLI.pep
KKKLFIYKRTKSPAYNFLRKLPLLRNGAQQRCKSPLTTGTSGGPSSSTASSECGRHALRVRVIFVREQNLFPARAAFVGGFHERGAGLDGQCGHLVRLQGVPQAAQRKREIELTGLQNLVLVDGRNDVAEFHFVGVAYEARGILLQEERNLNRVRELLQPPILQHKLRRGNLSRIGGAAVSHYGDSLSPVGGDNSVEAE

SEQ ID NO: 47426 - protein, 228 aa, Glycine max
  Clone ID: 701064821_FLI.pep
QTQSLNTFHSQKTHSRECIIPHLILSSPMTFQPVPTLLLLLLLASANSHFALAGKRKVHIPDELDDVFDDEEDDAWREWGKKPEPPFPSSDISKLDPSQIQQEMMKRHAGPVIGFVKLRPGSRRTPDMVAEFAMKWTHVLRTGAVGVRFMGVDLNTIMFNLESIKDLEELKEFVLDQSEAYEIKMGDQFFRRSGDPPLDEVIEKYNSEKAKADNADSEEIDPNVKTEL

SEQ ID NO: 47427 - protein, 172 aa, Glycine max
  Clone ID: 701065303_FLI.pep
KTLPPSNSNSPSIMGSEGSTVVVPRNFRLLEELERGEKGIGDGTVSYGMDDADDIYMQSWTGTIIGPPGTVHEGRIYQLKLFCGKDYPDNPPTVRFQTRINMTCVNQETGVVEPHLFPMLANWQRECTMEDILMQLKKEMISPQNRKLAQPPEGNEDGRIDQKGLALRCCVM

SEQ ID NO: 47428 - protein, 347 aa, Glycine max
  Clone ID: 701109845_FLI.pep
ISQTNCSISPMAKETSVVYLYPSKSQVWGENFDHKKLVITTLAANGKKEESNGAPNDTYPAFPGWYADVSWPGEAHTYKIEKILFHGKSEFQELLVFESSRQGKVAILDGHIQLTENDEFAYQEMLTHLALCSIPDPKKVLLIGGGDGGILREISRHSSVEHIDICELDQMVIDVYSEFFPDIAVGYEDPRVHVHISDGVAFINSVPEGTYDVIISDAFPAMGHSADVLADECFLESVAKALRPGGVFSAPADSLWHKNFVVADTIANCKKIFKGSVNYAWTTVPTYASGVIGFMLCSTEGPPVNFKHPINKLNPEKNGVAKGPTKFYNPEIHAAAFCLPSFVDKVD

SEQ ID NO: 47429 - protein, 177 aa, Glycine max
  Clone ID: LIB3049-021-H2_FLI.pep
KNKTELQKQKTYIYVSRVQTNTNQSSSSITLVPNPLSSSLGISTTVTREYSSSLASSSSFLLRAILTLILLGTLLIPWLQTNLFNFTSTLTSLVPMAFWANFLISLIALGAFFLNVQPWRRLWRLMVYSLVTTSSFLPFAFSTILNHRLLTYLRDREGFRQQRSTFNRAPVNHYSDP

SEQ ID NO: 47430 - protein, 193 aa, Glycine max
  Clone ID: LIB3049-024-H6_FLI.pep
RPNCVKFTMITIMMVADTVAVTAAKGLGVLRAYQSTCNFSVADQISAMIQTYDAVAPPPVKPTTYRLRRRTLLRRKQLTKRRLSGDDSGDAGNEGFLFGDGGDGPFGGGGDFGGGGVGGGGWNFNRFGGGNNWDEPSSSVPDPAFDFVYQVLSWIMLSNCLHFSFKRIVRIVAAGSIVDSDREKVPARLVPIC

SEQ ID NO: 47431 - protein, 344 aa, Glycine max
  Clone ID: LIB3049-043-G11_FLI.pep
ASDTKNKFQFFLIMGSTNANNETVAEIPEWIRVFKDGTVERPLDFPIVPPTLNTGLSSKDITISHHPPKPISARIYLPNITNSQTKKLPIYVYFHGGGFFFESAFSKLFNDHFLKLVPQANIIVVSVEYRLAPEHPLPAAYDDCWDALKWVASHSTKDTTPNNTESWLTEHGDFSRVFIGGDSAGANIVHNILSFRVGPEPLPGDVQILGSILAHPYFYGSEPVGSEPVTGLEQNFFNLVWKLVYPSAPGGIDNPFINPLGAGAPSLAELACSRMLVCVAEKDGLRDRGVWYYEAVKKSGWKGEIQLFEEKDEDHVYHLLKPALNQDSHKADALIKLMASFLVN

SEQ ID NO: 47432 - protein, 90 aa, Glycine max
  Clone ID: LIB3053-010-F6_FLI.pep
GGESLGDHPLSHFLLHREKITESGKTRFSRLIQSLRYKIPKTKQKSTEACSVPFLPLPPRVDHLIETVERKDKRSKISYTAPCNLGHVSL

SEQ ID NO: 47433 - protein, 90 aa, Glycine max
  Clone ID: LIB3051-059-G8_FLI.pep
NLSHNSVSYCIVRELRTRMSDIAMLVAEEYERRVKSLRKSGGGTGAGEFDMVSCVSVIVSRLKEKKQLLQWVLEPKTQVAMAASNSFFSA

SEQ ID NO: 47434 - protein, 247 aa, Glycine max
  Clone ID: LIB3055-003-G2_FLI.pep
HRREVEMKVAPIVVFLFRDTEGFASAISQALHANPSSSFTRQEDFFELSLEAYGIKHLKTSGSVSHFVDDHGAYKVTIVAMEHYEPPVLACALNEVLNKITEDKSSLIPTLLVPFLVESSKVKGHSKSLRSDESKPLIFGTKIGQNTDIMQALLNKTQEPPSSLGVQHETFACFLHFVHVMQLPTFFLIGQASQYLDNKSTKQHEILHAIGEILASTTGLQFSEDRVVWNPKKASGESKEPWRALYG

SEQ ID NO: 47435 - protein, 378 aa, Glycine max
  Clone ID: LIB3056-004-C1_FLI.pep
KQKMVNSGSEDLATHQLQQAITEQLFKAAELIDAGNLELAHGILARLNHQLSPIGKPFQRAAFYFKEALQLLLHPNANNSSFTFSPTGLLLKIGAYKSFSEISPVLQFANFTCNQALLEAVEGFDRIHIIDFDIGLGGQWSSFMQELALRNGSAPELKITAFVSPSHHDEIELSFSQESLKQYAGELHMSFELEILSLESLNSASWPQPLRDCEAVVVNMPIGSFSNYPSYLPLVLRFVKQLMPKIVVTLDRSCDRTDAPFPQHLIFALQSYSGLLESLDAVNVHPDVLQMIEKYYLQPSMEKLVLGRHGLQERALPWKNLLLSSGFSPLTFSNFTESQAECLVQRTPSKGFHVEKRQSSLVLCWQRKDLISVSTWRC

SEQ ID NO: 47436 - protein, 215 aa, Glycine max
  Clone ID: LIB3093-031-C9_FLI.pep
RKPFSSSPCCVLLLKDLNFKLVEQKGMSVIGAYSHFLYGEVYQRDQQCPQYLVSGRGYFFSHKSGCGNIWVGSRKSEGKIIKRRNFRVEAMWPDLSRPSELEMEEINDSEQLDQILVHAQQNSQPILIDWMATWCRKCIYLKPKLEKLAPEYQDKVKFYFVDVNKVPQTLVKRGNISKMPTIQLWKDGEMKEEVIGGHKAWLVIEEVKEMIQKYL

SEQ ID NO: 47437 - protein, 390 aa, Glycine max
  Clone ID: 700730125_FLI.pep
ASMAMASAKLNTLSSQWIAHNSFSPRRGSSSRRVSLPIRASSYQHELVQTAKSIASPGRGILAIDESNATCGKRLASIGLDNTEVNRQAYRQLLLTTPGLGEYISGAILFEETLYQSTTDGNKFVDCLRDQNIVPGIKVDKGLVPLPGSNNESWCQGLDGLASRSAEYYKQGARFAKWRTVVSIPCGPSALAVKEAAWGLARYAAISQDNGLVPIVEPEILLDGDHPIERTLEVAEKVWSEVFFYLAENNVLFEGILLKPSMVTPGAEHKEKASPETIAKYTLTMLRRRVPPAVPGIMFLSGGQSEVEATLNLNAMNQSPNPWHVSFSYARALQNTVLKTWQGHPENVEAAQKSLLVRAKANSLAQLGRYSAEGESEEAKKGMFVKGYTY

SEQ ID NO: 47438 - protein, 205 aa, Glycine max
  Clone ID: 700978919_FLI.pep
APRMLYTAQHFVNNSVTLSNNFFAAMASHSAATERTYKESFDSAANKLYADHIIPHILHLYGSCATSRDFEIYAAHASYEDPLMCAHGVKQIKSAFYTLPKVFKESKIVEYSIKENMVSPGKGEILIDNKQYYKFLGKDINMVSLIKLYIEEGKVVRHEDWWEKKPISNRETVKLPLLGRIAEMTRRGSMLATHVLMRFGKDPNV

SEQ ID NO: 47439 - protein, 230 aa, Glycine max
  Clone ID: 700863157_FLI.pep
EKSSVLRLQIFNFSMASRQQKEDRAEAAAKVAAKELEQLNREKDRDFSVGVADQHQQEEHQLDQQKRGVIGSMFKAVQDTYENAKEAVVGKKEPSTTTNSYSTREVIHDVDIQPDDAAAAREVRDKSASKSPGIYNSATADNKTGSKVGEYADYGSQKAKETKDATKEKAGEYTDYASQKAKETKDKTMEKAGEYTDYASQKAKETKDKTMEKAGEYTDYASQKAKEAKD

SEQ ID NO: 47440 - protein, 152 aa, Glycine max
  Clone ID: 701144605_FLI.pep
FWIRVHFQLQDDICTTSAMLLPNTADRSDLQQSITENASSPIRFTLLNTKKHVSPITTIYRPGHRKPPRSHGGDLHRILEVRVLGVHSTVRHLNLLVAVAGPRELPAVASLLRRSAQPRRRLPILPSLRRQLSVRLVALSGVLHSSSSLLSQ

SEQ ID NO: 47441 - protein, 92 aa, Glycine max
  Clone ID: 701148090_FLI.pep
LLAAMASTKVQRVMTQPINLIFRFLQSKARIQIWLFEQKDLRIEGRIIGFDEYMNLVLDDAEEVSIKKKSRKTLGRILLKGDNITLMMNTGK

SEQ ID NO: 47442 - protein, 142 aa, Glycine max
  Clone ID: 701207418_FLI.pep
GEYIGDNKFSIYAYVAVHMIDAAATRPTTTDPTAANPFETAAFSDGAGASDGGEEIDDGEMEGDGEDAGTEVGGDGGELTTEDEGEGAAAGGDMDEEGEGVAVFGGAAANSGDDAGDCATAEKTNIATSRRSRVEENAILRG

SEQ ID NO: 47443 - protein, 64 aa, Glycine max
  Clone ID: 700671214_FLI.pep
WFHPHTSIYIYVNLQNVGNEKNYICICSYFTMWKPSPFLPLYKTHGRWIINLLAFIQPAVMMAV

SEQ ID NO: 47444 - protein, 173 aa, Glycine max
  Clone ID: 700674452_FLI.pep
AREKIPTMATISTDQPRGSYSYGTSYGAPYGTTYETNSSINNPPSRQTVKFITAATIGITLLLLSGLTLTGTVIGLIIATPLLVIFSPILVPAAFVLFLVASGFLFSGGCGVAAIAALSWIYNYVSGNQPAGSDTLDYAKGYLTDKARDVKERAKDYGSYAQGRINEATQGTY

SEQ ID NO: 47445 - protein, 201 aa, Glycine max
  Clone ID: LIB3049-006-D3_FLI.pep
HHTTMSSPLLPVATSSDAHAPNPRVLPLYDIFSFLSTTISSGIITYLAYTKNDTPMLLFAAFIYVVYFSVDFSPPPQQPKARGLHAVKLASWALLSSTMLGFACSFSTSLTPPESLCFFWVVLGGSALLHGAWMGDENFVSKKEQYADMVRSFAPIMLMFFGLGRHYLSTQLILHAAIMNARNLVRPTTICVNINTKQLSG

SEQ ID NO: 47446 - protein, 293 aa, Glycine max; identical to SEQ ID NO: 43808
  Clone ID: LIB3049-006-E1_FLI.pep

SEQ ID NO: 47447 - protein, 355 aa, Glycine max
  Clone ID: LIB3049-008-H2_FLI.pep
NVTQLKMDREWGSKPGSGGAASAQNEAIDRRERLRRLALETIDLAKDPYFMRNHLGSYECKLCLTLHNNEGNYLAHTQGKRHQTNLAKRAAREAKDAPAQPQPHKRKVTLRKTVKIGRPGYRVTKQYDPETKQRSLLFQIEYPEIEDLMKPRHRFMSSYEQRVQPFDKRYQYLLFAAEPYEIVAFKVPSTEIDKSTPNFFSHWDPDSKMFTLQLYFKSKPPEANKPQPASTANGTAPSGVPPRPLPPPPQGPLPPPPPPPQGLPPGAPMANPPRAPPPPMPGSMPPPPMAATNGPRPAPSGGMPSIPPPPPVASGTSGFNMGARPPSMPPPQGFPSQPMQGHGVRLPPPPPNMGQ

SEQ ID NO: 47448 - protein, 202 aa, Glycine max
  Clone ID: LIB3049-016-F10_FLI.pep
GKQKHHHRNSQRKNKQTNKMSSPSKRREMDLMKLMMSDYKVEMINDGMQEFYVHFHGPNESPYHGGVWKVRVELPDAYPYKSPSIGFINKIYHPNVDEMSGSVCLDVINQTWSPMFDLVNVFEVFLPQLLLYPNPSDPLNGEAAALMMRDRATYEQRVKEYCEKYAKPEDIGAATEENSSDEELSEDEYDSSDEQVAGKADP

SEQ ID NO: 47449 - protein, 327 aa, Zea mays
  Clone ID: 700105086_FLI.pep
VMFESTGARLPACSLAAALLPIYCLRTWRCCDTHPTDTVDDACDRAFRSRARGGIYYLERERLVSACGGARSAAAMAAWKDGYLDMVLIPLAVLFPAVYHLWLYRAVRRSPLSSTVGISAAARRIWVFSMMKNNEKQAIIVVQSIRNVLMASTLVGTTSILFCTGVAAVLSSTYAVKKPLSDAVFGAHGAHMMALKYLLILAVFLLAFLCHSLAICTLNTASFLVNALSPSPHLHLPGVTAEYVADVMERGFLLSLAGNRLFFAGAPLLLWISGPVFPCVCSMAMISVLYNMDVVDDADDGRSSSGGGANAAVVMDGDSDDQSMEVV

SEQ ID NO: 47450 - protein, 323 aa, Zea mays; identical to SEQ ID NO: 47067
  Clone ID: 700105191_FLI.pep

SEQ ID NO: 47451 - protein, 81 aa, Zea mays
  Clone ID: 700105275_FLI.pep
NTNKSVQHHNMSTCQHVEIRDSLNKKYELLASFVHAKRNLRVSLLQLWPRSKEVDKPPARLDRYLTCLKHLSIQVPNTFVM

SEQ ID NO: 47452 - protein, 404 aa, Zea mays
  Clone ID: 700105281_FLI.pep
GDTNLAQQAIEKEIWLQPINHWPAVYVGTMALMQESSSQDLLQAHDELLHHSLCFAKSLALAVALDLRIPDAIHHHGAGGATLLQILAETALHPSKLRALRRLMRVLTVTGIFSVVEQPPAGGGDDSTVHTSDDEAVVVYRLTAAPRFLVSDDVSTATLAPFVSLALQPIAACPHALGISAWFRQEQHEPSPYGLAFRQTPTIWEHADDVNALLNKGMAADSRFLMPIVLRECGETFRGIDSLVDVGGGHGGAAATIAAAFPHLKCSVLDLPHVVAGAPSDGNVQFVAGNMFESIPPATAVFLKKTLHDWGDDECVKILKNCKQAISPRDAGGKVIILDVVVGYKQSNIKHQETQVMFDLYMMAVNGVERDEQEWKKIFTEAGFKDYKILPVIGDVSVIIEVYP

SEQ ID NO: 47453 - protein, 233 aa, Zea mays
  Clone ID: 700105382_FLI.pep
MERKRKEMEKGKSELRLAMEELRLCGSRDGAEEEEEVQVQQVKVQEQHKSSTMDLLYVSKQLIHVLDEIGPTLLVLRQDIQQNVQRLQDLHEKDCSKYACLTAIVTEEMEQGTAKKTKSCTRAIIWLSRSIKFSKYLLERLLETPESSLEEIVEEAYANTLKPWHGWISSAAYKVALKLIPEREFFVALLMGNCQDLEDLAEDARMLAYAVQPLLQEIDAISAKHNLDKMKSS

SEQ ID NO: 47454 - protein, 351 aa, Zea mays
  Clone ID: 700105412_FLI.pep
NNQDLVMMLKRRGGRDKESISHSEWLNTVQAEPDVTSMSFIPITSLLNGVPGSGFLIHAINLYLRHKPPIEELHQFLEFQLPRQWAPVYSDLALGPQRKRQGSTSLPVNLIGPKLYVCTNMVDVGKRPVTGLRLFLEGRKSNKLAVHLQHLCSLPQIIQLEDDPYNHQTPEYDRKYYEPIGPWKHFSHVCTAPVESDDLCIVTGAQLDVVHQGLKKILFLRLHFSKACNAVVRNSEWENSPNIAQKSGLISTLISTHFSSVAQTPPPRPADVNINSAVYPGGPPVPVQTPKLLKFVDPTEMMRGPQDSPGYWVVSGAKLNLERSKISLRVKYSLLTAMMPDDEFPLDDDEF

SEQ ID NO: 47455 - protein, 475 aa, Zea mays
  Clone ID: 700106281_FLI.pep
PSRLVLFFFPPLLLHLQTYYCHREGKLFGAGAGSTLTPSSAAMGSLGGSAGAGDGGKVGLPALDVTLAFPQATPASLFPPAVSDYYQFDDLLTDEEKALRKKVRGIMEKEIAPIMTEYWEKAEFPFHAIPSLASLGLAGGTIKGYGCPGLSLTASAISIAEVARVDASCSTFILVHSSLAMSTIALCGSEAQKQKYLPSLTQFKTIGCWALTEPDYGSDASSLRTAATKVPGGWHLDGQKRWIGNSTFADVLIILARNADTNQLNGFIVKKGAPGLKATKIENKIGLRMVQNGDIILNKVFVPEEDRLTGINSFQDINKVLAMSRIMVAWQPIGISMGVYDICHRYLKERKQFGAPLAAFQLNQEKLVRMLGNIQAMLLVGWRLCKLYESGKMTPGRSSLGKAWTSKKAREVVSLGRELLGGNGILVDFLVAKAFCDVEPIFSYEGTYDINSLVAGREITGIASFKPAVSAKSRL

SEQ ID NO: 47456 - protein, 229 aa, Zea mays
  Clone ID: 700106463_FLI.pep
RKRITGASFKWREREHEQSTSINCIGYSRLQTTKRNSSSILQPNNRNLLIIPFLSGRDLHLAVVNLLLQVLGVLAVDGAADADAGAENLLDAAGHFLGHGPGPHGPGNLDDIVETDVAAVLDVLDLLAVPLGLLERLDDEGRGRGNDGDLGLSVLDSELDGDAEALPVLGRLLGDVLSDLLGRKTERTDLGGQRRRRAYLAAGHTDEHLHHLRRVELGRHGCRRGVAAA

SEQ ID NO: 47457 - protein, 250 aa, Zea mays
  Clone ID: 700106516_FLI.pep
TILESNVLSSPYFLRSYPHHIPKPSVDPSSSIYTGDRRRVMGWATRFLAAVCFFAAGVLFVPEALLGSPSGAGAVTAAKLAHVLSFATSWGAALWATFIGGIIMFKNLPRHMFGNLQSKMFPAYFTLISACAAISVATFSHLHPWKTASTVERYQLGFLLSALGCNLSNLLVFTPMTIEMMKKRHKIERDLSIGEEVGWSKNQQVAKSNPTLAAMNKKFGMIHGLSSLANIMSFGSLAMHSWYLASKLEL

SEQ ID NO: 47458 - protein, 162 aa, Zea mays
  Clone ID: 700106619_FLI.pep
KRTNSIRLQIALLHPSAATGAGREIRLRALAADAAGELDVFGHDGDALGVDGAEVGVLEQADEVGLGGFLEGQDGVALEPQIRLEVLSDLTDQALEGQLPDQQLRALLVLADLAQSHRPGPVPVGLLHAAGRRRRLPRRLGGELLARGLASGGLAGGLLRTS

SEQ ID NO: 47459 - protein, 312 aa, Zea mays
  Clone ID: 700106681_FLI.pep
IFVSAPPPSMEFWGLEVKPGSTVKCEPGHGFILHVSQAALGESKKSDSALMYVKVDDKKLAIGTLSIDKYPQIQFDLVFNKEFELSHTSKTTSVFFSGYKVEQPIEGDEMDLDSEDEEEELNIPVIKENGKGDGKEEQKNQEKAVAATASKSSLGLEKKSKDDSDDSDEDESDDSDEDDSDDSDEGEGLSPDEGDDDSSDEDDTSDDDEEETPTPKKPEAGKKRGAENALKTPLSDKKAKVATPPAQKTGGKKGATHVATPHPAKGKTPANNDKSTEKSPKSGGSVPCKSCSKTFNSEMALQAHSKAKHGAK

SEQ ID NO: 47460 - protein, 197 aa, Zea mays
  Clone ID: 700106739_FLI.pep
LFGYWLFDAYYEHFGKRKRYSAMVLLEAEMSWNVLISPSQLDRKGLLLRKAIIVRLLEDVTNRRASKEHGYYIAVNQLKAISEGKVRELTGDVLFPVSFTCITQKPMKGEVMVGHVDRILKHGVFLKSGPVESIFLAEKSMSNYKYIGGENAMFMNDHSKLEKDTAVRFKVLGFRWMEADRQFQLLATIAGDFLGPL

SEQ ID NO: 47461 - protein, 162 aa, Zea mays
  Clone ID: 700106742_FLI.pep
LAIIEHACVLDNHKDQQTWPLHCPSISPDLAVVAPGLVAVEPVVDGGGVGLRPVEEVGAHALGGQVAPRVEDAAPHVAGAARRRRRRRRHRRRRGRRRRLRPLVAAAVRVFVDDERAGGGGLAELLEARLRARPGHHVVPQLVQHLLIRSPLSTSQNHQDER

SEQ ID NO: 47462 - protein, 243 aa, Zea mays
  Clone ID: 700106757_FLI.pep
LNSNITNTKGECRTKMTASTFLLVAFLALVTSQAIASDPSPLQDFCVADKDSPVKVNGFVCKDPMAVNADDFFKAAKLDQPRDTTKSKVGSNVTLINVMQLPGLNTLGISLARIDYAPLGQNPPHTHPRATEILTVLEGTLYVGFVTSNQADRSNKLFAKVLNKGDVFVFPQGLIHFQFNPVHDKPAVALAALSSQNPGAITIANAVFGSKPPISDDVLAKAFQVQKGTIDWLQAQFWENNHY

SEQ ID NO: 47463 - protein, 439 aa, Zea mays
  Clone ID: 700106990_FLI.pep
VGCLGVIVSSRLVLFSSPPSFRGAERAAGTGPPRSAPRRPAKMPGLTAPSDYAEEPPRHPALKINSKEPFNAEPHRSELVASYITPVDFFYKRNHGPIPKVEDLSRYAVSISGLVNKSIQLSMADIWSLPKYNVTATLQCAGNRRTAMSNVRKVRGVGWDISALGTATWGGAKLSDVLELVGIPKLSSVTSLGGKHVEFVSVDKCKEEKGGPYTASIPLNQATNPDADVLLAYEMNGEVLNRDHGYPLRVVVPGVIGARSVKWLDSINVKEEECQGFFMQKDYKMFPPTVDWDNINWSTRRPQMDFPVQSAICTLEDVDVIKEGQARIAGYALSGGGRGIERVDVSADGGKTWVEARRYQKDNVAYVSDGPQSDKWAWVLFEATLDVPANPEIVVKAVDSAANVQPEKVEDIWNLRGILNTSWHRIKIQRSLCVERSKL

SEQ ID NO: 47464 - protein, 189 aa, Zea mays
  Clone ID: 700235331_FLI.pep
FLSLLRGLGCLLWGLGGLLRGLALLAAAAGRLLRHLLGQENRVDVGEDTAVRDGDARQQLAELNVVTNRQEQVSRDDARLLVVLRRVPGQLQHLGGEVLKHGGEIDGGAGAHALRVPPLLEVAPDPADGELQPGLDGPRHRLLPGAASLAPSRPLLRLATGSAGVHGCSAAYAAIEWRKIWLWARELER

SEQ ID NO: 47465 - protein, 172 aa, Zea mays
  Clone ID: 700235463_FLI.pep
REGPRARSPLLLGRLVAPAEHPSLSMSGPSKKQRGMPALGCWLMAVGTFRLAFTWSCFFGSGSLCSATYSEIQVIGVHGRTVAVWTLLSCTLCFLCAFNLTSKPLYAATFLSFVYAFGYLSTECMVFHTMSAASLVPFTFIAVTSMVWMLIQWNSDGHGPRLLHGSTASKQP

SEQ ID NO: 47466 - protein, 458 aa, Zea mays
  Clone ID: 700235548_FLI.pep
ERRGGGGQDQLRGDDGRGVGQVGVGVRRRHLALVAVEVDLARERPAHAEGEGPCVLAHEHLRLHVAERAGLHEKVVVELEPVEHASVIDAPVWLQRLVLEAEDLGDVVQVGVLRHQRPLRVVHPVVVVGDGDLGAPVVLVVELDVPVHPDGAHVRRALQQRLAVLARRVHPGRQRALGVPLDAAARTRVAAVAAAAARAPGARHDGAVVEGGEGDAAGRVPGRQLLRVGAGHRPRHERLRPAPVVGRPVHGGRHHGGGPAGVAQPGPHEREVPGQLHRLVGGTGQADGDLERGDGPRRVLPVRRHHAGLAAVGDLLVVGHPREEVHHGRGALAAVRDAALELGAVPLLRGLRPHDGPDHLLLGPRPPQRPPGRHDVPVHLVVAHRHHRHVPVGRPRDHVPLDGDVAVRVQGVVGHHCNGAAGERDGQSQQRGGVADAEPHRHVDPSLACASRPAAAAS

SEQ ID NO: 47467 - protein, 354 aa, Zea mays
  Clone ID: 700235557_FLI.pep
TAPLLLIPCSCASDPELSPLSSSIDQYKASQLPQGATACDGMAIPVIDFSKLDGPERAETMAALAAGFEHVGFFQLVNTGISDDLLERVKKVCSDSYKLRDEAFKDSNPAVKALTELVDKEIEDGLPARKIKDMDWEDVFTLHDDLPWPSNPPAFKETMMEYRRELKKLAEKMLGVMEELLGLEEGHIRKAFSNDGEFEPFYGTKVSHYPPCPRPDLIDGLRAHTDAGGLILLFQDDRFGGLQAQLPDGSWVDVQPLENAIVINTGDQIEVLSNGRYKSAWHRILATRDGNRRSIASFYNPARLATIAPAIPAAGVGDDDYPSFVFGNYMEVYVKQKFQPKAPRFEAMATTTTK

SEQ ID NO: 47468 - protein, 158 aa, Zea mays
  Clone ID: 700236140_FLI.pep
CQNQTKQIFSLSLRDADPDAEDDERGTKDRGRWPDALAEGRGGGGRGGESDGVGDGDGHGDGRGAEEREEGRGRAQVGGERRRVLPRQEQLRPPPEDVTGGAGTGAAVPDERAPPHQRVGGAPHQTHCHHARGVAATRGHGQRTAGSEVRTTRQRGSE

SEQ ID NO: 47469 - protein, 158 aa, Zea mays
  Clone ID: 700236460_FLI.pep
SRGNMASGSLELSGNLHRSIKSRAPQKDSERAGSKTKQNSPRTTGRTIVTKEIKKNQEQHSPFSFRGRIPHRIEGMGGRMSRGLRVLQEGRRRNPFVHGPETANARNFTTRFCKVGGRYKKPKNPKIQEPRNEELKKRQERQLLSSFGPEAYLEAWET

SEQ ID NO: 47470 - protein, 263 aa, Zea mays
  Clone ID: 700236560_FLI.pep
QHSSSQSHPLSSLRFASSAPIPPPPPPPSSVPFRRTSSPEMANARSGVAVNDECMLKFGELQSKRLHRFITFKMDDKFKEIVVDQVGDRATSYDDFTNSLPENDCRYAIYDFDFVTAEDVQKSRIFYILWSPSSAKVKSKMLYASSNQKFKSGLNGIQVELQATDASESASMRSRIGHARRTAIASFMITHHGLAYYCGFVCHYRLGAAKDCFGDLWVCCCVKRSSWLPEDHEGLDLSCNSLLSANYVWTMDMCCAVQLTTNK

SEQ ID NO: 47471 - protein, 175 aa, Zea mays
  Clone ID: 700236938_FLI.pep
MGSLLTRTGVLPWLQAKIVDPVLQVIRRGAEPKQLAFSAALGVTIGIFPICGTTVILGAVAVAMLGSRCNAVTLMVLNLAATPIELSLIVPFLRLGEAVTGSGHFLLTADALKNVLTGHASKDVLMSIVHAMLGWLIAAPIVLVVLYAVSFPCFKILVNRFGGIPSSPRTPIKAV

SEQ ID NO: 47472 - protein, 368 aa, Zea mays
  Clone ID: 700237060_FLI.pep
PVTRTQEINMASSGGDEKAAAVVQNKKVVLRRYVTGLPTEEDMEIVVDTIVLRVPAGQTAVLVKNLYLSCDPWMRDRMSKHDDGDPTVLAPDFVIGEAMVNFGVGKVIDSTHPELTAGDLVWGMSGWEEYTLVTQTEYLSKINHKELPLSYYTGVLGMPGLTAFSCFFELGKPKKGDFVFVSAASGAVGQVVGQLAKIAGCFVVGSAGSDEKVSLLKDKFGYDDAFNYRSETDLGAALRRCLPDGIDVYFDSVGGATLDAALLHMRHGGRVAVCGMISQYGLEEPYGVRNLYCIIGKTVRVEGFNVNGYFHLYTRFEEEMAGYIKDGKVTVVEDVVEGIESAPASLIGLFSGRNVGKQVVAIAHSGTP

SEQ ID NO: 47473 - protein, 163 aa, Zea mays
  Clone ID: 700237152_FLI.pep
KLHASARWYILHHPSNYFLFYNLFHSHNLICNCKCRVRLALHLVDGDTWCELGERQGALLAVYLEDTQICNDGAHASRASEWQAALLHNLGRSIFAEMLRRDNDLCGFGVGDEVHCAAHALEELAWDHEVGEVAGSTDLEGAEDGNIDVTAADHAKGLGRVKG

SEQ ID NO: 47474 - protein, 153 aa, Zea mays; identical to SEQ ID NO: 44873
  Clone ID: 700237248_FLI.pep

SEQ ID NO: 47475 - protein, 412 aa, Zea mays
  Clone ID: 700237451_FLI.pep
AGCKRQAARNVLILMSDTGGGHRASAEALRDAFRIEFGDAYKVFVTDLGKEYGGWPLNDMERSYKFMIRHARLWKVAFHGTSPRWVHGVYLAALAYFYANEVVAGIMKYEPDMIISVHPLMQHIPLWVLKWQQHPKAVVPFVTVVTDLNTCHPTWFHHGVTRCYCPSAEVASRALLRGLSPSQVRVFGLPIRPSFCRAVLDKDEVRKELGLDPQLPAVLLMGGGEGIGPVEETARALGEELYDRRRRRRVGQVVVVCGRNRALRSTLQSLRWKVPVKIRGFETQMEKWMAACDCIITKAGPGTIAEALIRGLPIILNDFIPGQEVGNVPYVVDNGAGVFSKDPGEAARQVARWFSSTDGDELRRYSRNALRLAQPEAVFHIVRDIHKQLQRQPAAVTRIPSRSLTSSFPYHM

SEQ ID NO: 47476 - protein, 334 aa, Zea mays
  Clone ID: 700237549_FLI.pep
GLNRFTGALPHACPNPFLTSSASTTKRKMAAETKPAAAIGVAGEMEVEAYRRLFPVAFLERHLGESVRIDARRLREARTTTVALGAVSSAHGSALVRVGDTAMLASVKLEVMSPSAEYPDEGSVSVEFHMPPICSPLVRPGRSAEVAPVISKALEDVLMSSRMLNLKDLCLITGKASWLAYLDIYCLNADGSLFDAALISAVAAFTHLEIPLVSVGDDGKLFTVGGNDGKNKFELVNREKRKLTLGDIPLSLTCALHKGSILTDPTSEEESIIETYVTVVVDSSDRLVSLQKVGGTVTSMATIKECISLAKERRLRLREILIDSVKAMEVDHTE

SEQ ID NO: 47477 - protein, 304 aa, Zea mays
  Clone ID: 700237825_FLI.pep
PAQLSNPSLYLQAGELIDGGQGGGRSPGRQPLLGAPANRHGGAGHGGEGLQGASAGAAVRGGGADVVVLLPGRDRRVRGHLPVPVHQHPDCDGREQVVQQVRHRGHPGHRVVLRRHDIRAGVLHGGHLRRPHQPGRHLRPLPGAEAVAHARALLHGHAVPGRHLRRRRRQGLPGGPLHGRRRRRQRRQPRVHQGRRARGGDRRHLRARLHRLLRHRRQAQRPRLPRAHPRAAPHRLRRLPRAPGDHPHHRHRHQPRAQPRRRHRLQQVPRMERPLDLLGWPLHRCCSCRHLPRGHHQGPPLQEP

SEQ ID NO: 47478 - protein, 90 aa, Zea mays
  Clone ID: 700237985_FLI.pep
DKLAAANKFFRQKRNAAGVLGFSSRQKCTVALRMLAYGGPADFLDEGLRMGESTVLQTIKEFAKTVLQTFFCLACFFPPLDGSSDSSDVK

SEQ ID NO: 47479 - protein, 275 aa, Zea mays
  Clone ID: 700238237_FLI.pep
KNAQDEGAPQRRRRRASAHGEHRLRACRPRRGGAAHGADGVAQVAALQLRRLHRVRRQGRPRLPRRLLRLHGPAARRGGADGRRGHPAPDRAPQEEARSAGRALGHLRRRRRSGGEGDAQQPHQQAAALRAPPQGVVVVVEGQGQGTSPRDAPASLLFVFIRLSPRLRRGVVRDGGVVRAAGLRCAGPRARGCRGGRGQPEGGRGGGRRVPLGGGPAPRRHAGHGPRRRPRRDVREGPLDQLIKRYHLFISITTPCKCYSFTYPPGSECINCFFK

SEQ ID NO: 47480 - protein, 145 aa, Zea mays
  Clone ID: 700238572_FLI.pep
FLQWDTAGQERFRTITSSYYRGAHGIIIVYDVTDQESFNNVKQWLNEIDRYASDNVNKLLVGNKSDLTANKVVATETAKAFADEMGIPFMETSAKNATNVEQAFMAMAASIKDRMASQPAAANARPATVQIRGQPVNQKTSCCSS

SEQ ID NO: 47481 - protein, 148 aa, Zea mays
  Clone ID: 700238701_FLI.pep
TRTTMASQAIESHRAGAEVVTGGDAICRKKSIELLEELGLPKGFLPLVDIQEFGYNRETGFMWLVQGKKKVEHTFKKIKQTVSYATEVTAFAEKGKLRKITGVKTKELMLWLSVVEVYVPEASPEKVTFKTGTGLSDTFDASAFALGE

SEQ ID NO: 47482 - protein, 361 aa, Zea mays
  Clone ID: 700238760_FLI.pep
GAAALYGGAVGEALVRDVRAAGGVMTMDDLRGYRVDVGAALRADAMGFTFLGMPPPSSGTLGMALILNILQGYSSLEFLKELLGIHRVIESIKHMLAIRMDLGDPDFVDVTGDVAEMLSTTFADKVRQRIVDNTTFPPGYYFPKWSQLDDHGTSHLCVVDGDRNAVAMTTTVNAYFGAKVLSPSTGIVLNDEMDDFSVPAKRTPDRLPPAPANFIAPGKRPLSSMTPLIILKDGELAGVLGGSGGTNIIATVVQVFVNHFIVGMDPLAAVQHPRVYHKLIPNVVTYENQTVGDGEVIALGGAARAFLEERGHRLRSTDSGAVCQFIVHELAEPPAAPGHGVFRGRLTAVSDPRKGGSPAGL

SEQ ID NO: 47483 - protein, 376 aa, Zea mays
  Clone ID: 700238841_FLI.pep
PAVCRTRHAIMALMQESSQDLLEAHDELFHHCLCFAKSLALAVAQDLRIPDAIHHHGGGATLHQILAEAALHPSKLRALRRLMRVLTVSGVFTVQYSSTVDASDGADVVYRLTAASRFLVSDSDEAGTASLAPFANLALHPIAISPHAVGICAWFRQEQHDPSPYGLAFRQIPTIWEHADNVNALLNKGLLAESRFLMPIVLRECGDEVFRGIDSLVDVGGGHGGAAATIAAAFPHVKCSVLDLPHVVAGAPSDACVQFVAGNMFHSIPPATAVFFKTTLCDWGDDECIKILKNCKQAISPRDEGGKVIIMDVVVGYGQSNMKRLETQVMFDLVMMAVNGVERDEQEWKEMFIEAGFKDYKIRPVAGLMSVIEVYP

SEQ ID NO: 47484 - protein, 62 aa, Zea mays
  Clone ID: 700238875_FLI.pep
PKVNEDFYKWTLFGGIVTLVAAVVMLLLFISETRSYFYSATETKLVVDTSRRERLRVNVSTF

SEQ ID NO: 47485 - protein, 301 aa, Zea mays
  Clone ID: 700239159_FLI.pep
GRERRASPRRPSCRCLSDRRRGGAARPRVQEASRRAADPAGGSALELRPGVVSGDPVHGADHRRDRDGRHRVRRVPAVQAHDAVPAGLVRAAGDAGVRPVGHHPRPAAGADGAGGELQLAHRRHLLPRQPRRGLPRRRGGAAPRGHLRRAAPQLLPAPLPGRVGGAPAQPRGDGVHGRRAPGGRRPARPLRQGAHHLEGRHLRLAPVLDAHLLPLPLLLPRQWHRHAHRLPLQVAVASSWQPGRRHPLFTCSVSACSLLCSYAFVLSFICSFTQAQQHNLTHAPFLYRPKIIIIILVRYSA

SEQ ID NO: 47486 - protein, 209 aa, Zea mays
  Clone ID: 700239608_FLI.pep
CSHHQLQFMGHLTTHPALKIFLSLHITHMEEPKYFNPVGAHPSGYLGEDPCGTPNNLMPFVQQIAVGRRPSLTIFGNNYATKDGTGVRDYIHVVDLAEGHLFALKKLFESSSNIGCEAYNLGTGKGTSVLEIVNAFEKASGKKIPLVMGQRRPGDAEVLFSSPAKAERELHWKAKYGITEMCRDLWNWASKSPYGYAASESPKLNGSSR

SEQ ID NO: 47487 - protein, 148 aa, Zea mays
  Clone ID: 700239779_FLI.pep
ILFTGATKLTGRRHLDQVEGLSVRRLLFDHMFFSFNELLLNRFYQLRPWILCSLLIRILNARLDLAMKAGPVRCQPRPSTVRPPGVRCEIPTVVQLSRDPRFQVVMRQCFARTPQRPCPAPCLKPQRHQNPLHPWPSLSAFSLLGSCL

SEQ ID NO: 47488 - protein, 280 aa, Zea mays
  Clone ID: 700239780_FLI.pep
QRSLPSETPSTSAAAGAAATMAVGKNKRISKGKKGGKKKTVDPFSKKDWYDIKAPSVFSVRNIGKTLVSRTQGTRIASEGLKHRVFEVCLADLQGDEDQAYRKIRLRAEDVQGRNVLTNFWGMNFTTDKLRSLVKKWQTLIEAHVDVKTTDNYMLRLFCIGFTKRRPNQVKRTCYAQASQIRQIRRKMVEIMINQASTCDLKELVSKFIPEVIGKEIEKSTSSIFPLQNVFIRKVKILKAPKFDLGKLMEVHGDYKEDVGVKLERPVEGDEAGQEVAAAE

SEQ ID NO: 47489 - protein, 232 aa, Zea mays
  Clone ID: 700239941_FLI.pep
FEIYASRGQAAMSEVFEGYERQYCEASASLSRKCTAASALDGEKKKQKLSEIQSGVEEAESLIRKMDLEARSLQPSIKAGLLAKLREYKSDLNNVKSELKRISAPNARQATREELLESGMADTLAVSTDQRGRLMMTTERLNQSTDRIKESRRTMLETEELGVSILQDLHQQRQSLLHAHTTLHGVDDNIGKSKKILAAMSKRMDRNKWIIGGIITALVLAILLILYFKLAN

SEQ ID NO: 47490 - protein, 168 aa, Zea mays
  Clone ID: 700240267_FLI.pep
HLKRARETRIPRRRLRKRRRRRRRWLPPHTPHGPSGGSVPRYVRRCCFPSDRSFGFYRSENWVIGDGWMDLTGFADPGVARVHGSGVPAVRADGRGLGHLLVPACAQHHGQPRGAGDQGEEGGRRPGQPRRGREVRYARPQEVRPREEARDHGLHQLLLRRPSQGRLS

SEQ ID NO: 47491 - protein, 109 aa, Zea mays
  Clone ID: 700240362_FLI.pep
VVVCDPVAVRFSAQVSTARLLLVVDSLGLVLLSGAATVITASIPSSSMAAAFLLLPPSAVPLDAAGGGSAAVSSASCAGCARGSSCCSGSSSTACPCCACACASLGCFR

SEQ ID NO: 47492 - protein, 136 aa, Zea mays
  Clone ID: 700240561_FLI.pep
LASGENTMAQRQGRGSGAVALAAAAAVLLCVLLHAHVAESAVFTVGDRGGWSFSTGTWTNGKRFKAGDVLVFKYDSTAHNVVAVNAAGYKGCSAPRGAKVYTSGNDRVTLARGTNYFICSIPGHCQSGMKIAVTAA

SEQ ID NO: 47493 - protein, 230 aa, Zea mays
  Clone ID: 700240846_FLI.pep
QRRPTFKNPAKKQTVMKNGQPVPLLPSPDPIQWSTSDELSDRGHVLKPGVERLADGVDDEADLPQLLRVDDVAAVEDEGGLLHVVEDLLVVQGLELVPLGQDAHPVGALGGLVRVPHAAHLLNGRGARRLQVHRVVPVELVHGQVPLDLVLRHLRVVDADLGLVAQQALADVNGRGLPGVTGVFLEGEAEDGDLLAGDGVEHGGHDAVHEPALLVVVDLDHLLPVVATSG

SEQ ID NO: 47494 - protein, 249 aa, Zea mays
  Clone ID: 700240861_FLI.pep
PTSCSSLLAAEPMAGADVDVGTELRLGLPGGGADAAKAAKRGFEDTIDLKLKLPTAGMEEAAAAAAAKPEPAAEKAKRPAEAPAADAEKPPAPKAQAVGWPPVRSYRRNVMTVQSVKSKKEEEPEKQQSAANAGGNGSAFVKVSMDGAPYLRKVDLKMYNSYTELSVALKKMFSTFTTSGNNMNEGKLVDPVSGADVVTTYEDKDGDWMLVGDVPWEMFVESCRRLRIMKSSEAIGLAPRTKDKCKNRS

SEQ ID NO: 47495 - protein, 354 aa, Zea mays
  Clone ID: 700241186_FLI.pep
ADQMSHPSHVKKGMPYVRLGKSGLKVSRIILGCMSYGSKEWQDWVLEEEEAFRHIKAAYDAGIQTFDTANVYSNGVSEIILGKAIKKLNIPRNDIVIMTKVHGAVGRAPGVNFLKSKENPEEVGYVNQRGLNRKHIFESVEASLERLQVKYIDLLQCHRFDNDTPIEETMQALHDVVQAGLVRYIGMSSCWAWQFHAMQNYAINNKLTPFISMQNQHNLVYREEEREMFPTCKYFGVGMIPWSPLARGFVARPLGQQTVRGGCDMFINQYDKNHPNNRKIVERVEEVAKKMNISMAQVAVAWTLQKDGVAAPIVGTTSLDNLKDIIGGVNVKLSEEDVAYLEELYQPQAIIGHA

SEQ ID NO: 47496 - protein, 91 aa, Zea mays; identical to SEQ ID NO: 46165
  Clone ID: 700241352_FLI.pep

SEQ ID NO: 47497 - protein, 225 aa, Zea mays
  Clone ID: 700241542_FLI.pep
PPLPSSPFEGAASERFSQIRFDMNPEYDYLFKLLLIGDSGVGKSCLLLRFADDSYLDSYISTIGVDFKIRTVEQDGKTIKLQIWDTAGQERFRTITSSYYRGAHGIIIVYDVTDQESFNNVKQWLNEIDRYASDNVNKLLVGNKSDLTANKVVATETAKAFADEMGIPFMETSAKNATNVEQAFMAMAASIKDRMASQPAAANARPATVQIRGQPVNQKTSCCSS

SEQ ID NO: 47498 - protein, 132 aa, Zea mays
  Clone ID: 700241732_FLI.pep
LQNSLITFQLSRRTSRTGGDTARAEQGHRTVPSCWKERRWWRTPTCRRRCRPRRCRRRPGPWTASTSSTAGASRPTSRRSLTRSMAPDGNAWLAPASAATSRTARGASSTSAWSRSGSSSSKGRQHDDKPHG

SEQ ID NO: 47499 - protein, 230 aa, Zea mays
  Clone ID: 700241860_FLI.pep
EPKSPVCLKKESLQATNKRCSYRSFHQIHIRGKTVHQVHSYRQQSNHITRAARAIRSHRSSSHRRRENLYITCHIRRHPPGGLHRSPFLASDTVKPIGPSLTYHHHKEAASSPGHPCFRSSPEGPCGEESSPCRPCREGSPGCPCRRDNNPDSPCRKSTWEAETCGSHTRRRHCRNTHHAHHHSLYGTSHAPYARTDGQDSFQELVSLGDHGVKSMNTRPAITDTNEGNK

SEQ ID NO: 47500 - protein, 159 aa, Zea mays
  Clone ID: 700242337_FLI.pep
ECAKKEDGDCCATPASDQQMTQELGSSSALWTTYWGGYGRGWYWYWYCAAAYACHGYGYGYTGGGGGFLSSPFLSPASFLSPSFFFSSVAGPTETMAAEPTLRSLPTTSTGSASPTTVSLDSFMSTAMESIPWRVETALSTFCLSLLSCRSSFSTTFLA

SEQ ID NO: 47501 - protein, 491 aa, Zea mays
  Clone ID: 700242342_FLI.pep
GSRSPLSSLSWGMDRAAASPPAVEEPVRATSVLDSLGAEVLAVMSPVSICMALVVLLISLLSPPSSGSAAGSPPPVTAATLVYLESPNDSPGQKLLGALLDAAVFVALVAAVTFVLVALYYYRCTGFLKNYMRFSAFFVIFSMGGAIVAAVLRRLGAPLDAATVLLLLFNGAAVGVLSVFASAVPILVRQGYMVALAAIVAAWLSRLPEWTTWIMLVALALYDLVAVLAPRGPLRMLVELASSRDDELPALVYESRPTVGPATSSSSYASVMGSVEMQTMSDSGQICGNRYDRVEQEEYASHASLEMRDLGRGRSSVGEMNRPRGPVLQMENLEREVPATSAELTANQGGGSQHAIIQIEQPDEEETSPLVSAPSTNTAALDVEEHRQSSSSEPLDFEMFESTRGIKLGLGDFVFYSVLVGRAAMYDLMTVYACYLAIIAGLGCTLILLSICRHALPALPISIMLGVTFYFLTRLLMEPFVVGASTNLVMF

SEQ ID NO: 47502 - protein, 485 aa, Zea mays; identical to SEQ ID NO: 46975
  Clone ID: 700242384_FLI.pep

SEQ ID NO: 47503 - protein, 276 aa, Zea mays
  Clone ID: 700242392_FLI.pep
KLALYTHSLVAASIAGRPFPSNMGKRFLHQLLAVALALFVSPARSDDWLPATATFYGGADGSDTMGGACGYGDLYEQGYGVNNAALSTALFNDGASCGQCYVIRCDSSKTGWCKPGSSNFVVVSATNFCPPNWELPNGGWCGPPRPHFDMSQPAWENIGIYSAGIIPVLYQRVKCWRSGGVRFTIAGFDHFYMVLVTNVAGSGSIQSMAVKGANTDWIPMYRNWGANWHCLAGGLVGQGLSFALVSTGGQNIVFQDVVPAWWQFGQTFTTYQNFDY

SEQ ID NO: 47504 - protein, 450 aa, Zea mays
  Clone ID: 700242416_FLI.pep
RSCPRLAPVAATMGSDADMEDYGFEYSDEEPEEQDVDIENQYYNSKGLVETDPEGALAGFDQVVSMEPEKAEWGFKALKQTVKLYYKLGKYKEMMDAYREMLTYIKSAVTRNYSEKCINNIMDFVSGSASQNFSLLQEFYQTTLKALEEAKNERLWFKTNLKLCKIWFDMGEYGRMSKILKELHKSCQREDGSDDQKKGTQLLEVYAIEIQMYTETKNNKKLKELYQRALSIKSAIPHPRIMGIIRECGGKMHMAERQWDEAATDFFEAFKNYDEAGNPRRIQCLKYLVLANMLMESEVNPFDGQEAKPYKNDSEILAMTNLIAAYQKNDIMEFEKILKSNRRTIMDDPFIRNYIEDLLKNIRTQVLLKLIKPYTRIRIPFISQELNFPEKDVEQLLVSLILDNRIQGHIDQVNKLLERGERSKGMRKYNAIDKWNTQLKSIYQTLSNRV

SEQ ID NO: 47505 - protein, 465 aa, Zea mays
  Clone ID: 700242531_FLI.pep
SLYHRQIACLPCSPRRLTARPRSPRPKGTQASHRIRPALCRRQLQKRPAMAAAFDAYTDKNAVFRRLKAKPENKMCFDCNAKNPTWASVTYGIFLCLDCSAAHRSLGVHITFVRSTNLDSWTPDQLKMMAFGGNNRAHAFFKQHGWTDGGKVEAKYTSRAAELYRQMLTKEVAKSATTDNALPSSPVASEASKPPSDDFPEFKLPDVPAPPAEDLNGKHEPKSPKAAPRSPKAATHPTFATSVKKPIGAKKVGGKTGGLGVRKLTTKPNESLYEQKPEEPKPAVPALAASTKKGGQALHSRFEYVENEPSADSRTGGSVSRVSGHVAPPKSSDFFQEYGMGNGFQKKSSNASKTQVEETDEARKKFSNAKAISSSQFFGTQNREEKEAQLSLQKFAGSSSISSADLFGRNDADNSNLDLSAADLINRISFQASQDLSSLKDIAGETGKKLTSLASNFISDLDRIL

SEQ ID NO: 47506 - protein, 160 aa, Zea mays
  Clone ID: 700242540_FLI.pep
QTQSSITLTPLLCLYNKHRSAPRSSSAGASDRYGSGKRQCDAGACPRRPTRRRFPPPPRRRRRGHPQGRLVLQRGQLVQGQELPCRRRPRVQLRPLRAQRGGRGRRRLQRLPALRHVVRLRERPHHARPRHQLLHLQPQRALRDGDEDGRQRQLSTTLIC

SEQ ID NO: 47507 - protein, 205 aa, Zea mays
  Clone ID: 700242553_FLI.pep
SPALHRWARRRRRRRSGSCSQERRQLLPFSPLASRLAPSPLVLRTADIRRPMATLKDAAARKSILATIRLVVPAGAARPAPPVGPALGFYRLNLMAFCKDFNARTQKYKAETPMQVTLTAYKDSTFEFVVKSPSVSWFLKKAAGIETASTRPSHVNVSSLTLRHVYEIAKLKQADPFCKHISLEALCKSIIGTANSMGIAIVKDL

SEQ ID NO: 47508 - protein, 185 aa, Zea mays
  Clone ID: 700243467_FLI.pep
LGASDRAQFVFSRARRQSTISSPLGQQSMANAGMRPVAGLLLVLNFCMYIIVAAVGGWAINHAINYGFFIGAGLQLPAHFSPIYFPVGNAATGFFVIFAVIAGVVGAASALAGFHHVRAWNAESLPAAASAGFIAWTLTLLAMGLAVKEIELHGRNARLICMESFTIILSATQLFYLLAIYGGLR

SEQ ID NO: 47509 - protein, 265 aa, Zea mays
  Clone ID: 700243548_FLI.pep
SGGRLSACSCRRCSFPRMSERSESATEKIMSSIMDTIADNLPKQKSGKFDPGSVSDKVKNKLFGRQKTLHGVLGGGKPADVLLWRNKKISSSVLALATAIWVFFEWLDYHLLTIVSFALVLGMVVQFVWSNFSNMLSSGSRSQVPRVELPDELFVNIAVAIGAQINKFLCFLQDVSCERNLKHFVVAIAGLWAAAVIGSWCNFLTVIYVGFVCVHTLPVLYEKYEDQVDDFLYSLLGLLRDQYQKLDQGVLSKIPKGNMKAKKNE

SEQ ID NO: 47510 - protein, 273 aa, Zea mays
  Clone ID: 700243863_FLI.pep
VSRQLNLIYQQQASKQGSEEGALCMLDPSTGSLLLSSSCCCWRRRLFGSRLILLFLLLFFLLLLYHRLLRRCLCRRRCRLRRCSWLGLLLLLLHGDFPGGGLRRRLRLGLLLGDKRCDLVQDEGDRRKQGRGAGLGHRLAHHLGSREVNLSQLIEELGDCSRVLLADLDWLLILEQSLDLRRRCFVGLHDLGLQLCLLVLNLLVNLLLVEGLQEACSCSLLAILVKDLVEARQNLGLPHAGHLDLFFRIYTCSNNLCRQEGRRRGRRWQLMLL

SEQ ID NO: 47511 - protein, 180 aa, Zea mays; identical to SEQ ID NO: 37897
  Clone ID: 700244412_FLI.pep

SEQ ID NO: 47512 - protein, 419 aa, Zea mays
  Clone ID: 700244531_FLI.pep
PRSDLFGLFDGVPVSPGSFAMHSSASARGGRGLLLPAAAAAVVVLLLGAVAPAAGCYPRVFNFGDSLADTGNYPFVYGNDSAKLRPPYGETFFHRATGRASNGRLVVDFIADTLGLPFVRPYLSGRSAEDFAGGANFAVGGATALSPDFFRARGFHNMGNRVDLDMEMKWFRGLLDLLCPGNLAGCSDMMNQSLFLVGEIGGNDYNGPLLSGVPFEEIRAITPSVVAKISSTISELIQLGAKTLVVPGNLPIGCVPKYLMIFKSNKKEDYDPQTGCLRWMNEFSQYHNKLLVEQLKKLRRLHPGVTIIYADYYGAAMEIFLSPERYGIEYPLVACCGAEGPYGVSPTTSCGLGEYKLCDNPERYGSWDGLHPTESAYKVIAMGLLLGSYTRPPIASTTTSCPQLMELGSSAEYKRLYDL

SEQ ID NO: 47513 - protein, 253 aa, Zea mays
  Clone ID: 700097023_FLI.pep
SMASLPVPHTLPRASPAIVGAARGRAAVRVRTATAALGGRCGGGGGMEQRHGEAPHSPVKEKPVMSNIGKSTNILWHNCLIGQSDRQKLLGQKGCVVWITGLSGSGKSTLACALSRELHCRGHLTYVLDGDNLRHGLNRDLSFKAEDRAENIRRVGEVAKLFSDAGVICIASLISPYRRDRDACRALLPHSNFIEVFIDLPLKICEARDPKGLYKLARTGKIKGFTGIDDPYEPPINGEIRHKLYTSGIVFKD

SEQ ID NO: 47514 - protein, 252 aa, Zea mays
  Clone ID: 700098270_FLI.pep
AQLGLQHGGGAGRRYGYGRARVGRHARRPRGRGLPRGPRRRPRLRAVGARRLLPARRRHAVGLVRHPRGRRARRPPPAARAPPPQLLAALPAPLRGRGRTRAGPRRRAPRRARARPARRRAGEDGCDSAAGRGHCAGAAGLVPRRDGHPRVRGRVGRRRGALVVVGRQRHVTVRARGGTGAQQEVWMDERRIGGDDDQPWKTDGKCPSASSVDQVLIAASVKAGIFVAFAILELILKVPRVQIKVSAATCLD

SEQ ID NO: 47515 - protein, 395 aa, Zea mays
  Clone ID: 700098507_FLI.pep
PDLICDDLLPPDPAPSPPTATAAAAASPTEVLSSAIQPEPAAATMYGWEMLSFNIHDGFLEAIVRGNRSGLLTAADYNNLCQCETLDDIKMHLTATEYGPYLQNEPSPLHTTTIVEKCTLKLVDEYKHMLCQATEPLSTFLQYITYGHMIDNVVLIVTGTLHERDVNELLEKCHPLGMFDSIASLAVAQNMRELYRLVLVDTPLAPYFSECITSEDLDDMNIEIMRNTLYKAYLEDFYKFCQKLGGATAEIMCDLLSFEADRRAVNITINSIGTELTRDDRRKLYSNFGLLYPYGHEELAVCEDVDQVRGAMEKYPPYQSIFSRISYGESQMLDKAFYEEEVKRLCLSFEQQFHYAVFFAYIRLREQEIRNLMWISECVAQNQKSRVHDSVVFIF

SEQ ID NO: 47516 - protein, 297 aa, Zea mays
  Clone ID: 700099308_FLI.pep
SGGPARSSGPATFVCLLLLRSSAPLLAAVAWSLYITPPPSGPRPSSAALLASLDSGFSEFGQNPACPCRPTPPPASLRRVSCRSSRPGEMDGVVVRRVIPSDNSCLFNAVGYVMEHNRNKASELRQVIAATVAGDPEKFNEVFLGKPNEAYCAWILDPEKWGGAIELSILSEYYGREIAAYDIQTTRCDLYGQEKNYSERAMLIYDGLHYDALAMSPAEGAPEEFDQTIFPVNHDRSIGPAEGLALNLVREAQRKRSYTDTANFTLRCGVCQIGVIGQQEAVEHAQATGHVNFQEYK

SEQ ID NO: 47517 - protein, 371 aa, Zea mays
  Clone ID: 700099317_FLI.pep
ARNRPRGFTSSFHFNYGPTAVRVNPVAGRLRSLAWLLQFLGEVHVVDEDQFPAIRVQDGCDLGVDPWQGPRLPHHLASGQLRRLRGPVDIVGANGDLGICIPLGILGDTIVVGQLQHRVLVFRAETHHCHCVLVLRAISLPEQFHAAGLLIEAYGTVKVADAEHHLAQGFRSSRPLDDLKLVAVGVLHEGDDGLAALHRTGFPDDLSSLCSYELYRLGHVLDCDAEMAEPFAYVIFVNPVIVSELDDEMRFLGPVPEERVAVLLLWNVPLPEQLHPQALGVELDRLVEVADPVDDVEEAAVVFLRPRDGLVGQGPGLCHGAGLAPGQPQRPRSSHLLRLQRRTCGSGGEEQRPPGDGRGRAGDGPAAGGHR

SEQ ID NO: 47518 - protein, 301 aa, Zea mays
  Clone ID: 700100534_FLI.pep
ARQPGPAGFVSCRSYAIRSKLVRAMPPILASFQPASPRYPSFQDANGKRRNVPCYQRQQTPQVEARSMEEVYDALAEHLLSVLKNIEHLDSKYIVGLAGPPGAGKSTVASEVVRRVNTFWSQKHTKGSGAPLPTKEIAAMLPMDGFHLYRAQLDAMEDPKEAHARRGAPWTFNPSLFLKCLHTLRTEGSVYAPSFDHGVGDPVENDIFVKPQHKIVIVEGNYLLLEEDVWTEIRDLFDEKWFIDIDIDISMQRVLKRHIATGKEPDVAAWRISYNDRPNAELILESRKNADLVIRSVDFSS

SEQ ID NO: 47519 - protein, 227 aa, Zea mays; identical to SEQ ID NO: 41079
  Clone ID: 700101038_FLI.pep

SEQ ID NO: 47520 - protein, 70 aa, Zea mays
  Clone ID: 700101213_FLI.pep
AVATAHARSGGEEREREGEGGTREWLGCAVPRSPLLVVRQLFVAFVGCGCCAVVSCDEEARLATVCGRDR

SEQ ID NO: 47521 - protein, 187 aa, Zea mays
  Clone ID: 700101269_FLI.pep
SVVMARLYIGNLDPRVTARELEDEFRTFGVLRSVWVARKPPGFAFIDFDDKRDAEDAIRDLDGKNGWRVELSRNASGGRGGRDRHGGSESKCYECGETGHFARECRLRIGSGGLGSGRRRSRSRSRSRSPRYRRSPSYGRRSYSPAARSPRRRSVSPARGRSYSRSPQHKGAREESPYDNGYRRSRS

SEQ ID NO: 47522 - protein, 155 aa, Zea mays
  Clone ID: 700092088_FLI.pep
ALVCSLSCGLAQGRVARKSLGIGLGGGGGGGGDGLGLGLGLGLGVGAGTGGVSVSGSGSGSGSAPVVGSTSGSRSGSISVGGASSSAGSSAGSSAGSTGSAAGSSAGSGGGQGYGQGGGSGSGSVYGEGSGSGNGLVGIGTGQGYGHGSNFGGNP

SEQ ID NO: 47523 - protein, 362 aa, Zea mays
  Clone ID: 700092144_FLI.pep
SSSSRRRPCSLLRRRPLVGHGDRERAHRQRPLLELLRRVLPVRRGHRALARRRRPPPRHRHRRRPHPHLLPRLLPAGLRRVRPPVWFQQRAEAGTQPDAPSRGAQAHRRHPRRRPRRLRPQGVLRRHHHARHPGRRRRVRGSLLRGASRPPRRAIAGVQRPGLHAAGPRLRRAHAARRVQEPEPGHGGPRGALRGAHRGSWPLLLLHQPPPAQRRRRHHGPGVPPDARGQVRQGRQRGAGAGRAHPQRLRQQVLLRPHRQAGALQVGPGPHQRPDHQTRRHALRAQPGRLLRPVRQVHGQHEPDGRAHGQRRRGPPQLRSAQRRPRRLSRPARDRRRRRGARGRRVIRILFYNKWVASASCE

SEQ ID NO: 47524 - protein, 337 aa, Zea mays
  Clone ID: 700092716_FLI.pep
PASSSFPSIAVAGAPYNFKMAATATAMAIATISPAAPIPSAPFPSLPLGLRLRPQPLLFAASRRRLLHVPKAASWDESVPEDGGDAEESVAAGDDEDEDEKPRPEPVSSSEFQFAAPPEGYVEPAAFDELPPESPEDVAAAYESLYGPAFSGETLLGNNVFEVKVVDPIDMDREQRPNDDFTERVVQVNRVTKVVKGGRQLSYRAIVVVGDMKGHVGVGVGKAKEVTEAITKAAMNGRRNLVTVPLTKYSTFPHRADADYGAAKVMLRPACPGSGVIAGGAVRVVLEMAGVENALGKQLRSKNPLNNARATIKATQMMKQFKDVAEERGIPMEELWK

SEQ ID NO: 47525 - protein, 276 aa, Zea mays
  Clone ID: 700092795_FLI.pep
ASLTRLHFHDCFVQGCDGSVLLDAVPGVANSTEKLAPANNNSARGFPVVDKVKAALEDACPGVVSCADILALAAEISVELSGGPKWAVLLGRLDSKKADFKSAENLPSPFDNLTVLEQKFAAVGLHTVDLVALSGAHTFGRVQCQFVTGRLYNFSGTNRPDPTLNSGYRAFLAQRCPQNGSPSALNDLDPTTPNLFDNHYYTNLEVNRGFLGSDQELKSAPQAQGVTAPVVDQFATSQAAFFSSFAQSMINMGNIQPLTDPAKGEVRCDCRVANDD

SEQ ID NO: 47526 - protein, 162 aa, Zea mays
  Clone ID: 700093009_FLI.pep
HPHEVDPPRLERRALRHAAQELLRRAAGKWQGHRRRVRAAGQHGGHPQGAGRLPRRHDHARAQPRRQGAVRARVPRARKGRRLLRVQGHLHLRQRLGHRVHQVNHRRRDEMAWLPHALLAWSSYRTSPSSSSSGYCAATSLLSRMHVLLLNFLSSYHALWLA

SEQ ID NO: 47527 - protein, 325 aa, Zea mays
  Clone ID: 700093085_FLI.pep
AEKEGWTWQIFYCSSSCVYGSLLNGSANITFQDKPKLSMGESMKVLLSSRYVRDLATLVVAYGISINLVEVTWKSKLKAQFPSPNEYSSFMGDFSTATGIATFTMMLLGRVILRKFGWGVAATITPAVLLLTGVGFFSLILFGEPLTPLMTKFGMTPLLAAVYVGAMQNIFSKSAKYSLFDPCKEMAYIPLDEDMKVKGKAAIDVVCNPLGKSGGALIQQFMILSFGSLANSTPYLGGILLVIVLAWLGAVRSLDLQFSSLAKQELGREKLLKTQAVETVAEVVGTGNGSLQETLASEPSANGAATKQSQEPESTAPEKSGQQSQ

SEQ ID NO: 47528 - protein, 448 aa, Zea mays
  Clone ID: 700093116_FLI.pep
STSKKQRIATHTHIKGLGLDANGMSMPLAAGFVGQAAAREAAGLAVDMIRQKKMAGRALLLAGPPATGKTALALGIAQELGSKVPFCPMVGSEVYSSEVKKTEVLMENFRRAIGLRIKENKEVYEGEVIELSPEEAESTTGGYAKSISHVIIGLKTVKGTKQLKLDPSIYDALIKEKVAVGDVIYIEANSGAVKRVGRCDSFATEYDLEAEEYVPIPKGEVHKKKEIVQDVTLHDLDAANAQPQGGQDILSLMGQMMKPRKTEITEKLRQEINKVVNRYIDEGIAELVPGVLFIDEVHMLDIECFSYLNRALESPLSPIVILATNRGICNVRGTDMTSPHGIPVDLLDRLVIIRTETYGPTEMIQILAIRAQVEEIDIDEESLAYLGEIGQQTSLRHAIQLLSPASVVAKTNGREKMCKADLEEVSGLYLDAKSSARLLQEQQERYIT

SEQ ID NO: 47529 - protein, 346 aa, Zea mays
  Clone ID: 700093789_FLI.pep
PTRFSRLRCHRRDSTSVATMVKSKAIRVHELGGPEVLRWEEVEVGEPGEGEIRIRTTAVGVNFIDIYFRKGVYAAPTMPFTPGMEAVGVVTAVGPGLTGRKVGDVVAYAGNPMGSYAQEQILPAAVAVPVPPSVDHKQAASVMLKGMTAHVLLRRVFKVESGHTILVHAAAGGVGSLLCQWANALGATVIGTVSNQEKAAQAAQDGCHHPIIYTSEDVVARVKDITSGKGVNVVYDSVGKDTYKASLECLASRGFLVSFGQSSGKPDPIPTSDLASKSLFLTRPSLMHYTATRDELLESAGEVFANVANGVLHVRVNHTYPLSEAAQAHADLEGRKTSGSIVLIPG

SEQ ID NO: 47530 - protein, 251 aa, Zea mays
  Clone ID: 700093859_FLI.pep
TSFEQITFTANSRQRYITHIQASESTHTQISYHETAIPYEQQWGYKRLGMQTKETKEKKGVLVYLVSRDRHLGADLLELLLGVLGLVLADGLFDLLGETLDKVLGLLEREAGERAHHLDSGDTRAAGHLFDHHVELRLLDGGLLLGRGPAARPGRRDDGGRREGRGGDAEPLLEVVDEAAGLLEREPGDGVPELQDLGGLGGGARDGDGAAAPADVGRGVGGPRERGGGARGGGGAGEEGEGGGEGGGRHG

SEQ ID NO: 47531 - protein, 284 aa, Zea mays
  Clone ID: 700093869_FLI.pep
VARDMDDYVVYGLNACLQNVRNCCVRLDAIDKLRAHYDALADAVADPAANVEGLAAEASEYKAAMWQYCYNQRSASARAHSRAYSQALKLEGIDFAELVRRHQLRLGYGSKGEEFEDLDDTQKLEVYNSIIVESGRAGLPVRMFSSGRSAGGPKIAATTWAEAVSVFIMAAGNLAWDVFTTEHEVEAILKGSLNLLAGLGGFAVEAVVGAAVTKAVANVGAGVFACSLAGFVVGAIAGLIFVGVSGLLINLIIGSPRKVPDMSKLMFHTAVMPDGMALAYAVSH

SEQ ID NO: 47532 - protein, 554 aa, Zea mays
  Clone ID: 700093978_FLI.pep
IDRRRPLERRPLRHAVHGAPPAAVHLEPRQDVLRDRPVDPPQLQPPVGLVLVAAADDMDGLLEERGGARRRRDAAFLHQRRRDERRGLPEPLLEVHVGHEHLLVAIYSHISGALRQPVLGVFPLLAAEARAAVAGHHLGPLGSLGRVVAVERLAPEHAPCPDVHRALDAVQPLHVDVEEDGVPVSVSVVHVDAVEPLRELNVADLPADLRVHEEAHGLPDGLAVVDVVITVQVEHEWRVGQHGGDANQSVHGAGLLVVLESRALLTGDVHEAGQLVALGVVAAAVAQEHLDHAGVVAGVVPGPRRAVLHDPPLCRHLHGLGHQRVDPDLELLILSLHGAALLHEGGLHLVLEVVDLEREVELRGAGLDAELLAEGHPLARELGRLRQRLERQHRRAVVGDVAGDLVHGVVYGEDGEHGVGGHQRRLLERVHRAHEQVHRRQQRRLPFPLVPEGEAVEVRLAVDGEPLGELVEDPGDGEPDLADDGDEPQPDGVRDGVQDTVPEEEGEHNETHHDHHPVRVHLARRDRHLPRQRLPRLVVQCHVGVHVFGIGAAA

SEQ ID NO: 47533 - protein, 170 aa, Zea mays
  Clone ID: 700094027_FLI.pep
QSGTRVPVGGGDNNVVHKAEDVVSTMLAKGFVLGKDAVGKAKAFDEKHGFTSTAGATVASIDKKIGLTDKITTGTSLVSGKVKEMDQKFQVSDKTKSALAAAEQKVSSAGSAIMKNRYVFTGASWVTSAFNKVAKTATDVGTMTKEKMAAEEHHKGSGPSSGGHSYTPIR

SEQ ID NO: 47534 - protein, 362 aa, Zea mays
  Clone ID: 700094130_FLI.pep
SHSSQSRTNTQKPCPEFLHDRLAAKLKHWKAEFVTTLQHYWLGTKLLWADVRISSRLLVKLAGGKSLSRRERQQLTRTTADIFRLVPFAVFIVVPFMEFLLPVFLKLFPNMLPSTFQDKMKEEEALKRKLKARMEYAKFLQDTAKEMAKEVQTSRSGDIKQTAEDLDEFLNKVRRGERVSNDEILSFAKLFNDELTLDNMSRSRLVNMCKYMGIRPFGTDHYLRFMLRKKLQDIKNDDKMIQAEGVESLSEEELRQACRERGHLGLLSTEEMRQQLRDWLDLSLNHAVPSSLLILSRAFTVSGKVKPEEAVVATLSSLPDEVVDTVGTVLPSEDSVSERRRKLEFLEMQEELIKEEEKRKEK

SEQ ID NO: 47535 - protein, 197 aa, Zea mays
  Clone ID: 700094136_FLI.pep
GKTTFVKRHLTGEFEKKYEPTIGVEVHPLDFTTNCGKIRFYCWDTAGQEKFGGLRDGYYIHGQCAIIMFDVTSRLTYKNVPTWHRDLCRVCENIPIVLCGNKVDVKNRQVKAKQVTFHRKKNLQYYEISAKSNYNFEKPFLYLARKLAGDPNLHFVEAVALKPPEVTIDMAMQQQHEAELAAAAAQPLPDDDDDLIE

SEQ ID NO: 47536 - protein, 221 aa, Zea mays
  Clone ID: 700094167_FLI.pep
PLHCWMKHGPLSRGAPSLVIIFILLTTLFIILVIDLRLGLVRLLFIFLLFLLGRSLLSCSALALVVGSDGLVVLELELVSLGYIGSLVRLAQGFPPVASSFPHRSDRLVLRVLLLELLAKFLHEHEESAGSPLRLVGVLAGLPFPALGGLLRPLALHRQLGIGLGGALGFGPLHGGFERRHGAQRSDPRLAEGIPVAGGRIGVESRAKLPLAARGEREGGK

SEQ ID NO: 47537 - protein, 408 aa, Zea mays; identical to SEQ ID NO: 38874
  Clone ID: 700094469_FLI.pep

SEQ ID NO: 47538 - protein, 358 aa, Zea mays
  Clone ID: 700094526_FLI.pep
LDPMMLHIFYCRSYHALEYYRMAHGHIAQQYPYWNRTSGRDHIWFFSWDEGACYAPKEIWKSMMLVHWGNTNTKHKNSTTAYWADNWDDIPLDKRGNHPCFDPRKDLVLPAWKEPNPGAIWLKLWARPRNNRTTLFYFNGNLGSAYEGGRPEDMYSMGIRQKLAAEFGSTPNKQGRLGRQHAADVTVTYLRTEKYYEELASSVFCGVLPGDGWSGRMEDSMLQGCIPVIIQDGIFLPYENVLNYNSFAVRIQEDDIPGLISTLRGINDTQVEFMLGNVRQMWQRFFYRDSILLEAQRQKRLFSEEAPWSVEVSKLPDDDDVFATFIQVLHYKLYNDPWRQDFLQTKDTRLPNICSRTS

SEQ ID NO: 47539 - protein, 322 aa, Zea mays
  Clone ID: 700094865_FLI.pep
GHAAFGATGRIAISIILYVELYACCIEYLILEGDNLSKLFPNAHLSVGSLTMNSHVLFTILTTIIVMPTTWLRDLSCLSYLSAGGVFASILGVICLFCVGVVDNVGFENKGTALNLPGIPIAIGLYGYCYSGHGVFPNIYSSLKKRNQFPSILFTCIGLSTILFAGAAVMGYKMFGEATQSQFTLNLPENLVVSKIAVWTTVANPITKYALTITPLTMSLEELLPPNQQKYSNIVMLRSALVVSTLLIALSVPFFGLVMALVGSLLTMLVTYILPCACFLAILRRKVSWHQVAVCSFIIVVGVCCACVGTYSSLSKIIQNYT

SEQ ID NO: 47540 - protein, 298 aa, Zea mays
  Clone ID: 700095307_FLI.pep
IMATGQLFSKTTQALFYNYKQLPIQRMLDFDFLCGRETPSVAGIINPGSDGFQKLFFGQEEIAIPVHPTVEAACSAHPTADVFINFASFRSAAASSMSALKQPTIRVVAIIAEGVPESDAKQLISYARANNKVIIGPATVGGIQAGAFKIGDTAGTIDNIIQCKLYRPGSVGFVSKSGGMSNEMYSTIARVTDGIYEGIAIGGDVFPGSTLSDHILRFNNIPQVKMMVVLGELGGKDEYSLVEALKQGKVEKPVVAWVSGTCARLFKSEVQFGPRVRKGHWNAFGDGSDRGPPPARVP

SEQ ID NO: 47541 - protein, 452 aa, Zea mays
  Clone ID: 700095357_FLI.pep
ASPSTMGKEKSHINIVVIGHVDSGKSTTTGHLIYKLGGIDKRVIERFEKEAAEMNKRSFKYAWVLDKLKAERERGITIDIALWKFETTKYYCTVIDAPGHRDFIKNMITGTSQADCAVLIIDSTTGGFEAGISKDGQTREHALLAFTLGVKQMICCCNKMDATTPKYSKARYDEIVKEVSSYLKKVGYNPDKIAFVPISGFEGDNMIERSTNLDWYKGPTLLEALDQITEPKRPSDKPLRLPLQDVYKIGGIGTVPVGRVETGVIKPGMVVTFGPTGLTTEVKSVEMHHEALQEALPGDNVGFNVKNVAVKDLKRGFVASNSKDDPAKEAASFTSQVIIMNHPGQIGNGYAPVLDCHTSHIAVKFAELITKIDRRSGKELEKEPKFLKNGDAGMVKMIPTKPMVVETFSQYPPLGRFAVRDMRQTVAVGVIKSVEKKDPTGAKVTKAAAKKK

SEQ ID NO: 47542 - protein, 256 aa, Zea mays
  Clone ID: 700095609_FLI.pep
NRHPAEMGRKFFVGGNWKCNGTADQVEKIVKTLNEGNVPSSDVVEVVVSPPYVFLPVVKSQLRQEFQVAAQNCWVKKGGAFTGEISAEMLVNLGVPWVILGHSERRALLGESNEFVGDKVAFALSQGLKVIACVGETLEEREAGSTMDVVAAQTKAIAEKIKDWSNVVLAYEPVWAIGTGKVATPAQAQEVHASLRDWVKINVSPEVSESTRIIYGGSVTAANCKELAAQPDVDGFLVGGASLKPEFIDIINAAAV

SEQ ID NO: 47543 - protein, 379 aa, Zea mays
  Clone ID: 700096721_FLI.pep
LVGMMMMSGRAATAGRYPFTASQWQELEHQALIYKCLASGKPIPSYLMPPLRRILDSALATSPSLAAFPPQPSLGWGGCFGMGFSRKPADEDPEPGRCRRTDGKKWRCSKEAYPDSKYCEKHMHRGKNRSRKPVEMSLATPAPASSATSAAAAATSSSQAPSYHSPAPAVPYHAPYGAAYHHTQTQVTMSPFHLLHLETTHPHPPPPPPPPYYYADQRDYAYGKEVGERAFFSDGAGERDRQQQAAGQWQFKQLGTMEATKQPCTTPLLVPAAGYGHGAASPYGVGQAKEDEEEEETRRQQQHCFVLGADLRLAERPSGAHDAAAQKPLRHFIDEWPHEKGSNKAGSWMGGLDGETTQLSMSIPMAAAADLPVTSRYRT

SEQ ID NO: 47544 - protein, 475 aa, Zea mays
  Clone ID: 700071662_FLI.pep
GTKSCWHHQTNRWICPEYFRFHRPRSDPRRRVFAEMAITVRRSTMVRPARETPRQRLWNSNLDLVVPRFHTPSVYFYRRDGPVPAAEGFFDGERMRRALAEALVPFYPMAGRLARDEDGRVEIDCNGEGVLFVEADAPDASVDDYGDFAPTMELKRLIPTVDYTDDISAFPLLVLQVTYFKCGGVSLGVGMQHHAADGMSGLHFINSWSDLCRGAQISVMPFIDRTLLRARDPPTPSFQHIEYQPAPAMLSSTTQFLASKSKPPATAVDIFKLTRSDLGRLRSQLPAGEGAPRFSTYAVLAAHVWKCVSLARSLPPEQPTKLYCATDGRQRLQPPLPDGYFGNVIFTATPLAEAGKVTSELAEGAAVIQGALDRMDNDYCRSALDYLELQPDLSALVRGAHTFRCPNLGLTSWVRLPIHDADFGWGRPVFMGPGGIAYEGLAFVLPSANGDGSLSIAISLQAEHMEKFRKLIGEA

SEQ ID NO: 47545 - protein, 105 aa, Zea mays
  Clone ID: 700071675_FLI.pep
VFQHCIYIALYPVTHLIALYLHTWFCITVQFEIKLDSSWTHACTNDKQISLLCTGDGFSSHAATGRGPDDLEQRCQGRQKKEAERQKCVSSTILHLSGLRELTTQ

SEQ ID NO: 47546 - protein, 237 aa, Zea mays; identical to SEQ ID NO: 47062
  Clone ID: 700071688_FLI.pep

SEQ ID NO: 47547 - protein, 421 aa, Zea mays
  Clone ID: 700071715_FLI.pep
AASRRRRGLHSRRRAEMQRNGVVECSVCRSRVVVPSPRSVSRAYDKHRNKMSSKFRALNVFLVVGDCILVGLQPILVFMSKVDGKFQFSPISVNFLTEVMKVIFAVVMLIIQSRKQKVGEKPLLARSTFIQAARNNVLLAVPALLYAINNYLKFIMQLYFNPATVKMLSNLKVLVIAFLLKFIMRRRFSVIQWEALALLLIGISINQLRTVPVGNTAFGLPVTAIAYIYTLIFVTVPSVASVYNEYALKSQYDTSIYLQNLFLYGYGAIFNLLGILGTVLFQGPESFNILRGHSRATIFLICNNAAQGILSSFFFKYADTILKKYSSTVATIFTGLASAAFLGHSLTINFLLGISVVFISMHQFFSPLAKVKDDKPADSIELEDTQNDRPSESSFVNMTAGAADDASHRIGTDERQPLLPI

SEQ ID NO: 47548 - protein, 365 aa, Zea mays
  Clone ID: 700071806_FLI.pep
WYSPMQEAGRERDRAADLGGVAASVRPTDTAAVSTKPAKRYPLALWIAILGLIMLVAVYIFSLSLKQNGMLFGLMQTNLIEKEREKPCHDPSIPDAEIPYLHYPMPNTYDRKECACTGVRFFAILSMQRSGSGWVETLLNSHPNISSNGEIFSVKERRSNITAITKTLDRLYNLDWYSSAAKNECTAAVGLKWMLNQGLMKHHQEIVEYFNRRGVSAIFLLRRNLLRRYVSILANAHDSAMKQLNGTHKAHVHSKHEAEILAQYKPTIDKKTLITELKRSDKLAADALVNFKNTRHVVLYYEDVVSNRTMLMDVLDFLRLPKRKLFSRHVKIHTKRLCDHIDNWADVTDFLKGTPFESFLNGSRR

SEQ ID NO: 47549 - protein, 288 aa, Zea mays
  Clone ID: 700072504_FLI.pep
LRCAAHPWVGRLRLLVVGGGELLVGVGDEEQLVDDAGEAAADEGADPVHPLVAPLPADEGGAEGHGGVHGRAVEGAAHQDVGPHDEADGNGGDGAQAALLRVHRRRVHRVHQPEGHHDLQHQRLPHRHARQPEGARGLPARREAEQEARHGGPQQLRHPVQEPSEQGDVAAHEGAEGHGRVHVPAGDVRAHRHRHEQRERVRHRRRDQARRGRRAAAGQLAEGHAGALAGEDEDEGGDELSERRLEGARVVHLLVAPQGDPIDRHFHGPLASSRALVTTVIGAGVELS

SEQ ID NO: 47550 - protein, 337 aa, Zea mays
  Clone ID: 700072563_FLI.pep
QRSLTRIAGSQRTRATVGITDQIPAGAAAMAENFQLQGRHGKSRVRVSRVWRRPAAAGGDVIVEWNVAVSIVSDCLPSYTSSDNSAIVATDSIKNTVYVKAKECTEVVSMEEFAVILGRHFTSLYPQVSEATVTIVERPWERVTVDGRPHSHGFKVGVEKHSTEVIVKKSGSLLINSGIQGYSLLKTTQSGFEGFVTDRYRLLPDTRERIVATEVTAWWRYPFEHVSQLPSKKPFCFTQRYQDVKKVLAETFFGPPDVGVYSPSVQNTLYLMAKEVLTRFPDIASVQLRMPNLHFLPVNLGSKEAPLVKFADDVYLPTDEPHGTIEATLISRPMSKL

SEQ ID NO: 47551 - protein, 208 aa, Zea mays
  Clone ID: 700072612_FLI.pep
IPMASRRRTLLKVIILGDSGVGKTSLMNQYVNKKFSNQYKATIGADFLTKEVQFEDRLFTLQIWDTAGQERFQSLGVAFYRGADCCVLVYDVNSMKSFDNLHNWREEFLIQASPSDPDNFPFVLLGNKVDVDGGNSRVVSEKKAKAWCASKGNIPYFETSAKDGTNVEDAFQCIVKNALKNEPEEELYVPDTVDVVGGNRAQRSSGCC

SEQ ID NO: 47552 - protein, 189 aa, Zea mays
  Clone ID: 700072623_FLI.pep
RRRFEGAACDARCAAANISLQGKYLVDMLHLPSHGSAPGRPLTQLQHPLAASSRSWLQIPQMGPRPCASRSSPPSTSCTPRCMATLLPSASSLPAPSSTNPPCTLVVPASPSASSDTTPTPSLSRPQQSGYTHGVLVCEWRKSLMEDEGEESVEQMSKTRQMCSCWCFSTIATSMRKHGLYRVTRTPWN

SEQ ID NO: 47553 - protein, 188 aa, Zea mays
  Clone ID: 700072714_FLI.pep
PLTMPPAPKSGDALFASVDRVNAELFTLTYGAIVRQLLTDLEEVEEVNKQLDQMGYNIGTRLVDEFLAKSNVSRCVDFKETADVIAKLGFKMFLGVTATVTNWDVEGTSCSIVLEDNPLVDFVELPDTCQGLQYCNLLSGVIRGALEMVSMKTEVTWLRDMLRGDDAYEMRVKLIKQVPEEYPYKDDD

SEQ ID NO: 47554 - protein, 197 aa, Zea mays
  Clone ID: 700072913_FLI.pep
QSRAEVRLERSRRCPFQRGSRGSTGSGSSKGKMSSAFSGDETAPFFGFLGASAALVFSCMGAAYGTAKSGVGVASMGVMRPELVMKSIVPVVMAGVLGIYGLIIAVIISTGINPKAKPYYLFDGYAHLSSGLACGLAGLAAGMAIGIVGDAGVRANAQQPKLFVGMILILIFAEALALYGLIVGIILSSRAGQSRAD

SEQ ID NO: 47555 - protein, 346 aa, Zea mays
  Clone ID: 700072934_FLI.pep
PPRLFLLRLGSRASSGPWCFRRPAMVELEPSVKSEHGGGVGLVLPPGFRFHPTDEEVITSYLLHKFLNPSFAPHAIGEVDLNKCEPWDLPSKAKMGENSKEWYFFCHKDMKYPTGTRANRATKEGYWKATGKDREIFKPAAGRDRDRELVGMRKTLVFYMGRAPRGTKTNWVMHEFRLEGKSRHTCNDLRFNPKDEWVVCKVHHKGAEEASAAKKSAGGGGEEHYYSTATPNVSSVEGGDEFLVDSLLDYSSYFNCFATGGLPLPSTTANSAAAPATNDDDSSWSMLRHAPADQQAMVGSYSLHHQAMKAKTVGGVTSPSFSAGLPSSPVADYVGNDASGYHTNNY

SEQ ID NO: 47556 - protein, 305 aa, Zea mays
  Clone ID: 700072965_FLI.pep
ATHRPQCPACYFPPPTFSLLPAPPPLPPTRHPHASRPPPRLHLPILQRPAPREALQASPSRPPAPGTAVQEGRKEERQVPAGAGAQQRAMAYRAEDDYDYLFKVVLIGDSGVGKSNLLSRFTRNEFSLESKSTIGVEFATRSIRVDDKVVKAQIWDTAGQERYRAITSAYYRGAVGALVVYDVTRHVTFENVERWLKELRDHTDANIVIMLVGNKADLRHLRAVSVEDAKGFAEREMTFFMETSALESMNVESAFTEVLTQIYRVVSKKALDIGDDPAAPPRGQTINVGGKDDVSAVKKAGCCSS

SEQ ID NO: 47557 - protein, 341 aa, Zea mays
  Clone ID: 700072980_FLI.pep
SPLRDRNRSSNQSSTRFQPLVPEPRSASRLLLGRSPFSACALAGRFPMRGLLAVEAAGAASVPASVLHGAVDWWRDVNESPLWQDRIFHALAVLYGIVSAVALVQLIRIECRVPEYGWTTQKVFHFLNFLVNGVRSVVFVLRRNVQLVEPEIIQHVLLDMPGLAFFTTYALLVLFWAEIYYQARAMSTDGLRPTFYWINGVVYAIQIILWLVLWWKPVRVMVILPKMFFAGVSLFAALGFVLYGGRLFLMLQRFPVDSKGRRKKLQEVGYVTTICFSCFLIRCVMMCLNSFDKEADLDVLNHPILNFLYYLLVEIVPSALVLFILRKLPPKRGITQYHPIH

SEQ ID NO: 47558 - protein, 252 aa, Zea mays
  Clone ID: 700073011_FLI.pep
LDHTPPRLPSVNLDTAAGAFGPSLHAPIHLISAAHDTIVVGVGYTRLYRRFGRTSASSSPPPSSQLTSARSPFPFLSFPFLSSCPRIGNPASHVVLRRPARGVVDRGGVHAVAAAVPGDPGAADGDAAAGRLVVLHVRRLHRGGVAAAELGAAGRAHRARPPHPLDLLRRLLRGLPGLLPDGEPLEGPLRAGPRRGQLALGRRLARPPPPRARQLPLHHPRHVGPVNGCSDCSPAPVRFHARTYALVLLVAA

SEQ ID NO: 47559 - protein, 397 aa, Zea mays
  Clone ID: 700073061_FLI.pep
SLRSICPRIGLAAAHLMGEEAVHFSVVDAKDCKQSAFEVGDKTYVICRSDDDLKTSAVKIHDKLTQTWLSPTILGEQPLLTKSQSVIPVSDEKILVIEKGVPLNESIWFLEIDTPFVKQQRKIKETEVVSWSKGVIGVGQKPVVISGPSGVGKGTLIAKLMKDYPSKFGFSVSHTTRSPREKEIDGVHYHFTERIKIEKDISEGKFLEFAHVHGNVYGTSIEAVESVTDEGKRCILDIDVQGARSVRASSLEAIFIFVCPPSFEELEKRLRARGTETEEQIQKRLRNAQAELDQSNEPGLFDHLLVNDDLETCYENLKKLLSLDDDQEDSDDFFNKEDKETASYSIVSKTDSEILLQSETNEGKNGAIHLLALDLSSLSGGAPGRTRGLKIGSVNSF

SEQ ID NO: 47560 - protein, 452 aa, Zea mays
  Clone ID: 700073152_FLI.pep
SSPPAMGKEKSHINIVVIGHVDSGKSTTTGHLIYKLGGIDKRVIERFEKEAAEMNKRSFKYAWVLDKLKAERERGITIDIALWKFETTKYYCTVIDAPGHRDFIKNMITGTSQADCAVLIIDSTTGGFEAGISKDGQTREHALLAFTLGVKQMICCCNKMDATTPKYSKARYDEIVKEVSSYLKKVGYNPDKIAFVPISGFEGDNMIERSTNLDWYKGPTLLEALDQITEPKRPSDKPLRLPLQDVYKIGGIGTVPVGRVETGVIKPGMVVTFGPTGLTTEVKSVEMHHEALQEALPGDNVGFNVKNVAVKDIKRGYVASNSKDDPAKEAASFTSQVIIMNHPGQIGNGYAPVLDCHTSHIAVKFAELITKIDRRSGKELEKEPKFLKNGDAGMVKMIPTKPMVVETFSQYPPLGRFAVRDMRQTVAVGVIKSVEKKDPTGAKVTKAAAKKK

SEQ ID NO: 47561 - protein, 460 aa, Zea mays
  Clone ID: 700073162_FLI.pep
PDSEAEQGGVREMREIISIHIGQAGIQVGNSCWELYCLEHGIQPDGLMPSDTSVGIARDAFNTFFSETGAGKHVPRALFVDLEPTVIDEVKTGAYRQLFHPEQLISHKEDAANNFARGHYTVGREVIDLCLDRIRKLADNCTGLQGFLVFNAVGGGTGSGLGSLLLERLSVDYGRKSKLGFTIYPSPQISTAVVEPYNSVLSTHSLIEHTDVVVLLDNEAIYDICKRSLDIERPTYTNLNRLISQVISSLTTSLRFEGAINVDITEFQTNLVPYPRIHFMLSSYAPIISVEKAYHEQHSVPEITNSVFEPSSVMAKCDPRHGKYMACCLMYRGDVVPKDVNAAVHSIKTKRAVQFVDWCPTGFKCGINYQPPTVVPGGDLAKVQRAVCMISNNTAVAEVFSRIDRKFDLMYAKRAFVHWYVGEGMEEGEFSEAREDLAALEKDYEEVGAEVEDEDEEAEY

SEQ ID NO: 47562 - protein, 317 aa, Zea mays
  Clone ID: 700073239_FLI.pep
FSPREPQSKPPTAKIPTRYITEISSWLRSCPRIMASSLAEEEEAFEHTLLVVREVSVYKIPPRTTSGGYKCGEWLQSDKIWSGRLRVVSCGDRCEIRLEDPATGELFAACFVLPGQRESAVETVLDSSRYFVLRIEDGRGKHAFVGLGFNERNEAFDFNVALSDHEKYVKREQEKETTGAGGEETGGGEIDIHPAVNRRLKEGETIRITVKNKPSTGSGMLSAAGLSGGTTAKPKTSMLLAPPPGAAGKLRSPLPPPPNDPAAARMNSGHTAGIRAPKEPTKRNNDPFSDLSAIKQNLPSSAEPGQTKSTGAGWAAF

SEQ ID NO: 47563 - protein, 290 aa, Zea mays
  Clone ID: 700073355_FLI.pep
APTEPLAATLLKTELAIEDDVLAIDVLASVGRQVHRRVGHVVLGHRVGAVAADHSIQLLVSRVREDVPQHALVKPGGDAVRRDGIDPHAVSPQLGRGGAHDAHDRGLGDAVRRGHHVAERAHGAARAQDAPAADLVAAHHGAGVVDAGYDGLDVDRHGVPEAHHVDGGGRGGDVADPRVVVEDVDILLVDLLRLLDGGQDTVGFADVDAHRVSHRGAMVGLVESRYYVLAGVAVDVGEDDLGAVVDELPRDGLAQFAGGARDDRHLSEEPYGCCCCCSTHSERLLLGCFS

SEQ ID NO: 47564 - protein, 420 aa, Zea mays
  Clone ID: 700073361_FLI.pep
APMGKSPAKWIKSVLFGKRSSSRSGSTKAKDLSKGTTNKAAAAAAAAGKEPAFSESSPVISEPVLVSAHNNETAREAAKGENSSVQEVPETDVSQDLEKQGTVGSDTSNDAERLREEQAAVKAQAAFRGYLARRAFRALKGIIRLQALIRGHLVRRQAVSTLRATWLIVKFQALVRGRNVRLSNVSIQATTELSQQNFGGSKPGSWKEKLSSNAFARKLLSSPIVVEALHVQYDEMDPNSAFNWLERWTVSHVWKPISQPKRVGTDAKPHTRKASYAMETESAKLKRNARKSPAVPFEPSQTNTTIENEKTRRNPRKLSSTPAESVPDGQLTELEKVKRSLRKVTSSTVETSKVPSPTTEIPDRQEVQCERPLRSAKQAPIHVENQEPQNVNLSENAKMDILVPDIQPDVEVASDLVTIT

SEQ ID NO: 47565 - protein, 183 aa, Zea mays; identical to SEQ ID NO: 44872
  Clone ID: 700073547_FLI.pep

SEQ ID NO: 47566 - protein, 289 aa, Zea mays
  Clone ID: 700073833_FLI.pep
EMADHQYSAWTTSAARHRVFSCALMALVSFVAAGRPMVLADAIVFHVANRCPFPVWPASAPNTGHPVLAGGGFYVPQGKSRRVVAPANWNGRFWARTGCNFTANGMGVAGCLTGDCEGRLACNGSVGAPPATLVEVSLHEDAPKGSSYDVSLVDGYNLPVAVSAKPATGGADPNKCAIAGCAKNVNAVCPPELQVTATGSGGGKTVVACKSACLAFGLDAFCCRGAYATPATCRGTVYSRLFKDACPAYYSYAYDTAATTASGCYAQEYIITFCPSRWGDEPGDRAAQI

SEQ ID NO: 47567 - protein, 314 aa, Zea mays
  Clone ID: 700073869_FLI.pep
RKETKEMLTSRSVSSITCDRYSIFLKSLSVSPCCDDGILLMIASCSAWWHGALNCSASFQDKIKQQRKKERTCLCSREHVRVLLQEHGGPHGDVAGRLVAGVEVHDEHVDDLVVVQAPPALVLGLDQPVHHVHSSARDPLGPGGAALVQHALQHGHEAAARAQRPAVREAGQVDGHGAHAVVELRVAALQRARGGLVRAAQEDLHDDLERHAPQLRQELDAAAVVRPRAQRRRDGAVDEGQVPRQRVEAVDGRGRQLADAPVLVVRHRHERPRPDQRNRRLGPPRHERVVVHQHLLAPLRRRHQHRRAAEHEAS

SEQ ID NO: 47568 - protein, 302 aa, Zea mays
  Clone ID: 700073934_FLI.pep
GGPDLHLHNSFHNFSSQESSNLLNLPRSGQLMASEGWPSKRLAVESLAGHEIQPLQHKLEKVSHQSTVSHCSGTLPPLSARDGSSAQACGTNVQSHLLPSSFAIHDGLSTIRSGGVGSGTDAITIASLRYSDANLLPENSIATSSCLGESGTFNSLDDVCGVNPSQGGTFVKVYKSGSLGRSLDITRFGSYYELRVELERLFGLEGQLEDPARSGWQLVFVDRENDVLLLGDDPWQEFVNSVGCIKILSPQDLQQMARGGGGDLLSAPGARMLQGSVCDDYSAGHDVQNLTGSIAPVVPLDY

SEQ ID NO: 47569 - protein, 203 aa, Zea mays
  Clone ID: 700074446_FLI.pep
AEEERGAARSCAPPRSPRSCGNMGLTFTKLFSRLFSKKEMRILMVGLDAAGKTTILYKLKLGEIVTTIPTIGFNVETVEYKNISFTVWDVGGQDKIRPLWRHYFQNTQGLIFVVDSNDRDRVVEAKDELHRMLNEDELRDAVLLVFANKQDLPNAMNAAEITDKLGLHSLRQRHWYIQSTCATTGEGLYEGLDWLSNNIANKA

SEQ ID NO: 47570 - protein, 128 aa, Zea mays
  Clone ID: 700074691_FLI.pep
AGTFAHRLEFSLQHIYFEKKTWIDKRTPAGHLCRNKKRTNFPNMKGYIRKRFPQPHHIKTIIERMGSSTKPHAMARTRKNKILALADFVLTADENTCKTRGEIFKSFTWILGSLENCSNLLAKPKNQA

SEQ ID NO: 47571 - protein, 306 aa, Zea mays
  Clone ID: 700074711_FLI.pep
NISSSEPQSASQVLRSRRATQQDGEARIRKRRRLLQRHLHQGLRGGVHRHPPLRLRRRGFRHRLRATDEWRRAGPCGTGGDRGGARAGPLRGRLRGREHLRRPPEPRRDVRPGRGRPHHRPHRPLLLGGPAAGRVRGVPAPQVRDPRQGHPDARRLRRHHRAGGRGVRDRHHLRARLHRLRHRRRPQEGLPRHHRAHRHRLHRRRQHPRRGALQRRLHEPRPLLRPRRRRGRLRRQLGLLGRPAHRRRPRWPRLRRRLHRRLLPAGRRPGLRLSSVLRSSGLSSSNAAARFDRRRHLLCSSFHHVM

SEQ ID NO: 47572 - protein, 156 aa, Zea mays
  Clone ID: 700074764_FLI.pep
NAIHGSAFSTIHVTPEDGFSYASYEVMGLDATALSYGDLVKRVLRCFGPSEFSVAVTIFGGRGHAGTWGKALGAEVYDCNNMVEQELPGGGLLVYQSFCAAEDAVATSPKSVFHCFDGENVESAPPPMKKDYKLANLLCWEEEADAMEEKAGVLDE

SEQ ID NO: 47573 - protein, 381 aa, Zea mays
  Clone ID: 700075032_FLI.pep
GGPGSNGFRRSAPPRRGVPPHVPVGRPPPGLGHGERRRRHGHPLLGPPVPPPPAALRLRLRAAAAGGGADPRVRAGPDVAVGGAGGPAVAPLPPGGADAALLRGVRHARARAVRRLPGRRARRAARGPGPAAPPGPRRRPHRARGGHQLRRPRGVPPRPGAGAARRRRSRRQGGAVRLGRVQGRRGRPRAGGQERRGGGGGAAGARRHPGAAPPHGGLRPPPRQVRPRVPPPRHAPEILRGQEGGEDGAHQRDRHRRRLRACSAASGGAHHLGRVRPDLPGGQSAQGEREARGEGDGEGDPQRGAPAAAGGQQALQPSPPRLPAAPFVHRRLTSNGSAQAKQLSLLGCLLLWLSIIILPRAFPAFLFVCRVEEALPPSVFV

SEQ ID NO: 47574 - protein, 276 aa, Zea mays
  Clone ID: 700075048_FLI.pep
PFSITSAPGDDYLSVHIRTNGDWTQELKRIFVENYFSPHLNRRASFSELGAAEPRSLPKLLVDGPYGAPAQDFRNYDVLLLVGLGIGATPFISILRDLLNNIKIADELMDLAMETSRSEDSANSFSVSTASSNRKRAYRTSRAHFYWVTREAGSFEWFKGVMNEVAEMDKKGIIELHNYLTSVYEERDARTTLLSMVQALNHAKHGVDIVSGTRVRTHFARPNWKEVFTRIASKHPNSTVGVFYCGAPTLAKELKALAHEMSHRTGTRFHFHKEYF

SEQ ID NO: 47575 - protein, 308 aa, Zea mays
  Clone ID: 700075339_FLI.pep
HLVSELRGGRRKKKQQQGMDCCICSPVASVYRLPRNAICAPCHQGAKAIIGYLDRDGEREEDDGGGRSVQLQPRGSAKGLRDAWEQVKEMRAREEETRQRAAFLQHGFASAWKEGIHTDIVVKPGTGPAIPAHKAILAARSEVFRHMLSGDDRCKAPAGGSISLPELSHDDLSLLLAFLYTGALEAPGEGGGEASQDQERQLHALLVAADKYDVPFLRRVCEARLAAGVAPRNALRTLEVAELSSSAALMERAMGAVVEHAEEVVFSAEYERFAARNAGLCVEITRALLARMPTPARSDGPCLELGSS

SEQ ID NO: 47576 - protein, 288 aa, Zea mays
  Clone ID: 700075490_FLI.pep
RVLCLCLCSTSPAPAPQVHVHHSALTLLARSLVHAPASRREGTVGGKRTDMMHAKSESDVTSLAASSPPRSPKRGGGGAGNGGYYVQSPSRESHDGGYKSSSMQPTPVYNSPNESPSHPSYGRHSRSSSVSRFSGNLRKGAAGDRKVLNDKGWPECNVIEEEGPYEDLAGDSGLSRRCQIILGFLTFVLLFTVFCLIIWGAARPYEPEVIVKSLVMDDFYAGEGTDHSGVPTKLVTTNCSLHIAVYNPATMFGIHVTSGPIHLMYSEIPIAVGQVYPSSVLGLFNSRF

SEQ ID NO: 47577 - protein, 407 aa, Zea mays; identical to SEQ ID NO: 40940
  Clone ID: 700076361_FLI.pep

SEQ ID NO: 47578 - protein, 237 aa, Zea mays
  Clone ID: 700076805_FLI.pep
ECAYSWGAEMGKKQHSKDRMFITRTEWATEWGGAKQKDVGTPFKRLPFYCCSLTFLPFEDPVCTVDGSVFDLMSIIPYLKKFGKHPVTGAPLKHEDLIPLTFHKNSDGEFQCPVLNKVFTEFTHIVAVKTTGNVFCYEAIQELNIKPKNWKELLTDEPFTRNDLITIQNPNVVDGKVLGEFDHVKKGLKLEDEELQRMKDDPTYNINISGDLKQMIKELGTEKGNEAFLQGGGGLKA

SEQ ID NO: 47579 - protein, 208 aa, Zea mays
  Clone ID: 700149634_FLI.pep
SDCCSSLSLSLSIWVPLLFLMAAAAASTPQGVAERRGIPAAAFVEDVEAYLRQVGLDVNSALAFLQERLQQYKIVEMKLLAQQRDLQAKIPDIEKCLDIVTTLQAKKDLGEALIADFELSEGIYSRAKIEDTDSVCLWLGANVMLEYSCDEANALLKKNLENAKASLEVLVADLHFLRDQQTITQVTIARVFNWDVHHRRSKQAVKET

SEQ ID NO: 47580 - protein, 162 aa, Zea mays
  Clone ID: 700149703_FLI.pep
SILSQASVNGEQVEELRRRQDDGEGLHAYQSGIPAVQFNLLHRQPHGEQGERPRNEPGGGRRRQALGAPGADVVEPRQRRARADHPGDHGEDDEEPGRRVPDGEVDRGEVSREVQAGADEEAVVDGVVDGPAAHRRHDDVHAQVEHQQEAGHRLHARVRHGS

SEQ ID NO: 47581 - protein, 226 aa, Zea mays
  Clone ID: 700149786_FLI.pep
KQSSTVATTPLDFTMALAGITNQDLLDAQVELWHSTFAYIKSMALKSALDLGLADAIYHHGGSATLPQIVDRVTLHPSKTLHLRRLMRVLATTGVFSVQHPSPLGDDSSSASDSEPVYKLTAVSALLVGPRRSHVPLAAFVVDPALVTPFFELGKWLQRELPGPCIFEHAHGQTIWEHANGDAAFNALLNDGMLSDSHFIMDIASKECADVFQGISSLVDVGGGLG

SEQ ID NO: 47582 - protein, 357 aa, Zea mays
  Clone ID: 700149820_FLI.pep
ASPRRNGRRQRCEQGREGAGMRMLSKACSIVASSLPRCSSSAAAPTMRGQPSLLPSVRKQWPGKPLLYGIGTLLVMPLRTLYGVGRVFGAGRFLCNMTNVSSSLQIELVPCLRDNYAYILHDVDTGTVGVVDPSEAMPIINALEKRNQNLTYILNTHHHYDHTGGNLELKAKYGAKVIGSEKDKDRIPGIDITLKEGDTWMFAGHQVLVLETPGHTTGHVCYYFAGSGAIFTGDTLFNLSCGKLFEGTPQQMYASLQKITALPDDTKVYCGHEYTLSNAKFALSVEPGNKALQEYAANAAELRNKNIPTVPTTIGREKECNPFLRTSNPEIKRTLSVPDHFDEDRVLGVVRRAKDNF

SEQ ID NO: 47583 - protein, 120 aa, Zea mays
  Clone ID: 700150376_FLI.pep
HIIRSSLLLLLGGALAFFMVLTEYVLVSVTSAVTVTVAGIVKEAVTILVAVLFFNDPFTWLKALGLAIIIFGVSLFNIYKYKRFKKGHYNENAGTNTQSSNWTSKYVILDEDTEAQDDTG

SEQ ID NO: 47584 - protein, 342 aa, Zea mays
  Clone ID: 700150410_FLI.pep
ENGLRVPIQASTKYQCTNNSLRAQHRQIYYEKDNTTICLFTLTPDAKDHMIPYRQQNVSLQDRVYLSISKPQFGELEVGLFVVIKESLLIHSIFLDKRAENRVAQQGFVTWELKKALLITTQKFLEVRVVKDQRVCSPGPLETRPLFVAPSQGVATREGNNVLIAQAHLLAKNLPQVVRTLSGIRKAALRWGLRLVLPTGVEGNLRPTGDLHGHNSRELVEIGVREDWELLLDGLEQPHRDVQPRVSAVSQFRLMLHRAEWTAGPRRHVERPRGVPREAEHERGAALLGDEGSELAPGLLHSLAVLGAHGRVVLRHGCEQRELWIVGCDATRLREGHKICWD

SEQ ID NO: 47585 - protein, 124 aa, Zea mays
  Clone ID: 700150463_FLI.pep
VGSLLQVRKGFVLMAPPQPKSGLFVGINKGHVVTKRELPPRPCHRKGKSTKRVSMVRGLIREVAGFAPYEKRITELLKVGKDKRALKLAKRKLGTHKRAKKKREEMAGVLRKMRSAGTHTDKKK

SEQ ID NO: 47586 - protein, 170 aa, Zea mays
  Clone ID: 700150504_FLI.pep
LILLDHLWLLIDHLSKLCLGQLLIEPCLHEIFLQVTWNSLMGEVLCVVVEALGVEGCAAGRRLVHTSVELLHGLDLRAGAARGVDGLLILLGSGGGCLLPHNHRLPVLPDRPDPGHPPLPPSLSLTLRSLVPTRQPLAGLPLLSLPQDATQGARERGVETADQEEDMETE

SEQ ID NO: 47587 - protein, 263 aa, Zea mays
  Clone ID: 700150712_FLI.pep
DKQNPPLRQLRLPPTRGSPDNRQRKGAQGLPAKMEDVDVSRQLKQMTDFIRQEAVEKAAEIEAAAAEEFQIEKLQLVEAEKKKIRQEYDRKEKQVGIKKKIDYSMQLNASRIKVLQAQDDLVTDMLESARKELLCISRDHPTYKKLLKTLIVQSLLRLKEPAVLLRCRKEDLQLVDLVLESARNEYADKAKVYPPEIVVDRQIYLPSAPSHYQAPGPSCSGGVVLASRDGKIVCENTLDARLQVVFRKKLPEIRQSLFGQVAA

SEQ ID NO: 47588 - protein, 246 aa, Zea mays
  Clone ID: 700150852_FLI.pep
MYTRNRRSQASLACARLLGTAAPALPPTTTRLLAKDGLDPPHPAVPGALLALRRRVRVRRLAELRHVVPFLLGTLHQLLVHGLVHVRLPAKDPEVVPGGLPDERVLVVGVDVEHPVVAGDGDEGEEGRHVEANLELGLVAGRVGAPGRAFDVAAAPVGPRLVHHLHSAVRVQRVGGARVGARLGLEPGREARDLVPPPRVPLQVEVAHHLHGHRASLAPPAARGGGVGFSGREEEGGGWGGMPGCE

SEQ ID NO: 47589 - protein, 204 aa, Zea mays; identical to SEQ ID NO: 37223
  Clone ID: 700150907_FLI.pep

SEQ ID NO: 47590 - protein, 245 aa, Zea mays
  Clone ID: 700151076_FLI.pep
DLPDSAARTRGLPPLLDPFGRPAGLASSAGMVFYFKARPEAGDYTIFMGLDKYENEDLIKYGFPEDIWFHVDKMSSAHVYVRLNKGQSMDDMSEGLLEDCAQLVKANSIQGNKVNNIDVVYTPWYNLKKTPSMDVGQVGFHNPKLVRTIKVEKRINEIVNRLNKTKVERKPDLKAEREAISAAEKAERKAQLRDKKRREEMERLEKEKQADIRSYKGLMVQEKMTSNKQIASGSKTLQELEEDFM

SEQ ID NO: 47591 - protein, 140 aa, Zea mays
  Clone ID: 700151235_FLI.pep
QKREGRSSRSPGDPAAGRPHTSSSLPSFLFPTIKMSRGGSAGGGQSSLGYLFGSGEPPKPAVAPAVSAPPAAAGAPPAEKPPAAKPDGTSQIAAGVTSQTNNYHRADGQNTGNFLTDRPSTKVHAAPGGGSSLGYLFGGN

SEQ ID NO: 47592 - protein, 165 aa, Zea mays
  Clone ID: 700151309_FLI.pep
DGCSRSVHPGGFVRSKAASELEDAGQAVGRRGGRASPGDGPREAPQGHHRPPARHQQRRGRRQLQAGAVDAVDPDDAGDAVVVDDAARRRQRVAQRLPPGEQPGHQGHGRQPLRPAAAQLPHRLRLALQRRDQEQPPLDRARWMDSEEAMFAGPCGYLKRTHALL

SEQ ID NO: 47593 - protein, 234 aa, Zea mays; identical to SEQ ID NO: 42501
  Clone ID: 700151522_FLI.pep

SEQ ID NO: 47594 - protein, 467 aa, Zea mays
  Clone ID: 700151539_FLI.pep
LSSSPASSALRFEGAMRVKVISRSTDDYTRERSQDLQKVFRNYDPALRSQEKAVEYTRALNAAKLEKIFAKPFIGAMDGHIDAVSCMAKNPNHLKAIFSGSMDGDVRLWDIAARKTVCQFPGHQGAVRGLTTSTDGDLLVSCGVDCTVRLWKVPMLKMVDTSERAGDNSQPSAVYTWKHAFWGADHQWDGNLFATVGAQVDIWDPDRSEPINSFEWGKDTVLSVRFDPGDSNILITSGSDRSLTLYDLRMSSPARKLIMKTRCNSVCWNPREPMNFTAANEDTNCYSFDARKLDEAKIVHKGHVSAVMDIDYSPTGREFVTGSYDRTVRIFNYLGDHSREIYHTKRMQRVFCVKYTYDGTYLVSGSDDTNLRLWKSKASEQLGVLLPRERKKQEYQDALKERYKHLPEVKRIVRHRHLPKPIYKAANLRRTMIEAESRKEERRRKHSAPGSMPVQPFRKRRIIREVE

SEQ ID NO: 47595 - protein, 135 aa, Zea mays; identical to SEQ ID NO: 36896
  Clone ID: 700151621_FLI.pep

SEQ ID NO: 47596 - protein, 337 aa, Zea mays
  Clone ID: 700151883_FLI.pep
ENGQRVPIQASTKYQCTNNSLRAQHRQIYYEKDNTTICLFTLTPDAKDHMIPYRQQNVSLQDRVYLSISKPQFGELEVGLFVVIKESLLIRSIFLDKRAENRVAQQGFVTWELKKALLITTQKFLEVRVVKDQRVCSPGPLETRPLFVAPSQGVATREGNNVLIAQAHLLAKNLPQVVRTLSGVRKAALRWGLRLVLPTGVEGNLRPTGDLHGHNSRELVEIGVREDWELLLDGLEQPHRDVQPRVSAVSQFRLMLHRAEWTAGPRRHVERPRGVPREAEHERGAALLGDEGSELAPGLLHSLAVLGAHGRVVLRHGCEQRELWIVGCDATRLREGH

SEQ ID NO: 47597 - protein, 173 aa, Zea mays
  Clone ID: 700152090_FLI.pep
TGATHATAAACERGIHIHGPRPPASHGGSSQAAGRAPPVPPLSMAAAPVGAQNRCVFVGNIPYDATEEQLVQICEEVGPVVSFRLVIDKETGKPKGYGFCEYKDEETALSARRNLQGYEINGRQLRVDFAENGRNTDRNREKVDDPQIFTVEEPFLPPLEFSVNLRSCIVFVL

SEQ ID NO: 47598 - protein, 210 aa, Zea mays
  Clone ID: 700152141_FLI.pep
RNPIPLPPLRLRRRRRTEPEPGALTNPRRQAAAGMVYYALLVGAELDGLTNLQPRHGCDDPNFPYYLKLKCENCGEVTAKSTYVTLSEQVDLPKGHGAAHLVQKCKLCGRDGTIVMIPGQGTPLTIEQSQKEEKTCLMVFDCRGYEPVEFSFGTGWKAESVHGTPFEIDCSEGEFSEYDEKGECPVELGKLQSTFKVVKKHERGGKTRFV

SEQ ID NO: 47599 - protein, 415 aa, Zea mays
  Clone ID: 700152392_FLI.pep
RWLQHGSRGQSTPAELERALVVLAPAPVSPMAMRGAAQQVARFAMGPHVPHVIAPAERSLHASAGSKKIVGVFYKGGEYADRNPSFVGCAEHALGIRGWLESQGHQYVVTDDKDGPNCELEKHIADAHVLITTPFHPAYVTADRIARAKNLELLLTAGIGSDHVDLAAAAAAGLTVAEVTGSNTVSVAEDQLMRVLVLTRNFLPGHRQAVGVGWDVAAVAHRAYDLEGKTVGTVGAGRIGRLVLQRLKPFNCRLLYHDRLRIDPALEAEIGAQFEADLDAMLPKCDVVVINMPLTEKTRGMFDKERIARMKKGVIIVNNARGAIMDTQAVADACATGHIAGYGGDVWHPQPAPKDHPWRYMPNNAMTPHISGTTIDGQLRYAAGVKDMLERYFKGQDFPVQNYIVKEGKLACQYQ

SEQ ID NO: 47600 - protein, 485 aa, Zea mays; identical to SEQ ID NO: 46975
  Clone ID: 700152511_FLI.pep

SEQ ID NO: 47601 - protein, 365 aa, Zea mays
  Clone ID: 700152776_FLI.pep
GTVFVEVTPRLCRQILHTLDWSGCCSWPAMSGGGPGGACGPDSRVETISRLAQWRIDTFGPCSYRRSDPFKLGIWNWYLSVEKSRSIVVRLFPEPGRVAKEQPPLARFLLRVSWAGPPRRSCVSPVHEHLLRTSDDFVWQVDAMSHGRFTIDVEFLDLRIATNNATESSSVWPNEGMVQKIASKSALGCLSRMLADSIHADVTINTTDGVLKAHKAVLAACSPVFKSMFVHDLREKESSTVDIGDMCVESCSALLGFVYGTIEQGQFWKHRLPLLAAADKYGIGDIKDCCEESLLEDIGSGNVLERLHVAWLYRLERLKKGCLTYLFVFGKIYDVRDEMHGFFHHADRELMHDMFQEVLSVWKPM

SEQ ID NO: 47602 - protein, 328 aa, Zea mays
  Clone ID: 700153393_FLI.pep
RDPMGEASPSIAKDVTELIGNTPLVYLNKVTDGCVGRVAAKLESMEPCSSVKDRIGYSMITDAEEKGLITPGVSVLIEPTSGNTGIGLAFMAAAKGYKLTLTMPASMSMERRIILKAFGAELVLTDPLLGMKGAVKKAEEIQAKTPNSYILQQFENPANPKIHYETTGPEIWKATAGKIAGLVSGIGTGGTITGTGRYLREQNPNVKLYGVEPVESAVLNGGKPGPHKIQGIGAGFIPGVLDVDLLDETLQVSSDEAIETAKALALKEGLLVGISSGAAAAAAVRLAKRPENAGKLFVVVFPSFGERYLSSVLFQSIKKEAESMVVEP

SEQ ID NO: 47603 - protein, 547 aa, Zea mays
  Clone ID: 700154080_FLI.pep
ISRIVSAETMEWRFLLLPRHLSSVAPSSAAVVAGEISVLLSARNFLASVNCAEQFISSEAVTSSGVLELYRAVAAAAPSGKARYLVDAASALVEASARADLPDGALRLLEFLIDTPAARLPMGSSCGHLMVKLLSLGRRADARHVFEILADAGERRRKKAMNELWAAGRGADAFKVFGEMADVPVVSYRKRYDFMMYGYLKNGDLQSASEIRTRMMQGGIKLSTQQRRMLRMLAEARACPENMLRIKVEICIMAQDIDEAIRLLRHMSHGDKSPPNAHSYNLVIAGLWKAGRGDEAVKLFGEMTDISLAPNHFTYTVMINGHLKRLGNGLTPRKNGNGDLEAALQLKAQMEQAGFKSDEPTYHLLMAELCSAERLGDVTALFDEMMTQETTLHKIVHSSMLQFLCRINEGQLLRIIEESAKNGVSAADNGCITLLLKELCRIDKVSSAEKALQTFAKTGLVPTTEMYNILIDGYSKIRELQAAFLLYRQMKSHDQLVPNEATHEALLLAVRNNTSIVYWEDVEELFEKNGVGIDAMNNAFSDIYGFK

SEQ ID NO: 47604 - protein, 240 aa, Zea mays
  Clone ID: 700154137_FLI.pep
RAAARADKEQAEEELCQATMGISRDSMHKRRATGGKQKAWRKKRKYELGRQPANTKLSSNKTVRRVRVRGGNVKWRALRLDTGNYSWGSEAVTRKTRILDVVYNASNNELVRTQTLVKSAIVQVDAAPFKQWYLTHYGVDIGRKKKTPAAKKDNAEGQEVEAAAEETKKSNHVTRKLEKRKEGRTLDPHIEEQFGSGRLLACISSRPGQCGRADGYILEGKELEFYMKKLQRKKGKSAVA

SEQ ID NO: 47605 - protein, 350 aa, Zea mays
  Clone ID: 700154351_FLI.pep
AAAGGSSSKVPALYVFGDSTADVGTNNYLPGGAEVPRANFPHNGVDFPTARPTGRFSNGYNGVDFLAVNMGFKRSPPPFLAVANKTNRQVFRGLLGVNFASAGSGILDTTGSSIIPLSKQVEQFASVRRNISSRVGNGSAAADALLSRSLFLVSTGGNDLFAFFARNSTPSDADKRRFVANLVALYQNHVKALYVLGARKFAVIDVPPVGCCPYPRSLHPLGACIDVLNELARGFNEGVRAAMHGLGVSFQGLRYSVGSSHAVVQSIMKHPQRLGFKDVTNACCGSGRFNGKSGCTPNATLCDNRHQYLFWDLLHPTHAASKIAAAAIYNGSLHFAAPMNFRQLAEDDRC

SEQ ID NO: 47606 - protein, 286 aa, Zea mays
  Clone ID: 700154447_FLI.pep
QQDGEARIRKRRRLLQRHLHQGLRGGVHRHPPLRLRRRGFRHRLRATDEWRRAGPCGTGGDRGGARAGPLRGRLRGREHLRRPPEPRRDVRPGRGRPHHRPHRPLLLGGPAAGRVRGVPAPQVRDPRQGHPDARRLRRHHRAGGRGVRDRHHLRARLHRLRHRRRPQEGLPRHHRAHRHRLHRRRQHPRRGALQRRLHEPRPLLRPRRRRGRLRRQLGLLGRPAHRRRPRWPRLRRRLHRRLLPAGRRPGLRLSSVLRSSGLSSSNAAARFDRRRHLLCSSFHHVM

SEQ ID NO: 47607 - protein, 117 aa, Zea mays
  Clone ID: 700155974_FLI.pep
RCSRGSTRRCHVSNQTSWTLKPGGRDCFNLFAFSASNTQRVYKYLEQRTLNLTTSLLLLIFTDRASFLLAVRRKSLISWICFGIFSRDLEVPELFFLRRRLGSHGKMEMRRWRLGGK

SEQ ID NO: 47608 - protein, 535 aa, Zea mays
  Clone ID: 700156359_FLI.pep
KKVPQEPKVTRHFRHFIQLQESGAMEMVPWLLGFLGRYPELMVSLACFLLLFRRLNQRDGLPTNWPVVGALPAITVNAGRMHEWVTEFLRAAGLSYVMKGPWGSPVDVIMTADPANVAHVFTSNFGNYPKGQEFAALFDVLGDGIFNADGESWAFQRRKAHALLSDARFRAGVAASTARKLRDALVPLLDGIAASGAVVDLQDVFVRLTFDLTAMFVFGIDPGCLAPDFPYVPFAAAMDTVEEVLFYRHVAPVPWLMLQKYLRTGHSKKMWNARRVLDASIAEFISLRRERAAEAEAEADLLTSYLACHDEIGKSGAELERFLRDTTLNLMVAGRDTTSSALTWFFWLLTKHPDVEAKVLEELRAHPPLSGAGGHRTAAELKQLVYLHAALSESLRLYPPVPFEHKAAARTDTLPSGARVGPSRRVIVSFYSMGRMEAVWGKDCSEFRPERWLTAAGRFRHEPSYKFVAFNVGPRTCLGRDLAYSQMKAVVAAVLPRFRVEVDAGAVVRPKLSIILHMKDGLKVRVPKREEDGLC

SEQ ID NO: 47609 - protein, 198 aa, Zea mays
  Clone ID: 700041801_FLI.pep
DGKSGAIAHGGGLSAAERSRSGLGSGFRYFAGAASGWWDRWMVMGASGSKLEKALGDQFPEGQRYFGLENFGNTCYCNSVLQKSGQTAISCIGSSTARPQHYRDEKLHCQAEKWHRRAAPRDFRFGFLQIFGYLFGLIASSRDSFREFNQELIEVFLILDHFLGFDVLEVYVKFWKISQDCPKQYFYWLSFIPFGNLI

SEQ ID NO: 47610 - protein, 171 aa, Zea mays
  Clone ID: 700041813_FLI.pep
SRAPAWVSDRTGAEMVAAAAAVRPVSFRRLGVLLRAPLPCGLTTSRVAAPFPRRTDSMKICQLQLTATRFSKQNNSGEDDELLSELKDKWDAMENKSSLALYGAGAILAVWISLVVVRSLDSVPLLPGILELVGLSYSGWFVYRYLLFQENRKELAGVIDDIKRRIVGDDE

SEQ ID NO: 47611 - protein, 137 aa, Zea mays
  Clone ID: 700042152_FLI.pep
LGAAAAAAAMAASMISSSALAVAPQGLPPLGRRASSFAVVCSKKKIKTDKPYGIGGGLTVDVDANGRKGKGKGVYQFVDKYGANVDGYSPIYNEDDWSPTGDVYVGGTTGLLIWAVTLAGILGGGALLVYNTSALSG

SEQ ID NO: 47612 - protein, 237 aa, Zea mays
  Clone ID: 700042425_FLI.pep
FRACKTVKYAYSIRNWLWTAFTYTAMVDYPTPANFLENLPAYPVKEMCKTIDAFPAGADVLEKAFAAASLYYNYTGDQTCNKIEDGDDPHGLDGWQWQACTEMIMPMTISNESMFPPSAFSYDDRSDECFQSWGVRPRPHWITTEYGGYKIDKVLKRFGSNIIFSNGMRDPWSRGGVLKNISSSIIALVTEKGAHHLDLRSSTKGDPDWLIEQRRQEVEIIQGWIDQYHQDMAETSS

SEQ ID NO: 47613 - protein, 278 aa, Zea mays
  Clone ID: 700043225_FLI.pep
DAAGVDPPLCLPHSGVHDLVVLVRNHQLLAQRRRHGPVHGVGPAQGLERQVRRLLAGDHHGAKRRAHPGGAVNLGDLHSGDDHAGNDLAREAHDLVLGGVHVERLHPRHGADHADVLEPLDAGGAEGPVVAAGADHDLGLHDVGVHAGLRVVVHGHERPVGDDAADAPSPDDEVLHGHGVEQLHVGARQEQAHDRGREERGVLDDHVVLGLVVRHAQLVQEQVRRLAHHHGREQLPAQPRAAARRHRLLHDGDAHGGVLGELVRAGQPRGAGAHDDDV

SEQ ID NO: 47614 - protein, 209 aa, Zea mays
  Clone ID: 700043757_FLI.pep
TMASMTGLSQGVLPSRRAANRARTAAVVRASAEAQAGRRAVLGLVATGIVGGALSQAVHAETVKTIKIGAPPPPSGGLPGTLNSDQARDFDLPLKERFYLQPLPPAEAVARVKTSAQDIINLKPLIDKKAWPYVQNDLRLRASYLRYDLKTVIASKPKEEKQSLKELTGKLFSTIDDLDHAAKIKSTPEAEKYFAATKDALGDVLAKLA

SEQ ID NO: 47615 - protein, 309 aa, Zea mays
  Clone ID: 700044275_FLI.pep
SRGGRPTLPIRGVRSYFIRSIPPLGRVERGVRKARTSRPAMGGDLYALDFDGVLCDSCGESSLSAIKAAKVRWPSLFEQVDAAMEEWIVEQMYTLRPVVETGYENLLLVRLLVEIQIHSVRKSSVADGLSIQEILENWSKLKPTLMDEWQEDRESLVDLFGRVRDDWIENDFSGWIGANRFYPGTADALKLSSSEAYIVTTKQSRFAEALLKELAGIDFPSERIYGLGTGPKVKVLQQLQQMLQHQGLKLHFIEDRLATLKNVIKEPALDNWNLYLVKWGYNTQKEREETEAIPRIQLIDLPDFSRQLK

SEQ ID NO: 47616 - protein, 195 aa, Zea mays
  Clone ID: 700044369_FLI.pep
HQRHQIERHNDWNGPAYTHSINGVFMSTNIMSKMGFRQATILVSSCILVMVELVQQDLSTCMSDGQEAAAGAEIQAPWIVETKPRPRPVLEHAERRDVHEPHAVPLFPRADRQDLGVMVELHLTDISGQVLDSLHRLPLPAEKIVPLVHIHDAAAGACGKQRAIPRGAEREASQGTVICCLVDAFPCSKVPVVNM

SEQ ID NO: 47617 - protein, 109 aa, Zea mays
  Clone ID: 700044865_FLI.pep
GVLLLALDNRRRRRSHRAGGGRQERFKPRQQPVVDEVRPVVVRAVPHALQHVERHVRELRRQLREELPHGPVDRGEGVPVTPQHQHGQVGQPRHQGYRAWPRRAGHRRH

SEQ ID NO: 47618 - protein, 281 aa, Zea mays; identical to SEQ ID NO: 36920
  Clone ID: 700044892_FLI.pep

SEQ ID NO: 47619 - protein, 83 aa, Zea mays
  Clone ID: 700045655_FLI.pep
KNKKVNFTNLRDGLSRPCIATTMATDALLAILCESRAKLYDENQRAVGMVHIRQSVHNPNIALNMQSYAPGGCKSMAKDLLER

SEQ ID NO: 47620 - protein, 277 aa, Zea mays
  Clone ID: 700045892_FLI.pep
QGLQGARVLNAYARFLDDAPEQVKIVRVSCGEYHTAAISENGEVYTWGLGSMGQLGHCSLQSGDNELIPRRVVALDGIVVGDVSCGGVHSCAVTEGGALYAWGGGHVGQLGVGPQGGFFSCSLNGSDMLLRNIPVLVIPSGVRLATCGHSHTLVSMKDGRIYGWGYNSYGQATNEKSTYAWFPSPVDWCVGEVRRLAAGGGHSAVLTDACSLKELCEFKLAETVNLSNAQLIEDVASRTGADALARLCEKVREHLDKEGECEFLEKQVAEEVNTIGS

SEQ ID NO: 47621 - protein, 198 aa, Zea mays
  Clone ID: 700047731_FLI.pep
TGHHHPTTIKMVNLRTQKRLASAVIGCGKRKIWLDPNEQSEISNANSRQTIRKLISDGLIIRKPVTQHSRSRARELNLARREGRHRGYGKRKGTADARMPSQVLWMRRLRVLRRLLVKYRASGKIDKHLYHELYHSSKGNAFKHKRALVEHIHRAKAEKARETALQEEMDAKRAKNKAARERKQERAVAKRNALLAEE

SEQ ID NO: 47622 - protein, 228 aa, Zea mays
  Clone ID: 700047847_FLI.pep
YISLLVGYNMVYRSLALINDGILLFITKTVCLICLYLQLCWQSVLTFSNNQSSPGLKNSNLDACVLGALEVLATGVTITFLDRAGRRILLIISSCGMTLSLLAVAVVFYIKDNISHDSDMHNILSMVSLVGVVAYVIAFCFGMGAIPWIIMSEILPVSIKSVAGSFATLANWLTSFGITMTANLLLSWSAAGTFASYMVVSAFTLMFVILWVPETKGRTLEEIQWSFQ

SEQ ID NO: 47623 - protein, 116 aa, Zea mays
  Clone ID: 700047859_FLI.pep
DGAPLPVALKNPHHPHRQQIDSRKRRPPPHRTVPEPPFSSLTRLPSSAVAGGEASGDHRSISWVNPLKGGRELCASLNGCYKASGPLEPPGWPQNHSFLGANIQMGHQHCQHSRLC

SEQ ID NO: 47624 - protein, 172 aa, Zea mays; identical to SEQ ID NO: 36903
  Clone ID: 700048050_FLI.pep

SEQ ID NO: 47625 - protein, 290 aa, Zea mays
  Clone ID: 700048315_FLI.pep
KITMLYLVGLGLSDETDITVKGLEVVKKASRVYLEAYTSILLVEQSVLESYYGRSITVADREMVESNSDEILRNAQNEDVAFLVVGDPFGATTHTDLVLRARELEIPVRTVPNASIMSGIGACGLQLYNFGQTVSMVFFTDTWKPASFYDRIKENRQIGLHTLVLVDIKVKEQSLENMARGRLVYEPPRYMTVGQCAKQMLEIEDERKEGVYTKDSLAIGAARVGGKTEKFVAGTLEELCSTDEVLGPPLHSLVLLGRRTHELELDYVRQFAVDKEKWDRLWKAEYGKQL

SEQ ID NO: 47626 - protein, 129 aa, Glycine max
  Clone ID: LIB3049-017-A12_FLI.pep
VTREQGSFDWFKGVMNEVAEEDHKGVIELHNYCTSVYEEGDARSALIAMLQSLNHAKNGVDIVSGTRVKSHFAKPNWRAVYKRIAVSHPRARVGVFYCGPPALTKELGQLASDFSHNTNTKYDFHKENF

SEQ ID NO: 47627 - protein, 192 aa, Glycine max
  Clone ID: LIB3049-018-F7_FLI.pep
LPSMAEYERSIQHQSKETAFQALNTIIQLHFEKTLEKKRAIDLQKKELYKLFQIFFIFLGLVFLVLAQSPRLQCRHCWIPITLLSIAHLIFYVSVAQTLRCINAFKYQRRCHKLTLGLATEKLRDIKIRIAAASAADADYDSVVADDEFEIHYQEPPETYFGKFKRNWALHFGFLILIYAFMISSSVVLLCF

SEQ ID NO: 47628 - protein, 261 aa, Glycine max
  Clone ID: LIB3049-020-F8_FLI.pep
GKRNEKMGTTLMRCSHANALFRALKPKPRNSSLPLSSMAINKGNSNKAYDALLLDAGGTLLQLAKPVEEIYATIGSKYGVTVDPAMIKQGFKRAFAAPWPEKLRYQGDGRPFWKLVVSEATGCGDEDYFEEVYEYYAKGDAWHLPDGAFETITFLKDAGVKMAVVSNFDNRLRKLLKDLNVLNLFDAVIISSEVGYEKPDPRIFQAALDEVNVEACKALHIGDDQKADKLGANAVGIDCWLWGIDVKTFSDIQIRILNSEA

SEQ ID NO: 47629 - protein, 137 aa, Glycine max
  Clone ID: LIB3050-024-F12_FLI.pep
EPPDENGDHSLLESCQQDDIATENEEAGETFVYEKTELDCSPESLQSKYSTEGECGSLIGSPENLVCEEDLYCEFPPKGNIEKSKSGQSSNSSAKKGSKRTRGLLQPVIHATVAVDKKGISNLSRIDSRSERIEAWR

SEQ ID NO: 47630 - protein, 198 aa, Glycine max
  Clone ID: LIB3051-041-C3_FLI.pep
KNGQIIVPVFYHVDPTHVRHQTGSYGHAFAMHEQRFVGNMNKVQTWRLVLGEVANISGWDCLTTRVESELVEKIAMDILQKLDSITSGGLERRIATYKQMAQQKLEKSLKTSNMRDMEDLITTLLQLGELKLEKAMRTDDSSVWDDLMATYERVLQLKQDKWMRTFNTKDMEDLVATRQHVMQIQREQSNRKIGFRGI

SEQ ID NO: 47631 - protein, 350 aa, Glycine max
  Clone ID: LIB3051-047-E6_FLI.pep
NSNEQTKEAMMMNVIGLSLSLVLTSLAAASTIVKEGHRVVVVEYDQGGHQNTKISISPEQPTHANLKDPICDAYGKCKHKIVDAMEKSQEVIHEKKDEIAANKEAARQVAGKTKERVYDKARHVHEYAQNTVETAKNHIACNVSNAKDAFKRLIAGSLERQSLNSLMGVANMLGFSTAYGMCVWVTFISSYVQSRAMARQQFAVVQSKIYPVYFRAMSYSIGVALFAHVLAHRNTLLSNKSDLLQAYNLLASLVTLFFNSLYLEPRATKLMFERIKIEKEEGRGRSEDVSSRTKEPASTTADQDAVRTRIIKLNDKLKKLNSYSSFLNILNLMSLTWHLVYLAQRLPHIC

SEQ ID NO: 47632 - protein, 263 aa, Glycine max
  Clone ID: LIB3094-074-H5_FLI.pep
GFRIYPKPSSMAEEAALEVVDPNTAAAAAAVDMDVENVEAGGNGAEPNQKRAREEEEPQGGDDDVSKKQRVDEENEKSVEEQRLEKRDEQEEEKGEEKEAEKEEEEEKEASGSVNLGFKSFGSSSEMFHYFYNFLHTWPQYLNVNKYEHLMLLELLKNGHAEPDKKIGGGVRAFQVRKHPTFKSRCFFLIREDDSADDFSFRKCVDHILPLPEEMHLKSDANKALGGGGGGKHYGGGKGGRGGRGGRGGGGRGGHGRGGKWRN

SEQ ID NO: 47633 - protein, 263 aa, Glycine max
  Clone ID: 700560831_FLI.pep
GEVLPGMSPVFSPYYCWCPPGVSTCPSIAAVTQFPNSSIETLPFPSGASLLPNPLSANLLDPVHPLSTSMDFPPFFPDPLVRMSLPSQQIPTFTPLMCDPIVHVPVIDVCSSGQGYLVSAGPAMSPSIPPLHPNLVKPLIPESDAVVKGARETLRLLLSGSSQGNQQMMRDTLPAILTNPDEKQNNILVAGSRGLYTGTRDINAIANSIAAMGLVSLSGVSKVESGGYSELCENYGNLEAVKNSNDSGGAILDDEGGSFDSKQ

SEQ ID NO: 47634 - protein, 167 aa, Glycine max
  Clone ID: 700681054_FLI.pep
VSVTLPTMVLAYAAMLSSTLPFQKSVPLTSQRSGTAFGSSFQFNRENGTVVTPLVVCHAKKKLSFMEQILDYIEGGPKLRKWYGAPDILEKDGTAIEDNEDDYPEDEVRDAVLVTDGDSEMGQMVILSLIVKKARVKTLVKDKRVALEAFGSYVEEIQVTNDLSRKL

SEQ ID NO: 47635 - protein, 223 aa, Glycine max
  Clone ID: 700756204_FLI.pep
GMAAILARKSLLALRARQLAVSGQGLHSSQYYGLRLSAHSFSTKREDEEREQLAKDISKDWSSVFERSINTLFLTEMVRGLMLTLKYFFETKVTINYPFEKGPLSPRFRGEHALRRYPTGEERCIACKLCEAICPAQAITIEAEEREDGSRRTTRYDIDMTKCIYCGFCQEACPVDAIVEGPNFEFATETHEELLYDKEKLLENGDRWETEIAENLRSESLYR

SEQ ID NO: 47636 - protein, 207 aa, Glycine max
  Clone ID: 700763456_FLI.pep
VTGTPHGWDVLFYIFQFFRVVLLFTVIVLVGTGWSFLKPFLQEREKKVLMIVIPLQVLANVASVVIGETGPFIKDWVTWNQVFLLVDIICCCAIIFPIVWSIRSLRETSKTDGKAARNLAKLTLFRQFYIVVIGYLYFTRIVVFALKTIAAYKYQWVSNLAEEAASLAFYVVMFYMFRPVERNEYFVLDEEEEEAAEIALRDEEFEL

SEQ ID NO: 47637 - protein, 57 aa, Glycine max
  Clone ID: 701007506_FLI.pep
ANSKCHSNTSGMNHQMLHQLMGVDPGTNPVCHFLGSKAILWVPNLSVDTAYQTNIVA

SEQ ID NO: 47638 - protein, 319 aa, Glycine max
  Clone ID: 701041718_FLI.pep
ICFFEFHSQVVKGFQGMENMQSFWQLGDELRGHSKASEDHKWLMVASKLAEQTRLKGERVNNLDLSKGPIETRSRDKFGFQEENKFDSLNLSMLNLDSKFTENVSKSSLRNGVYGMNAVYQKNNANLVSNVISNKYNGSIQHNKEINNNTGNNINTNESNNTNATDKRFKTLPAAETLPRNEVLGGYIFVCNNDTMQEDLKRQLFGLPPRYRDSVRAITPGLPLFLYNYTTHQLHGIFEAASFGGSNIDPTAWEDKKCKGESRFPAQVRIRVRKLCKALEEDSFRPVLHHYDGPKFRLELSVPETLDLLDLCEQAGSAA

SEQ ID NO: 47639 - protein, 362 aa, Glycine max
  Clone ID: 701042188_FLI.pep
IFSPLPKTLAPLFFLFHYFFTIFFMDLFTGDHFPVPDHVAPFPDSGDLLFAADLLSHRHNPQKFRPIRSVPTAPIANPSPPPLSHDPIPSGSGHAPCHESSLSFDAEDEDEDDDNSSASTKGHGPRKKRRKMVRKLEDFAKDLVVKVMEKQEQMHKQLLEIIENNERERIKREAAWKNEEMERIRKDEEARAQENSRNLALISFIQNLLGHEIQIPQQPAKPCSKREEDEVEASARKELNNDPGDNRWPDVEVQSLITVRTSLEHKFRLMGSKGTIWEEISEAMNGMGYNRSAKKCKEKWENINKYYKRTIGSGKKRRQNSKTCPYFDELDILYRKGLLSIGNALSNTCGVPQIEVKELNET

SEQ ID NO: 47640 - protein, 294 aa, Glycine max
  Clone ID: 701153369_FLI.pep
QPMNDTFVLDLNSSNPEWQHVQVSSPPPGRWGHTLSCVNGSHLVVFGGCGRQGLLNDVFVLDLDAKPPTWREISGLAPPLPRSWHSSCTLDGTKLIVSGGCADSGVLLSDTFLLDLSMEKPVWREIPVAWTPPSRLGHTLSVYGGRKILMFGGLAKSGPLRFRSSDVFTMDLSEEEPCWRCVTGSGMPGAGNPGGIAPPPRLDHVAVSLPGGRILIFGGSVAGLHSASQLYILDPTDEKPTWRILNVPGCPPGFAWGHSTCVVGGTRAIVLGGQTGEEWMLSELHELSLASSAI

SEQ ID NO: 47641 - protein, 192 aa, Glycine max
  Clone ID: 701156322_FLI.pep
GRMNKIEMAATINLSLPLLSLCKPPKFLKPPTTRFLQHEYVNSLSLSLRRRITESNTCRKRRGIVCGLPLPVDPWAPTIDSQSIASQLFAFSLFPYIGFLYFITKSKTAPNLTLFGFYFLLAFVGATIPAGIYAKVHYGTSLSNVDWLHGGAESLLTLTNLFIVLGLREGLRKAENSQRDQNASTPNSGLDE

SEQ ID NO: 47642 - protein, 256 aa, Glycine max
  Clone ID: 701156649_FLI.pep
HTKSIPHLHIHHTMATTTMFSSPSAILSSTTTTTTPKPSSSAPPSPSCKPLLPFKQPLTTLTAAAAIATILTTAPAPSLAQESPYQVYYGTAASAANYGGYGGNSSKKDSAEYVYDVPAGWKERLVSKVEKGTNGTDSEFYNPKKKAEKEYLTFLAGFRQLAPKDVILNNLALSDVDLQDLIANADSVTSDEVRDDKGQLYYVYEIDGVGTHSLISVTCAKNKLYAHFVNAPTPEWNRDKDMLRHVHESFKTVGSF

SEQ ID NO: 47643 - protein, 113 aa, Glycine max
  Clone ID: 701066875_FLI.pep
PPPAQPPAAPRPLLPANKPRRRVERRHPPPLPARILSAADGAKTAARAAAAGGGEGHRVVQEVAAPRRTFLLRARSHGASLRSRVDIQTKEKEEDEGTERVLGCCYLMVHTTI

SEQ ID NO: 47644 - protein, 363 aa, Glycine max
  Clone ID: 700787631_FLI.pep
ILIATQHSHSHSKMVTSSQKILVTGGAGFIGTHTVVQLLKGGFSVSIIDNFDNSVVEAVDRVRQVVGPQLSQNLEFTQGDLRNRDDLEKLFSRTTFDAVIHFAGLKAVAESVSKPRRYFDFNLVGTINLYQVMAKYNCRKMVFSSSATVYGQPEKIPCEEDFRLQAMNPYGRTKLFLEEIARDIQKAEPEWKIILLRYFNPVGAHESGKLGEDPKGIPNNLMPYIQQVAVGRLPELNVYGHDYPTRDGSAIRDYIHVMDLADGHIAALRKLFTTENIGCTAYNLGTGRGTSVLEMVTAFEKASGKKIPVKLCPRRPGDATEVYASTERAEKELGWKAKYGVDEMCRDQWNWAKNNPQGYTGKP

SEQ ID NO: 47645 - protein, 142 aa, Glycine max
  Clone ID: LIB3028-027-B12_FLI.pep
LVSMNHDTQSCMDPNVMEAKVVVSSCGHDGPFGATGVKRLKSIGLIDSVPGMKALDMNKAEDAIVKLTREVVPGMIVTGMEVAEIDGAPRMGPTFGAMMISGQKAAHLALRSLGLPNALDSVGNVHPELVLAAAESAEIADA

SEQ ID NO: 47646 - protein, 146 aa, Glycine max
  Clone ID: LIB3028-035-C11_FLI.pep
PKKKNSPHPVKVVYISNPMKIKTSASEFRALVQELTGQDAESPPDPSRFHGHHPDSSSSVENIEEEEEEDNIHRVNCVVPPMTATDEISLLIGCCNQNGQHQPSSMESNNFQLLDDDDVFTPQMIENISALLPASVFYESPHLNHW

SEQ ID NO: 47647 - protein, 226 aa, Glycine max
  Clone ID: LIB3028-050-C11_FLI.pep
EFSVLVDRATGGASIKDGEVELMLHRRILHDDSRGVGEPLDEQVCVNNNNTCEGLTVRGNYYISIHKLGVGSRWRRTTGQEIYSPFLVAFTHEISENWKSSHLTKGTIMDPNYSLPPNIALITLEELDGGIVLLRLAHLYERSEDAEYSTLTKVELKKLFAMKTIRELKEVSLSSNQEKSEMKRMTWKVEGDKGQEPQAVRGGPVSYHNLVVELGPMEIRTFLLKF

SEQ ID NO: 47648 - protein, 451 aa, Glycine max
  Clone ID: LIB3049-044-G2_FLI.pep
FINDTTPKMKLEESVSNSNITAPLLPPEDPSPSPQNGSISGAVFNITTTMIGAGIMSIPATMKVLGIVPGLVVIVLVALITDVTVEFMLRYTSSGKSSTYAGMMAESFGSIGSLAVKICVIITNLGVLIIYFIILGDVLCGNESNGITHLGILQEWFGINWLTSRAFALLFVALFIMLPLVMLRRVDSLRYSSAISILLALVFVVICSSMAVSALLSGKSQTPRIVPDFSQVTVLDLFTAIPVFVTGFGFHVNVHPIRAELIKVEHMGLAARISLIICVAIYFAIGFFGYLLFGDSIMPDVLVNFDQNSHTSTGRLLNAIVRLSYALHLALVFPIMNYSLRANIDELIFSNKNKPPLASDTPRFVSLTLTLLALTYLVAVTIPNIWYFFQFLGSTTIVSTSFIFPAAIVLRDMHGISKTKDQVMAIVVIVLAVGTSGIAIWTNLNGSGDDQ

SEQ ID NO: 47649 - protein, 342 aa, Glycine max
  Clone ID: LIB3049-051-F5_FLI.pep
GGRIIIKIVFLYFSYYANAMLITRNPVLLNSTFVPTLISDSEHRCASPRSLCFSSRTDMDTAAGQSLYPLHRCKTLHLVRHAQGFHNVEGEKNFEAYKSYDLFDANLTPLGWKQVDNLRQHVKASGLSKRIELVIVSPLLRTMQTAVGVFGGQPYTDGINVPPLMNDNVGDSGRPAISSLNAPPFIAVELCREHLGVHPCDKRRNITDYRHMFPAVDFSLIENDEDILWKPDIREKNEEVAARGLKFLEWLWTRKEKEIAVVTPSGFLFHSLSAFGNDCHPNVKNEICTHFANCELRSMVIIDRGMIGSDESSTNYPGKVPYGLDLPSDVADQKHPENGQAN

SEQ ID NO: 47650 - protein, 122 aa, Glycine max
  Clone ID: LIB3049-051-H3_FLI.pep
RGTITEARECGSARDLPWWDISKPKPRFQLHRCGLWPIWVLHFPWWLYRYPFFAHYSRCWRVTTSSTTCIRKMALVEDLCYYYLMLSSKLSTVELCLSFNLPFIIICLRLLGFVLGSWLGVI

SEQ ID NO: 47651 - protein, 426 aa, Glycine max
  Clone ID: LIB3049-052-F1_FLI.pep
IPIYSSSSATLTLELKMQPQRLRQQAMMQPSLYHHPALLTPPQIEPILSGNLPPGFDSSSCRSVYVGNIHPQVTDSLLQELFSTAGALEGCKLIRKEKSSYGFVDYFDRSSAAFAIVTLNGRNIFGQPIKVNWAYASSQKEDTSGHFNIFVGDLSPEVTDATLYACFSVYPSCSDARVMWDQKTGRSRGFGFVSFRNQQDAQSAINDLTGKWLGSRQIRCNWATKGASASDEKQTSDSRSVVELTNGSSDGQETTNDDTPEKNPQYTTVYVGNLAPEVTSVDLHQHFHSLNAGTIEDVRVQRDKGFGFVRYSTHAEAALAIQMGNARILFGKPIKCSWGSKPTPPGTASTPLPPPTSANVSGFSLASLAAYERQMALSKMGGAHALMHQQGQHALKQVAMGMGAPGAGYDARFQNVATTQHLMYYQ

SEQ ID NO: 47652 - protein, 193 aa, Glycine max
  Clone ID: LIB3049-052-H7_FLI.pep
RSIHFLLLSLSPRVRVFSLHHSLCRSVSMAQQDAQNGGSENAAAAATVSFVAVKPQLLVEAPKANDAILFFKAAFGAEEVGRTLNPKRKAEHELPLILSAELKIAGSTILVADLVDDTSSPAKTGGNGVVLCLETEDVDGAVAKAVSAGAVAEGEVAEGEVACCGGRVGKVKDPYGFVWLFCTPGKKCADVEA

SEQ ID NO: 47653 - protein, 387 aa, Glycine max
  Clone ID: LIB3050-003-D3_FLI.pep
RRQKGAANSVKMKFTVSNLSSSMFLLVLFIALVSHTHGSKIDHHRSNKHVALFIFGDSFLDAGNNNYINATTLGQANFWPYGETYFKFPTGRFSDGRLISDFIAEYANLPLVPPYLQPGNSNYYGGVNFASSGAGALVEAFEGSVIPFKTQARNYKKVAALLRHKLGSSETKSLLSSAVYMFSIGSNDYLSPFLTHSDVLNSYSHSEYVGMVVGNLTSIIKEIYKRGARKFVFMTLPPLGCLPGTRIIQLEGKGKCLQELSALASLHNGVLKVVLLQLDKQLKGFKFALYDFSADLTLMVNHPLKYGLKEGKSACCGSGPFRGVYSCGGKRGEKQFELCDKPNEYLFWDSYHLTESAYKKFADLMWGFTNNSSNIGPYTIGDLFQLP

SEQ ID NO: 47654 - protein, 177 aa, Glycine max
  Clone ID: LIB3051-080-B6_FLI.pep
STRGRIQRWEGGAWTRRAWRGCSRSWRGGGRTCRRWSIAARSRATQRRAPPRRAGTRGGTPTAGVLGVACSHALVTYVVLSATLVAAVTLKERRTASAVAALPQRMTVPVFSNYPHQYALWSQHGNICGNGLCCNNFIHSLLFHHLFLLLHLLSIVRHVSLIRWDSTIQHKAIHIFP

SEQ ID NO: 47655 - protein, 95 aa, Glycine max
  Clone ID: LIB3051-084-A8_FLI.pep
TIFNLIHRKMGALDHISELFDCSHASSKLKKKRKQFQTVEVEVKMDCEGCERKVKKSVEGVTEVEVDRQGSKVSVSGYVEPSKVVSRIAHRTGLT

SEQ ID NO: 47656 - protein, 119 aa, Glycine max
  Clone ID: LIB3073-010-D10_FLI.pep
KREEKSKTMSGIIHKIEETLHVGGHKKEEEHKGEQHHGGEYKGEHHGEHSTEYKGEHHVGEHKPEHHGGEEHKEGFLDKIKDKIHGEEGGTAEGEKKKKKKEKKKHEHGHDSSSSSDSD

SEQ ID NO: 47657 - protein, 109 aa, Glycine max
  Clone ID: LIB3093-032-A12_FLI.pep
DEDDNGETGEDEMGVEDDGEFEDDDEEEDYGAGYLVQPVGQSDALNAGGADVDGGNDDDGEEEDEVDDDDDDQVLPPPDSSHKRKRDDEEDVDDDDDVVAFTKSPKKHH

SEQ ID NO: 47658 - protein, 466 aa, Glycine max
  Clone ID: LIB3093-041-C7_FLI.pep
KRKMDCSNELDMQEPSIETDKLSYEIFSILESKFLFGYDDPKLWFPKQIPPKPESQTPAATAAVDCVSAVKNQRGKICILAIDGGGMRGILAGKALAYLEAALKKKSGDQNATIADYFDVAAGAGVGGIFTAMLFSTKDHRRPIFSADDTWRFLAEKGNKFYRAGGSASNRGLLKRLLSSGGSGSVSSATAGLEKAVKEAFTAENGGGSLTLKDTLKPVLIPCYDLSSTAPFLFSRADALETDSFDFRLWEVCRATSAEPGLFEPVQMRSVDGQTKCVAVDGGLAMSNPTGAAITHVLHNKQEFPFVRGVEDLLVLSLGTGQLLEVSYDFDRVKRWKAKDWARPMARISADGSSDLVDQAIAMAFGQCRSTNYVRIQANGSSMGRCGPNVDTDSSPGNVKMLVGIAEEMLKQENVESVLFGGKRIGEQSNFEKLDWFAGELVQEHQRRSCRIAPTVAFKQATPKAT

SEQ ID NO: 47659 - protein, 275 aa, Glycine max
  Clone ID: LIB3093-044-F7_FLI.pep
NVDFLFGLQPQPPPIDVKFNDPLPEPVAPPPEHPLRFNFNPAVSDPSAIQRQLQQLQIAENEQAAHRRKGEDNYPAGDYYVQKVPEKFPPPNFLASSPGYWPEKHVSGDVYPPAVTATSGGGEPSVYMVPAPGTFYHAPVMRPPPPATQGYYTVQRMGSDNYREAPVYGGVPPPKAAVPASMAPAQQPIKAPAYTEGFGMVRPGGIVDNTGVPYAQVAYDSGSGRQVYYTAPGGGVTHAPPYHGVFPPVTADMRLGGVSFGQDVKVISKLTQGSV

SEQ ID NO: 47660 - protein, 149 aa, Glycine max
  Clone ID: LIB3106-026-G8_FLI.pep
IFEFIQRSPFCLPLYAYQGTMAATVKQMSLIVSLFGVVSFILGVVAENKKPAAGTPVPGLDGVSVTCKYPADPTVALGYLSTAFLVASTVTGYLSLFYPYKGKSIPQGVLFKHTTFTVFFNISFCSYAVMANNHRTHSPDTQCAPQYQL

SEQ ID NO: 47661 - protein, 58 aa, Glycine max
  Clone ID: LIB3106-039-F7_FLI.pep
IFIKYRYLAIHPHRVKNSIRNGFHLRVLVVFLSSLYVDLLHQARAIHIKCFIYPKFDK

SEQ ID NO: 47662 - protein, 76 aa, Glycine max
  Clone ID: 700660393_FLI.pep
FGTFGPKVMPRIGNARMIPGQLLALPILGITLGRLVQNFELLPPPGQSQIDTSEKGGQFSLHILKHSTIVAKPRSF

SEQ ID NO: 47663 - protein, 333 aa, Glycine max
  Clone ID: 700661911_FLI.pep
NRAKRECVKSETKNRTTMATLKVPQPLPPVADDCEQLRKAFSGWGTNEELIVSILAHRNAAQRKLIRETYAQTYGEDLLKALDKELTSDFERLVHLWTLDSAERDAFLANEATKKWTSSNQVLVEIACTRSSEQLFAARKAYHVLYKKSLEEDVAHHTTGDFRKLILPLVSSYRYEGDEVNLTLAKTEAKLLHEKISNKAYNDDDFIRILATRSRAQINATLNHYKDAFGQDINKDLKADPKDEFLSLLRATVKCLIRPEKYFEKVVRLAINKRGTDEGALTRVVATRAEVDLKNIADEYQRRSSVPLERAIVKDTTGDYEKMLVALLGHDDA

SEQ ID NO: 47664 - protein, 472 aa, Glycine max
  Clone ID: 700985536_FLI.pep
YTIDDIMAASFSSMLIIPSSKISYEASLGGLSFHNFLTAKSPPLKRNQKSIKVVTRDNHSPLVDDLMIEVQEHEHEHATLHQKDLSEMWRQIHGEKNWEGLLEPMDPLLRSEVIRYGELAQACHDAFDYEPFSRYCGTCRFEEEKFFSSLGMTHHGYKVTRYIHLTANTDFLLKWLIHSKWPTAMGSKVNWGGYVAVSNDDTSRCLGRRDIVIAWRGTTTHLEGEKDLRSSLTPVSSKGIPCHDDGVKVDNGFLDMYTGKDETSEYCQHSARDHVLREVKRLMDMYSEEEVSITVTGHSLGSALAILSAYDIVEKGLDRGVPVSVMSFSGPAVGNKSFHKRLKKLGIKVLRVINANDWVPWFSLWLPPFQYYHVGVELKLDNNKSPFLKHDVDCAHNLEVLLHLLDGYHGERGEFMLASDRDHALVNKGGDFLKESYLVPPNWWQDENKGLKRSSDGRWVQPERTIEVDGYP

SEQ ID NO: 47665 - protein, 166 aa, Glycine max
  Clone ID: 700732307_FLI.pep
LASIPPMADPQQQDNYMKRKPSNSNVLVLAALVPFGVSLLILVGLTLSATVISLTVVTPLFVIFSPVLLPAALFIALAVAGFLTSGVFGITSISSFAWLATNLRRSHSPEHPQRPRDDADRVAQKTDEAVRQAQETVHQAQKETATKAQKDISETRKAHKESVATS

SEQ ID NO: 47666 - protein, 106 aa, Glycine max
  Clone ID: 700870562_FLI.pep
GPGYGASTGSTYDAQRGATYDTQRLTGSNAFRGSAYDSKRGSGYDMQRAPAYDAPRAAGYDAQSRGVAGPHGHARPMNNMPYGSTTPPARSGGGYEPARGVNPARR

SEQ ID NO: 47667 - protein, 275 aa, Glycine max
  Clone ID: 700996928_FLI.pep
GNMSAVVAGSSSSFSATFTPIRSPSLKNSQLSHSKALTSPQCQKTSLQGLSLHEAKRGVSESFLVENNNGSSIAGRRLEITARTAGASKTIEVEVDKPLGLTLGQKSGGGVVITAVDGGGNAARAGLKAGDQVLYTSSFFGDELWPADKLGFTKTAIQAKPDSVYFVVSRGAEVDVKKLTKRPAPPRFGRKLTETQKARATHICLDCGYIYTLQKPFDEQPDTYGCPQCQAPKKRFARYDVNTGKAIGGGLPPIGVIIGLLAGVGAVGALLVYGL

SEQ ID NO: 47668 - protein, 85 aa, Glycine max
  Clone ID: 700843855_FLI.pep
EKMGSLMASLTLTLVLAIVSLSLSSQASADKYDYSSPPPPVYKYKSPPPPYKYSSPPPPPKKPYKYPSPPPPHYVYASPPPPYHY

SEQ ID NO: 47669 - protein, 315 aa, Glycine max
  Clone ID: 700845152_FLI.pep
RPKMTVRIFSEIMAVAFVEIILDQCFTFLGMKYTSASFASAVMNSVPSITFVLAIIFRLESMNLKELGCLAKVIGTAVSLGGAFLMALYKGPVVNIADSSASHVGRPDNVNDPSGSHWLIGACFLLIGCAGFSAFYILQAITLRKYPAEMSLATWVCFVGALQSSAVSFFMERNSPHVWSLAWDSRLVAYAYSGIVTSAIQFYVQGMVIKTTGPVFVTAFNPLRMIIVTALACIVLSEKLHLGSIIGGVVVVIGLYLVVWGKAKEQKHLMPPSPEKVTLQRHQQLPVTVPISDDANDNNKPQLVIIEDRNIGPEH

SEQ ID NO: 47670 - protein, 239 aa, Glycine max
  Clone ID: 700846666_FLI.pep
FTSYIVFLFEVLQTMAATQEDVTLLGVVGSPFVCRVQIALKLKGIECKFLEENLANKSDLLLKSNPVYKKVPVFIHNEKPIAESLVIVEYIDETWKNNPILPSDPYQRSFARFWSKFIDDKIVGASWKSVFTVDEKEREKNVEESLEALQFLENELQDKRFFGGDEFGFVDIAGVFIAFSIPIFQEVAGLQLFTSEKFPKLFKWSQELINHPVVKDVLPPREPLFAFFKSLYESLSASK

SEQ ID NO: 47671 - protein, 345 aa, Glycine max
  Clone ID: 700846947_FLI.pep
ILNLQQSLVKANLAGYIKLVVPCNADAYESSLPSQGAFRPELTQIMTQLVQFLNSNGTPFIVNIYPFLSLYDNNDFPQDYAFFEGTTHPVTDGNNVYTNAFDGNYDTLVAALSKLGYDQMPIVIGEIGWPSDGAIGANITAAKVFNQGLISHVLSNKGTPLRPDAPPMDIYLFSLLDEGAKSILPGGFERHWGIFSFDGQAKYPLNLGLGNKELKNAKNVQYLPSRWCVASPSTDAQNVANHMRIACSVADCTTLDYGGSCNGIGEKGNISYAFNSYYQLQMQDSRSCNFDGLGVITFRDPSVGDCRFLVGVTDKGSDSSASQIRCQWWILLAFLVIQTISSFSL

SEQ ID NO: 47672 - protein, 84 aa, Glycine max
  Clone ID: 700848964_FLI.pep
TNQPNEPIYHHYHNIYNTTQENFAASKLKLKLQQRKTQFYRFKFKHYYHQLLPLMLSSIPHSLQPPSISRENYRNPTSFSSRSF

SEQ ID NO: 47673 - protein, 162 aa, Glycine max
  Clone ID: 701148152_FLI.pep
QGNSVGPSSKGVSLARGLSLYYLNRFEEAAEQFRLDVAQNPNDTEESIWCFLCEAQLFGVDEARKRYLEVGRDPRPVMREAYNMFKDGGDPEKLVAAFSGSREGEYFYASLYAGLYYESQNGTDAAKVHIVAACQSPYGQRSDDYMASLAKVHCRCRNWVFN

SEQ ID NO: 47674 - protein, 394 aa, Glycine max
  Clone ID: 701149286_FLI.pep
GRIAPRFSFLKFLFPSSLPLSLRVFPSCPFIYITISTANFEQNLIKKSFSGAMADLKSTFLNVYSVLKSELLHDPAFEFSDDARNWVDRMLDYNVPGGKLNRGLSVIDSYRLLKEGQALNDDEIFHASALGWCIEWLQAYFLVLDDIMDNSHTRRGQPCWFRVPKVGMIAANDGVLLRNYIPRILKKHFRGKPYYVDLLDLFNEVEFQTASGQMIDLITTLEGEKDLSKYTLTLHRRIVQYKTAYYSFYLPVACALLMAGEDLDNHVDVKNILVEMGTYFQVQDDYLDCFGDPQTIGKIGTDIEDFKCSWLVVKALELSNEQQKKVLHENYGKADPENVAKVKALYNELNLQAVFEEYENGSYAKLVSSIEAHPSKAVQAVLKSFLAKIYKRQK

SEQ ID NO: 47675 - protein, 120 aa, Glycine max
  Clone ID: 701149904_FLI.pep
MVQRLTYRKRHSYATKSNQHRVVKTPGGKLVYQTTKKRASGPKCPVTGKRIQGIPHLRPAEYKRSRLPRNRRTVNRAYGGVLSGSAVRERIIRAFLVEEQKIVKKVLKIQKAKEKQASKA

SEQ ID NO: 47676 - protein, 345 aa, Glycine max
  Clone ID: 701150411_FLI.pep
GLMAIVAEDNADPNGTNLELTFLCLTSLTICDLPELKCFLQCDMLKTFSHVEPNTKNQICIEKLTPNLQHLTLGENELKMIPHGEFPGNVLHNLKALILLNFSVESYEFAYGFLQQVPNIEKLEVYCSSFKEIFCFQSPNVDDTGLLSQLKVLSLESLSELQTIGFENTLIEPFLRNLETLDVSSCSVLRNLAPSPICFPNLMCLFVFECHGLENLFTSSTAKSLSRLKIMEIRSCESIKELVSKEGDGSNEDEIIFRQLLYLNLESLPNLTSFYTGRLSFPSLLQLSVINCHCLETLSAGTIDADKLYGVKFQKKSEAITLDIDLNSTIRNAFQATVPDASSAP

SEQ ID NO: 47677 - protein, 202 aa, Glycine max; identical to SEQ ID NO: 47448
  Clone ID: 701046951_FLI.pep

SEQ ID NO: 47678 - protein, 390 aa, Glycine max
  Clone ID: LIB3138-011-B12_FLI.pep
ENNHDKIENLEGSPADQDEAGDKLADVLDDDDDDDDDEASDSHGSEGSLHNKVEENAKEAEEEPIVKSETDIKVRNKESSDEIINKGNDASENTEGLSREELGRLVASRWTGENTDKPSAVPDTTLDNEDREDPKGRNNEEYEGYASETDDDNNKYDDDSHKYDDEDEVDDEYREDEHDDLSSSYKSDSDNEPDLSDNPSWLEKIQRTVRNIFQVVNLFQAPVNQTDAARVRKEYDESSAKLSKIQSRISSLKQKLKHDFGPAKEFYSFYDHCFEGKENKYTYKVCPYKQASQEEGYSNTRLGSWDKFEDSYRVMVFSNGDKCWNGPDRSLKVKLRCGLKNEITDVDEPSRCEYVAVLSTPTLCQEERLKELQLKLDLLNSEIPANHDEL

SEQ ID NO: 47679 - protein, 313 aa, Glycine max
  Clone ID: LIB3138-045-D4_FLI.pep
SYPVLCNLYRPWMCPLARLLYFLISFVTVLIGFYDLYKNVPVLKATASRICGPLLDWIETWEMVSRVKYLGTMLFLHNFQKAVRWFLAFTHTMRSFFSFLVQPLVESLVEIFGFLLPSFKFLFELAESIFSVIWLVVDTSFDIVGNVLELLFSPFWFVLNVVWSIATCILYPLFWVLWEFLYAPVRLVLVIFGFVASICSHICNMLGNTWQFVSRIFQFAASSEATVSASEVSMWRTLWNDLFSQIFRALKSILYGFVAFFTACNRHRLSIYNHVQEFVQRLYGTCQRSRQDDSRDNGKTCLPLNLTEEKKNV

SEQ ID NO: 47680 - protein, 192 aa, Glycine max
  Clone ID: LIB3138-057-D6_FLI.pep
YYEEASRIRDSLKCFEDEIPVLRLRRLLKEAVADERFQDAARYRDELKEIAPHSLLKCSSDATTLGIRVQVKSAYIEGRSQPSEEVYSFEYRIKITNNTNRPVQLLRRHWIISDANGKTENIWGIGVVGEQPAIFPRSSFEFSSTCPLSTQNGRMEGDFEMIHVDRVGSRAFNVAIAPFSLSLLGDGDGETT

SEQ ID NO: 47681 - protein, 263 aa, Glycine max
  Clone ID: LIB3138-072-E12_FLI.pep
LNQASTDEGKFLLSARKCRRATHTDYIISLNCDDVSRGSSTYIGKLRSNFLGTKFTVYDAHPPIYGAKVTKSRSSRLVSLKQVSPRVPAGNYPIAHVSYDLNVLGSRGPRIMQCVMDAIPASAVEPGGVAPTQTQFLHSRIDTSPSIPFFRSKSTRMDNLPTVPLTCQNEGTLVLRNKSPRWHEHLQCWCLNFNGRVTVASVKNFQLVASPKNGVSEQAQENVILQFGKVGKDVFTMDYQYPISAFQAFAICLSSFDTKIACE

SEQ ID NO: 47682 - protein, 92 aa, Zea mays
  Clone ID: 700106577_FLI.pep
TAISEKRTTDLYLLLSHRLMHCGTASSTKHTASSRKPLPSRRGWAIDDIPAHYPGPSAATVLLGAIGIATVVSVHDQIPKTHAQFLLSHLLL

SEQ ID NO: 47683 - protein, 362 aa, Zea mays
  Clone ID: 700209987_FLI.pep
LSQQMSSRPRSLAPVPLYLACVRREGSGWLVGSRKRLLVLFLLPRLMSMGHCSEQRTGFEVTKDWNGADQFAIRSPRGASVRVCLHGGQVVSWRNHRGEELLFSSSKAIFKPPRATRGGIPICFPQFGNCGTLEQHGFARNKIWTIDDEAPPLNYGDNNSNKASVDLLLKPSEDDLKCWPHCFELRLRVSLSMDGDLSLISRVRNVNGKPFSFAFAYHTYLSVSDISEVRIEGLETLDYLDNLSQRERFTEQGDAITFESEVDRVYVGCPGVIAVLDHGKKRTFIVRKEGLPDIVVWNPWEKKSKTMADFGDDEYKQMLCVDAAAVERAITLKPGEEWTGKLELSAVASTNCSDHLDRPGRL

SEQ ID NO: 47684 - protein, 200 aa, Zea mays
  Clone ID: 700438766_FLI.pep
YDLIAKEQQEAGRQTDRRDDPANVNAKLVPPHTSLAAHRMGSLLAHFLLRSMPALRATASRPCFSMVLRALVERRSLTKRLPASHHSFLYCRFTNCCFFVLWLENDTLFARFVFLSVNGHTRRATVGWSCCLLGRRATAVGVATPAERERPASCDVAKLNEAEEGEEALRAAAGMAKEELSSVAVAMADGWTEGTERFVG

SEQ ID NO: 47685 - protein, 165 aa, Zea mays; identical to SEQ ID NO: 44696
  Clone ID: 700439907_FLI.pep

SEQ ID NO: 47686 - protein, 264 aa, Zea mays
  Clone ID: 700617459_FLI.pep
NSDLCGPPSESECGVYRRRRRRQRVQRLALLIGVVAAAALLVALFCCCCVVSLMGWRRRFVESRDGVKKRRRSPGRGSGSSGTSTENGVSQPKLIMFNSRITYADTVEATRQFDEENVLSRGRHGLVFKACYSDGTVLAILRLPSRSADGAVVIDEGSFRKEAESLGKVKHRNLTVLRGYYAGPPPDVRLLVYDYMPNGNLATLLQEASHRDGHILNWPMRHLIALGVSRGLAFLHQSGVVHGDVKPQNILFDADFEPHLSDFG

SEQ ID NO: 47687 - protein, 96 aa, Zea mays
  Clone ID: 701163213_FLI.pep
HPHAAATSVTLNCTEAPLECLPLCPGGGKACSEYALPPPPPIPVIPRAPVADRHAPVRLLLIISLLSAFLFLSLALSTLLLYRRRRLILRRRRRLA

SEQ ID NO: 47688 - protein, 175 aa, Zea mays
  Clone ID: 700930143_FLI.pep
LASCLLHKFFARPPSTRPSNNVKLVGAGGGQFELLLVFRGPVLGFQLVVGGAEQLAHRLQRPAAGLREEGEEEHPREHRDAGVEEEGAADGDGLGQRDEGHGDHAAGQAVGGHAQRAAHRAHMQREYLRAVHPRDGAEADGEEGHVGHGRRDGHADGPWDLFVLVVPDDGEPGGE

SEQ ID NO: 47689 - protein, 102 aa, Zea mays
  Clone ID: 701174039_FLI.pep
PSRPRVAMKQRGDDGADGAAAFAGCLDCRSSDHCFLREATPPPPPTVTTLLPPSVYNSFDHRFSELFVFWNQGAHLHELDLLATRPYRYKLSSMASDDTAEM

SEQ ID NO: 47690 - protein, 319 aa, Glycine max
  Clone ID: LIB3139-080-B12_FLI.pep
TKKIILVVYDKKILPFFSFAMEVRNKPSIDDYVNLWNDWESSVEQLSYDKCYKFWMFMLKHFSTETKKLSNCLVKLPATSGNNEIVLLDKNDVFIPDNLHLKKLFQQEKVFVWYPQNLAPLSRCELFDVYRKIGARNISESICMEEPSLLNGVELKQVDPGNICNVKVLAKLILSFLSSSSLKMEPNKRREAVQGLLNLSFFETKEAVNVSYSLSLSSGAIITKKADRMVRWQGQSSKFFTQTNWQSGNASLIKYATYFSEAISEGVLRENHDHVPALSELITLAFVLKFNNETIEFLMESKNLHCEDEEFLSSAFPSN

SEQ ID NO: 47691 - protein, 180 aa, Glycine max
  Clone ID: LIB3139-082-D4_FLI.pep
KILFCVIGSKMDQIFNKVGSYWFNQKASSQLNSVGDDINSMTNSIEGGTKWLVNKIKGKMQKALPELLKEYDLPIGIFPRDATNYEFNEETGKLVVFIPQVCEVGYKDSSVLRFFTTVTGYMEKGKLADIEGMKTKVLIWVNVTTILSEGSKLYVTAGMKKRRSREAYEVTRDGVCVDKF

SEQ ID NO: 47692 - protein, 303 aa, Glycine max
  Clone ID: LIB3139-087-H10_FLI.pep
VHPHPPHVPKPHPKPPVHPHPPYVPKPPVVPVTPPYVPKPPIVNPPYVPKPPVVPVTPPYIPKPPVVTPPYVPKPPVVPVTPPYVPKPPVVPVTPPYVPKPPIVKPPIVYPPVVPKPPIVTPPYVPKPPIVKPPIVYPPVVPKPPIVTPPYVPKPPIVKPPIVYPPVVPTPPIVYPPVVPTPPVVTPPVVTPPSPPSETPCPPPPPPVVPYPPPAQPTCPIDTLKLGACVDVLGGLIHIGIGSSAQQTCCPVLAGLVDLDAAVCLCTTIRAKILNINIIIPIALQLLIDCGKTPPDGFKCADS

SEQ ID NO: 47693 - protein, 353 aa, Glycine max
  Clone ID: LIB3139-099-E6_FLI.pep
PIVMSALNLNAWPRPRSRSRSRSPTFHAVNKLPFFTVTKRRAFSLSAVLTVETEEKPPIFDFKNYMLSKASAVNKALDDSVSLREPKKIHEAMRYSLLAGGKRVRPVLCVAACELVGGHEATAMPAACALEMIHTMSLIHDDLPCMDNDDLRRGKPTNHTVFGEDVAVLAGDALLAFAFEHIAASTRGASAPRILRAIGELARSIGSEGLVAGQVVDINSEGLADVGLERLEFIHVHKTAALLEGAVVLGAILGGGTDDEVEKLRKFARYIGLLFQVVDDILDVTKSSQELGKTAGKDLVADKVTYPKLLGIEKSKEFAAKLNKDAQDQLAGFDPVKAAPLIALANYIAYRQN

SEQ ID NO: 47694 - protein, 208 aa, Zea mays
  Clone ID: 700048816_FLI.pep
IPMASRRRTLLKVIILGDSGVGKTSLMNQYVNKKFSNQYKATIGADFLTKEVQFEDRLFTLQIWDTAGQERFQSLGVAFYRGADCCVLVYDVNSMKSFDNLNNWREEFLIQASPSDPDNFPFVLLGNKVDVDGGNSRVVSEKKAKAWCASKGNIPYFETSAKDGTNVEDAFQCIVKNALKNEPEEELYVPDTVDVVGGNRAQRSSGCC

SEQ ID NO: 47695 - protein, 329 aa, Zea mays
  Clone ID: 700048822_FLI.pep
PPSVPRPPLSSPPARLSLPLSPSLLAAMNNLLTDSFELPRRDSSRDADIEMGMHQADASDNLKDFLKKVDAIESIIAKLSNLLNKLQTANEESKAVTKASSMKAIKQRMEKDIDEVGKIARQAKTKVDELERDNLSNRQKPGCGKGSAVDRSREQTTGAVKKKLKERMDDFQTLREAIRQEYREVVERRVFTVTGNRPDEETIDDLIETEKSEQIFKDAIQHQGRGQILDTVAEIQERHDAVRDLERKLLELQQIFMDMAVLVEAQGDMINNIETHVSNATNHIQQGVSALQNAKKLQKNSRKWMCYAIILLLVIVAVIVVAVIQPWKK

SEQ ID NO: 47696 - protein, 153 aa, Zea mays
  Clone ID: 700048994_FLI.pep
TMVKAVAVLGSSDGVKGTIFFTQEGDGPTAVTGSVSGLKPGLHGFHVHALGDTTNGCMSTGPHYNPASKEHGAPEDENRHAGDLGNVTAGADGVANINVTDSQIPLTGPNSIIGRAVVVHTDPDDLGKGGHELSKSTGNAGGRVACGIIGLQG

SEQ ID NO: 47697 - protein, 468 aa, Zea mays
  Clone ID: 700049102_FLI.pep
TKRSCYFHSSDRRLIPIYKHGAKLENSLYSRQIKHSTTGYTCRQTTEQKIKQQKYEAYRDGMGCDAMQCNAMQGPLVIWIWRPRFTPGSHDDLGLEDAGFDLLVREHDAAVAVDLVADVDVLAEDGHVLDARPLADGGVPADDAAGDAGVLLDARGAHDGAAGQAHPGLHHAAWPDRDVGPDEAAVPDDRGLVHQHVAQDVRARREPGGRLLPQRVQVQAQARDVVPRLPDVHPETRENHGEEGPVRRDAREHLLLDGRRLQLDAAEHGRVEQVDAGVDLVAHERLGLLHEPLHLAGALLHDHHAVLGRLVDLGHHDRGLAAVGPVELNELGERVLADHVAVEHEERVAGSVGELVAGQGQRACGPEGLRLLRAGDLDAKLALEVLEKVEHDLRLVIDGQDNLCNTNFLQSLDLVQDHGLVAEIHERLGHAERERAQAGAEASDENEGLHGCSSSPPPNSAPTPPGEA

SEQ ID NO: 47698 - protein, 256 aa, Zea mays
  Clone ID: 700049109_FLI.pep
EHTDVAVLLDNEAIYDICRRSLDIERPTYTNLNRLVSQVISSLTASLRFDGALNVDVNEFQTNLVPYPRIHFMLSSYAPVISAEKAYHEQLSVAEITNSAFEPSSMMAKCDPRHGKYMACCLMYRGDVVPKDVNAAVATIKTKRTIQFVDWCPTGFKCGINYQPPSVVPGGDLAKVQRAVCMISNSTSVVEVFSRIDHKFDLMYAKRAFVHWYVGEGMEEGEFSEAREDLAALEKDYEEVGAEFDEGEDGDEGDEY

SEQ ID NO: 47699 - protein, 251 aa, Zea mays
  Clone ID: 700049430_FLI.pep
LVGQKSRVCNTSSKKSSNCSVHGAANLAEAKTFISLDTKTQNRGARQPARRGPSHEQVGPGRLEGGPELPGGRPHLAVHERELDRRVVELLRVVPLAQLEVDRRSLDDLDAGGPHAVARGHLVVHLLHGAVQGRVAVLLVHVVVPRPALVPQPDAVVLDGGRVALEDLVDGEHLAIALLHLLQLSQEVPELRLGANLVSGPELHAVDLGVLIGRGRQRATHHLVLMEPVGDHFGVLAWPEERRRSPKTEQG

SEQ ID NO: 47700 - protein, 371 aa, Zea mays
  Clone ID: 700049476_FLI.pep
AWHPKAVKIREAGGTKRRASDPTSSSARAARRRREMGADYYKVLGVDRGASDDDLKKAYRKLAMRWHPDKNSTNKKEAETKFKEISVAYEVLSDPKKRAIYDQLGEEGLKGQPPPGAGGPGTSPFFPGGAHSTAHHFNPRSADDIFKEFFGSPGMGGMRTEPGFQRSMFGNDIFSSRFRAEGSTSMQQPLRKAAAIENPLPVGLADLYKGVTKKMKISRETIDASGRISNTEDILTIQVKAGWKKGTRITFPDKGNEAPNMKPADIVFIIDEKPHDVFTREGNDLVVTEKISLVEALTGYTARVTTLDGRSLSLHINSIIHPKYEEVMPGEGMPVPKDPTKKGNLRIKFNIMFPSRLTSDQKAGIKRLLGS

SEQ ID NO: 47701 - protein, 144 aa, Zea mays
  Clone ID: 700049763_FLI.pep
LHHHLLPRRHPKREIVEWPWSGNNDGGTDRPDADAAGGDAAVGRRRPGGAGRDAGRQLLARQPRHGRRVVRAGAPGLAPRAAPARRPAPACAAIAPPAGNPGNRPRHGRVRRKLLISDSLPNARAPATFDESSPSHGAGVQCGG

SEQ ID NO: 47702 - protein, 157 aa, Zea mays
  Clone ID: 700049810_FLI.pep
QQQRFGGSTLSTPSRLLKKHGASIFSRGLVTASGREGLFTAGYLGLAPSITRNLIEEREFSNTNARFIGALLAGLLFGTLSHPLDTIKTCMQGDVEKEKYTSLRDTASTLYREGGLRRFFRGWGWRTSRFIGGIFIINVGKSLFGPLLFPQHFRQQK

SEQ ID NO: 47703 - protein, 427 aa, Zea mays
  Clone ID: 700049821_FLI.pep
QLRRHRPDAPALTAHKPRAAAAASCPGRILRAARAALIFPAPTRRTTRALAMSKKVGRAKKAAGGGELSRFLESHLQTISDTFQMMAESAPGALERTEWSEVVKLGDQVSRQATVAGMLWSGDLPDVETLKENIVAYFNILQGFLLVCHGSMVGAGPTLHKSIFGSAKDVVDSSFSLFKHAVSAYESRSSDRNTTIPQVTGTVWEACAALKKVPASNCIAIGRAMTRIGVCLKDVLREMNELPIGGSGDSTAEKSSNGVVDTTSCSDRDERSDLDLDDDDDDEFTEEEVAVAKLVINVVSDSLVVVKEAIRFITGLLRSSGNKDKDGANEDRVEPMEKLLSHCKEIADQVNDLGASVYPPQDSSEMELAIKRLYNGINGMRKEIGNLGGAPESTFAALEGFENCLGSLRARLADDVVNEMEGLNISH

SEQ ID NO: 47704 - protein, 231 aa, Zea mays
  Clone ID: 700049917_FLI.pep
AIEASQAELLTKLSLLCALWSRRTLLCSNGRQRIGDAVPGREPSDVRHGQRLRWQLPHADPVDADPDAGLVRQVPPRRAQAGRVRQCSGTDQGQGGRAAHGAMLPAAEGTRRPRGRRVPLHRHQGRGPRNQAQPTGRPQPHPQPLRQESAHRIQVPLSYKPRGACRRARSSACHSSQCCLLIMCYVRTCLLASSATSACMSTCIRTNTRSSYVCRAGRFDEQLSLLGVSFM

SEQ ID NO: 47705 - protein, 157 aa, Zea mays
  Clone ID: 700050004_FLI.pep
SIVWSFVPGRHVIITTMASGRRKSGIPALGWWLMAVGTIRSAIVWSCLFSSASLCLAVYPEMTGVQERAMAAWTLLSCTLSFLCAFNMESKPLYVATFMSFVYVAGYLLVECFFYHSVHAASIAPYCFIAGTSMVWMLLQWNSHGRGRRPREASKEP

SEQ ID NO: 47706 - protein, 232 aa, Zea mays
  Clone ID: 700050012_FLI.pep
EVPWYLDDGTGRVYMVGARSAAGLILTVASEVFEESGRTLVRGTLDYLQGLKMLGVKRTERVLPTGISLTVVGEAIKDDVGTIRIQRPHKGPFYVSPKSIDQLIMNLGKWAKLYRLASMGFATFGAFLLAKRAIQHFLERKRRHELQKRVLNAAAQRQAREAEGSIGSSDTEPNSKKDQLVLDICVICLEQEYNAVFVPCGHMCCCMACSSHLTNCPLCRRRIDQAVRTFRH

SEQ ID NO: 47707 - protein, 106 aa, Zea mays; identical to SEQ ID NO: 38992
  Clone ID: 700050212_FLI.pep

SEQ ID NO: 47708 - protein, 227 aa, Zea mays
  Clone ID: 700050275_FLI.pep
GNSHNTAPSKSSKNKGKAGISGKTGRNGHVTGPCNNLRTNEEKTGISGKFDSGDNSCLVPFSEVINVPTRLPHNFEMRKMESTRSPARLHNKGGFLSATVQIKESTLLPTGKPCWQSEMSHPTTNEVSTSAQATTWIDAGACAEEQEPTPWVDIGVSDYQPFLDVIDDMCGLEWRLQRLKENMLSSSIDGQTAASESDKRNQTVVLVPTAELKEKLPHDGLFGHYCP

SEQ ID NO: 47709 - protein, 185 aa, Zea mays
  Clone ID: 700050382_FLI.pep
KRTNSIKLQIALLHPSAATGAGREIRLRALAADAAGELDVFGHDGDALCVDGAEVGVLEQADEVGLGGFLEGQDGVALEPQIRLEVLSDLTDQALEGQLPDQQLRALLVLADLAQRHRPGPVPVGLLHAAGRRRRLPRRLGGELLARGLASGGLAGGLLRTSHLLLSLAARFLPCLDGTNLRATM

SEQ ID NO: 47710 - protein, 229 aa, Zea mays
  Clone ID: 700050488_FLI.pep
AIRLRLVAVQSALTAALPPLTCPRQCRSKPYRTYRHATAGVACFFCRSLAPSLPPMETSLRLRSGGGLRIHAKEKLPLGHSSLLQAHAELDLHTSPAGVTTPSYLALFVRHFYSQLSANLGAGVQLHNGDDLAYSFRAKKAVLFKPDNGFLGLNLKGRLLTDKELKPTKTTGSVELAWTILDLKQGQDVRLKVGYELCDKDRRTGAVIGTGRCRSTAPRLYILDSLRLT

SEQ ID NO: 47711 - protein, 158 aa, Zea mays
  Clone ID: 700051635_FLI.pep
DLLEASFQEMMHSSSIAAKTVATTSFPSSKASFNLSPSSPSGTFKSSLVLPSSFNKLTKPSSMLMTWKSRLSTLGTIMLWVDGQISSYFFPVKISIPTIWTLACPCFPVLEVEVSTTLQGLFFNTAYPFFLMAEHCIGKQVDAPDPTDSNSSSAIMYY

SEQ ID NO: 47712 - protein, 213 aa, Zea mays
  Clone ID: 700051754_FLI.pep
SVLCLSNLLLGRRVRRRREGKMYTARKKIQKEKGLEPSEFEDSVAQAFFDLENGNQELKSDLKDLYINNAIQMDVTGSRKAVVIHVPYRLRKAFRKIHVRLVRELEKKFSGKDVVIVATRRIVRPPKKGSAVLRPRTRTLTAVHDGILEDVVYPAEIVGKRVRYRLDGSKIIKIFLDPKERNNTEYKLETCTAVYRRLCGKDVVFEYPMTENA

SEQ ID NO: 47713 - protein, 256 aa, Zea mays
  Clone ID: LIB4148-001-D12_FLI.pep
GLAPHPPPHQPSAMAMAARLVSRSRQLHSVQAAFANGGATQVRSFAKDAAPADRPPVGGDDLLKGIFFEVKKKFETALGVLKKEKITIDPDDPAAVSQYAQVMKTVREKADLLSDSQRIKYTIETFTKGIPDARTYLNTLQQLRIKSGLIDHIGIEPLMMEALEKIEKDIKKPLLRSDKKNMATLMAEFDKINAKLGIRKEDLPKIEKELELEIAKSELTELKKECVEAMETQLKREEFQDEEMPDVRKLDIRNFL

SEQ ID NO: 47714 - protein, 487 aa, Zea mays
  Clone ID: LIB4148-001-H3_FLI.pep
RRGAETGVFVLAYLRDSKLLPFPTAAAAAPPHSVDTMRECISIHIGQAGIQVGNACWELYCLEHGIQADGQMPGDKTIGGGDDAFNTFFSETGAGKHVPRAVFVDLEPTVIDEVRTGTYRQLFHPEQLISGKEDAANNFARGHYTIGKEIVDLCLDRIRKLADNCTGLQGFLVFNAVGGGTGSGLGSLLLERLSVDYGKKSKLGFTVYPSPQVSTSVVEPYNSVLSTHSLLEHTDVAILLDNEAIYDICRRSLDIERPTYTNLNRLVSQVISSLTASLRFDGALNVDVNEFQTNLVPYPRIHFMLSSYAPVISAEKAYHEQLSVAEITNSAFEPSSMMAKCDPRHGKYMACCLMYRGDVVPKDVNAAVATIKTKRTIQFVDWCPTGFKCGINYQPPSVVPGGDLAKVQRAVCMISNSTSVVEVFSRIDHKFDLMYAKRAFVHWYVGEGMEEGEFSEAREDLAALEKDYEEVGAEFDEGEEGDDGDEY

SEQ ID NO: 47715 - protein, 295 aa, Zea mays
  Clone ID: LIB4148-002-E10_FLI.pep
APKATLRRRGKREDKKRTCLPAPTPSLASRVPPSVQPGGTVDGAGIVLLLRSYHCSEKMVASAFTVDLDKPLVFQVGHLEEQYQEWVHQPIVCKEGPRFFENDILEFLTRTKWWAVPLIWLPIVCWCLSTSIKMGNTITDVAMMIGFGIFLWTLIEYVLHRFLFHIKTKSYWGNTAHYLLHGCHHKHPMDGLRLVFPPAAAAILCFPFWNMIKLFSTPSTTPGLFGGGLLGYVIYDCTHYYLHHGQPSSDPAKYLKKYHLNHHFRIQTKGFGITSTLWDHVFGTLPSTKTVDKSI

SEQ ID NO: 47716 - protein, 116 aa, Zea mays
  Clone ID: LIB4148-021-B1_FLI.pep
EDFFKRIIGLLAETSEICFSGIKDIKCITCPHKPEGSMFVMVKLNLYLLESIHDDIDFCCKLAKEESVILCPGSVLGMENWIRITFAIDSSSLLDGLERLKSFCQRHKKKNLLNGH

SEQ ID NO: 47717 - protein, 383 aa, Zea mays
  Clone ID: LIB4148-021-G2_FLI.pep
PAMATAAAASRVAVSAPVFGSDGGARSSGIKGNNNVSFGSKSWVGGTLAWESSCSVRPRRASKVLCMSVQQASRSKVSVAPLHLESAKEPPLNTYKPKEPFTATIVSVESLVGPKAPGETCHIVIDHGGNVPYWEGQSYGVIPPGENPKKPGAPQNVRLYSIASTRYGDNFDGRTGSLCVRRAVYYDPETGKEDPSKNGVCSNFLCNSKPGDKIQLTGPSGKIMLLPEEDPNATHIMIATGTGVAPFRGYLRRMFMEDVPNYRFGGLAWLFLGVANSDSLLYDEEFTSYLKQYPDNFRYDKALSREQKNRSGGKMYVQDKIEEYSDEIFKLLDGGAHIYFCGLKGMMPGIQDTLKKVAERRGESWDQKLAQLKKNKQWHVEVY

SEQ ID NO: 47718 - protein, 154 aa, Zea mays
  Clone ID: LIB4148-023-H7_FLI.pep
HIVTREFPQVVIQLSLNHNDMIHHLSLDGWMEYIVSQIIEASTKHRSCHKNLHLPLFIIKVILSPLRSIRPSDFLVFFLTLISSASSRTKFMYSSNPIMRPSIRRSFCSKSQIWMRALLCRNRKMRLMGWVMIRWTLVDAMAAAAGTSPPPRNV

SEQ ID NO: 47719 - protein, 193 aa, Zea mays
  Clone ID: LIB4148-024-A2_FLI.pep
NAKEEKKMKGSSEPGETSKQAPLGSRGVSKGVSVLDLILRFIAIIGTLASAIAMGTTNETLPFFTQFIRFKAQYSDLPTLTFFVVANSIVCAYLTLSLPLSIVHIIRSRAKYSRLLLVVLDAAMLALVTAGASAAAAIVYLAHKGNVRANWLAICQQFDSFCERISGSLIGSFGAMVMLVLLLLLSAIALARR

SEQ ID NO: 47720 - protein, 307 aa, Zea mays
  Clone ID: LIB4074-001-E12_FLI.pep
RRRAMAGALLSSPHTLPSPTSQSPFRPRSRGPLHAGAARVLPPRRRAFVLASCSREPAARNRGLEVERRRLLMSGLVSSFAIMLPISEAYAVMETDEDVKMNTQIDEINAYSFLYPVELPGKKFAFKWVESRKPERYSSAAPLSPDARQRIVSERVDMIHNVVISVSIGPPNSRFLPSKDKSSWDPKHVADCILSDRSTMKVTTGQRMTESSVLDAHVAEVDGEPYWYYEYLVRKSPTKSAPEPNLFRHNVACTAERDGYLYSLNASTLSKQWESMGPFLQKTVASFRLLPGTENYVPPYKDPWRFW

SEQ ID NO: 47721 - protein, 206 aa, Zea mays
  Clone ID: LIB4074-002-C3_FLI.pep
YIGLSIKQGSNQYADVNLNDSSVRQVKFYQYIVLMLNSPPLWMLATPREKKIREERAPALLELLDEGEVVEHLLDLLVPGVADEPAAGLEGGDERGGLAAGVGAEVAERAELELGEAVAAQRLADLAHGVGVLVAAEALHVLQRLLEHLRHLRRRVRLRRRVLLDLLVLVLQDDRHLAVHQALGLEELFADLELRGVLLLLARHPW

SEQ ID NO: 47722 - protein, 229 aa, Zea mays
  Clone ID: LIB4074-004-H4_FLI.pep
QHSSMGRSPCCEKAHTNKGAWTKEEDQRLVAYIKAHGEGCWRSLPKAAGLLRCGKSCRLRWINYLRPDLKRGNFTQEEDDVIIKLHQVLGNKWSLIAAQLPGRTDNEIKNYWNTHIKRKLIARGIDPRTHQSASAAAVAPAAAAAAQSSYRHHGDDEAVARRSCSRDSGCIAAHSSDDDDSTSGSVPHQHAVGGIDLNLSLSPPTTSQPSSPAAAKGVVASGYGQGSES

SEQ ID NO: 47723 - protein, 280 aa, Zea mays
  Clone ID: LIB4074-005-G4_FLI.pep
VKAKIQDKEGIPPDQQRLIFAGKQLEDGRTLADYNIQKESTLHLVLRLRGGMQIFVKTLTGKTITLEVESSDTIDNVKAKIQDKEGIPPDQQRLIFAGKQLEDGRTLADYNIQKESTLHLVLRLRGGMQIFVKTLTGKTITLEVESSDTIDNVKAKIQDKEGIPPDQQRLIFAGKQLEDGRTLADYNIQKESTLHLVLRLRGGMQIFVKTLTGKTITLEVESSDTIDNVKAKIQDKEGIPPDQQRLIFAGKQLEDGRTLADYNIQKESTLHLVLRLRGGQ

SEQ ID NO: 47724 - protein, 344 aa, Zea mays
  Clone ID: LIB4074-007-E1_FLI.pep
AAASPTASPSLSSPRSLRLLPAPPRAEQSAALSGAGMADAKQQQQQPQQAAAAATGVWKTVKPFVNGGASGMLATCVIQPIDMVKVRIQLGEGSAGQVTRNMLANEGVRSFYKGLSAGLLRQATYTTARLGSFRVLTNKAVEKNEGKPLPLIQKAFIGLTAGAIGACFGSPADLALIRMQADSTLPAAQRRNYKNAFHALYRISADEGVLALWKGAGPTVVRAMALNMGMLASYDQSVELFRDKFGAGEISTVVGASAVSGFFASACSLPFDYVKTQIQKMQPDANGKYPYTGSLDCAVKTFKSGGPFKFYTGFPVYCVRIAPHVMMTWIFLNQIQKFEKKIGI

SEQ ID NO: 47725 - protein, 130 aa, Zea mays
  Clone ID: LIB4074-010-F4_FLI.pep
GHPGPRLLQPSTEFASSSVPAPNHAPQLPISSGHGSGVRPYKCGASFTIAHQVRNPLLVSQHHHRLGAVLCAQPPPSIRAWGDHPAGACHLEARRDHQEQVHQSRGPGKPTEFVASAVGTLNRSSEVTRI

SEQ ID NO: 47726 - protein, 134 aa, Zea mays
  Clone ID: LIB4074-013-C3_FLI.pep
GSCNHQVPQAVYFEDAFHKQFCERSGHPHTDSHGRMLCKLSGETPEAKHGVDTGCCCGCKDWEVAWRALAVQGYPCSICLHVKRPEVPWQGEGRDRFSKRCWCEIAVGKTDCFMRGYVRASCLPPKLLGGPLVS

SEQ ID NO: 47727 - protein, 176 aa, Zea mays
  Clone ID: LIB4074-014-A2_FLI.pep
LGLSGPHRSVPPVPVVVAVAAAAVCTTVSPTAAVASTTTAVASTATAVAASITAPATVSATAASTAAAGLGLVNGDVAAVELLAVHALDGAAHRVLRGEGDEAEAAGPLRLPIQDDLRLEDLAVGAEGVVEGVVVGGPGEAANEATVLNVRRRHLFPLAHEPEPEHEPVGEEKPTH

SEQ ID NO: 47728 - protein, 164 aa, Zea mays
  Clone ID: LIB4074-014-A8_FLI.pep
AMGRGKFKGKPTGRRNFSTPEEIAAGTSGRPRTFKKKEEEEEEEEEREESEEEESEDESDDKPKHKGTEGIIQIENPNLVKVKNIKAKEVDLGKTTELSRREREELEKQKAHERYMKLQEQGKTEQARKDLERLALIRQQRADAAKKRDEEKAAKEQRKSEARK

SEQ ID NO: 47729 - protein, 396 aa, Zea mays
  Clone ID: LIB4074-015-G1_FLI.pep
CHSFVSHHFIHSFHYYLSYCMQCKKICWQSRRSGDDTDKYKWSRKGECSLGSGGVSLHLWVVEVDADHGLPEPRADVGEDGGVAVVGDRLDDGAGAARGVAALEDAGADEDAVAAELHHERGVGGRGHAPRRELHDGEPPQLLGLHDQVVGRGDALGVGEHLVVVHAAERADGARDGAHVAHRLHDVARAGLPLGADHGGALADPAQRLAKVAAAAHEGHAEVVLVDVVGVVGRGQHLALVHVVHAHGLQDLRLHEVPDAGLGHDGDGHGALDVTDQARVRHARHATLRADVGGDTLQRHHGAGAGLLGQAGLLRGHHVHDHTAAEHLRQAHLHGESRRLGLLRRLQQRRAVVAVHRHHATAVGRHCLVGGFDRRGVPVLDGGRLTLSIYPLGSMN

SEQ ID NO: 47730 - protein, 110 aa, Zea mays
  Clone ID: LIB4074-017-B1_FLI.pep
SLPSECLLLLRRRRRRFPRLRPPKPCRRTRPSGSRRSWPRRCARTAPSPTGSACAPTTPSGTTPSAGTGVAPNSDSERWKKCWLKTPRGYRALQARKLLFNFFCLCYLSL

SEQ ID NO: 47731 - protein, 200 aa, Zea mays
  Clone ID: LIB4074-017-C7_FLI.pep
AHETAAAALVLAPDLLDSADLFLAHGRHHRQEEVLSIIISALDLAFQSFISRKPEVILSVATVSQKAHKSIFSDVNQLILSAINMGNITVVRRRNNILKLLSSENVNANKVALGMAMLPSLGSGDLNNLAGTSLDDDVAVLADGAGLLRVGLGGAGVGLGLELVLLVRHLRESYRDPVEKYERRFAGRILDREARALRFG

SEQ ID NO: 47732 - protein, 143 aa, Zea mays
  Clone ID: LIB4074-023-C4_FLI.pep
PSLPLPSSFLSLRRLRGGLDHILVGATMAGKLIANLIVMGSTIIGRAMLQAYRKALDNANKTGVAHEAINNIRRVSKTMTEQEARQILGVSENSTWEEIVQRYDTLFERNGKSGSFYLQSKVHRAKECLETVYQKNKQDEPPN

SEQ ID NO: 47733 - protein, 190 aa, Zea mays
  Clone ID: LIB4073-001-B9_FLI.pep
SKQPKQQPQGDRYRSRRCSDRRPSYSSCWAASDRRSTACLGLGSELESGEGRQRSAGGGHGVDTVALVAAQEALGPHAFRPEQEEGHLHPVRGRQVVPLRGRADPLVHPRRVLPPAAAAAPQALTPSDHRPSAHVEHGAVTYRRATARASRSISRRLIVALVRPTQRNCRCMYIKIFQWFTFFSRDTIGG

SEQ ID NO: 47734 - protein, 216 aa, Zea mays
  Clone ID: LIB4073-001-D1_FLI.pep
LPHFSSPAIRARTRREEKGSPDHQGAASRSRGGAEMGLTFTKLFSRLFAKKEMRILMVGLDAAGKTTILYKLKLGEIVTTIPTIGFNVETVEYKNISFTVWDVGGQDKIRPLWRHYFQNTQGLIFVVDSNDRERVVEARDELHRMLNEDELRDAVLLVFANKQDLPNAMNAAEITDKLGLHSLRQRHWYIQSTCATSGEGLYEGLDWLSNNIANKA

SEQ ID NO: 47735 - protein, 134 aa, Zea mays
  Clone ID: LIB4073-002-B5_FLI.pep
PPPPSLLFVEMGGKCPHRKVKKRRLSHKTARRGKFLLKADDAVYDELVKLADQGKDAEGKELPVDEDLPGMGQFYCLHCDRYFASESVKDDHYRSKRHKKRVKVMSGPAPHTQLDAELAAGMGKPDNGLKLMSM

SEQ ID NO: 47736 - protein, 137 aa, Zea mays
  Clone ID: LIB4073-002-E7_FLI.pep
GGPLLTIGDLLSDLAVDGGDDPLVGVGDASAPSSPSATQQAGKADPSDLSRLFEEHYNNLMKALEEKDPSWPSLMLKLCAALKTADKLVSCANMNAEQLLEKVKALEGVLERSDHAVAEIVEALQKSGLAKDRQGSQ

SEQ ID NO: 47737 - protein, 168 aa, Zea mays
  Clone ID: LIB4073-003-D2_FLI.pep
ALYCACAYRRALLLPRPVGRHGGSAGGGGRAGHGGLAGAPGGRVLPADGGRRRPRQEEQQQGRWSQRRQRQRQPVERQRQEAEADDEEEGCRSSRQWVLLAEDVLVGGGRRGPRQRPEGAAVQGPLPASGRRRRGRSASAGLADQRDMCCIIILLLYQIQIRRNLCRY

SEQ ID NO: 47738 - protein, 89 aa, Zea mays
  Clone ID: LIB4073-004-A1_FLI.pep
SMELHLILCVCRSYANGWGESSGGPPGCPCRNSRSKRCLEKALLWCWKDKRFFRRRQSIWASPTDTPMLKTLSRPLLETCRLATVSNLI

SEQ ID NO: 47739 - protein, 147 aa, Zea mays
  Clone ID: LIB4073-004-B1_FLI.pep
QHFSNRREWNHNQFERGEFLIGAEVDLRRGCLGRRRGAGVAGDEVVVGVPAAGGLADLRVPGELRVEALEGPEAVGAQREVPRRLGALAPLLHLVDMLPPNLVALVRVLHQTEDQVLRELHDETHRRRRRSPSPLLLPGELGICWCA

SEQ ID NO: 47740 - protein, 134 aa, Zea mays
  Clone ID: LIB4073-004-B4_FLI.pep
LTKILCSLGTSNSQPCCRQLPVPAQRSLCDELPWYIHIPYEDLKTAGSVDICHSLSNTNNRLLPAVVYSGVLTIQTLLMDIYFFLDRKFILLILRESALVGHPHEWSLFVSFSMVIFFLWLIWTLVIVPVPSGR

SEQ ID NO: 47741 - protein, 203 aa, Zea mays
  Clone ID: LIB4073-004-B7_FLI.pep
YCRGVPDPKIRIYDVGMKKKGVDEFPFCVHLVSWEKENVSSEALEAARIACNKYMTKSAGKDAFHLRVRVHPFHVLRINKMLSCAGADRLQTGMRGAFGKPQGTCARVDIGQVLLSVRCKESNANHAEEALRRAKFKFPGRQKIIRSRKWGFTKFTRAEYLKYKSEGRIAPDGVNAKLLGVHGPLSKRAPGKAFLAENIQASA

SEQ ID NO: 47742 - protein, 188 aa, Zea mays
  Clone ID: LIB4073-005-C11_FLI.pep
ARHDRDRNGAVTLREFFADWSNMGHGKMARWMDKFASADRNGDGSLNAVEFNDFLHPEDTSQESVMLWLLKDKLSEMDHDGDGRINLEEFVAQSDLERAEAEEKFRELDADMDNYLTVEEARSVLQSLITGEFSYATSHAKFLMKADVNQDGKLSLEEMLDDYVSFYSTVYTDDHYSNEVDSDSHDEL

SEQ ID NO: 47743 - protein, 159 aa, Zea mays
  Clone ID: LIB4073-005-D7_FLI.pep
IAQCNASLISLKMRDGVQIFLHSSIASCSFSTLVQTVWQLAVISATLSSYFFLHPSSQDLESGVPKPCFLLHFNEHWTASIHTFLKRLLRAQDSLQAGSLSFFSAQRFLQVSSFSFLSAAAPAMSARTNTKSTTTIFIFFGNGDRDVVAIGIIGADRGG

SEQ ID NO: 47744 - protein, 260 aa, Zea mays
  Clone ID: LIB4073-006-D3_FLI.pep
RPNRAELIGISSHLTPPLPVPLPSAAPAAAATAGQSIRCRVRVCPAANNMGVESSECDRIKGPWSPEEDEALRRLVERRRLRRHQLHRRRAPSSAPASSSSRRLRGPAHLALAFAAGAGPPVGVVGVPPRQRAEPLPGAVPLALPVAAVYSSTRRPSFAAGGGGSLSVVVVVVVVPVQRRAGGRDAGDDPCRGAQVHVRRGPTRRLRSRRRRRGGHAAAGGGRHARRRGARRRRHTAVEEENPKPNQTKSDRINAKHCVN

SEQ ID NO: 47745 - protein, 106 aa, Zea mays
  Clone ID: LIB4073-009-H7_FLI.pep
YSSVVTAVCVCLSQPVSRVPWHHMLVVLVLMGTNNNCTGMLASCRPSRAPPGAHLLAVGVVLCVCGCSAAQQQAMPPALWARRSCATLFVLCHHPSITYNIPRLCV

SEQ ID NO: 47746 - protein, 156 aa, Zea mays
  Clone ID: LIB4073-010-B9_FLI.pep
HQTAALRSSFASSRLCRTGRDTAEPFLRCVGPGVVGGHLVGPGVLAVSRRRPLGDVAWLWFGRRGFLLIPGFAEDNREPVGRGRVVDVPFAELGYSAASVVLRHRHSFGCRRVLQPESQKILPLLVIRRARVCGAKFSPGARDEREGKDWPKPQTR

SEQ ID NO: 47747 - protein, 284 aa, Zea mays
  Clone ID: LIB4073-010-E8_FLI.pep
GWYPPGHGDVFPSLNNSGKLDILLAQGKEYVFVANSDNLGAIVDIKILNHLINNQNEYCMEVTPKTLADVKGGTLISYEGRVQLLEIAQVPDEHVNEFKSIEKFKIFNTNNLWVNLKAIKRLVEAEALKMEIIPNPKEVDGVKVLQLETAAGAAIRFFDKAIGINVPRSRFLPVKATSDLLLVQSDLYTLVDGFVIRNPARANPANPSIELGPEFKKVANFLARFKSIPSIVELDNLKVSGDVWFGSGITLKGKVTITAKSGVKLEIPDGAVLENKDVNGPEDL

SEQ ID NO: 47748 - protein, 234 aa, Zea mays
  Clone ID: LIB4073-011-G3_FLI.pep
LFVVAGDPAPAAQLSGMPVRVVDTATPSSQPSPGQETNTGHPSPPSCSLLSAGRSFAGTQNVSSLQKDEAWKVNVRIHGCDLEQGYLCGTMEALNVPLADTPVVTFWEGEIVDAKNYTFFTGKWEASPEDDIRHWSKFPSFTPLLSQIETDGGKSLDFSNYPYIFMRWKEQYFVNVGADCGLTIAGFYYVCFSCSDGSISGFYYDPNSSPFQKLELKCTNEKNSGFTFSSYELQ

SEQ ID NO: 47749 - protein, 137 aa, Zea mays
  Clone ID: LIB4073-013-H1_FLI.pep
KDFFSLLLGKAEHGAAKEALQRLHLGARNAASSLVKHGVNLIAVFHLQLIRGLLAAKPAAIKQECNGIHIHRLAVTVGVHQLLQLGGPLNAEENLIAILSLDLEIDVGAARLRGLLVLLTGSRHRRRRLRTQQRQRS

SEQ ID NO: 47750 - protein, 112 aa, Zea mays
  Clone ID: LIB4073-014-F7_FLI.pep
GGTQHGRGGSGRLVVVELEPHPVVDLVVLEGDVVLVDVVPLLDADLLGARPRLRRHQLLEVADGVVLVALHPHLLPQAVVQHHLDHLLLPLRSRSRVRFPPTQTLARLRFGV

SEQ ID NO: 47751 - protein, 128 aa, Zea mays
  Clone ID: LIB4073-015-B12_FLI.pep
MKRASPESGTVRREGTKEDGGGAEMGSPLGGWPSYNPHNFSQLVPADPSAQPSNVTPATYVATHRTDPPPNQVITTEARNILLRHFYQKSEEKLRPKRAAPDNLAPENNNKQPRGPVGDVGGQSSARG

SEQ ID NO: 47752 - protein, 324 aa, Zea mays
  Clone ID: LIB4073-015-G5_FLI.pep
SSNTQGQGVADAPASAQCRTQISGRDLFSYCSTARNGHHGDRGGQGRAGGAGQRQRQRRAEDAPLRGRTQEPAQERRPLPVHPGHERVPAGAGEHEGAPRDHRQAPMEPDDDLRRRGAVPQHAHQAHRRQEDHGDRRLHRLLPPRHRARSPGGRHDLGHGHQPRELRAGPALHREGRRRPQDRLPRGPRAPRPRRPHRRREEPRVVRLRLRGRRQGQLPQLPRPAAQAGEAGGPHRLRQHAVERLCRAPRRRPHAQVHPLLPRLRARPQQGARRRRARRDLPAPRRRRRHPLPPRQVKKNMPGHRRRRRRRIPHPNHIVDDAQH

SEQ ID NO: 47753 - protein, 248 aa, Zea mays
  Clone ID: LIB4073-016-C4_FLI.pep
TGKAALPLKRDRTRSKRFLEIQKLRESKKDYDVPTAISLMKQMSSAKFVESAEAHFRMNLDPKYNDQQLRATVNLPKGTGQSVKIAVLTQGEKIDEARAAGADIVGGEDLIEQIKGGFMEFDKLIASPDMMPKVAGLGKILGPRGLMPNPKAGTVSPNITQAIEEFKKGKVEYRVDKSGIVHIPFGKVDFPEEDLIANFMAVVRSVERNKPSGAKGIYWKTAYLCSSMGPSIKLNIKEMLDYGLDSSD

SEQ ID NO: 47754 - protein, 121 aa, Zea mays
  Clone ID: LIB4073-018-A4_FLI.pep
KPQCLFTDGSENHKKPDCSSFYYNQLRPRKGTLASWWQHVAEPTSPAYSVDLTMKFWRLMGFMTTGGPAVRGQAWNLVSVACHHSFSETVLGVEPPKAFLSETNVSHRYAMAKDPTSEPTM

SEQ ID NO: 47755 - protein, 217 aa, Zea mays
  Clone ID: LIB4073-018-H11_FLI.pep
REGGRADGQTRPDQTNDLAELAAVSDLDLLGGGSAAGSDLLDGLDDVHALDDLAKDDVLAVEPGGIDGADEELGAVGVGPGVGHGEHPGGRVVAHELLVGELVAVDGLASGPVAPGEVAALAHELRDDAVEGGALVVERLPGLPHALLARAQRAEVLGRLGHLVRVQLHHDPPRRRAADRHVEEDARVRHRDPKVARVWERGFLVGGKFFLRLLRSV

SEQ ID NO: 47756 - protein, 242 aa, Zea mays
  Clone ID: LIB4073-019-C4_FLI.pep
GTAAVALALLFLSSSTTLRLAVVVGARVIHQPYGGGGGGGPCALAVAPLGYPCEEHQDGMSWLLASPEESLPFILADRGFDVWIANNRGTRWSRRHVSLDPSSRLYWNWSWDDLVVNDLPAMVDFVNTQTGQKPHYIGHSMGTLVALAAFSEGRVVDQLKSAALLTPVAYLAHITTPIGILLAKAFVGEALSDLLGVAEFDPVAYVRRPRARISRLQSLHCRSIQIIHLSVFGSLDSCVVIS

SEQ ID NO: 47757 - protein, 153 aa, Zea mays
  Clone ID: LIB4073-020-A11_FLI.pep
KDFFSLLLGKAEHGAAKEALQRLHLGARNAASSLVKHGVNLIAVFHLQLIRGLLAAKPAAIKQECNGIHIHRLAVTVGVHQLLQLGGPLNAEENLIAILSLDLEIDVGAARLRGLLVLLTGSRHRRRRLRTQQRQRSVSRRSINRWRRRPARV

SEQ ID NO: 47758 - protein, 46 aa, Zea mays
  Clone ID: LIB4073-020-D2_FLI.pep
KVSFSDVVVICLDDMSETIGFYVTLVGFQYLVDLVSMHIISWEHYG

SEQ ID NO: 47759 - protein, 240 aa, Zea mays
  Clone ID: LIB4073-021-F5_FLI.pep
PPPQLISLPREVAADDVLLADTMAVFSDLHTADGLKTLEAHLAGKTYVSGDAITKDDIKVFAAVPSKPGAEFPNAARWYETISAAVASRFPGKPVGVNLPAGSAPAAAAPAAEAEDDDDLDLFGDETEEDKKAADERAAAKASSKKKESGKSSVLMDVKPWDDETDMKKLEEAVRSVQMEGLTWGASKLVPVGYGIKKMTIMLTIVDDLVSVDSLIEDHLTEEPINEYVQSCDIVAFNKI

SEQ ID NO: 47760 - protein, 171 aa, Zea mays
  Clone ID: LIB4073-022-A6_FLI.pep
HRSVSPPLAWKTKKPSPHQPNPAKSGPGAVRRLRSIRSHPPTRFDPTGRSVMAKTSSFKLEHPLEKRQSEANRIREKYPDRIPVIVEKAERSDIPDIDKKKYLVPADLTVGQFVYVVRKRIKLSAEKAIFIFVKNTLPPTAALMSSIYEENKDEDGFLYMTYSGENTFGLL

SEQ ID NO: 47761 - protein, 157 aa, Zea mays
  Clone ID: LIB4071-006-E7_FLI.pep
PDQPETLQDYRSDCGMIRFILLQNRQGKTRLAKYYVPLEDSEKHKVEYEVHRLVVNRDPKFTNFVEFRTHKVIYRRYAGLFFSICVDITDNELAYLECIHLFVEILDHFFSNVCELDLVFNFHKVYLILDEFILAGELQETSKKAIIERMGELEKLE

SEQ ID NO: 47762 - protein, 179 aa, Zea mays
  Clone ID: LIB4071-008-H2_FLI.pep
PLQPSSSRERPSRRQGVRPPPDLRLHRTAAERARVEERSRPIHVGWAVAEPPGALQPRSRARGGPPWSAGACRGRPTGHAPRWDAWVLVLGSDRARPCARSEAEAEAGCALARRQSISLLVPTWRPSRPACACGGRGGPPALCQSRCRAARVAFVRRLPRASCTRAGANRCRARASSGA

SEQ ID NO: 47763 - protein, 198 aa, Zea mays
  Clone ID: LIB4071-010-E4_FLI.pep
SSPSSSELIPYKLCDGTLIDKIERAQSTLHSTQVYLDAARSRDGSGLVNRQDLSTSPEVAGDLDAEEEHGHGVGDDNGDCAGASKRDAEAPGPRAVDGEVEEDDANAAKEEHEPGGESLDDVLAVDAPWKEDDGADGASAGVLGAADARGLNDDVVHESGDDRKVGEQDEGEDGHGRGKRQVRRQPQAGARRQEEGEG

SEQ ID NO: 47764 - protein, 123 aa, Zea mays
  Clone ID: LIB4071-011-B10_FLI.pep
GFTTKTLDASASCDSLALVRSAHETRRRRRDIAAASASSRPLPAVGPFSLELPETMSSGLDMSLDDLIKQSKSRPKANPASSSGPARRAHPARAAPYPPVAPKARATADSPYGVYSEQIAAIG

SEQ ID NO: 47765 - protein, 172 aa, Zea mays; identical to SEQ ID NO: 45169
  Clone ID: LIB4071-018-A8_FLI.pep

SEQ ID NO: 47766 - protein, 204 aa, Zea mays
  Clone ID: LIB4071-022-F7_FLI.pep
KSMDIFWSYSHSLLSKYCIAFSSFSGPPLTQYAIPQHMASSSPRRRFQACRSSPDAPLCLEIKGAVVALDEAEDFVVEVEAEVPDEGAVAEDPQHHRAACGISDSPGGGEGGGGARTARKTRRRARAGEQEGSEILGSCPVPVPSPRMARSCCPPRRPACLGMTRMRIRTVACGGHRCRGRRYEGRATATAMDSSGRGGERGLF

SEQ ID NO: 47767 - protein, 234 aa, Zea mays
  Clone ID: LIB3969-001-A2_FLI.pep
EAVPFPTLTMPMEQASRHCDKDTLKMAMLKHEETFRQQVHELHRLYRIQKLLMRDLTRELKLKSQRSLPTTSPNGSCAEYSRGALGMCAYERLYAALGRGGHVAAAATPTPTPRTALGLDVVAPVVEYVRSAEEEDDDDRAEETDEDAELELTLAVGGGGAKKRYDEYPSGGESLSSSSTESDVLTVSGREWRRARGTPYHKMRPATGLDVVQVEDDVGVPPPLLFHWLSLKMA

SEQ ID NO: 47768 - protein, 168 aa, Zea mays
  Clone ID: LIB3969-001-H1_FLI.pep
PKQELPMATGNLASVVVAVDGSEESMNALQWALDNLRLRPDGELVVLHVQPPPNIAAGLNPAPIPFGGPSGLEVPAFTQAIEAHQRRITQAILEHALKICSDKNVEVKTEVVVGDPKEKICEIAANRKADLLVMGCRAIGPLKRVFLGSVSNYCINHVGCPVVVIKGT

SEQ ID NO: 47769 - protein, 351 aa, Zea mays
  Clone ID: LIB3969-004-B11_FLI.pep
KMARIPSLKSLNAFPHAEEHLLKKTYSGAVVTIFGLLIMITLFVHELQFYLTTYTVHQMSVDLKRGETLPIHINMSFPSLPCEVLSVDAIDMSGKHEVDLHTNIWKLRLDKYGHIIGTEYLSDLVEKGHGTHHDHDHDHDHHDEQKKHEQTFNEEAEKMIKSVKQALGNGEGCRVYGMLDVQRVAGNFHISVHGLNIFVAEKIFEGSNHVNVSHVIHELSFGPKYPGIHNPLDETSRILHDTSGTFKYYIKVVPTEYKYLSKKVLPTNQFSVTEYFLPIRPTDRAWPAVYFLYDLSPITVTIKEERRNFLHFVTRLCAVLGGTFAMTGMLDRWMYQLIKTVTNSKTRSVLR

SEQ ID NO: 47770 - protein, 216 aa, Zea mays
  Clone ID: LIB3969-006-B9_FLI.pep
LNVLHTHVLVVIDHMNRKYLYNADNDTGTSQAHTSPACSYYRHEHDVARTLPPGRRPCISSVGWQRRVAWAWRGSGDGGRLLDVLERAEPHLLVQNRASCCCSVSGDAQLVGVHRRRAEHAGLGVGAPVLVGAPRAAADHIVRHERRAHLLLRVLVVRRGVHGPPRGGGLAGQDAADEAPSDRPPLGASRRCCHAKDRPFGGSGGNPPHPTVEGRE

SEQ ID NO: 47771 - protein, 218 aa, Zea mays
  Clone ID: LIB3969-008-G8_FLI.pep
RGREGVDGGTEPTGRRPHAHIKIPVKFPPDATPQIAPCLCPLVTSLPLPAPLRPPRHRPFARQETGPETMADQLTDDQIAEFKEAFSLFDKDGDGCITTKELGTVMRSLGQNPTEAELQDMINEVDADGNGTIDFPEFLNLMARKMKDTDSEEELKEAFRVFDKDQNGFISAAELRHVMTNLGEKLTDEEVDEVIREADVDGDGQINYEEFVKVMMAK

SEQ ID NO: 47772 - protein, 208 aa, Zea mays
  Clone ID: LIB3969-012-C3_FLI.pep
FHGASAELLSLADPWCSSLAHVLPPAEPLPSALGAGVLCPHLIPRRRPLPSVLCWSASSPCPTFLAPWPPRLGSPAPLRRSAHLPAAALPWRVPASCFSSLCHLPWRPSPNAELPTRSRPRWLNSPSFLFYRSSSPIRRPHLKPVQPLYSPLSSIPLLLEHGELTPCASRVRHSLSSTSLHGCHVADLCSSYLSGKSQDLVEKKHSSI

SEQ ID NO: 47773 - protein, 300 aa, Zea mays
  Clone ID: LIB3960-007-G4_FLI.pep
ATKFSTLRSNRNNEVRQEPQQPDRGDAPGLARQVPVLQGPQEAAEADRRRLWRAAEQAPAGGGRARRILAACDDPGGGRIRRAPRRRARQVQRLLPREGGGLRHPAEGVAGQGGERRGGGVGGGAAAGAQGDRRLPRRDGLAGELQRAQLHRAGQDPQEVRQEDRRADPPALHPERDAGAVLRHRRAVQARQGVRGDAGPAPPAPEPAAARAERQRRGRRQRRRRRQATTGGARRLIAAQRRRRWRWRHGAGGDRGHGEHVHEEYGGRAQGAQGDQERELHGERVLPAATTVIDTLCSVQ

SEQ ID NO: 47774 - protein, 174 aa, Zea mays
  Clone ID: LIB3960-011-H7_FLI.pep
GRKFQTSPEFTKHYTSPMLRARMLATPAAAGKPVGSYPLGSPAASTVGTSSRYTANGPAKRAASTTHALASPGSFPARTPARWAASESRSITGSPVPRTRSPVKRIALTRGTCFHRNSSGSVGEWRAFWLARGGARQRRGRGVRLWRVGRRRRRSTGPWPRRRGCREWRGLEGE

SEQ ID NO: 47775 - protein, 290 aa, Zea mays
  Clone ID: LIB3960-022-B11_FLI.pep
TYMHLMTYIIKLVYYFSGPHAHSTPQFTNSTTDHTNGCKTMLFSFRLSRLLSVPLAFQHFKQAAIVDSPDSVLVKKPFFIFAEGVKHLPLCETTQPAVNFPKHTSFEVIRLPVCFEQLLQLFACQGVWPSVGMLLEDLLKFFSNEPSIGIVHARITSVLSFLDVLHVDGELESWSLLVLRYGLGSKEAVDEDGAEGRQRDAGPDRAEPLVCLGGVDDAVLVPVEEGDVPLQRRQLAFVNVGRHRHGGGEGGLSFVAPCPCRLCRFGGHGSGEIVDKDQRRARDALLRWCQ

SEQ ID NO: 47776 - protein, 323 aa, Zea mays
  Clone ID: LIB3960-023-B1_FLI.pep
SAAGQVGKGISVVPFSLRIARNPIRLRLLPVSAARFTRLAMSTTPPAAATISVEYAKSGRSICKGCSGVIASGALRLGASARDPRGFGATKWYHVSCLPSSSYPLGPIGSIKGFDSIKDHDRAELRELEKNHKRDNTAVSPPEEQRPKKARIQMFSPAEGVPDNVTVSVEYAKSGRSTCKGCSENIAKGALRLGASFPDPRGYENTKWYHVVCFPTSSYPLFPMSNLKGFDSIEDHDRDKLHKLVENHKSDGKAADVLNESNLKREMAHSMDDSNEGAEKDLEGIKIHCMGEFEEGAEKNLEEAKLPAGNKMIGPSISFSLSD

SEQ ID NO: 47777 - protein, 309 aa, Zea mays
  Clone ID: LIB3959-003-B3_FLI.pep
MASSNGEAEQQWIENIKSGGTVPCLPPENCPNGWATPPGDSFMVRGPEYLTNKVKIPGGEYLLKPLGFDWIKGPAKICEILKDSNHRVRKAIDEEVSRGNRPFVWAFNLQLPKDNFSAIFYFVSLEAIPEGSLMDQFLKGDDAFRNSRLKLIANIVKGPWIVRTAVGEQAICILGRALSCKYVQGSNFIEVDVDIGSSIVANAIVHLAFGYITTLTVDLAFLIESQTESELPERLLGAVRFSELNPGSAGLFERRSEEHQESTQSRPVGFWQGFSQLLNNQGNTREPSPNLQNTNGTLRKEEANEDAKW

SEQ ID NO: 47778 - protein, 262 aa, Zea mays
  Clone ID: LIB3959-007-A5_FLI.pep
LLITMPCLAQEFHPKLPAASHYCKSLSSLIRETYAHCHVPCVRTPAGAGWSSGEDSDDDSVLDEAQGTKQVILNEMRSRQMKRRSRCGVDVDSPTLPLSSSSAFAWSYTPLDPRTVLDTVSSPKTCTCVVVEGTAAEEEQEEEAADGGDCDADDESEAFFSVKSFFTRSTSRAATVASSACMLTDPPPPTLRSPEAWERFRDCEGWPFGLCRRPRPAVLPLPPLPSTPADSWKWRKSVGSLAASPAPAYRHKITTAAPASSK

SEQ ID NO: 47779 - protein, 60 aa, Zea mays
  Clone ID: LIB3959-007-H10_FLI.pep
TLTTSAVSFFRTTTFRLAREREYSIHSNDHHLLGGRRAAKKRWSGWSARRSLSQASAACA

SEQ ID NO: 47780 - protein, 179 aa, Zea mays
  Clone ID: LIB3959-008-C10_FLI.pep
VKRCLSRSKTSVRVQPVHTSKGGGWLVVPGGVALSYASDDDFLLKRPPAPANGEMGGVVPSGEAGGVLAALLGEDGYPAGRLIMMLRVTFTGVSSLPEAGEGGTSAAASPAGSLILTAAGRAGCLRRRPRPVSGRGPATVSSHSLSRRPIPLRRNHPTATTRPRSGTVSSASSTHETCG

SEQ ID NO: 47781 - protein, 315 aa, Zea mays; identical to SEQ ID NO: 43651
  Clone ID: LIB3959-009-G7_FLI.pep

SEQ ID NO: 47782 - protein, 205 aa, Zea mays
  Clone ID: LIB3959-020-C6_FLI.pep
NAMNPEYDYLFKLLLIGDSGVGKSCLLLRFADDSYLESYISTIGVDFKIRTVEQDGKTIKLQIWDTAGQERFRTITSSYYRGAHGIIVVYDVTDQESFNNVKQWLNEIDRYASENVNKLLVGNKCDLAENRVVSYEAGKALADDIGIPFLETSAKDATNVEKAFMTMAGEIKNRMASQPAASGASRPATVQMRGQPVSQQSSCCS

SEQ ID NO: 47783 - protein, 246 aa, Zea mays
  Clone ID: LIB3959-021-F12_FLI.pep
QSSRLFLIRLLPLSRRRGGRSNSIASHDPGREPGVADRERLRRICGCAGTEAGIGGGREGRGGPVGGAAAAVGADGADDGRRPGRVGVPRGGQHASLGGHHRGIRRDGLRGHLLPPRAGLHRRVPVQAAQGAVRHPLLPPQRRRARQHLPGHPPGQVVLRLRRAHHPPLHPEPARRAEQRLAAQHAGGGALGEPGRVQEDGGEALQGRRVEDSTRRRCRLRFFKHRSHLDRLTWMVLFGWVHSLVL

SEQ ID NO: 47784 - protein, 113 aa, Zea mays
  Clone ID: LIB3959-022-G11_FLI.pep
RSTIQVYPGAWAAVLVSLDNVGVWNVRSQNLDSWYLGQEVYVRVVNPEDTGNKTEMAIPANALYCGQLHKYQKEQTPHHKMGASAAAPRSLVSLARRLLATALLLAGSFVLAP

SEQ ID NO: 47785 - protein, 428 aa, Zea mays
  Clone ID: LIB3959-024-B1_FLI.pep
SRRIPSHYHPSRRPPIRSGSSNPGAVMATKRSVGTLGEADLKGKKVFVRADLNVPLDDAQKITDDTRIRASVPTIKFLLEKGAKVILASHLGRPKGVTPKYSLKPLVPRLSELLGVEVVMANDCIGEEVEKLAAALPEGGVLLLENVRFYKEEEKNEPEFAKKLASVADLYVNDAFGTAHRAHASTEGVTKYLKPAVAGFLMQKELDYLVGAVANPKKPFAAIVGGSKVSSKIGVIESLLAKVDILILGGGMIYTFYKAQGYSVGKSLVEEDKLELATSLIEKAKAKGVSLLLPTDIVVADKFAADAESKIVPATAIPDDWMGLDVGPDATKTFNEALDTTKTVIWNGPMGVFEFEKFAAGTEAIAKKLAELTTTKGVTTIIGGGDSVAAVEKAGLADKMSHISTGGGASLELLEGKTLPGVLALDDA

SEQ ID NO: 47786 - protein, 118 aa, Zea mays
  Clone ID: LIB3959-024-C4_FLI.pep
RETDAYTQAAVEEEEKKKKKMASSAYASWSKRWIRPEVYPLFVPMAVALGICSYQLVRNITGNPEVRVTKEKRAAGVLDNHDEGERYAMHGLRKFVRGKKPEIMASINSFFADPPKDD

SEQ ID NO: 47787 - protein, 241 aa, Zea mays
  Clone ID: LIB3958-006-F11_FLI.pep
RRAAARADKEQAEEELCQATMGISRDSMHKRRATGGKQKAWRKKRKYELGRQPANTKLSSNKTVRRVRVRGGNVKWRALRLDTGNYSWGSEAVTRKTRILDVVYNASNNELVRTQTLVKSAIVQVDAAPFKQWYLTHYGVDIGRKKKTPAAKKDNAEGQEVEAAAEETKKSNHVTRKLEKRKEGRTLDPHIEEQFGSGRLLACISSRPGQCGRADGYILEGKELEFYMKKLQRKKGKSAVA

SEQ ID NO: 47788 - protein, 140 aa, Zea mays
  Clone ID: LIB3958-007-B3_FLI.pep
KHSASTPAAATRCSLSTSTYWSREHAARALSAAAKMVNVPKTKKTYCKNKECKKHTLHKVTQYKKGKDSLSAQGKRRYDRKQSGYGGQTKPVFHKKAKTTKKIVLKLQCQSCKHYSQHAIKRCKHFEIGGDKKGKGTSLF

SEQ ID NO: 47789 - protein, 180 aa, Zea mays
  Clone ID: LIB3958-014-C7_FLI.pep
QAQYQNRNSLNGFRYNKLTTKVVTMRGARRLEAELGKEPPVLAGLEPLLEARLGGLAGFDLLVPGGERVGPARGDVFEIDVEGVAGGHEVSEIDELDETLDAGLLGRLLGGVLADHLLGVLGQAGDEAVPIGTVAGALLEHAHDHRLPAGEPALEEDYGLAGLEKLHHLRAVVVMLLRRR

SEQ ID NO: 47790 - protein, 242 aa, Zea mays
  Clone ID: LIB3958-017-B7_FLI.pep
IRRAAARADKEQAEEELCQATMGISRDSMHKRRATGGKQKAWRKKRKYELGRQPANTKLSSNKTVRRVRVRGGNVKWRALRLDTGNYSWGSEAVTRKTRILDVVYNASNNELVRTQTLVKSAIVQVDAAPFKQWYLTHYGVDIGRKKKTPAAKKDNAEGQEVEAAAEETKKSNHVTRKLEKRKEGRTLDPHIEEQFGSGRLLACISSRPGQCGRADGYILEGKELEFYMKKLQRKKGKSAVA

SEQ ID NO: 47791 - protein, 116 aa, Zea mays
  Clone ID: LIB3957-002-F12_FLI.pep
VISTASSSPMATALKSFLNSPVGPKTTHFWGPVANWGFVIAGLVDMNKPPEMISGNMTAAMCVYSGLFMRFAWMVQPRNYLLLACHASNESVQLYQLSRWARSQGYLEKKEPEAKQ

SEQ ID NO: 47792 - protein, 183 aa, Zea mays
  Clone ID: LIB3957-018-A1_FLI.pep
MLDRLADKANRGKQLRLLVVDIGEAALAAVVAVEVVGHEDARAALCVGALLAEAGHLACGVVHLIELQHGELHLLVLVLDLLGLGVRLLLTLLGATAEAEHQVEGGLLLNVVVGEGATVLELLAGEDEPLLVRGDALLVLDLGLHIVNGVRGLHLQSDGLPRQSLHKDLHLGGDGGPPAAAAR

SEQ ID NO: 47793 - protein, 137 aa, Zea mays
  Clone ID: LIB3957-021-F4_FLI.pep
TKTVKKTSRQVIEKYYSRMTLDFHTNKKVLEEVSILPSKRLRNKVAGFTTHLMRRIQRGPVRGISLKLQEEERERRMDFVPEKSALEVEEIRVDKETMEMLAALGMADLPGVERQAEVSSVPAYGRPQYGGPRRDRV

SEQ ID NO: 47794 - protein, 349 aa, Zea mays
  Clone ID: LIB3957-023-A12_FLI.pep
FSYIALALSPAVHDRPKAPGTDSSSDPREARALPDHGLGGYHPYGYRRHRQWHRPCALPLPGAHLRGHLEEACGGAVLADPVRGDAAELHDVGAVRAAAGAPAQHAGGDHQRHRHAHPADLRGALHPLLRGGGAPQGRAPVRRRGRLRRRLGRAGAHPGAHARAQVHARRHRLRLLRHRHVRCAALGHEIGDPDKERGIHAPVPVPGLPRQQHLLDRLRAHPLRPLHHHPQRAGRAVRAGSAGPVRHVLQEHQADHGGTQAQGRPAVNHDGGGHRRLRHAAPATQQQQRRRRRQRLLIACNRKDDDDRPASKSHIHSVVVAPRRPPNACCSDSDLPKGTMLRCILCISY

SEQ ID NO: 47795 - protein, 165 aa, Zea mays
  Clone ID: LIB3957-025-G6_FLI.pep
SPLTLVPLAVSRSHSLHFSSDGGAASSTMADSKATSAVTLRTRKFMTNRLLARKQFVLEVIHPGRANVSKAELKERLAKMYEVKDPNTIFVFKFRTHFGGGKSTGFGLIYDNLESAKKFEPKYRLIRNGLATKVEKSRKQMKERKNRAKKIRGVKKTKAGDAKKK

SEQ ID NO: 47796 - protein, 183 aa, Zea mays
  Clone ID: LIB3957-026-H3_FLI.pep
LEYALAFTSAALDRHYSKWSATPKTGFIDITTSKDFYRIFSGLQYSYLEDSINNPSKKQEMLGDSVAWAGCTIMYLLGQQQHFELFDFSYQFLNVAEVESATVSHYQSSERTKSSNFLQGYEGILEAMRKARRLNNHVFSMLRARCPLEDKVACAIKPSGAPLHRMKFMNTVSAFETLPQRVT

SEQ ID NO: 47797 - protein, 201 aa, Zea mays
  Clone ID: LIB3912-001-B1_FLI.pep
RRTREPTVSVCARERGGGRRRMYPAKPTVATASEPVTGMAAPPVTGIPISSPGPAVAASQWSSGLCACFDDCGLCCMTCWCPCVTFGRIAEVVDRGATSCAAAGAIYTLLACFTGFQCHWIYSCTYRSKMRAQLGLPDVGCCDCCVHFCCEPCALCQQYRELRARGLDPALGWDVNAQKAANNNAGAGMTMYPPTAQGMGR

SEQ ID NO: 47798 - protein, 115 aa, Zea mays
  Clone ID: LIB3912-005-H11_FLI.pep
TKPPAPMASGELACTYAALILSDDGIAITAEKIATIVKAANIKVESYWPALFAKLLEKRSVEDLILSVGSGGGAAPVAASAPAGGAAAAAAPAAEEKKEEPKEESDDDMGFSLFD

SEQ ID NO: 47799 - protein, 156 aa, Zea mays
  Clone ID: LIB3912-012-B1_FLI.pep
LYKKLDCKLPVVHGTPPAGHRSSEMGSQTGSSQPPAPGARNSGAGCSLQERPVAGSPPTRNSCQAARQRQEQEAVLLSCCHQKRSDLRRSWEVGTADAGWPGGVLGRPSLGCARAHLNPHVGPLMLSSSGVTAGRRCPIGSTTLMPKPSISRSLTL

SEQ ID NO: 47800 - protein, 111 aa, Zea mays
  Clone ID: LIB3912-019-G10_FLI.pep
RGERKPRRQCQRSFPRALGFNPPTVRSLSLPESNSASSSPGACDMGYLQEARENHVKKKVEEALRSKMKQKALQECDFYCSKYAECARGRTFSVVWQCRKQAKELNECLHQ

SEQ ID NO: 47801 - protein, 81 aa, Zea mays
  Clone ID: LIB3912-022-A9_FLI.pep
AEHVLFTAGQQTPGSKVTYESIIRMEMFFGSFLSESVSPQNLFGHLDVERCPFLRNINGATTFSLSSALPVAAQGGKGPIF

SEQ ID NO: 47802 - protein, 98 aa, Zea mays
  Clone ID: LIB3912-026-G2_FLI.pep
QLQHPLAASSRSWLQIPQMGPRPCASRSSPPSTSCTPRCMATLLPSASSLPAPSSTNPPCTLVVPASPSASSDTTPTPSLSRPQQSGYAMVQGSDLNC

SEQ ID NO: 47803 - protein, 335 aa, Zea mays
  Clone ID: 700332858_FLI.pep
ARAMAGIRWPPEDPEIFPSRMVSGGAWVPVAPPGEMASDDDRSVAADSWSIKSDYGSTLDDDQRYSDTAEVLLASSSASSVAAPSTTVAVHPSSDFSFDKDVHDSSYVEPPLLGLQNFQDGAYAEDLANFHERSHADDWFGTDIMDIRVGWTKNLCSSRDLPSCSVLDIGTGSGRLLQQLAKQGFSDLTGIDYSESAIELARSLAIGDGFEHINFLVDDVLESKLERRFELVMDEGTLDAIGLHPDGPVKRMMYWQSVDSLVSRGGILVITSCSRTKDELVQEVENFNQRKLGAVGSGSEGLPASEAAVFSYLDHVQSYPSVDSSCITTVALLHK

SEQ ID NO: 47804 - protein, 266 aa, Zea mays
  Clone ID: 700332924_FLI.pep
GVTSPPSRPRAPDRLLHSAAVTAGAAPANAERATGQLAAPGASSRQPAAGRQPATRAHRHSTSGPDHSAPGPDHSSPGSHNAAPGADNSTSGPHHAASVPTSVATARSHHSATVSPGKPAARSRHPATVSAHGATSRHAPSTRHPAATGRAHAGPERGPDSPARGDTGCVPQEPQDAEPRRRDVPGALALARGHADERGLGCKRARGRLRHGGGVGGRGPRRSALSSRLRLFLLSSRRCRHLLPVPRRCCSLHFSFIFFFSFGVVI

SEQ ID NO: 47805 - protein, 347 aa, Zea mays
  Clone ID: 700332930_FLI.pep
KIRVLDSTCQESMAPGSKAERKAALDAGAWMFNVVTSVGIIMVNKALMATHGFSFATTLTGLHFAMTTLMTLVMKWLGYIQPSYLPLPELVKFAFFANLSIVGMNVSLMWNSVGFYQIAKLCIIPVLCILEIIFDKVRYSRDTKLSIVLVFIGVAVCTVTDVSVNSQGLLAAVIAVWSTALQQHYVHHLQWKYSLGSFNLLGHTAPAQAASLLIVGPFVDFWLTNKRVDAFNYTSIVTFFIVLSCIIAVGTNLSQFICIGRFTAVSFQVLGHMKTVLVLTLGFLFFGKEGLNFHVALGMLLAVIGMIWYGNASSKSGGKERQVYPTPSEKTQKHGALSSQSELDQKV

SEQ ID NO: 47806 - protein, 273 aa, Zea mays
  Clone ID: 700334243_FLI.pep
YPRTAPRARLGTATDPRRSADGSPISTQRRTDRGAAFLKLLPPARGRPADQLLGQQVPERQVVGLPLHAAARPPGRRAPAHGVPEAVGQVARDRGHHLLRTQPGVPRVQLQGPGEDDLALPPPAHADGDVGADVLLLRRLQLLEQALGAVEPHHWIRVATGGQCEVHQRLGPIHGEALQLLVPVPAGLPFRVEQQPKPLSRRVCSAAQDLVLYQLRVYSLATNDVGYLGKQYPFAVALWDPVLYMGMHHHRVMHVDPESKLLLVFHSTEVDTF

SEQ ID NO: 47807 - protein, 221 aa, Zea mays
  Clone ID: 700334950_FLI.pep
WSDDVQVKCSVEMLLQVSATQVAYDRETDRAAVLRSSGDGRQRTALAQFSFNFFSEEPRFSGLSAVHAMTMLSLEDVRHVVGGVAVVVTVQPHPVLPQLLPDEPVVDEGRAPEVRQDQPRRQQQLRLVPQRYPVEDMLGRHFEEGDEGVDYPVGQPLLVVHPGRALHRADRRVQRVYQSETRPCESVEVGDERPCFTHLPVPTPHQINLIAIRKRWYVARF

SEQ ID NO: 47808 - protein, 324 aa, Zea mays
  Clone ID: 700335184_FLI.pep
LSLSASTKTKSNDPWFFSCADADRHGSEMSCQLLLGRYRRRSTDLAAISYLRDEVVEDGERGALAEVDLVGDAGLLDAGQAQLVVLAVDVHGQDLRGGTNNKERERGILGLSVGGPLAASPSGRWGGRSGKREGTTTDRAVLREGERRGEEGVAGVHADLHGLLGADELDEHVQELPLVGGGRHQVPARHVFRSRSVVQQLGRRREIGPGKRNIPWVLGGDLAELLHALRLPRVHARVQDVLVEVILPPVRFEPRKIRSRARGRKWAGRIRSVLSVYLVEVVALEQALVADLGVPRLLLAVAVGLLLLRRRRLGRRGGHCVQCS

SEQ ID NO: 47809 - protein, 235 aa, Zea mays
  Clone ID: 700335652_FLI.pep
GSGFEIYASRGQAAMSEVFEGYERQYCEASASLSRKCTAASALDGEKKKQKLSEIQSGVEEAESLIRKMDLEARSLQPSIKAGLLAKLREYKSDLNNVKSELKRISAPNARQATREELLESGMADTLAVSTDQRGRLMMTTERLNQSTDRIKESRRTMLETEELGVSILQDLHQQRQSLLHAHTTLHGVDDNIGKSKKILAAMSKRMDRNKWIIGGIITALVLAILLILYFKLAN

SEQ ID NO: 47810 - protein, 222 aa, Zea mays
  Clone ID: 700335762_FLI.pep
HPGASPSRSPPPVAFVPSISGCVAGEPDTANRIRRQGEREKMGLTFTKLFSRLFAKKEMRILMVGLDAAGKTTILYKLKLGEIVTTIPTIGFNVETVEYKNISFTVWDVGGQDKIRPLWRHYFQNTQGLIFVVDSNDRDRVVEARDELHRMLNEDELRDAVLLVFANKQDLPNAMNAAEITDKLGLHSLRQRHWYIQSTCATTGEGLYEGLDWLSSNIATKS

SEQ ID NO: 47811 - protein, 467 aa, Zea mays
  Clone ID: 700336160_FLI.pep
THRRSASQPNRHSLEALLGVRSLRIYHTMPPPLRCLLLAFVVVLSGFPRLAHPFTALESDQIARFQEYLRIRTAHPSPDYAGASAFLLHYAASLGLHTTTLHFTPCKTKPLLLLTWRGTDPSLPSVLLNSHMDSVPAEPEHWAHPPFAAHRDPATGRIYARGAQDDKCLPVQYLEAIRGLQAAGFAPARTIHISLVPDEEIGGADGFDKFARSEEFRALNIGFMLDEGQASPTDVFRVFYADRLVWRLVVKAAGAPGHGSRMFDGAAVDNLMDCVETIAGFRDAQFRMVKSGEKGPGEVVSVNPVYMKAGIPSPTGFVMNMQPSEAEVGFDLRLPPTEDIEQIKRRVEEEWAPSHKNLTYELVQKGPVTDVAGRPVSTATNASNPWWLTFERAIASAGGELSKPEILSSTTDSRFARQLGIPALGFSPMTRTPILLHDHNEFLEDRVFLRGIQVYEHVIRALSSFQG

SEQ ID NO: 47812 - protein, 333 aa, Zea mays
  Clone ID: 700336273_FLI.pep
PSQATSLARSTPACMGGGGEGRDSGGGGGAASFREAARDFSNVASFSELPFLQRSAAPPRGSPHNSGIRIFGIDVPHSPPERNSNKDATAATTTTAAASATQSSGGGGATTDSSSSSSRKFECHYCCRNFPTSQALGGHQNAHKRERQHAKRVQMQSAMAAAAAAAAAAGGAHHHHLLGYPQHRFGVAGPTVATLYPSWPTMRPPAPAGAGAGAVAIGGPQFYSGIGSIAQPINGSPLLTAAGLWRGPPPPAAGHGNASLPSSPGGERRRPVALSSSSPVFRGDDPRASTSLLAAASSPSSSSSLLLSPQGQFVCEQPAATTAAEGVSLDLHL

SEQ ID NO: 47813 - protein, 239 aa, Zea mays
  Clone ID: 700336372_FLI.pep
RFCPSAALLPAPFSIPKTPISRRKERERGEVRAGEMDRLEERNIKKGEREMEEARKEEERKEEAGDRNTQEPQQGQGLSLSLANGSDSGRSAMLPMSNPSANPTQLTIFYGGSVCVYDSVPPEKAQAIMLIAAAAAATKGSAATAFNPPMSTSVAAGQAQVVADPSSISKLQADLPIARRHSLQRFLEKRRDRVVSKAPYSPAKSFDGMESAGMEMTADGKQGARPSILKGWGAAKSEV

SEQ ID NO: 47814 - protein, 353 aa, Zea mays
  Clone ID: 700336510_FLI.pep
EKQLLWTKKIQFSPRRRRGIPPFRVVCSLFLRRFLSRLSPRRRRRGVGATETARGGGGACGCTDMGDHEARGDDFEKKAEKKLSGWGLFGSKYEDAADLFDKAANSFKLAKNWSRAASVYIKIANCHLKGDSKHEAASAYVEAANCYKKFSPQEAAQALNQSVNLFLEIGRLNMAARYSKDIGEIYQQEQDLEKATDYLERAADLFDSEGQSSQSNTIKQKVAEIAAQLEQYPKATEIFEAIARQSINNNLLKYSVRGILLNAGICQLCRGDPIAITNSLERYQEIDPTFSGTREYKLLADLAASMDEGDVAKFTDAIKEFDSMTRLDPWKTTLLLRAKNELKKKEDDEDDLT

SEQ ID NO: 47815 - protein, 61 aa, Zea mays
  Clone ID: 700336687_FLI.pep
VFIVFMVSFPFVFMLLRVSISISRLTKKNISYQDKEYHQSRWIYGWSSHINQYKKLSVTSH

SEQ ID NO: 47816 - protein, 473 aa, Zea mays
  Clone ID: 700377741_FLI.pep
RDSKLLPFPTAAAAAPPHSVDTMRECISIHIGQAGIQVGNACWELYCLEHGIQADGQMPGDKTIGGGDDAFNTFFSETGAGKHVPRAVFVDLEPTVIDEVRTGTYRQLFHPEQLISGKEDAANNFARGHYTIGKEIVDLCLDRIRKLADNCTGLQGFLVFNAVGGGTGSGLGSLLLERLSVDYGKKSKLGFTVYPPPQVSTSVVEPYNSVLSTHSLLEHTDVAILLDNEAIYDICRRSLDIECPTYTNLNRLVSQVISSLTASLRFDGALNVDVNEFQTNLVPYPRIHFMLSSYAPVISAEKAYHEQLSVAEITNSAFEPSSMMAKCDPRHGKYMACCLMYRGDVVPKDVNAAVATIKTKRTIQFVDWCPTGFKCGINYQPPSVVPGGDLAKVQRAVCMISNSTSVVEVFSRIDHKFDLMYAKRAFVHWYVGEGMEEGEFSEAREDLAALEKDYEEVGAEFDEGEEGDDGDEY

SEQ ID NO: 47817 - protein, 231 aa, Zea mays; identical to SEQ ID NO: 41034
  Clone ID: 700377791_FLI.pep

SEQ ID NO: 47818 - protein, 211 aa, Zea mays
  Clone ID: 700378024_FLI.pep
GGANAGEGEGVREGAPAMVHVNFYRNYGKTFKKPRRPYEKERLDAELKLVGEYGLRCKRELWRVQYALSRIRNAARHLLTLDEKNPRRIFEGEALLRRMNRYGLLAEGQNKLDYVLALTAENFLARRLQTLVFKAGMAKSIHHARVLIKQRHIRVGRQIVNVPSFMVRVESEKHIDFSLSSPFGGGPAGRVKRKNQKKASGGGDAGDEDEE

SEQ ID NO: 47819 - protein, 297 aa, Zea mays
  Clone ID: 700378395_FLI.pep
FRLIEGVARSVNNLLEKFHQSFFLYFLTGPSKFISVGVYMIPFALLLAPLPIVAAALADGSRSMEKTADKFIGDGKTDGIADISQNKGGSWKWLRAAKVLLVVQLWAVLVSLLPYYITQIPDATPTQSTLIWVVLSIVVLISLSVLFGSPYSTGVEWKLLKATMITSISIGLGLMSIINFATAQLGALIVIPMCLFSRPLKASGMNFLPRAVLLASNVAFAVLGFPPVALLIMKGVSKGSRSWTIDVGDFWVWMEFLWEWSSATYLYLFLVHLPCWLLCVLVFLHPCHQSEYKLKQE

SEQ ID NO: 47820 - protein, 270 aa, Zea mays
  Clone ID: 700257319_FLI.pep
QELNHHGFVIKALPLASTRAMEHLFDQVIIVIREGLRSGSCKLSFMLLLHGHINLHFRWLQSNGFDKVKVLIPCQLPCEVKEGLLKVVIALGRNLIVLQVLLPVECNLLGFDLPVLYINLVSAENDGDVLTHPAQVPVPCWNILVCQPRSDIKHNDGTLTMNVVAIPEATELFLPSSVPAIEANFATVSAKIQRVNFNTNGGLIFLLKLASKMPLHKCGFASSTVANDDELEAGVIHNLLIRQRHFCGGARRTETAAAAKSLKCITREKR

SEQ ID NO: 47821 - protein, 188 aa, Zea mays
  Clone ID: 700257631_FLI.pep
KLFNRWTFDDVQVNDISLNDYLAVTAAKHATFLPHSAGRYSKKRFRKAQCAIVERLTNSLMMHGRNNGKKVMAVRIMKHTLEIIHLLTDANPIQVVVDAIINSGPREDATRIGSAGVVRRQAVDISPLRRVNQAIYLLTTGARESAFRNIKTIAECLADELINAAKGSSNSYAIKKKDEIERVAKANR

SEQ ID NO: 47822 - protein, 223 aa, Zea mays
  Clone ID: 700257689_FLI.pep
ASHSKHLRRRCLTGKAAMVSGSGVCAKRIVVDARHHMLGRLSSIIAKELLNGQKVVVVRCEEICMSGGLVRQKMKYLRFLRKRMNTKPSHGPIHFRAPAKILWRTIRGMIPHKTKRGEAALARLKTYEGVPPPYDKTKRMVIPDALKVLRLQPGHKYCLLGELSKEVGWNYHDTIRELEEKRKEKAKVAYERKKQLAKLRVKAEKAAEEKLGSQLEILAPIKY

SEQ ID NO: 47823 - protein, 459 aa, Zea mays
  Clone ID: 700257727_FLI.pep
EMDMNNGWLGFSLSPSAASRGGYGYGDGGGGASASACGDGEGSCPSPAAAASPLPLVAMPLDDSLHYSSAPDWRHGAAEAKGPKLEDFMSITCSNKSSGRSLYDSCGHHDDEQASKYHEVHGIHPLSCGSYYHGCISSGGGGGGGIGLGINMNAPPCTGGFPDHQHHQFVPSSHHGQYFLGAPAASAGPPAGAAMPMYNAGGGSVVGGSMSISGIKSWLREAMYVPPERPAAAALSLAVTDDVPPAEPPQLLPAPLPVHRKPAQTFGQRTSQFRGVTRHRWTGRYEAHLWDNTCRKEGQTRKGRQVYLGGYDREEKAARAYDLAALKYWGPSTHINFPLSHYEKELEEMKHMSRQEFIAHLRRNSSGFSRGASMYRGVTRHHQHGRWQARIGRVAGNKDLYLGTFSTQEEAAEAYDIAAIKFRGLNAVTNFDISKYDVKRICASTHLIGGGDACRRSPT

SEQ ID NO: 47824 - protein, 389 aa, Zea mays
  Clone ID: 700257777_FLI.pep
AYTTLLLLALCATPCTSSIVTPPQGWRRPPFPSHGRGGSRARTAASCRSRGGAAGTSSRTGRRGWPRRQRRRVRRPPPVARTVACTAAFSSSRCGAGISSGTGRCSRRRRRRRPPVAYARSAARTTASPADRCGAGISSGTAGRCRPRRRRSHGCRRAPVAGARKPGRTAACFPGRGGPRTASRKGSGRRCPPPPPRRCRPPPAPGSCSPSGSAASPTSPRGGGARTSPGTCPRSRCRDRTLAPCRRPVRGGGTASCTPGSPTAGPRGGAGTGAGTRPSRSGRRRRPRRCRRPRPRQLAGAARGTRSRIPSSAGCPFRTATRTPACTTAGPPCGPVRPLRPPPRPWLLRPAARRRAGGTPTMMHPHYPSPCVVVRHPTSDLVDVQITSY

SEQ ID NO: 47825 - protein, 263 aa, Zea mays
  Clone ID: 700258055_FLI.pep
KASRLVGDVVGKPIKPLIQPFTRCSTSALDVPVPLAKRMQTKLVSNFSSIHSIGKILFVCKYKQHGITQLILIQHPVELISSLNNTFPIIAVYNKNKSLRVLKVVPPQGPDLVLATNIPNGEANVLVLNSFNIESNGGDGGDDLAELELIEDGGLTGGIEPDHENPHLLLGEEAAEQLPKGEPHLFLNEIRSIGRSRQSDPRGRGAELLTLRRKRRLTGSTHRDGGERLPQPPRAPSPWTLSRWASAICALGSAETGARGAVV

SEQ ID NO: 47826 - protein, 331 aa, Zea mays
  Clone ID: 700258092_FLI.pep
EASIWTTGTRTRSGTAENASTQALIICTKPMETSKSPQSSKNSHIVVPSDSNGPRFDNDGFSSEAASNQMVVFNSEAGDKEQDELGENRLQKSIITRGISPSIGAFTVQCAKCFKWRLIPTKEKYEEIRERIIEEPFVCKRAREWRPDVTCNDPEDISQDGSRLWAIDKPNIAQPPRGWERQIRIRGEGGTKFADVYYTSPTGRKLRSLVEVDRFLQENPEYGAQGVTLAQFSFQIPRPLRQDYVKKKPKLINPSDEASMIASKSFQPEEVKPIAWAVATKHEGDASEEASLTDEAPTSEVMLARKRKAGSSLSIEPNHLSDELEPKLEDA

SEQ ID NO: 47827 - protein, 163 aa, Zea mays
  Clone ID: 700258271_FLI.pep
QIVAHILIKALMAMPAPDFSLCLFLIPEHVQMEEQFKVLIVLSHYLETARFSQFWDEAAKNRHISEAVPGFEQAIQSYAIHVLSLTYQKVPRPILVEAINIEGLALDKFLEYHAANSGWVIEKGGQSQVIVLPRNEFNHPELKKNTADILPFEHVTRIFPVLG

SEQ ID NO: 47828 - protein, 176 aa, Zea mays
  Clone ID: 700258333_FLI.pep
APAFCELSLPLRRKRQPSHRRTRRCSGTSPPAGRRARTAPTFLTAWSSNPVTIHRPHRQSHASNASFITSQFCRVPEGRRGQIPPRAPHPRAGRMRTMSVLLRLYTSLSSIAVAFSVTCIIRSELFLKVMKQNTEAITSYEMLDAVRVALGILLQMVVIATTTRLLQNMSPPKRAS

SEQ ID NO: 47829 - protein, 349 aa, Zea mays
  Clone ID: 700258593_FLI.pep
QRSRPPPLLLHLPRSRRLVRFASAPPRPEQSAALSGAGMADAKQQQQQQQQPQQAAAAATGVWKTVKPFVNGGASGMLATCVIQPIDMVKVRIQLGEGSAGQVTRNMLANEGVRSFYKGLSAGLLRQATYTTARLGSFRVLTNKAVEKNEGKPLPLFQKAFIGLTAGAIGACVGSPADLALIRMQADSTLPVAQRRNYKNAFHALYRISGDEGVLALWKGAGPTVVRAMALNMGMLASYDQSVELFRDKFGAGEISTVVGASAVSGFFASACSLPFDYVKTQIQKMQPDANGKYPYTGSLDCAVKTFKSGGPFKFYTGFPVYCVRIAPHVMMTWIFLNQIQKFEKKIGI

SEQ ID NO: 47830 - protein, 195 aa, Zea mays; identical to SEQ ID NO: 44977
  Clone ID: 700258703_FLI.pep

SEQ ID NO: 47831 - protein, 282 aa, Zea mays
  Clone ID: 700261120_FLI.pep
LLALPPAWPARQPPPDQLRTACLRLPDSSGGGMWSHSKDLLEIEPLELRFPFETKKQISCSMQLTNRTDDYIGFKVKTTSPKKYCVRPNSGIVPPRSTSDVIVTMQAQKEAPPDMQCKDKFLVQSVVVAEGTLVKDITGDMFTKESANVVDEVKLKVVYIPPPKPPSPVHEESEEGSSPRPSLSDGINLNYQEMQTTRESDESLLFSAVKTHIDQKDYTSETSALISKLTEERNSAIQQNNKLREELDLTRREANKQNGGFSFVVVVAIALLGMLLGYIMKR

SEQ ID NO: 47832 - protein, 310 aa, Zea mays
  Clone ID: 700262860_FLI.pep
GCIVSIHKYQLRDAGGVDCAKCARSTRAAMAPPSPVWTNPIHSSQNVSDRKDITVKSWRPPAGQISSQWRQTNLWSVSSIQSDLQQRLAFEFDRPSGSEKLLPGRTFIHSQERKFDDMHDRPATPAGMNHIMRERDPNGHGQTTNMDPAYSYTLYHRDGSHPNNLHDSNHHCGENDSLSSRKVAMPEASTSVDAGFKLDSHHTSNLKDDPPSLSVGLASNFAPQNGPKDHIRIAPTQQQSQMTSSSLQKQFYSHAVTGYNEFQAQMRNGRPRMDSKARSQLLPRYWPRITDQELQHLSSEYPTHSTYVNK

SEQ ID NO: 47833 - protein, 117 aa, Zea mays
  Clone ID: 700263178_FLI.pep
HVIQSFVVKFLLTWIWRGKFERSYGRIIPEKRRVCVTSSFPQTAGAMIKMCFPNLATACCLIISSFSISDNALTAAECHATGHRHLLHSEGSCPDAVEVREVHEEKLWPLPRERATS

SEQ ID NO: 47834 - protein, 143 aa, Zea mays
  Clone ID: 700263323_FLI.pep
NNRNDVEYSTSHDTICQLQKHILVLHTVPYFHYISITLNKHCIVNRKTSGLIQTKPLRLITATSKEPSKSTQTHLKLIPDQYSVSKLQVPFPYVKDKNLNKNLSKGHPKLSINNHVLCRCINTSQPQSPNQSPSARASYCTEK

SEQ ID NO: 47835 - protein, 282 aa, Zea mays
  Clone ID: 700263726_FLI.pep
PKAKGGETNTNKDIGNELPELDMKMVTVLKINLHCDACSEEIKRRILKITGVEEAMPHLKSSQVAVKGKVEPATLVGFIHKCTGRRAAIIRAEPLDDALLPQPPNPPAAPPSKAESKKDEPPAENPPAKVEDEENRGGGGKDNADDDNPKTEKPASDGHGAAEEHGAHATTEAPDRDNDDDAGDGLVLENHTKAAVDRLFAVPTPAGGVVTVVAPEMALGSRSYCYPAYPCAQYYYPYQPHLYPPQPYPAASAYSPVAMYGYPAGYPPEAFSEENPNACTIV

SEQ ID NO: 47836 - protein, 318 aa, Zea mays; identical to SEQ ID NO: 42476
  Clone ID: 700263728_FLI.pep

SEQ ID NO: 47837 - protein, 51 aa, Zea mays
  Clone ID: 700264018_FLI.pep
VDSSTSFVGVVHHFIILRSTRLLNSASRDQLAYVEHIASVALASLLLHPKT

SEQ ID NO: 47838 - protein, 134 aa, Zea mays
  Clone ID: 700264043_FLI.pep
HRTRYQTTLGARMRKSGTRFSVTWSLKYRQLEWHRGRIEGTTAAGLASPSRSRVTLGLARRAMKSKSTGVSSRGASPPSPSHSHHIPQPGSSLHHRRVALPSDAPNSFQGSVRFLPRDGSSAGGDAVAWWILWA

SEQ ID NO: 47839 - protein, 192 aa, Zea mays
  Clone ID: 700264278_FLI.pep
EEGGQLAARVRVSGGRDRGGAAAMALKFLNKKGWHTGSLRNIERVWKAEQAEEAERRKTEELKKQVAAEREKAEFRAMQERAGLRPAQERLDFLYESGLAVGKSSEGFQALQQSAPGAAAASTSAQASAADSSKAATPGALFEDKPQSANDTWRKLHSDPLLLIRQREQDAISRIKNNPIKMAEIKKSVEAE

SEQ ID NO: 47840 - protein, 266 aa, Zea mays
  Clone ID: 700264656_FLI.pep
PFLEGRSAVSNPCGNIFLASSSETPGAMTAHSPGFQLAGVATFPPCLAAVSSESTARSTSSMFRPVVAGYRKLSLTALSGPTTWSARDGMLRPAASFSSGSTMFSCRMASRAGSARIGNVTFVVVACCCCCFPPYASTSLVHCLCDSTSSHEMPSSFTPRFSNSLAYPAIAAISVVHTGVKSAAISSYLPSAGAREQLCKHAYGRADDVRYGGRTWVGEDDGVAVADVVVDADLAVGGVQLQVGDGVADGEPRHGGVPTDVRWLAG

SEQ ID NO: 47841 - protein, 566 aa, Zea mays
  Clone ID: 700265464_FLI.pep
LSPHSLHGTAPPSPPSPNPPPLPNWANSPLRFQSRRRSGKKLRSRAADRERSSPLPPRRPLPRRRSLREASPSPAMSCFVCFGSAAQDEEPRKPAAAGAGKDAAPDRAVARVGSDKSRSQGGPDSKKDLIIHKDGNSQNIAAQTFTFRELAAATKNFRQDCLLGEGGFGRVYKGRLENGQAVAVKQLDRNGLQGNREFLVEVLMLSLLHHTNLVNLIGYCADGDQRLLVYEFMPLGSLEDHLHDLPPDKEPLDWNTRMKIAAGAAKGLEHLHDKASPPVIYRDFKSSNILLGEGFHPKLSDFGLAKLGPVGDKTHVSTRVMGTYGYCAPEYAMTGQLTVKSDVYSFGVVFLELITGRKAIDNTKTQGEQNLVAWARPLFKDRRKFPKMADPMLQGRFPMRGLYQALAVAAMCLQEQAATRPHIGDVVTALSYLASQAYDPNAPVQHVRSNSSTPRARNPAGWNGDQRSVRSPNHHSPDPRRRDAAGASKYGAEVSRTSSTSDSGRRSGLDDMDLTGSQVGSPAQTGRRREAPRGTDRQRAVAEARTWGENSRERTNGHGSFDSTHE

SEQ ID NO: 47842 - protein, 266 aa, Zea mays
  Clone ID: 700265474_FLI.pep
VQPVNSPVTVCGDIHGQFHDLMKLFATGGHVPETNYIFMGDFVDRGFNSLEVFTILLLLKARYPAHITLLRGNHESRQLTQVYGFYDECQRKYGNANAWRYCTDVFDYLTLSAIINGQVLCVHGGLSPDVRTIDQIRTIDRNCEIPHEGPFCDLMWSDPEEIETWAVSPRGAGWLFGSRVTAEFNFVNGIELVCRAHQLVQEGLKYMFQEKGLVTVWSAPNYCYRCGNVASILSFDEKMERDVKFFTETEENNQMRGPRTAVPYFL

SEQ ID NO: 47843 - protein, 408 aa, Zea mays
  Clone ID: 700265806_FLI.pep
CGMPIFSTNSEFSAAKMSDNLMDKVSAFGERLKITGTEVSKKMTAGMSSMSFKMKELFQGQTPADKIVEGATSEDLDGPDWNSNLEICDMINTEKVDSVELIRGIKKRIMLKDARVQYLSLVLLETIVKNCDKAFSEVAAERVLDEMVRLIDDPQTVVNNRNKALMLIEAWGESGDELRYLPVYEETYKSLKSRGVRFPGRDNESLAPIFTPARSVAEADVDASLPQQVFEDVHVHTYTAEETKEAFDVARNSVELLSTVLSSSPEQDALQDDLTTTLVQQCYQSQHTIQMIIETVGDNEAVLFEALSVNDEIQKVLSKYEEMKQPRASEHAEHVPVVIPIAAEHEDLNAVGNEDALVRKPAAARATSGGDDDILDDLDEMIFGKKGGSSSQEGPKKPDPKKDDLISF

SEQ ID NO: 47844 - protein, 154 aa, Zea mays
  Clone ID: 700265960_FLI.pep
PSLSLTTPVCRLLIPGADRSKASQPNCLSTEGKEEKKRGNLKLSVSALHNRIPRSLPFDSVSCCIGRVRNISILCRKKNLFFYHELFRRSTRKLEPSAVLLIQKFKTPCVESTSCCSCSFTNSHGFQAGRGANLGGPVGLRRGRREQRERQGGR

SEQ ID NO: 47845 - protein, 224 aa, Zea mays
  Clone ID: 700266523_FLI.pep
SYRGDRDSTAAYVAAATAFKGHMPPRRQWFKEVARAVRSSVVLLSRPLRLVDAVLCCILDVAGLGRQPRLGVVQLVGARRVLARQVLVHPGEHGQRSDAEAAGGDEPGRHERQRDGGRHQHRAEDHQHGGGHRERDHGAGQDQPGQHQHRPAEGRGRRGLERRHHGALLLLLLRLAVHAAPALEVAVAPATSRRTPVVISHGRLAERARYPTCARCPELLPLML

SEQ ID NO: 47846 - protein, 290 aa, Zea mays
  Clone ID: 700267018_FLI.pep
EANRPPVDAMAPDLVNGVLNWVGTPAMVASLLLFYPPYYLFKTCYSFLSWLFPEDLAGKVVLITGASSGIGEQLAYQYALNRASLALVARRESSLRHVADRALELGARDVVVLPGDVSAPDDCDRFVRTAISHYDRLDHLVCNAGVASVGAFEEIPDVTSYSSQLDVNFWGSVQTTFAALPHLKRSRGRIVVTASATGWNPVPRMSIYNAANAALINFFETLRTELGNQVGITVVTPGWVESEMSRGKFLKEHGQVEVDQEMRDVSEEHDHAPVECLLMNQPPATRDRSS

SEQ ID NO: 47847 - protein, 168 aa, Zea mays
  Clone ID: 700267044_FLI.pep
SDDQVSDRPDRVGTPYRMRDDDQSINRRLIAINRTIRKHCSTSQRKTRSRDWARQAGEIPRAQSRESLGWAHWSSRAIAAAWNSKKKRPAPRDTTAGRSRKVGRPSVVSRGEHRRAEKTRGTRERAGERESAMGAEGERSWGWAPWVFTAGCGSELDDGRGERWGEGG

SEQ ID NO: 47848 - protein, 310 aa, Zea mays
  Clone ID: 700267149_FLI.pep
RLTVCGNPFRRIREVELKRDYAFIEFSEHRDADEARYQLDGRDVDGSRIVVEFAKGVPRGPGGSREYMGRGPPPGTGRCFNCGMDGHWARDCKAGDWKNKCYRCGERGHIERNCQNSPRSVSYSRSPSPRRGRGRSPSYSRSRSRSRSRSYSRSRSLSGSPRGGRRDRDDRRSRSLSYSRSPVRSPPAKEKERSPTPGGSRSPRSRSPQDQVMSPPPKDNGDRNGSDRGDSPRGREDSRSRSRSPSGGNRSPAANGRSPSPRGDRTPSPMADRGPSPMADRSPSPKGNGNNDGGDDDTGRGGSPTGSKSP

SEQ ID NO: 47849 - protein, 287 aa, Zea mays
  Clone ID: 700207602_FLI.pep
HLGFQTPSVSTGKEVAMADDEQAEKKEEVPELAPFDPTKKKKKKKVVIQEPSDEVDNLAEKTESLTVTESSEPSFAGMKKKKKHVELDSSLTETGDVDDTGDDQVREDEEGEGIVLAGAAATRYPWEGTDRDYKYEELLGRVFNILRENNPDLAGDRRRTVMRPPQVLREGTKKTVFVNFMDLCKTMHRQPEHVMMFLLAEMGTSGSLDGQQRLVIKGRFAPKNFEAILRRYINEYVICNGCKSPDTILSKENRLFFLRCEQCGSSRSVAPIKAGFVAQVGRRKAGS

SEQ ID NO: 47850 - protein, 200 aa, Zea mays
  Clone ID: 700208410_FLI.pep
ETTAAMATSFQGTTTKCTACDKTVYLVDKLTADNRIYHKACFRCHHCKGTLKLANYNSFEGVLYCRPHFDQLFKRTGSLDKSFEGTPKVVKPERNVGNENATKVSSAFAGTREKCVGCSKTVYPTERVTVNNTMYHKSCFKCCHGGCTISPSNYIAHEGKLYCKHHHIQLIKEKGNFSQLENDHEKTSQAGSLEEDEQEY

SEQ ID NO: 47851 - protein, 256 aa, Zea mays
  Clone ID: 700208454_FLI.pep
LLRHPRQRRLGHKIAVASSRQVGKMSSLRNAIPRRAHKERAQPEARKKFGLLEKHKDYVVRARAYHIKEATIAKLKEKAAFRNPDEFYFKMINSRTVGGIHRPKPEDNKYTEEELLLLKNKEMGYILQSVQSEKKKIEKLSSTLHELDNKPQNKHVYFAEDREEAKEIQSRIGQSSNMPDLDNIPSRIKKKIASSYRELEERKQRLQKLEKLYADMALQKELKKPGRKRKLKLHEDEETDNQTSRPVYKWRAQRKR

SEQ ID NO: 47852 - protein, 310 aa, Zea mays
  Clone ID: LIB148-063-C6_FLI.pep
PADKIKTGHVRTGERDACAKIRYTYTCTYIRASFSAFCSGGKETSKHLGHERGLLMGARAPQRGALRRRRHARHSRHPGPGHLPVPLHVLELHREPLRGRRSGLLVPHAEPGHGRRPRGVALRRGGPRPWPRRRVVLLPVRVRSSVAVAMPVPVRGRGLLLLVAAAAAAAVVMTGLLLRAGALLLLVVLRRRRELALAVGRRAAAALRSPVALPVAPPRRRRLAVASRGRRPRRRRRGDSPHWPLLWLGLAVGVGVVGAARPAQRRRRGALVLAHLVEVGRVPGIAAVPGAELGHRGSFCHAHPAGEEPN

SEQ ID NO: 47853 - protein, 212 aa, Zea mays
  Clone ID: LIB148-064-G3_FLI.pep
ALPLPLPLLPCQVAGQAPDRGARARGRRRRHYIGLVRPACHCIGEMYPATTPYDTASGVGVAPVAGLFPVAGEAREWSSRLLDCFDDFDICCMTFWCPCITFGRTAEIVDHGMTSCGTSAALFALIQWLSGSQCTWAFSCTYRTRLRAQHGLPEAPCADFLVHLCCLHCALCQEYRELKARGYEPVLGWDFNAQRAAAGVAMCPPASQGMGR

SEQ ID NO: 47854 - protein, 145 aa, Zea mays; identical to SEQ ID NO: 37232
  Clone ID: LIB189-001-H6_FLI.pep

SEQ ID NO: 47855 - protein, 121 aa, Zea mays
  Clone ID: LIB189-011-H4_FLI.pep
KRQRARMPCLNVSTNVNLEGVDTSAILAEASKSVANIIGKPEAYVMVVLKGSVPMAFGGTQEPAAYGELVSIGGLNPDVNKKLSAGIASILESKLSVPKSRFYLKFYDSKRSDFGWNGSTF

SEQ ID NO: 47856 - protein, 229 aa, Zea mays
  Clone ID: LIB189-017-H5_FLI.pep
IKLRAIHDKLRPPLRSPPSYSDPKERTQGESTMTEGGRPNRPDQRDLGELSAVSDLDHLGGGAVAGAHLLDGLDDVHALDDLAEDDVLAVEPRGRDGADEELGAVGVGPGVGHGEHTGGGVLAHELLVGELLAVDGLAAGAVAAGEVAALAHELGDDAVEGGALVVERLPGLAHALLARAQRAEVLRGLGHLVGVQLHHDPARRGAADGHVEEDARVRHRDRELGFGDI

SEQ ID NO: 47857 - protein, 300 aa, Zea mays
  Clone ID: LIB189-020-A7_FLI.pep
FVSIPMAGLSLEHPWAFTFGLLGNVISFMTFLAPIPTFYRIYKSKSTEGFQSVPYVVALFSAMLWIFYALIKSNETFLITINAAGCVIETVYVVMYFVYATKKGRMFTAKIMLLLNVGAFGSILLLTLLLFKGDKRVVMLGWICVGFSVSVFVAPLSIMRRVIQTKSVEYMPFSLSLSLTLSAVVWFLYGLLIKDKYVALPNILGFTFGVVQMVLYVVYMNKTPLPVADGKAAGKLPSAADEHVVVNVTKLSPGRLPPVTQMAAVPTKSCATEAAAPATLPSRDVVDVLVNRHSPAVHVA

SEQ ID NO: 47858 - protein, 320 aa, Zea mays
  Clone ID: LIB189-026-C9_FLI.pep
LVHSKILLWYTVHIRRRNKTPALSYLTKIRDYEVILVVGDLDPGLLALANPSAAAGGGFGRPVVRRVVRRLVSEKLRHLRQRPAGFGRLLVEEVDVGEPLQLLEPERRLLVQLVAGLVVGELQELVDGPALRQELRRRGHLLHRGGDGGVRWLDGGLGRGVVVGVVGVAGVAAGGSRGEADADAGGQVALVVPGERARDVDGLVAVLAEERPVLHAEDERRFLLADVAARELGGERLEREALVLARELVGGVDLDVAARAQRGLVGAAHHRGSRALARVALDLHGRSTSRSLLPARQHPANNNQGGENEEDNATDDCGGG

SEQ ID NO: 47859 - protein, 156 aa, Zea mays
  Clone ID: LIB189-027-H6_FLI.pep
AVPMSGGPALLRSVLRPVWRGAYGAAARHTCGGRFGRHTRGSRSVARCGARASPPNRPLDSQNAVHTALLTLTTTTCVGAAVIYSQNSSLPSPLPCYQPSQRRGRAATGFFPPGKRCVLADATKGTLGSANPFNPEPLSFIHASDKAKNHSSSMIL

SEQ ID NO: 47860 - protein, 86 aa, Zea mays
  Clone ID: LIB189-028-C12_FLI.pep
FECLTARCPTVLMDLGKVYVPWKTLESRGGIVYVMYLLMQIRAVAFLFSVWVSSLSCVLKNYIPCAKHKERLFDTRDELLVIKKCH

SEQ ID NO: 47861 - protein, 320 aa, Zea mays
  Clone ID: LIB189-032-B3_FLI.pep
LSELEASERRMERWKQHSGPIPAQTTGTGKGSAADPGEKLMSKLREQRQKVRRVMEGSLWNVAASKAARLMAKSVLAVLARISLAFAAFVPGLPPWTVGRAWALGHSSGSGPLHRSATPAALQHSAPIFGQRDSASLLSASSIKPSVSTVGGSSMELRYANVILAAKTLLAALRPPAGDNEEAHEGMIDLSKRDALYKMLPVGIRKAMNAKLREIWKKAQPVDEVSAAASKDAVECLLRWLSPMAHDTVRWNDEQSMERAQRFSMQPRALMVQTLHFADRKKTDAAIVDVLIGLTCVCWYDDEQRRLESLDRDDDDEYQL

SEQ ID NO: 47862 - protein, 280 aa, Zea mays
  Clone ID: LIB3059-020-D7_FLI.pep
ETHQAKHISNNLTTMATKILSLLALLALFASATNAFIIPQCSLAPSSIITQFLPPVTSMGFEHPAVQAYRLQQAIAASVLQQPISQLQQQSLAHLTIQTIATQQQQQFLPALSHLAMVNPAAYLQQQLLASNPLALANVVANQPQQQLQQFLPALSQLAMVNPAAYLQQQQLLSSSPLAVANAPTYLQQQLLQQIVPALTQLVVANPAAYLQQLLPFNQLTMSNSAAYLQQRQQLLNPLAVANPLVAAFLQQQQLLPYNQFSLINPVLSRQQPIVGGAIF

SEQ ID NO: 47863 - protein, 72 aa, Zea mays
  Clone ID: LIB3059-044-G11_FLI.pep
EASTSPIFFIQITDHGHGITQQPKHTHEYIMSCGSTAVYARTRNYSAGTSHTSFHSDYWVAKQLATSKQAQH

SEQ ID NO: 47864 - protein, 187 aa, Zea mays
  Clone ID: LIB3059-049-H5_FLI.pep
GCQSCQQPPAQAHTSEANVSRGRSGWNRRAGWGRERKEGRRRHQVERVARGEGGVDVAEGSGEAQHLQLRRPQRQEDGHRVICSVEQWFGSVSGLRSEHHNKKKHHGWKPARSGDQGAAAMDWSRQPWLEVLWTRFATDLVDRRDSRPARGERQNRAPILSVDAYVRYISSSREVEEMGTGWLTIFT

SEQ ID NO: 47865 - protein, 223 aa, Zea mays
  Clone ID: LIB3059-057-F10_FLI.pep
QKSLHIQTESIQLETCTVRFAYYPCNNILQPSKANIKALFLSSFAHYALDCIYPLTGRHDYSSNSIARDETQLRTMFQKHVACTLLGVDANSIVGDDGTGLGRDLELLRGVLEHRGEGRRLGHAEHFERELGVGGEDDLEGYLPSCAAASRRHGGVRLRLRSRPRRRLPDRCAALSLARVLDPSAQCSQAPIASLLPPYLSPAVSSVCDCLLDPVGLKNWVFT

SEQ ID NO: 47866 - protein, 278 aa, Zea mays
  Clone ID: LIB3059-058-E8_FLI.pep
SAASACFVGEGERERERSSREASRWSSNEDVGGVQRAGGGGAGGAGGGGQPDAVAQDEGVAAGGALPGRLRAGRVRAARRPRPPRLLPHQPGAPPPQVVRGQGRGVLPVRGGAGQPGSSEPAARAVKQGRQRGAPRHRGLQDAARPRALPGQLHARPAHRLLRLRPLRQVHQLPARRIRPRGQGAALLGDHRRRLRRLLRRHRHAQRLMRQVARAVPARLLLLQRPRRAQVLREPQAQGHRCPRRRRRDLRCHFQGGGRVYCPDGAALIYHHQAEAMR

SEQ ID NO: 47867 - protein, 234 aa, Zea mays; identical to SEQ ID NO: 44905
  Clone ID: LIB3059-059-A11_FLI.pep

SEQ ID NO: 47868 - protein, 195 aa, Zea mays
  Clone ID: LIB3060-017-F5_FLI.pep
ATIIILPSPTRCLPPSFPFPIVESSPLLPSAVAFASNSRFACRNPSDAVVTRRRRVWRSPSRRGRACSGMVRTSRTASRRVSRACSRCRRSSRGRRRRTSGCPSTSTSPSSPSAPAAPSASRGRTSPSPPRPSPRSSTSAAGWARPALSSGRPWAGPCSTPCGVCPCRSGTDRSGAASYRRRFLSRPRIRWARAR

SEQ ID NO: 47869 - protein, 328 aa, Zea mays
  Clone ID: LIB3060-020-F12_FLI.pep
LLSFCSERTHRPSPISDPLVDPKMQIFVKTLTGKTITLEVESSDTIDNVKAKIQDKEGIPPDQQRLIFAGKQLEDGRTLADYNIQKESTLHLVLRLRGGMQIFVKTLTGKTITLEVESSDTIDNVKAKIQDKEGIPPDQQRLIFAGKQLEDGRTLADYNIQKESTLHLVLRLRGGMQIFVKTLTGKTITLEVESSDTIDNVKAKIQDKEGIPPDQQRLIFAGKQLEDGRTLADYNIQKESTLHLVLRLRGGMQIFVKTLTGKTITLEVESSDTIDNVKAKIQDKEGIPPDQQRLIFAGKQLEDGRTLADYNIQKESTLHLVLRLRGGQ

SEQ ID NO: 47870 - protein, 303 aa, Zea mays
  Clone ID: LIB3060-027-G7_FLI.pep
LPRPSGSYRSSPSPVELMASSMAAAATALPLPSGTTQRPSAQGRLLFTAAPARSRCRSLRLRPAGRRSARSSPRATKAVVAALADPLKVMISGAPASGKGTQCELIKTKYQLAHISAGDLLRAEIAAGSENGKRAKEFMEKGQLVPDEIVVNMVKERLRQPDAQENGWLLDGYPRSYSQAMALETLEIRPDTFILLDVPDELLVERVVGRRLDPVTGKIYHLKYSPPENEEIASRLTQRFDDTEEKVKLRLETYYQNIESLLSTYENIIVKVQGDATVDAVFAKIDELLGSILEKKNEMVSST

SEQ ID NO: 47871 - protein, 343 aa, Zea mays; identical to SEQ ID NO: 37513
  Clone ID: LIB3060-034-B5_FLI.pep

SEQ ID NO: 47872 - protein, 701 aa, Zea mays
  Clone ID: LIB3060-040-E2_FLI.pep
RGYTATTTINRAATGPASHCSRHTRPDTNRLVHLLDLGARATASSRSVLVHAAGASHVGTRALVHLGDDGVAKALQLLHLVIELVRLGELVGVQPADGRVDGVLDLLLVVGSQLRRDLLVLDRVAHVVGVVLQRVLGLHLLLVLLVLRLVLLRVLHHLLDLLLGQTALVVGDCDLVLLPRRLVLGRHVQDAVGVDVEADRDLGDTTRSRWDAGELELPKQVVVAGPGPLTLVHLDQHTRLVVRVGGEHLLLLGGDGGVPRDKDGHHSSGSLQTQRERSDVKQKQVLHLLVALTTEDSGLDGSTIGNGLIRIDVLAQLLAVEEVLEQLLHPGDPSGATNKDNIMDAALVHLGIPQALLNRLHALPEQVHVELLKPGTGDGGVEVNALVQRVNLNGGLGSGRQSSLGPLTRGPQPPESPRVASDILLVLSLELLDKVVNHPVVKVLTTKMGVASCGLDFKDTFLNCKEGDIEGTTSKVKDEDILLTDTGCLLVKTIGNSSSGWLIDDTQHIEASNHPSILCGLPLRVVEIGRDRDNSILDRAAKVSFSDLTHLDENHRGDLFGCKLFLLPLVLNNYHWLLTGPWNDLEGPQLNITLDRGITKPPANETLGIKDGVDGVHGDLVLGRISDEALGVGEGDVRGCGAVTLVVGDDLDTVVLPDADARVRRAEIDADCRPITLACHLFSLSAEVAEDGMELAVAVNG

SEQ ID NO: 47873 - protein, 280 aa, Zea mays
  Clone ID: LIB3060-041-A4_FLI.pep
TLESLELSVPDPLDLDILGRLGPEVGVGRLHALEDADDLAGLRVALGDAQRDVAGGGGGVLDVLLLELLLVTSAPGGERDGVVVAGGAAAALGVEEGGATVAGHEEGPAEALGLAGGDELLDGEEERHALAPRELHGDGGVVDAVLLLELERAVGADLERALDLVQRVREAGHELGLLELGRGVLGDALRLDGEGRRLQAQLLHLVLAGLERERLHAAVDGRALVRRARALHLHVRFALDLVVGQPLGRALRARARDEERRGGEREAGELRGVDAPAGDA

SEQ ID NO: 47874 - protein, 247 aa, Zea mays
  Clone ID: LIB3060-043-D4_FLI.pep
HRSLPPPPRPAAALLEDAADDPLSLSLGQAAAVLVQRRGEAVLVHDPADRQGRRRRRLLLLPPGNERHRPLHAHQEAPAAARAGQGHRLLLPRRPPPPARGRPPSTSDAARRPHREEVSLALAARIRGGRHVDGVPGVEAVEVADDGDDGGGERRAQGLAPEVLHHELLVRGAEPEPRRELPQLLHAASMPHQHRGSLRRHVQKKLLLPPDRLLKLATASAATPLVRSYNDRASSLAAATHYGSASC

SEQ ID NO: 47875 - protein, 311 aa, Zea mays
  Clone ID: LIB3060-052-C5_FLI.pep
RSPIMEFPHHHHHHGHRRDDDEDDRRGPPPPVYGGYGQPPPPDPYGRAPVDPDPYGRPPPQSAYGGAGDAYGHSGQGYAPPPAYGAGGGYGNVVHVAHEVGDERPYYGGGGGGLGGAYGGGGSEYGHEGRPHHGGGGSQYGHETRPHHGGGGGAPPVRQQTYRIYCKAGEDQYSLASRDGKVCLVRTDRDDDAQHWIKDMKYSTRVKDEEGYPAIVLVNKATGEALKHSLGQSHPVLLTRHNPDSLDESVLWTESRDVGDGFRCIRMVNNIYLNFDALHGDKDHGGVRDGTALVLWEWCEGDNQRWKIVPW

SEQ ID NO: 47876 - protein, 205 aa, Zea mays
  Clone ID: LIB3060-053-D2_FLI.pep
AAMEDEEHEVYGQEIPVDGEDVDMAAGDDATKLQELDDMKRRLKEMEEEAAALREMQAKVAKEMQGVDPNATTSENKEEMDSRSVFIGNVDYACTPEEVQQHFNSCGTVNRVTILTDKFGQPKGFAYVEFVEVEAVQEAIKLNESELHGRQLKVAPKRTNVPGMKQPRGRGFNPYHGHPYMRPYGYSPYGYGRFPRFRRPRRPYF

SEQ ID NO: 47877 - protein, 286 aa, Zea mays
  Clone ID: LIB3060-063-C12_FLI.pep
SLHNIANMQIILELTRCRGRNSRGGLHKCAPCTAMPNNKIVAANMEEKGAGGKAAVPHDELPRFTIFLIPNRREPPLDLVELVCLHHRISLGNGVPGSSPVVELAVVLVGVAVECAVQVPTPAVESRKSNPLPAGAAPVRPYLPPFGDRRHPLAGSGNISGLLHVHCLQLNLGNSYYRVAASNNRLHDGVAAVHDAVDRGGSQLGLILLRYHLLVALGAHVHGRRAAEEATVIDAEDGSLGGLAPSLLVLHGFLNSDETALFAIPLRRSPRGRRGGEGRGIAGNSV

SEQ ID NO: 47878 - protein, 404 aa, Zea mays
  Clone ID: LIB3060-064-E7_FLI.pep
GSDFQAVWSPEERSERRSAHQRCIGRKGERRSVRSIELQGGQDDFGGGLVPRDDGRGAAVRGDDPGVRVGAVVAHLLSGPVLRDQPLRGALRGAAAVLPLHLHQQPLHHEPALHRRRHAAEAHGAGHAHRVGPPQPPGAGQPRPGLDHHALLPLHAAQHARHGHPAAQGHVRRLLGKPHGADRRAPVHHLVHAHALHVRVPRRAAAHRRAVPGQRRRGHRLHRRRPGRGLPRRPRPRGRHRDGGRGQGGRQDTRHRAPLQRVALRRRLLAPLRGRLLRRHPAPQQPHQRRDLLPAVVAQPDAAGIQLQPHRLLLHGRPQLQLRRGRRVRRRPHAAPVQLRGRRVQAQVPAARGGRPLPGALERQEGGDERACQGRGPPHVRLELQRVTRIGRLRRRRARLQRPR

SEQ ID NO: 47879 - protein, 404 aa, Zea mays; identical to SEQ ID NO: 46033
  Clone ID: LIB3060-066-G5_FLI.pep

SEQ ID NO: 47880 - protein, 159 aa, Zea mays
  Clone ID: LIB3060-073-C1_FLI.pep
SLAPDLPSQPARDPFTAREMADQEAPVAVEAPTPVLGEPMDLMTALQLVMKKSSAHDGLVKGLREAAKAIEKHAAQLCVLAEDCDQPDYVKLVKALCAEHNVHLVTVPAAKTLGEWAGLCKIDSEGKARKVVGCSCVVVKDYGEESEGLNIVQEYVKSH

SEQ ID NO: 47881 - protein, 104 aa, Zea mays
  Clone ID: LIB3060-083-A2_FLI.pep
CATAAAAARLRRALCRRRFPTSPTGSEEVMARSDSCLARVGAGIAIGGAVGGAVGACYGTFEAFRYKIPGLLKIRYIGQTTVGSAAIFGLFLGAGSLIHCGKSY

SEQ ID NO: 47882 - protein, 229 aa, Zea mays
  Clone ID: LIB3060-085-D1_FLI.pep
YIKYTPPKYNQRPPDQIHVHIHIYINIYIYPITRHLINFHPAGSRSHSSPTGSGLPLAVEVDGGDRQAEVVELGEVAGAEVLPPPRGVHRLPAELLEEQKHDPVDPQHRPWALVAHDLGPKRYSSRRRNISDQPVQVLPEVGIAGARRIRIYHHEGVEGAHVGSADLDARLVGDGGGPELAAVGDLARGVGDAERNPAHEGVHHVADDAAHHQRIPTLHGRAELLLDPS

SEQ ID NO: 47883 - protein, 255 aa, Zea mays
  Clone ID: UC-ZMFLB73018B01_FLI.pep
AKTENHGRPVALRRLPAGADRAGLRRPWQEAAGRRAGAGAGVRQEGAAATAGVDGVAVRGRDAAALLVQEPQRVLRPEAEPVRADLQDPHPGLPLRDGVQPRGGALRARHAGSPLQAHLPGEQGAHAGPAGHLLPAGRLPRPPPPPRLPGFLPPGHPRLRAGCRGRRAALAPLLGRPPRQHLPRDEAVRAECGIAVHLRRGGDAVHRGAEAVLPDAGEGVQLDAGEPAGHPVPQGHEGPQAAERHRGPHHRGPAR

SEQ ID NO: 47884 - protein, 444 aa, Oryza sativa
  Clone ID: UC-OSROCYP013H07_FLI.pep
QTPISKICIPESAANIMLPCKAGQDIVKGLKGKKDHRRRLLWYTGEEESHRRSLAGAAGEDYCAQSGKVALMSSGGMHQLHIFIFVLAVFHVTYCVITMALGRLKMKKWKKWELETNSLEYQFANDPSRFRFTHQTSFVKRHLGLSSTPGLRWIVAFFRQFFGSVTKVDYLTMRQGFINAHLSQNSKFDFHKYIKRSLEDDFKVVVGISLPLWFVAILVLFLDIQGFGTLIWISFVPLVILMLVGTKLEMVIMEMAQEIQDRATVIKGAPVVEPSNKYFWFNRPDWVLFFIHLILFQNAFQMAHFVWTLATPGLKKCFHENMGLSIMKVVVGIFIQFLCSYSTFPLYALVTQMGSNMKKTIFEEQTMKALMNWRKTAREKKKLRDADEFLAQMSGDTTPSRGSSPVHLLHKQRVRSEDPPSAPASPGFAGEARDMYPVPVAPVV

SEQ ID NO: 47885 - protein, 259 aa, Zea mays
  Clone ID: LIB148-004-C7_FLI.pep
EATASNQWPSPSFHEQQNKCRSGTITQSLLNVTRNFNEFLNENQVLIMSKHSLLAARRHLMLECKNMPNSRPRPHMIHIMFASVMQLLAIWLSSLSNLPMGLGTPAWVNGRSHESKSWTASCSMIFAVPVSLNAMARCAAPMASCVFMYIVSQVLRACACGGGIVRAATATCFRACAVRLANAATCMFSTAKLSMTGYLDAWRPAVAVQTSGNGAREQMPATSGLTAPPPCTLPLPFPNACGKRPADNNATRARRTSRG

SEQ ID NO: 47886 - protein, 176 aa, Zea mays
  Clone ID: 700237563_FLI.pep
FVCHCLPEPPLPFLGLSSLPSPSPSPARRGVKPLTGQLVVMATEPPAAAEKKKVPLPKVVTLNKALKLAQTWVDKMSASEPDEPNDKDFEGRPPKLGLGAKAAPGVKRVAPTDPVERRLLGKVNAQKRKALEDDNRNAQVANEASDDDGPESRTSAFNKKRPVPSVTSTPLGKKAK

SEQ ID NO: 47887 - protein, 158 aa, Zea mays
  Clone ID: 700343176_FLI.pep
GFAMLLMDLSGRRFLLLGTIPILIASLVILVVSNLIDLGTLAHALLSTVSVIVYFCCFVMGFGPIPNILCAEIFPTRVRGLCIAICAFTFWIGDIIVTYSLPVMLNAIGLAGVFSIYAVVCLISFVFVFLKVPETKGMPLEVITEFFAVGAKQAAAKA

SEQ ID NO: 47888 - protein, 305 aa, Zea mays
  Clone ID: 700051781_FLI.pep
RTPRRFTEPAPSDPSRSFQKVTAMAAPFFSTPFQPYVYQSQQGSVTAFQISGGDVQVLQVMLKSQEKLTAKPGAMCYMSGNMQMDNNYLPENDGGVWQWIFGKRVSSTIFFNSGSDDGYVGIAAPFPGRILPVDLTNFSGELLCQADAFLCSVNDVSVSSTVEPRPRNIEIGAEMILKQKLRGQGMAFLVGGGSVMQKILAPREVITVDAACIVAMSATINFQLKSPNQLRRAVFGGDNQLTASLTGPGVVFIQSLPFHRLSQRIASRSVAGPSLRDNPKFFIQIVMFFFLAYVMIVSSIILTDV

SEQ ID NO: 47889 - protein, 263 aa, Zea mays
  Clone ID: 700051861_FLI.pep
HLLGSTPALCGLREAPAAATGQDEPPPQTERGGDQCVRSWWRAWKSLAGGKQGFGRMVSLSTWFRYAAQKFEYCVSLSLKKYNDVGRISSTQLTDVLNKNLFQGKLTYVCPTKGEEAMAPIASPTGGAVLVRKLANLSPTQVFVGDVVLLKDPEKSDDLIIRRLAALEGYEMVSNDEKDEPFVLEKDQCWVLADNLALKPKEARDSRLFGPVPMTDILGRVIYSLRTAVDHGLVENSGMAMKQDGPVLAVELDVEEMAKNIKP

SEQ ID NO: 47890 - protein, 112 aa, Zea mays
  Clone ID: 700052387_FLI.pep
NSATLNLRNTGAHGPRDLRKKAEPVEDMAGEMSWVGKKIHLYNVTMGLYMLDWWERCLFSILPPCLDPIQFMYYCPLCRFRPCFSRLRHQLRLMLDPRLILAGYLCLCPGRA

SEQ ID NO: 47891 - protein, 372 aa, Glycine max
  Clone ID: 700566572_FLI.pep
SDWKAHTKTCGTREYKCDCGTLFSRKDSFITHRAFCDALAEESARLTSVTTTNLNFKSEEGGNNVMNSQQHGLGGHGLIGAQSLQNVSGIPQFGSHGFRLDFNGMEQQIRPSLSLWLNQGNHQMNSNNNNINSNNNSASDAGPNYMSSSGLPEIVQMAHANALMGCSSSMVSNFGGVHAGSNSSSANLSLGKRGEACGSTVVDLASIYNNSEGQNKNSKPASPMSATALLQKAAQMGSTRSTNPSIFSGSFGVINSPSSQTTSLNNNNNGGAAMMLASNTSTAAANANDFSSLRHSSNSFDQLVMQTNAQLQSEPVKLKLHSNGMENNLTRDFLGVSGGGGGGGGPQFLPQELGKFASMGSPMGLSQFTSNQ

SEQ ID NO: 47892 - protein, 353 aa, Glycine max
  Clone ID: 700566687_FLI.pep
GDAKKDHACWERPEDMDTPRSVFKIDANTPGSEVAAETAAALAAASLVFRRSDPTYSKILVRRAIRVFQFADKYRGSYSNALKPYVCPFYCSYSGYQDELLWGAAWLHKATKNPMYLNYIKVNGQILGAAEFDNTFGWDNKHAGARILLSKEFLVQRVQSLHDYKGHADNFVCSLISGTSLSSTQYTPGGLLFKMSDSNMQYVTSTSFLLLTYAKYLTQSHMLVNCGGITVTPRRLRTIAKKQVDYLLGDNPLKMSYMVGYGPRYPRRIHHRGSSLPSIAVHPGKIQCSAGFSVMNSQSPNPNILVGAIVGGPDRHDRFPDQRSDYEQSEPATYINSPLVGALAYLAHSFGQL

SEQ ID NO: 47893 - protein, 338 aa, Zea mays
  Clone ID: 700576578_FLI.pep
AVWTGDNSADWDHLKSSIPMVLTLGLTGLPFSGADIGGFFGNPEPDLLVRWYQVGAFYPFFRGHAHHDTKRREPWLFGERRTAIIREAIHMRYSLLPYFYTLFREASVNGIPVMRPLWLEFPDDKETYNNGEAFMVGPSLLAQGIYEEGQKSVSVYLPGKESWYDLRNGSPYKGSATHKLQVLEDSIPSFQRAGTIVPRKDRFRRSSTQMVNDPYTLVIALNSSGAGEGELYVDDGKSYEYQQGAFIHRRFVFADNKLTSFNIGPDDLGKKFRSDCVIERIIILGLRSGVKKAIIEPGNQELEIESGPISLRSGSSPVAPTIRRPNVCIADSWTIRIA

SEQ ID NO: 47894 - protein, 151 aa, Zea mays
  Clone ID: 700577036_FLI.pep
EPLHSKFRLQETFRRPLLSSDPAITVHQIQPTDKFIIFASDGLWEHLSNQEVVDMVQSSPRNGIARKLVKSAVQEAAKKREMRYSDLKKVDRGVRRHFHDDITVIVVFFDSNAMTTAAWSRPSVSLRGGGFPIHSNTLAPFSVPTELNNSY

SEQ ID NO: 47895 - protein, 304 aa, Zea mays
  Clone ID: 700578131_FLI.pep
DPRAYVFGEDVGFGGVFRCTTGLADRFGKSRVFNTPLCEQGIAGFAIGLAAMGNRAIAEIQFADYIFPAFDQIVNEAAKFRYRSGNEFNCGGLTIRTPYGAVGHGGHYHSQSPEAFFCHVPGLKVVIPRSPREAKGLLLASIRDPNPVVFFEPKWLYRLAVEEVPEEDYMLPLSEAEVIREGSDITLVGWGAQLAVLKEACEDAAKDGVSCELIDLKTLVPWDKETVEASVKKTGKLLVSHEAPVTGGFGAEIAASIAERCFQRLEAPVARVCGLDTPFPLVYEPFYMPTKNKVLDAIKATIDF

SEQ ID NO: 47896 - protein, 158 aa, Zea mays
  Clone ID: 700579004_FLI.pep
KKFISTARSEGATILYGGGRPQHLRRGFFLEPTIITDVSTSMQIWQEEVFGPVICVKEFRTESEAVELANDTHYGLAGAVISNDQERCERISKALHSGIIWINCSQPCFVQAPWGGNKRSGFGRELGEWGLDNYLTVKQVTKYCSDEPWGWYQPPSKL

SEQ ID NO: 47897 - protein, 202 aa, Zea mays
  Clone ID: 700579620_FLI.pep
YAQPPQPANVNPSTPHVPHAPQQPEETMPYAPAQSYPPNAIPPPYMQPPSGPAPLYYGQQNPSMYEPPAGRANPGPPSSYGSAGYGPQGGGSFSESYGYTGSPSHRGNAGMKQSSPFAQSSGGSGSYGSGKLPTAQMLPQAVPISSSSTSGSSGNRVPLDDVVEKVATMGFSREQVRATVRRLTENGQNVDLNVVLDKLMNG

SEQ ID NO: 47898 - protein, 207 aa, Zea mays
  Clone ID: 700580909_FLI.pep
KSRGLTTSSVMKSCRLSELSNAEVSSLKARPRIDSSSMSIFGTVNPIVEGVCVRGDAADKQYQVKNCRWRPTFALETDGPSNTDGQDFDEDSGFLGRTRLGRLIQAAARELLDKLNSARTNSPTKIFLVLLGFYTANALATILGQTGDWDVLVAGVVVAAIEGIGMLMYRKPIARPPGRFQSLISMVNYWKAGVCLGLFVDAFKLGS

SEQ ID NO: 47899 - protein, 259 aa, Zea mays
  Clone ID: 700582077_FLI.pep
AHSLELPLHWRASRLETRWFIDYYARDRNMCPLLLQFAEIDFNQVQYEHQKDLAVVTRWWKKIGLGEKLPFARDRLMECFHYANGIVWDPKLGTCRQMLAKVSNLIVYLDDVYDVYGTIEELVLFTNAIARWDAIPNETLPEYMKALYSIIYDTSNEVAEHALKKHGCSMHYLLQKSWYDICLAFLVEAKWHHGNYRPSIQKYLENGWVSSSAPLLLLHAFSMLDSVVNMSTISPLQTKLRLVQHVSLICVSAMILQHT

SEQ ID NO: 47900 - protein, 256 aa, Glycine max
  Clone ID: 700605377_FLI.pep
VLLKEQGFRGFFRGWVPTLLGYSAQGACKFGFYEFFKKYYSDIAGPEYASKYKTLIYLAGSASAEVIADIALCPFEAVKVRVQTQPGFARGLSDGLPKFVRSEGTLGLYKGLVPLWGRQIPYTMMKFASFETIVELIYKHAIPTPKNECTKSLQLGVSFAGGYVAGVLCAIVSHPADNLVSFLNNAKGATVGDAVKKLGLWGLFTRGLPLRIVMIGTLTGAQWGIYDAFKVFVGLPTTGGPAPAAAPAPGSELAKA

SEQ ID NO: 47901 - protein, 328 aa, Glycine max
  Clone ID: 700676878_FLI.pep
PVVAAALHFSLQLPKMAPPRGRGGFGGGGGFRGGGRGDRGRGRGGGGRGGDRGTPFKARGGGRGGGGRGGGKGGGRGGGRGGMKGGSKVVVQPHRHDGIFIAKGKEDALVTKNLVPGEAVYNEKRITVQNEDGSKDEYRVWNPFRSKLAAAILGGVDNIWIKPGARVLYLGAASGTTVSHVSDVVGPTGVVYAVEFSHRSGRDLVNMAKKRTNVIPIIEDARHPAKYRMLVGMVDVIFSDVAQPDQARILGLNASYYLKAGGHFVISIKANCIDSTVPAEAVFESEVNKLKADQFKPFEQVTLEPFERDHACVVGGYRMPKKKKDAAE

SEQ ID NO: 47902 - protein, 358 aa, Glycine max
  Clone ID: 700677752_FLI.pep
VGVVWFYFRYKNFQDSKRAIDKSKWTLMSFHKLGFSEDEILNCLDEDNVIGSGSSGKVYKVVLSSGEVVAVKKIWGGVKKEVESGDVEKGGRVQDNAFDAEVETLGKIRHKNIVKLWCCCTTRDCKLLVYEYMPNGSLGDLLHSSKGGLLDWPTRYKIAVDAAEGLSYLHHDCVPAIVHRDVKSNNILLDVDFGARVADFGVAKAVETTPKGAKSMSVIAGSCGYIAPEYAYTLRVNEKSDIYSFGVVILELVTGKRPVDPEFGEKDLVKWVCTTLDQKGVDHLIDPRLDTCFKEEICKVFNIGLMCTSPLPIHRPSMRRVVKMLQEVGTENQTKSAKKDGKLSPYYYDDASDHGSVV

SEQ ID NO: 47903 - protein, 266 aa, Glycine max
  Clone ID: 700677756_FLI.pep
SHFGRSGPPDISDTYSLLVLNITFRTTADDLFPLFDKYGKVVDIFIPKDRRTGESRGFAFVRYKYADEAQKAVERLDGRMVDGREITVQFAKYGPNAERIHKGRIIETSPRSRRSRSRSPRKRHRDDYRDRDYRRRSRSRSYDRYERDRHRGRDKDYRRRSRSRSASLDYKGRGRGRYDDERNSRSRSRSVDSRSPARRSPSPRRSPSPQRSTSPQRSTSPRKSPRGESPANRSCEERSPTPRSVSPRGRPDASRSPSPRNSNGDE

SEQ ID NO: 47904 - protein, 218 aa, Glycine max
  Clone ID: 700678327_FLI.pep
QHAPIAMNIFTKKPTAKEALRESKREMTNASRGIEKEIGALQSEEKKLVAEIKRTAKTGNEAATKILARQLIRLRQQIANLQGSRAQMRGIATHTQAMHAHSSVAVGLKGATKAMAAMNKKMEPAKQAKIIQDFQKQSAQMDMTTEMMSDAIDDALDNDEAEEETEELTNQVLDEIGVDVASQLSAAPKGRVATKNAENDSSSGIEELEKRLAALRNP

SEQ ID NO: 47905 - protein, 100 aa, Glycine max
  Clone ID: 700678783_FLI.pep
LPIFKFKLKNNENGDDQDANSAIDEGGILAAGTEKERMISGEDAVCCICLAKYADDDELRELPCSHVFHVECVDKWLKINATCPLCKNEVGTSNGGSPSA

SEQ ID NO: 47906 - protein, 32 aa, Glycine max
  Clone ID: 700681024_FLI.pep
TKYQKLLHSVRIISACTLGIVKALFVRNEQVI

SEQ ID NO: 47907 - protein, 118 aa, Glycine max
  Clone ID: 700682052_FLI.pep
VEVSTSKTGKHGHAKCHFVAIDIFNGKKLEDIVPSSHNCDVPHVNRTDYQLIDISEDGFVSLLTDNGNTKDDLKLPTDEALLAQIKDGFSEGKDLVVSVMSAMGEEQICSLKDIGPKN

SEQ ID NO: 47908 - protein, 143 aa, Glycine max
  Clone ID: 700683458_FLI.pep
INNRAISNGLELRPSQVVNRPRVTVGGEDLRTFYTLVMVDADAPSPSNPVLREYLHWMVTDIPATTNASFGREVVFYESPNPSVGIHRIVFVLFQQLGRDTVITPEWRHNFNSRNFAEINNLAPVAAAYANCQRERGCGGRRY

SEQ ID NO: 47909 - protein, 219 aa, Glycine max
  Clone ID: 700684661_FLI.pep
SYGSLTMSTTTTLNQVLWSQTKSCRHGGQRLEHLVMLTKKDEPWWPRLKTPKDLIGILNTIIWVTSGHHAAVNFGQYVYGGYFPNRPTIVRTKMPSEDPTEEEWKKFIANPERALLKCFPSQLQATRVMAVLDILSTHSPDEEYIGEKMEPSWGEDPVIKDAFERFRERLKKLETLIDERNENTKLKNRNGAGIVPYELLKPFSKPGVTGMGVPCSISI

SEQ ID NO: 47910 - protein, 296 aa, Glycine max
  Clone ID: 700685431_FLI.pep
ALPDQRRSDGMLLTPCGTPAYVAPEVLKKKGYDGSKADIWSCGVILFALLSGYLPFQGENVMRIYSKSFKADYAFPEWISPAAKNLISNLLVVDPQKRYSIPDIMKDPWFQIGFLRPIAFSMKESALEDNIDFSGDDVPSPGSDDGNSSSNNEDGELTGAKPARPSYNAFEIISSLSHGFDLRNLFETRKRSPSMFISKFSASAVMAKLEGVAKKLNFRVTGKKEFMVRMQGATEGRKGKLAMTVEVFEVAPEVAVVEFSKSAGDTLEYLNFCEDQVRPSLRDIVWSWQGDANCHQ

SEQ ID NO: 47911 - protein, 152 aa, Glycine max
  Clone ID: 700725668_FLI.pep
GIQARMWVALSIFFLTVLTLLRQVAYPVTKKFPALSSNDDKSTSKPPPDTTNMEVLPPSSTPSCTEENLLPSMLKRLGELEEKVDTLQSKPSEMPYEKEELLNAAVCRVDALEAELIATKKALYDALMRQEELLAYIDRQEEAKLRKKKFCW

SEQ ID NO: 47912 - protein, 188 aa, Glycine max
  Clone ID: 700725784_FLI.pep
NEVTNPNLVPLLGSLVGFDSTRFSLMKKHLMHSYGVAVIVVLALSLSLGASAEQLSSRECENLGFTGLALCSDCNTLSEYVKDKELVSDCFKCCTEDSNDATTKITYSGALLEVCMRKLVFYPEVVGFIEDEKDQFPSVKVQYVFNSPPKLIMLDEVGQQKETIRIDNWKREHILQFLREKVKPLASD

SEQ ID NO: 47913 - protein, 88 aa, Glycine max
  Clone ID: 700726307_FLI.pep
ARTAVVFFCFAIVKTVDDHCGLWLPGNIFHIFFQNNTAYHDIHHQLQGLKYNYSQPFFSIWDKLLGTYMPFNLVKRPEGGFEARLAKE

SEQ ID NO: 47914 - protein, 232 aa, Glycine max
  Clone ID: 700727423_FLI.pep
SEPLSKEWTQFYLLEGLSSSSSPPSSSSESSLSDLFLFGGASDFSPSSSSTSSSSSSPFSSGSKSLDASSSSAVTRGRIRYSVPKSASSPCSSSSSSSSSSSSSSLSSSSGSPPRWTSLSSSSSSSSSSSPPSGASSSSSSSSSSLSSSSSSSSSSSSSSSPSSTTSSSDSYSSSSSSSTKTVTSFSSTCWLNSFVAFIFKSRNQRMLRSPRDFETRCSANKRRKKNSIQNR

SEQ ID NO: 47915 - protein, 211 aa, Glycine max
  Clone ID: 700727819_FLI.pep
RNEACHNVVFTAGFNAYGGLKNQFPYVLKWLGLSGEKLHADLAREVRRVVNDEGGVTFTALENMPLVKSVVYEVMRIEPAVPYQYARARENLVVSSHDASFEVKKGEMLFGYQPFATRDPRIFEDAEVFVPRRFVGEGEKMLKHVLWSNGRETEEPSASNKQCPGKNLVVLLCRLFLVELFLRYDTFEFEYTQAGFGPTITIKSLTKASTI

SEQ ID NO: 47916 - protein, 166 aa, Glycine max
  Clone ID: 700728090_FLI.pep
LDEKDTTSALFSQDRFIAYAIALGSCENKAEVVSLDEKESGLRATLNLGHTFGHAIETGVGYGQWLHGEAVAAGTVMAVDMSYRLGWIDDSLVKRVGDILKQAKLPSAPPETVTVDMFKSVMAVDKKVADGLLRLILLKGPLGNCVFTGDYDRKALDDTLRAFCKS

SEQ ID NO: 47917 - protein, 292 aa, Glycine max
  Clone ID: 700728502_FLI.pep
KAGIPDGVLNIVPGFGPTAGAAISSHMDIDAVSFTGSIEVGREVLQAAAWSNLKPVSLELGGKSPLIIFNDADIDKASELALFGIMSNKGEICVAGSRVFVQEEIYDEFEKKLVEKAKSWVVGDPFDPKSLQGPQADRNQLEKILSYIEHGKREGATLLTGGNTVGNKGYYIEPTIFSNVKEDMLIAREEIFGPVLALMKFKTMEEAIKSANNTKYGLAAGIVTKNLDTANTMSRSIRAGIVWINCYFTVGSDVPFGGYKMSGFGRDLGLQALHKYLQVKSVVTPIHNSLWL

SEQ ID NO: 47918 - protein, 241 aa, Glycine max
  Clone ID: 700728813_FLI.pep
QLYSSSLGDVFAITAAGDFVAHVLNAYTGEDVAGKILSFAQKGPRGICILSANGAISNVTIRQPGSSGGILTYEGRFEILSLSGSFTVVDNSGMKSRTGGLSVSLAGPDGRVIGGGVAGLLTAAGPIQIVVGSFMQNCCKTQKRKYQREQQIVAATPTSAGPEIVTAAIPISQANAADGENFLIPIPIYQIPDQNQRESISVSSDKQNLDATPDAAATWNGSEEYSDQRTSPDINISLPDE

SEQ ID NO: 47919 - protein, 286 aa, Glycine max
  Clone ID: 700728866_FLI.pep
TGSLPDSIVNLGQLGILDFHNNKLSGELPKGIRSWKKLNDLNLANNEIGGRIPDEIGGLSVLNFLDLSRNRFSGKVPHGLQNLKLNQLNLSYNRLSGELPPLLAKDMYKSSFLGNPGLCGDLKGLCDGRSEERSVGYVWLLRTIFVVATLVFLVGVVWFYFRYKSFQDAKRAIDKSKWTLMSFHKLGFSEDEILNCLDEDNVIGSGSSGKVYKVVLSSGEFVAVKKIWGGVRKEVESGDVEKGGRVQDNAFDAEVETLGKIRHKNIVKLWCCCTTRDCKLLVYEYA

SEQ ID NO: 47920 - protein, 76 aa, Glycine max
  Clone ID: 700729363_FLI.pep
QVRLLGRSKYVNKKSFIGLGRDRTGVARGLSLVWCVVFAVLSFSLCLLLLPICRSTPYYDSGSEGYIRGFAPTPIE

SEQ ID NO: 47921 - protein, 115 aa, Glycine max
  Clone ID: 700729902_FLI.pep
MESSQLKTYNLTESDLVKDHLRYLMGGRSNIQNEVLCRFTFPERPGALMKFLDPFSPRWNISLFHYRGEGETGANVLVGIQVPKSEMDEFHDRANKLGYDYKVVNNDDDFQLLMH

SEQ ID NO: 47922 - protein, 171 aa, Glycine max
  Clone ID: 700730133_FLI.pep
ISSSLLRKKEKTNKTMAFASFLGRVLFASVFILSAYQQFNEYGVDGGPATKALRPKFDAFTHRVHSQVGFQIPEINLKFLIAGAIALKGLGGVLFIFGSSFGALLLLLHQLIATPIHYDFYNYDSEDKEFTQLFIKFTQNMALFGAVLFFIGMKNSIPKRVPKKAPKTKTY

SEQ ID NO: 47923 - protein, 369 aa, Glycine max
  Clone ID: 700730441_FLI.pep
FNVGKYRRLKHGSSQSADFFRADNPEGVEARNEVAKMAFEDMISWMQEGGQVGIFDATNSSKQRRNMLMKLAEGRCKIIFLETICNDVDIIERNIRFKIQQSPDYAEVSDFEAGLRDFKERVANYEKVYETVEEGSYIKMIDMASGHGGQIQVKNISGYLPGRIVCFLVNTHLTPRPILLTRHGESQYNVRGRIGGDSALSEAGELYKKKLAKFVEKRLKSERAACIWTSTLQRTILTAGPIVGFPKIQWRALDEINAGVCDGKTYEEIKKNMPEEYESRNKDKLRYRYPRGESYLDVIQRLEPVIIELERQRAPVVVISHQAVLRALYAYFTDRPLKEIADIEMPLHTIIEIQLGVTGVEEKRYKLMD

SEQ ID NO: 47924 - protein, 335 aa, Glycine max
  Clone ID: 700730247_FLI.pep
GSVEAAERNKLVFMEGGVYGFGLEDLLRASAEVLGKGSMGTSYKAILEDGTTVVVKRLKDVAAAKREFEARMEVVGNVKHENVVPLRAFYYSKDEKLLVYDYMAAGSLSALLHGSRGSGRTPLDWDTRMKIALGAARGLACLHVSGKLVHGNIKSSNILLHPTHEACVSDFGLNPIFANPVPSNRVAGYRAPEVQETKKITFKSDVYSFGVLMLELLTGKAPNQASLSEEGIDLPRWVQSVVREEWTAEVFDAELMRYHNIEEEMVQLLQIAMTCVSLVPDQRPNMDEVVHMIQDISRSETTDDGLRQSSDDPSKGSDGHTPPQDARTTPRSDTS

SEQ ID NO: 47925 - protein, 391 aa, Glycine max
  Clone ID: 700731210_FLI.pep
NLAVSLLMVPWNRILTITKWKDKTQHLATNNERHKIMIKSPKEADFPLKQEGHSQSITDPEKAKASASSVAQWPRLKDPRIVRVSRAFGGKDRHSKVFTIRGLRDRRVRLSVPTAIQLYDLQDRLGLSQPSKVVDWLLDAAKHEIDELPPLPVVPSVNNFTLGHPSAVTSNEATTSNSQPNEQLLNINRSIQWEGSNQNSTWKLKPKEVSREMISTDKPNWISRSEEDKQGSNNEGPSTRVIPNINLLPRANLNHPSFLGLLNTMPHGYQWEPSAGDVSHQLGNNGFANQTDMHSINVVPFPTSTLSLSTGNSQILLCPPGTAQPYFPSHVTMDMDPRQINHYQMLSSGSQNPLANYLNHSFSLAMMTHKPLHSPNSSKSPSHKDQDFPSN

SEQ ID NO: 47926 - protein, 135 aa, Glycine max
  Clone ID: 700731703_FLI.pep
VEGLQVFVDGRWYSVAPKEDAFVVNIGDTFMALSNGMFKSCLHRAVVNNKIVRKSLAFFLCPNRDKVVTPPKDLISYENSRTYPDFTWPSLLEFTQKHYRSDTKTLDAFSRWLLEKNNPNRGAPTNVPWPTKSIN

SEQ ID NO: 47927 - protein, 488 aa, Glycine max
  Clone ID: 700736883_FLI.pep
KLKKATLESAARRLGGGKEAMKQLLKLILEWVQTSHLQNKRRKENNGSSISSVLQAQFQDPSGQNNNQNTQSGSFAPESNTCFNNQTPWLSSQTFATDQAPLMVPPQQFPQPMVGYVGDPYTSGAASNNISATHNHNNSNPYQPGAEQYHMLESAHSWPHSLFNVASNYSQSFGDNNGLNPHGGFGGGGYGNNQYPYQFFHGPGDRLMRLGPSATKEARKKRMARQRRFLSHHRHHSGNHQNQGSDPHARMGGDNCNTALAAPHHANPSANWMYWQAMIGGAAGPLAPVIPAEPPVVQPVVDRSAMQTQNCHQNRVASDRRQGWKPEKNLRFLLQKVLKQSDVGSLGRIVLPKKEAETHLPELEARDGISITMEDIGTSRVWNMRYRYWPNNKSRMYLLENTGDFVRANGLQEGDFIVIYSDVKCGKYMIRGVKVRQQGVKPETKKAGKSQKNQHGTGTNASSTAGTAANNGTSSSPKTKSEKSSKLI

SEQ ID NO: 47928 - protein, 550 aa, Glycine max
  Clone ID: 700737222_FLI.pep
TSLHPTTFHLQTNMGRKHDAVLASEPVAEEAPCSPELDSEKKKKKKKKNKNKDKHQTESSPKRKLDEHDPQNGTESKKKKKKHHESKGNAEETNGDSNNNNGDGANREETATDGSVVVTGNNAGEAKYAAVKSFADSGLPENVLECCKGFEKPSPIQSRAWPFLLDGRDLIGIAATGSGKTLAFGIPAVMHVLGKRKGKSSKGRNPLGLVLSPTRELAQQISDVMCDAGRSCGVQSICLYGGTSKGPQISSLKSGIDIVIGTPGRIQDLIEMGICCLKEVSFVVLDEADRMLDMGFEQIVRSILGQTCSDRQMVMFSATWPLPVHYLAQEFMDPNPVKVVVGSEDLAANHDVMQIVEVLDDRSRDKRLVALLEKYHKSQRNRVLVFVLYKLEAKRVENMLQEGGWKVVSIHGDKAQHDRTKALSLFKNASCPLMIATDVAARGLDIPDVEVVINYSFPLTTEDYVHRIGRTGRAGKKGVAHTFFMQQNKGLAGELVNVLREAGQIVPDALLKFGTHVKKKESKLYGAHFKEIPVDAPKSQKKTFDDSDED

SEQ ID NO: 47929 - protein, 273 aa, Glycine max
  Clone ID: 700737763_FLI.pep
EIRRWELMVALSFQGGRASPAQPQHPSLCSGRAAGVIRIRCGIAEPSGEPAPLGQKTRYHDGIFEKAFMTLFARKMEKFSDPPAGKARENKGWWDWGYDYESFVDVSRRVMQRRSRIQQQQVVREVLLSMLPPGAPAQFRKLFPPTKWAAEFNAALTVPFFDWLVGPSEVVEVEINGVKQKSGVHIKKCRYLENSGCVGMCVNMCKIPTQDFFTNEFGLPLTMTPNFEDMSCDMVYGQSPPTFEEDPVSKQPCYADICSMAKPSSSVCPKLQA

SEQ ID NO: 47930 - protein, 283 aa, Glycine max
  Clone ID: 700898255_FLI.pep
VLENCELPCANHGHVILGDPSPILFYPISSTEIRCLVDVPGQKVPSISNGEMGKYLKTTVAPQIPPQLYDAFIAAVDKGNIRTMPNRSMPADPHPTPGALLMGDAFNMRHPLTGGGMTVALSDIVVLRNLLRPLSDLNDAPTLCKYLESFYTLRKPVASTINTLAGALYKVFCASPDQARKEMRQACFDYLSLGGLFSEGPVSLLSGLNPRPLSLVLHFFAVAIYGVGRLLLPFPSPKRVWIGARLISGASAIILPIIKAEGIRQMFFPATVPAYYRTPPVAQ

SEQ ID NO: 47931 - protein, 235 aa, Glycine max
  Clone ID: 700899221_FLI.pep
LGRKNIMGRGRVELKRIENKINRQVTFAKRRNGLLKKAYELSVLCDAEVALIIFSTRGKLYEFCSTNSMLKTLERYQKCSYGAVEVSKPGKELESSYREYLKLKARFESLQRTQRNLLGEDLGPLNTKDLEQLERQLDSSLKQVRSTKTQFMLDQLADLQNKEHMLVEANRSLTMKLEEINSRNQYRQTWEAGEQSMPYGTQNAHSQGFFQPLECNPTLQIGSDYRYIPEASSSS

SEQ ID NO: 47932 - protein, 198 aa, Glycine max
  Clone ID: 700899315_FLI.pep
AGSSYGNEEFVSMAEIMEAEDHDRDRVHIVFGLSNELSVPGLKVGVIYSYNDNVVAASSKLARFSTVSAPTQRLLISMLSDTSFVQKFIEVNRLRLRKMYNTFVAGLKQLGIECTRSSGGFCCWADMSRLIGSYSEKGELELWDRLLNVAKINVTPGSSCHCIEPGWFRFCFATSTEKDVSVVMERIRRTVDATNGHG

SEQ ID NO: 47933 - protein, 92 aa, Glycine max
  Clone ID: 700900022_FLI.pep
MVLQNISYPVQCPPYFQSFCRGFFIRHYPFHVLYVWPTFLPILILDPLIFDYQRCPQRFALSRTSADPISQQFLRNLFPEGHPSLHNLKSFT

SEQ ID NO: 47934 - protein, 371 aa, Glycine max
  Clone ID: 700900416_FLI.pep
NTTADRSDYLWYSLSIDLDAGAQTFLHIKSLGHALHAFINGKLAGSGTGNHEKANVEVDIPITLVSGKNTIDLLSLTVGLQNYGAFFDTWGAGITGPVILKCLKNGSNVDLSSKQWTYQVGLKNEDLGLSSGCSGQWNSQSTLPTNQPLTWYKTNFVAPSGNNPVAIDFTGMGKGEAWVNGQSIGRYWPTYASPKGGCTDSCNYRGAYDASKCLKNCGKPSQTLYHVPRSWLRPDRNTLVLFEESGGNPKQISFATKQIGSVCSHVSESHPPPVDSWNSNTESGRKVVPVVSLECPYPNQVVSSIKFASFGTPLGTCGNFKHGLCSSNKALSIVQKACIGSSSCRIELSVNTFGDPCKGVAKSLAVEASCA

SEQ ID NO: 47935 - protein, 308 aa, Glycine max
  Clone ID: 700900550_FLI.pep
NPFGDFKSMHRHISKGSWTFSDQDHGWQVSDCTAEGLKCCLLLSMLPPEIVGEKMEPERLYDSVNVLLSLQSKKGGLAAWEPAGAQEWLELLNPTEFFADIVVEHEYVECTGSAIQALVLFKKLYPGHRKKEIENFITNAVRFLEDTQTADGSWYGNWGVCFTYGSWFALGGLAAAGKTYTNCAAIRKAVKFLLTTQREDGGWGESYLSSPKKIYVPLEGSRSNVVHTAWALMGLIHAGQADRDPMPLHRAAKLLINSQLEEGDWPQQEITGVFMKNCMLHYPMYRDIYPMWALAEYRRRVPLPSTEV

SEQ ID NO: 47936 - protein, 132 aa, Glycine max
  Clone ID: 700901135_FLI.pep
EKLKKDNEKLSGELALAKKQCEELVAFLRDSLNVSPDVIERIIRQGTCVSSNNDAVRFDAIINNDLDDDENAVGECEPQQPPPKGDNGESLKLFGVWLKGQNGKENSIGKCRKRGRQDYPIAATAKELKTLV

SEQ ID NO: 47937 - protein, 67 aa, Glycine max
  Clone ID: 700901258_FLI.pep
WHLRKHLVLPLKRTVHRASLRFRMLQILLKKSFRRRVLRVNMYQKVCVKHELIIVSMPINIYGVGQF

SEQ ID NO: 47938 - protein, 314 aa, Glycine max
  Clone ID: 700901287_FLI.pep
EHTFTASKPGSGMVVAVKRLKPEGFQGHKEWLTEVNYLGQLYHPNLVKLIGYCLEGENRLLVYEFMPKGSLENHLFRRGPQPLSWSVRMKVAIGAARGLSFLHNAKSQVIYRDFKASNILLDAEFNSKLSDFGLAKAGPTGDRTHVSTQVMGTQGYAAPEYVATGRLTAKSDVYSFGVVLLELLSGRRAVDKTITGMEQNLVDWAKPYLSDKRRLFRIMDTKLEGQYPQKGAFTAATLALQCLNSEAKARPPMTEVLATLEQIEAPKTAGRNSHSEHHRLQTPVRKSPARNRSPLNLTPTASPLPAHRQSPRVH

SEQ ID NO: 47939 - protein, 116 aa, Glycine max
  Clone ID: 700901839_FLI.pep
ATFPSPSSPLPAEAAPASSAPPKAAPALPSPGKASTSSHPPLKCPMAGTFYRSPAPGEPAFVKVGDKVKKGQVICIIEAMKLMNEIEADQSGTIAEVLAEDGKPVSVDMPLFVIVP

SEQ ID NO: 47940 - protein, 289 aa, Glycine max
  Clone ID: 700902222_FLI.pep
WLRHRNLVPLLGWCRRRGDLLLVYDFMENGSLDKYLFDGPKTILSWEQRFKVIKDVASALLYLHEGYEQVVIHRDVKASNVLLDGGLNGRLGDFGLARLYEHGANPSTTRVVGTFGYMAPEVPRTGKSTPNSDVFAFGALLLEVACGLRPLEPKALPEDVVLVDCVWNKYKQGRILDLVDPKLNGAFNEREVLMVLKLGILCSNAAPAARPSMRQVVRFLDGEVGLPDELRKPEEVGYQEGFDEFMNSLEPSSFYQMSTSSYAIKTDMDARFPFIDTSLYTLHARGETR

SEQ ID NO: 47941 - protein, 144 aa, Glycine max
  Clone ID: 700903312_FLI.pep
EHLQSDSHCPVCKERFELGSEARKMPCNHVYHSDCIVPWLVLHNSCPVCRVELPPKEHTSSRGRRIWGNGSGSGSSNDISRGRENRQMNNGRRNLLSYLWPFRTSSSSTQSVFVLSESHFPKHVERDFYEIDFEGDSKPNQRQP

SEQ ID NO: 47942 - protein, 582 aa, Glycine max
  Clone ID: 700904431_FLI.pep
NNNFSGVVPEGLWGLPHLYLLELVYNSLSGSISNSISGAWNLSMLLISGNKFSGSIPEGVGELGNLEKFVANNNSLTGRIPKSVFRLSQLDRLVLGDNQLFGEIPVGVGGCKKLNELDLANNRLGGSIPKELGDLPVLNYLDLSGNQFSGEIPIELQKLKPDLLNLSNNQLSGVIPPLYANENYRKSFLGNPGLCKALSGLCPSLGGESEGKSRKYAWIFRFIFVLAGIVLIVGVAWFYFKFRDFKKMKKGFHFSKWRSFHKLGFSEFEIIKLLSEDNVIGSGASGKVYKVALSNGELVAVKKLWRATKMGNESVDSEKDGFEVEVETLGKIRHKNIVRLWCCCNSKDSKLLVYEYMPNGSLADLLHNSKKSLLDWPTRYKIAIDAAEGLSYLHHDCVPSIVHRDVKSSNILLDDEFGAKVADFGVAKIFKGANQGAESMSVIAGSYGYIAPEYAYTLRVNEKSDIYSFGVVILELVTGKLPLDPEYGENDLVKWVQSTLDQKGLDEVIDPTLDIQFREEISKVLSVGLHCTNSLPITRPSMRGVVKKLKEVTELPKSLSGKLSSPYFQEEASDIDHEGSLV

SEQ ID NO: 47943 - protein, 190 aa, Glycine max
  Clone ID: 700905448_FLI.pep
ITENGVSDETDLIRRPYLLEHLLAIYAAMIMGVRVLGYLFWTISDNWEWADGYGPKFGLVAVDRANNLARTPRPSYHLFSKIVNTGKVTHEDRERAWDELQRVAKEKKTRPFYRAVDKHRLMYAGGLDKPEQRPYIERDWRFGHYQMDGLQDPLSRFSRSIFRPFSLFSLKRKPKSQKKNAKLILQPLET

SEQ ID NO: 47944 - protein, 219 aa, Glycine max
  Clone ID: 700905387_FLI.pep
NPKRGVASKMRSSKMWMVFMCLTVSFFARIESLSVTVNDVECVYEYVLYEGDTVSGNFVVVDHDIFWSSDHPGIDFTVTTAAGNTVHSIKGTSGDKFSFKAPSHGMYKFCFHNPYSTPETVSFYIHVGHIPSEHDLAKDEHLDPINVKIAELREALESVTAEQKYLKARDARHRHTNESTRKRVVFYTVGEYLLLAAVSALQVIYIRRLFSKSVAYNRV

SEQ ID NO: 47945 - protein, 373 aa, Glycine max
  Clone ID: 700905933_FLI.pep
ENLMKKDMITNVTEYEAIAKEKLPKMVYDFYASGAEDQWTLKENRNAFSRILFQPRILIDVSKIDLTTTVMGFKISMPIMIAPTAMQKMAHPEGELATARAASAAGTIMTLSSTATSSVEEVASTGPGIRFFQLYVLKDRNVVAQVVRRAEKAGFKAITLTVDSPILGRREADIKNRFTLPPNLVLKNFEGLDLGKLNKTSDSFAASYAAELYDRSLNWKDIKWIQTITSLPILLKGVLTPEDTMIAIQAGAAGIIVSNHGARQLDYVPATIMALEEVVKATQGRIPVFLDGGIRRGTDVFKALALGAAGVFIGRPVVFSLAADGEAGVRKVLQMLRDEFELTMALSGCRSLKEITRDHVLTEWDRPRFSPKL

SEQ ID NO: 47946 - protein, 341 aa, Glycine max
  Clone ID: 700906672_FLI.pep
NLFVPSIHSISSKMAKDPVRVLVTGAAGQIGYALVPMIARGVMLGPDQPVILHMLDIPPAAESLNGVKMELVDAAFPLLKGVVATTDVVEACTGVNIAVMVGGFPRKEGMERKDVMTKNVSIYKSQASALEKHAAANCKVLVVANPANTNALILKEFAPSIPEKNISCLTRLDHNRALGQISERLNIQVSDVKNVIIWGNHSSTQYPDVNHATVGEKPVRELIADDAWLNGEFITTVQQRGAAIIKARKLSSALSAASAACDHIRDWVLGTPQGTWVSMGVYSDGSYNVPAGLIYSFPVTCANGEWTIVQGLPIDEFSRKKLDLTAEELSEEKALAYSCLN

SEQ ID NO: 47947 - protein, 223 aa, Glycine max
  Clone ID: 700907070_FLI.pep
SLQLHPLFTMKATLKGKYDVDKNGAAFANIAVNAGDVKFRASVTEATFINGPSLTGLALAVEKPGSFIVDYNVPKKDFRFQFMNTVRVGERPLNLTYAHSRGDNRTVLDGTFVYDSANKVSANYALDSGNCKLKYTYVHKGLTTFEPAYDVAKNTWDFAVSRRVYGGDDTLRASYQTSSRVLGVEWSRNPKHTAGFKIVASVNLAEEFKAPKLVAETTWNFEM

SEQ ID NO: 47948 - protein, 158 aa, Glycine max
  Clone ID: 700907506_FLI.pep
FFFLILFVSHGKFTERTRICFRDALYRLARNTEEQPVMLDQNEDLNIQKAIPHTDHNETMRSQDKKPMESETNNIDRIIANLMFKSMEFNIHHSPITSSTNSVQQVIGSNNGPRGNNSKAMNMEDKSCYSHPQKLLVDAEIPRFGLSNQPRDTGSYIT

SEQ ID NO: 47949 - protein, 397 aa, Glycine max
  Clone ID: 700907636_FLI.pep
SLLMKSVDENGDGSKRVISLGMGDPTLTTYFPISNVAEKAVAEALQSHRFRGYAPTAGLPQARIAIAEYLSRDLPYQLSSDDVYITCGCTQAIDVSVAMLARPGANIILPRPGFPLYELSASFRGVEVRHYDLLPEKGWEVDLDAVEALADQNTVALVIINPGNPCGNVYSYHHLEKIAETAKRVGTIVIADEVYGHLAFAGKPFVPMGVFGSIVPVLTLGSFSKRWIVPGWRLGWFVTNDPSGTFRNPKVDERFKKYFDLLGGPATFIQAAVPQIIEHTEKVFFKKTIDNLRHVADICCKELKDIPYIICPYKPEGSMAMMVKLNLSLLEDISDDIDFCFKLAKEESVIILPGTAVGLNNWLRIIFATDPVALVEGLKRVKSFCERHARKWSMTTE

SEQ ID NO: 47950 - protein, 385 aa, Glycine max
  Clone ID: 700908268_FLI.pep
EIRSQLIMGREVTGMQVVDKKPNGVIPASNGSSNDKVCISPKRTAAKVQAKDHEVNECTKANSFVEKSQEKMDGLSAKATNCNTGLPEEEIEISEVQKMGDSKKLSPPAARKEHTSHLVTHPSDLVTEKHGSHTQIVDAEADATGLNLSPNTNNMLSPISSKNSQPNSPFSSRKTLQHDKKNYDDEDNWSVASSAMSMRTARSKVTHGSAPTFRCSERAEKRREFYLKLEEKHRALREEKNQYEARFKEEQEAAIKQLRKNLVIKANPVPSFYYEAPPPKTELKKLPLTRPKSPKLSRRRSLGDALNPSPEVCSRGRHSTGGVGHTKGGSNASFPHKNNIRRNSNGVCKPKERTKEDKETKTAPPKITDHANADIPVQSCPLRPK

SEQ ID NO: 47951 - protein, 277 aa, Glycine max
  Clone ID: 700908643_FLI.pep
FSFSEIKSLTGDLKDQIGPNMFKGVLPNNHLIAVKDLNASIEERKFRSAVMKLGNIHHKNLVKLEGYCCEFNHRFLVYEYVKIGSLHKYINDCTLCKRLTWRKRIEICSSVAKAICYLHTGCREFVSHGNLKCENVMLDENSVAKVCEYGFAIADGEATYRGFSAEKDVGDFGKLALTLFTGCLVHEQLYEWAYTEWMEGRAVNVVDKRLDGVVNSEELERALRISFWCLQMDERRRPSMEEVVRVLDGTLNVDPPPPPFVLHRPLQEDDPQENGSD

SEQ ID NO: 47952 - protein, 342 aa, Glycine max
  Clone ID: 700909008_FLI.pep
PVSKSLYRRINRVVAELLWLELVWLIDWWAGVKVQIFTDHETFRLMGKEHALVISNHRSDIDWLVGWVSAQRSGCLGSTLAVMKKSSKFLPVIGWSMWFSEYLFLERSWAKDESTLKSGIQRLSDFPLPFWLALFVEGTRFTQAKLLAAQEYATSTGLPVPRNVLIPRTKGFVSAVSHMRSFVPAIYDVTVAIPKSSPAPTMLRLFKGQPSVVHVHIKRHLMKELPDTDEAVAQWCRDIFVAKDALLDKHMAEGTFSDQELQDTGRPIKSLLVVISWACLVVAGSVKFLQWSSLLSSWKGVAFSAFGLAVVTALMQILIQFSQSERSNPAKIVPAKSKNKGS

SEQ ID NO: 47953 - protein, 360 aa, Glycine max
  Clone ID: 700909018_FLI.pep
THNSMTRRCSHCSNNGHNSRTCPSRGGGGVKLFGVRLTDGSIIKKSASMGNLNLSSAAAHHQFHSSPSSSNLAAAPSSPNPSSPCSDPPQGYLSDDPAHVSTFANRRGDRKKGVPWTEEEHRLFLIGLQKLGKGDWRGIARNFVVSRTPTQVASHAQKYFIRQSHATRRKRRSSLFDMVPDMSSDQPSVPEEQVLLPPSQNSQPCNGKSQPSLNLSLKSEFEPMETTSQENAQQTNETMMGSIGLTPMAPHGFFPAYLPVPFPMWPSTVAPPFEEVKGGETSHHQIHKPIPVIPKEPVNVDELVGMSHLSIGEAKVRDREPSPLSLKLLGEPSRQSAFHANAPVGTSDLNNGKDNAIQAV

SEQ ID NO: 47954 - protein, 263 aa, Glycine max
  Clone ID: 700909138_FLI.pep
LEEIKKEKDNKSCSKAMDVAHFLFGIFGNASALFLFLAPVITFKRIIKNRSTEKFSGIPYVMTLLNCLLSAWYGLPFVSPHNILVSTVNGTGSFIEIIYVLIFIVLAPRKEKAKILGLFTFVLSVFSAVVFVSLFALHGNSRKLFCGFAAAIFSIIMYGSPLSIMRLVIKTKSVEFMPFFLSLFVFLCGTSWFIFGLLGRDPFVAVPNGVGSALGTMQLILYFIYRDNKGVPRKQAPTEEESMEMGDAKPQQGKQSNANGIQG

SEQ ID NO: 47955 - protein, 537 aa, Glycine max
  Clone ID: 700909810_FLI.pep
SCAIQSQSHRNNIIQILETENIMANLDLDPFQTSILILVPIALLVALLSRTRRRAPYPPGPKGLPIIGNMLMMEQLTHRGLANLAKHYGGIFHLRMGFLHMVAISDPVAARQVLQVQDNIFSNRPATIAISYLTYDRADMAFAHYGPFWRQMRKLCVMKLFSRKRAESWQSVRDEVDAAVRAVASSVGKPVNIGELVFNLTKNIIYRAAFGSSSQEGQDEFIKILQEFSKLFGAFNIADFIPYLGCVDPQGLNSRLARARGALDSFIDKIIDEHVHKMKNDKSSEIVDGETDMVDELLAFYSEEAKLNNESDDLQNSIRLTKDNIKAIIMDVMFGGTETVASAIEWAMAELMRSPEDQKRVQQELADVVGLDRRAEESDFEKLTYLKCALKETLRLHPPIPLLLHETAEDATVGGYLVPKKARVMINAWAIGRDKNSWEEPESFKPARFLKPGVPDFKGSNFEFIPFGSGRRSCPGMVLGLYALELTVAHLLHCFTWELPDGMKPSEMDMGDVFGLTAPRSTRLIAVPTKRVVCPLF

SEQ ID NO: 47956 - protein, 123 aa, Zea mays
  Clone ID: LIB3067-037-C3_FLI.pep
DLAPSDASGGSPASPQASERSPDTILSAPRCTTTGAVCSGDAISKHSSVPLVENCTTPTVAVCTTLKRVAEKVVSELVGSERLGSNNSAELLESMEKEDVLAENVRFGGNGVAQGGLPEELEV

SEQ ID NO: 47957 - protein, 144 aa, Zea mays
  Clone ID: LIB3068-003-G6_FLI.pep
KLGLYVCMFLKKRIYYAGCLQSAYSLYTFRIESIAHGKPASVDELQFHGVHNPDFLRKVITREASRSIREVQSWKNRLYSEEGPSHVQSSGLHSPSAKVRASPICAAFDSKGKISDNILLHKIEELNRSVKNLESLLVRSHRRE

SEQ ID NO: 47958 - protein, 237 aa, Zea mays
  Clone ID: LIB3069-013-D1_FLI.pep
HIRKGEADVMLCGGSDAPIIPIGLGGFVACRALSQRNSDPAKASRPWDVDRDGFVMGEGSGVLVLEELEHAKQRGAEIYAEFLGGSFTCDAYHMTEPHPEGKGVILCIENALADSGVTKEDINYINAHATSTQMGDLKEFEALNRCFGQNPQLRVNSTKSMTGHLLGAAGGIEAVAAIQAIRTGWVHPNLNLDNPEKTVDVRMLVGPQKERCDVKVALSNSFGFGGHNSSILFAPFK

SEQ ID NO: 47959 - protein, 420 aa, Zea mays
  Clone ID: 700471463_FLI.pep
ERRIASGDLVDGDSFQVDTIQQLQGLYEELIENGEDCQLDRYKSSEKSGRSRWLWSRLITQPSSFAPVKGLYLYGGVGTGKTMLMDLFYEQLPSNWRKKRIHFHDFMLNVHSRLQMHKGVSDPLDVVAAEISDEAIILCLDEFMVTDVADAMILNRLFRQLFSKGIILVSTSNRAPDKLYEGGLQRDLFLPFIDTLKERCIVHPIGSAVDYRQLGSAEQGFYFVGKHYSTLLKQKLQSLIGDEEPSPQTVEVIMGRKLQVSLGANGCAYFPFEDLCDRPLGAADYFGLFKKFHTLALDGVPKFGSSNRTAAYRFVTLIDVMYENKARLLCTAEAGPVELFENIMTLAEAQKVSPRSSRSQKSDDPDLCVDNELGFAKDRTISRLTEINSREYLEDFEMRLGQQQLLPLQALDNGGDVVLA

SEQ ID NO: 47960 - protein, 90 aa, Zea mays
  Clone ID: 700549688_FLI.pep
KQQWAGERTLYACLLHFPTRLCWFFPPCRLAIRVATTQRTMTTVTIRMTKRRLNLSKDDGGGGNQPFRSAVVFGSRSSSLVGGGGSSGGW

SEQ ID NO: 47961 - protein, 130 aa, Zea mays
  Clone ID: 700550602_FLI.pep
KLFRLVSTCGRLLNDYQSLEREGNQGKLNSVSLLVLHSGGSMSIEAAKKAMQKSIDVSRRDLLRLVLRKESAVPRPCKELFWKMCKILHLFYSQNDGFSSPKEMVSAVNAVINEPLKVQNSTTFLSSSSR

SEQ ID NO: 47962 - protein, 86 aa, Zea mays
  Clone ID: 700553370_FLI.pep
LLCAYFLLQGLAYLHSIFKVHRDIKGGNILLTEQGEVKLGDFGVAAQLTRTMSKRNTVFLTVFLLLLQIPKFKKLHIDVTNKMKCR

SEQ ID NO: 47963 - protein, 94 aa, Glycine max
  Clone ID: 700553710_FLI.pep
HLVLKDIHATLKKFGSNIIFSNGLLDPWSGGGVLQNISESVVSLVTEEGAHHIDLRSSTKNDPDWLVEQRETEIKLIEGWISDYHQKNEAMFDM

SEQ ID NO: 47964 - protein, 433 aa, Glycine max
  Clone ID: 700874814_FLI.pep
NLLATLGDLERDSFVALLSKLIAESKYVQNNPPELIPQEDRVVKHVLDVLLPFSTTTGGGPLLVNHVTYHAGRGNLIVEYPGTVPGKILSFVGCHMDVVTANPNDWDFDPFSLSVDGDKLRGRGTTDCLGHVALVTELMRKLGETKPNLKSSVVAVFIANEENSAITGVGVDALVKDGLLNKLKDGPLYWIDTADKQPCVGTGGMIPWKLHVTGRLFHSGLAHKAINALELAMDALKEIQLRFYSDFPPHPQEQVYGFATPSTLKPTQWSYPGGGINQIPGECTISGDVRLTPFYNVKDVMKKLQEYVDDINESAQKLESRGPVSKYVLPDENIRGRLTLSFDEALSGVACDLNSRGFHVLCKATEEVVGYVKPYSITGSLPLIRELQEEGFDVQTSGYGLMATYHAQNEYCLFTDMSQGYRVFARIISQLEE

SEQ ID NO: 47965 - protein, 352 aa, Glycine max
  Clone ID: 700836747_FLI.pep
FISRCCCSSSMAFPQHHFQQHYQTQQQQQPQNKSFRNLQTIDGQMSQQVAFYNPTDLQDQSQHPSYIPPFHVVGFAPGPVPPADGSDGGVDLQLQWNYGLEPERKRLKEQDFLENNSQISSVDFLQPRSVSTGLGLSLDNTRLTSTGDSALLSLIGDDIERELQQQDAEIDRFLKVQGGRLRQAVLEKVQATQLQSVSLIEDKILQKLREKEAMVESINKRNIELEDQMEQLTVEAGSWQQRARYNENMIAALKFNLQQAYVQSRDSKEGCGDSEVDDTASCCNGRSLDFHLLSRENTDMKEMMTCKACRVNEVTMVLLPCKHLCLCKDCESKLSFCPLCQSSKFIGMEVYM

SEQ ID NO: 47966 - protein, 79 aa, Glycine max
  Clone ID: 700846513_FLI.pep
LAEKQQCCICSKKNTALQITPLWTWSTFLVKSSLGLVTKTFLLQSVDLVGIQKNETSVTLIYLDIKPHLQDSCTSKYWE

SEQ ID NO: 47967 - protein, 184 aa, Glycine max
  Clone ID: 700846841_FLI.pep
VQEELDRVIGLERVMTEADFSSLPYLQCVIKEAMRLHPPTPLMLPHRANANVKVGGYDIPKGSNVHVNVWAVARDPAVWKDPLEFRPERFLEEDVDMKGHDFRLLPFGAGRRVCPGAQLGINLVTSMLGHLLHHFCWTPPEGMKPEEIDMGENPGLVTYMRTPIQALASPRLPSHLYKRVPAEI

SEQ ID NO: 47968 - protein, 60 aa, Glycine max
  Clone ID: 700753353_FLI.pep
TIGRIHHQNVVQLIGYCVEGSKRALVYEFMPNGSLDKFIFPKDGNIHLTYDEIYNIAIGV

SEQ ID NO: 47969 - protein, 489 aa, Glycine max
  Clone ID: 700789616_FLI.pep
EQPPHHTALPFSSSTMSLPPPSLVTAATPTELPIRQIPGSYGFPLLGPISDRLDYFWFQKPESFFRKRVEKYKSTVFRTNVPPSFPFFVNVNPNVIAVLDVKSFSHLFDMDLVDKKDVLVGDFVPSVAFTGNMRVGVYQDTTEPQHSKVKNYIMDILKRSSGIWVSELESNLDTLWDNIEASLSKSSSVSYLFPLQQFLFTFLCKVLAGADPARDPKIAESGYSMLNSWLALQLLPTVSVGILQPLEEIFLHSFAYPFFLVGGNYNNLYNFIKQQGKDTINRGAIGFGLTEEEAIHNLLFVLGFNSYGGFSIFLPSLIDAIASNSALQEKLKKEAREKGGSTLTFDSVKEMDLIQSVVYETLRMNPPVPLQYGRARKDFRLSSHDSVFHVKKGELLCGFQKLVMRDSVIFDEPDRFKPDRFTQEKGAQLLNYLYWSNGPQTGSPSVSNKQCAGKDVVTLTAALIVAYLFRRYDSIQGDGSSITALQKTK

SEQ ID NO: 47970 - protein, 35 aa, Glycine max
  Clone ID: 700832794_FLI.pep
IVHKLFLSFRRCCLTFASLYHNDDDVSFIQPHNHT

SEQ ID NO: 47971 - protein, 173 aa, Glycine max
  Clone ID: 700873022_FLI.pep
EAELRLLEVFYHKIYKVFPPNEKIESINDQYWTLRAEEIPEEEKNLGPHDRLIHVYHFTKDTAQNQMQIQNFGEPFFLVIHEGETLAEIKVRIQKKLQVPDDEFVKWKFAFFSLGRPEYLQDSDIVSSRFQRRDVYGAWEQYLGLEHTDNAPKRSYAVNQNRHTFENPVKIYN

SEQ ID NO: 47972 - protein, 126 aa, Glycine max
  Clone ID: 700856501_FLI.pep
EKEGGSQMKLTVTWAPDVSDPVPTLLSHTVKNKKQQKPRIKKSQKKNGKGQKVSYSKRGSSKGKLYRNRWLHSHDEVFEASSELDDLNAVNHDSYYGTSYYLKTSFTQRFTGLLETRCNMLGCVVY

SEQ ID NO: 47973 - protein, 313 aa, Glycine max
  Clone ID: 700788990_FLI.pep
YFPTSPFKMQIFVKTLTGKTITLEVESSDTIDNVKAKIQDKEGIPPDQQRLIFAGKQLEDGRTLADYNIQKESTLHLVLRLRGGMQIFVKTLTGKTITLEVESSDTIDNVKAKIQDKEGIPPDQQRLIFAGKQLEDGRTLADYNIQKESTLHLVLRLRGGMQIFVKTLTGKTITLEVESSDTIDNVKAKIQDKEGIPPDQQRLIFAGKQLEDGRTLADYNIQKESTLHLVLRLRGGMQIFVKTLTGKTITLEVESSDTIDNVKAKIQDKEGIPPDQQRLIFAGKQLEDGRTLADYNIQKESTLHLVLRLRGGF

SEQ ID NO: 47974 - protein, 233 aa, Glycine max
  Clone ID: 700850469_FLI.pep
YGQPHRAPDLQKEAIYGLTEVLREEIKNARLVANPGCYPTSVQLPLVPLIKASLIELKNIIIDAKSGVSGAGRSAKENLLFTEVTEGLNSYGVTLHRHVPEIEQGLADASGSKVTVSFTPHLIPMSRGMQSTIYVEMAPGVRIEDLYQQLKLSYENEEFVFVLENGVIPRTHSVKGTNYCLINVFPDRIPGRAIIISVIDNLVKGASGQALQNLNLLMGFPENLGLHYLPLFP

SEQ ID NO: 47975 - protein, 397 aa, Glycine max
  Clone ID: 700851647_FLI.pep
ILQGGTGIPNVRWFGVEGDYNVLVMDLLGPSLEDLFNFCSRKLSLKTVLMLADQMINRVEFIHSKSFLHRDIKPDNFLMGLGRRANQVYAIDFGLAKKYRDSSTHQHIPYRENKNLTGTARYASMNTHLGIEQSRRDDLESLGYVLMYFLRGSLPWQGLKAGTKKQKYEKISEKKVSTSIEALCRGYPTEFASYFHYCRSLRFDDKPDYAYLKRIFRDLFIREGFQFDYVFDWTILKYQQSQLATPPTRAIGPSAGTSSGMPPAVTNADRHTGGEEGRPPALVSVDSSRRRMSGPILNTLSSANALGQSSGSSRRVAVSSSRDAFVGAESDIRTRTAEASPGAAHRALSGQRSSPIGSSDPKRVVSSGRNASHVKNYDTALRGMEGLQLENDERTHY

SEQ ID NO: 47976 - protein, 199 aa, Glycine max
  Clone ID: 700867713_FLI.pep
KTKIHFLLLNLKKMAKTQTLKLNKIKESFNLSFSFDCTRYGTYQILRRHSTVLCVMSPLQTLPQRKFLLNLRLIPISISRCRCHQLTESHSPRCSTSNSVMELHTPTTLPFFSLLRILLNDNIRLTGERNDDSDSHPSSHPKFSICNEVAAAEEEAPTGPDRFTSSRTGSVSHTITATSDRVSRSGIASTVSLQSGHVA

SEQ ID NO: 47977 - protein, 350 aa, Glycine max
  Clone ID: 700895313_FLI.pep
VKLERKKKIHSNMEGYEILKDIGSGNFAVAKLVRDNCTNELFAVKFIERGQKIDEHVQREIMNHRSLKHPNIIRFKEVLLTPTHLAIVMEYASGGELFERICNAGRFSEDEARFFFQQLVSGVSYCHSMQICHRDLKLENTLLDGSTAPRVKICDFGYSKSSVLHSQPKSTVGTPAYIAPEVLTRKEYDGKVADVWSCGVTLYVMLVGAYPFEDPEDPRNFKKTIGKILSVQYSVPDYVRVSMECRHLLSQIFVASPEKRIKIPEIKNHPWFLRNLPIEQMEGGSWQMNDVNNPSQSVEEVLSIIQEARKSLNVPKVGGLLIGGSMDLDDLDADEDLEDLQTSGEFVCPI

SEQ ID NO: 47978 - protein, 440 aa, Glycine max
  Clone ID: 700850850_FLI.pep
KMLKDNGIQKVKLFDADAGILDALKKSGIQVMVGIPNDMLYTLANSVEAAEKWVSKNISKHVSSGGVDIRYVAVGNEPFLSTYNGSFEATTLPALQNIQAALTRSGLSNRVKVTVPLNADVYQSSSEKPSDGGFRPDINNVMLQIVKFLNDNGAPFTVNIYPFISLYADPNFPVDYAFFNGYQPTINDNGRAYDNVFDANHDTLVWALQKNGFGNLPIIVGEIGWPTDGDRNANLQYAQRFNQGFMSRYMSGKGTPMRPGPIDAYLFSLIDEDAKSIQPGNFERHWGMFYFDGQPKYQLNLGSARGNGLVGASGVDHLAKKWCVLKPSANLNDDQLAPSVAYACQNADCTSLGYGTSCGNLDVHGNISYAFNSYYQINDQMDSACKFPGLSMITDKDPSVGDCKFRIMIQTDSAEPHGKVGYLTTVLCFFVLLLFCNLWF

SEQ ID NO: 47979 - protein, 150 aa, Glycine max
  Clone ID: 700731112_FLI.pep
VMFSFCNSICLPLMSSQLTRSCYHGMRYFATVSNDPDTHDDFKPANKLENSNISLADVIEQDVKDNPVMIYMKGVPDFPQCGFSSLAVRVLQQYDVPLSARNILEDPELKNAVKAFRYVHFYWFYYSCFIREYSISLTVSTIFQNSHLWW

SEQ ID NO: 47980 - protein, 309 aa, Glycine max
  Clone ID: 700736974_FLI.pep
KFTEAFLPLPPRVDLIKLVERKDKGAKLATLLLQHVATFSSQFSRVTRTQDPRVSQGLFCGEPSRRVPRDHFSQEILGGGGHSPEDSRREPEVSPNHSLKDLSSRVSVKRGNPRQHYIQNHPTAPHINLLIVLPPQQNLRRHVVRRPHHAAHAPPVAEPLRRTEVGELKIVRRIEENIVGLNVAVGDAEAVAVGDGFEKVLDEGGGLGLREGSMEHAVEKRVGLAEVHYDGEIVVVLEDMEDLEDVGVRREEGHEFGFVLEAVAVGGVKEEGFVDEFAGVGLVGEWVEAAEDGAETTATNLLANLVIPL

SEQ ID NO: 47981 - protein, 94 aa, Zea mays
  Clone ID: 700471924_FLI.pep
ADKRMAVEAAKPQSKRPRANGSAFATRATGFADKSFYSATPERHPFNPCERQFVYGAEVHLPPMMTSASYTMQPAHGPYYGNGYPVQYQVSYIH

SEQ ID NO: 47982 - protein, 216 aa, Glycine max
  Clone ID: 700855915_FLI.pep
SLPQSQPITILMAALALALLLLAFTGTSSATWCVCKDGSDAILQKTLDYACGAGADCNPLHLNGPCFQPNTVRAHCNYAVNSYFQKKGQAQGSCEFAGTATVTASDPSSSGCVYPSSVSAAGTGTTPVTTTPTMGTTPTTGTPSTSTGTGTGTGTTTGTTPYSTTPGVLGGIGSGMGPSGSGMNDESHGGIRFVHSSSFFSIAIALISAFMMLCWG

SEQ ID NO: 47983 - protein, 206 aa, Zea mays
  Clone ID: LIB3078-037-C7_FLI.pep
TSQIYVHSKLMIVDDRITLIGSANINDRSLLGSRDSEIAVVIEDKEVVNSKMDGRPWEAGKSSLSLRLSLWVEHLGLHPGEVSHIMDPIDDSTFKNIWMATAKTNTMIYQDVFGCVPNDLIHSRVQFRQSFAHLRDKIGHTTIDLGVAQEKLEAYQEGDLKSINPMDRLQLVRGHLVSFPLDFMCQEDLRPYFSESEYYTSPQVFH

SEQ ID NO: 47984 - protein, 478 aa, Glycine max
  Clone ID: 700787750_FLI.pep
RALCYANDGNQQGRSPSVIVIGGGMAGIAAARSLHDASLQVVLLESRERIGGRIHTDYSFGFPVDMGASWLHGVSNENPLASVIGRLGLPLYRTSGDNSILYDHDLESYGLFDMDGKQVPQELVAKVGEIFEAILQETDKIRQESSEDMSVLRGLSIVFDRKPELRLEGIAYKVLQWYLCRLEGWFAADTDAISLKGWDQEVLLPGGHGLMVRGYLPVVNSLAKGLDIRLGHRVTKVVRRYNGVKVTVENGKTFFADAAVIAVPLGVLKAKKILFEPKLPDWKEAAIADLGIGLENKIILHFENVFWPNVEFLGVVADTPYECSYFLNLHKATGRAVLVYMPSGQLAKDVEKMPDEAAVNFAFMQLKKIFPDASSPIQYLVSRWGSDINSLGSYSYDAVGKPHELYERLRVPVDNLFFAGEATSMSYPGSVHGAYSTGTMAAEDCRMRVLERYGEVDLFQPVMGEEGSMSIPLQISRL

SEQ ID NO: 47985 - protein, 308 aa, Glycine max
  Clone ID: 700869137_FLI.pep
VIDMKHIYGGDERRRAETLRLVSEACREWGFFQVVNHGVSHELMKGAREVWREFFQQPLEVKEVYANTPLTYEGYGSRLGVNKGAILDWSDYFFLHHMPCSLRDQAKWPALPTSLRNIISEYGEQVVMLGGRILEILSINLGLREDFLLNAFGGENDLGACLRVNFYPKCPQPDLTLGLSPHSDPGGMTILLPDENVSGLQVRRGEDWITVKPVPNAFIINMGDQIQVLSNAIYKSIEHRVIVNSNKDRVSLAFFYNPRSDIPIQPAKELVTKDRPALYPPMTFDEYRLYIRTRGPSGKAQVESLTSE

SEQ ID NO: 47986 - protein, 283 aa, Glycine max
  Clone ID: 700889833_FLI.pep
SENGNRPKQRVTKQANTMVIKSVLFSFIFPPPPSLVVWGLTVTSFLILANAFLSEIRGKHLNYSKFWNANPSAEKQVKLSSKAGMLLLYTPAFLAGLASFWVFPHQGLRFTILQSAVTLHYFKRVFEVLFIHKYSGGMTLESAIPITLSYFLSAVTMVYSQHLTKGFPEPPINLFYPGIVLFLVGIIGNFYHHYLLSKLRGKGEKEYKIPKGGFFELVICPHYFFEITVFYGIFFISQTLYSFAFAVGTTMYLVGRSYSTRKWYLSKFEDFPKHVKAVIPFVF

SEQ ID NO: 47987 - protein, 196 aa, Glycine max
  Clone ID: 700892963_FLI.pep
ASATRLVHCELRSARPAVRPREPAGPVQVTIPKPKPKAAEAEGANIVLQPRLCTLRSYGSDRAGVLIKTRKEGDHDDVSPFFAALSDYIESSKKSQDFEIISGRLAMMVFAATVTMEVVTGNSVFRKMDIEGITEAGGVCLGAVTCAALFAWFCSARNRVGRIFTVSCNAFIDSVIDQIIDGLFYEGDPTDWPDEP

SEQ ID NO: 47988 - protein, 139 aa, Glycine max
  Clone ID: 700873647_FLI.pep
SSVVVPRNFRLLEELEKGEKGIGDGTVSYGMDDGDDIYMRSWTGTIIGPYNTVHEGRIYQLKLFCDKDYPEKPPSVRFHSRINMTCVNHETGVVESKKFGLLANWQQRFTMEDILTQLKKEMAASHNRKLVQPPEGTHY

SEQ ID NO: 47989 - protein, 226 aa, Glycine max
  Clone ID: 700560316_FLI.pep
LHPCFSFLVYEFLEGGSLDKLLNDDTHATLFDWERRVKVVKGVANALYHMHHGCFPPIVHRDISSKNVLIDLDYEARVSDFGTAKILKPDSQNLSSFAGTYGYAAPELAYTMEVNEKCDVFSFGVLCLEIMMGKHPGDLISSFFSSPGMSSASNLLLKDVLDQRLPQPVNPVDKEVILIAKITFACLSESPRFRPSMEQVYNEFVMPTSSSVNLFSMVTLSQLVDN

SEQ ID NO: 47990 - protein, 170 aa, Glycine max
  Clone ID: 700683156_FLI.pep
GGSMCWNTRLFSATAGGGAFCNGQRIQVSATNQVERSLLVTGFGYDHDDAWATNIDLFKEFTDVSRGVRRLGAAAVDMCHVALGIVEAYWEYRLKPWDMAAGVLMVEEAGGTVSRMDGGKFCVFDRSVLVSNGQLHAKLLERIGPATEKLKNKGIDFSLWYKPENYRADV

SEQ ID NO: 47991 - protein, 251 aa, Zea mays
  Clone ID: 700052493_FLI.pep
LSLMLNSVGFYQISKLSMIPVVCLMEWVLNSKHYTTKVISAVVVVAAGVGICTVTDVEVNAKGFICACVAVFCTSLQQITIGSFQKKYNIGSFELLSKTAPIQAISLIILGPFVDYYLNGRSLLNYPFSGGATFFILLSCSLAVFCNMSQYLCIGRFSATSFQVLGHMKTVCVLILGWILFDSALTVKNILGMLLAVMGMVVYSWAMEAEKKAAAPVPRIKSEMLDGEDVPLKARVSGVPAVDLEDGEMKS

SEQ ID NO: 47992 - protein, 243 aa, Zea mays
  Clone ID: 700201791_FLI.pep
PPPKDYDCQAAGFENANAGREIKNDLYGSSSSLVRFQRISPFQALFRVERMSLVWNLVELIYIVRFGPNWNGNWPGLKFSFTSRPGTNPCVVPSGSKPGHTRPTRRRLDATGATRGFDATGTAAAHSPDVDPPRCLLPGEDLLSSFPISYPLLSLPQSVTLDLGPLRSHQVRRHLQELRPCVLVHRRLPSLRAQRLNGCRQDEWAEDRMSGRRNGSGEPDPAEKRSSSYNEGSTVWNEIPVTS

SEQ ID NO: 47993 - protein, 239 aa, Zea mays; identical to SEQ ID NO: 41895
  Clone ID: 700201865_FLI.pep

SEQ ID NO: 47994 - protein, 334 aa, Zea mays
  Clone ID: 700201893_FLI.pep
HSRGSFETATNPSFQDRQHLEAAASAPLRPTLERDRPDDHLVVDGSQRSADEGADPEDPVVSPGMVLVVNYGGAKAPRGVDAGAGDRDGGQVDEEHGKPDWKRGEDRHMGVPGVPLGVGGGEDGVDEDEGADDLGAEAVALGVAGRDDVGAAAVAHVQPLLEPLDDARAADGAQALHDDVKHRPGEGQLPRQEQPEGHRRVDVPAGDAGGAVDEGEDHAAEGPGDALDADGGALGGGLGDAHDGEDGDVEEEEGGDELGDAGAVEGPGLELPGLEERRRRGLLVVLVVRALRRRADGLALRELVGAQADVLLLPLHACAVTFLQQTSLARARRS

SEQ ID NO: 47995 - protein, 235 aa, Zea mays
  Clone ID: 700201922_FLI.pep
EGEEEGEMVKHNNVIPNGHFKKHWQNYVKTWFNQPARKQRRRIARQKKAVKIFPRPTAGPLRPIVQCQTLKYNMKSRAGRGFTLEELKAAGIPKKLAPTIGISVDHRRKNKSLEGLQANVQRLKTYKAKLVIFPRRARKVKAGDSTPEELATATQVQGDYMPFTRGEKRSVEVVKVTDEMKSFAAYGKLRLERMNKKHLGARQKKQLRQRRKIRSEAVEDSTLFCSIQSLVNATT

SEQ ID NO: 47996 - protein, 117 aa, Zea mays
  Clone ID: 700202616_FLI.pep
ARVLAGQEATATPRDVPSCWKERRWWRTPTCRRRCKPRRCRRRPGPWIASTSSTAGASRPTSRRSLTRSMAPDGNAWLAPASAATSRTARGASSTSAWSRSGSSSSKGRQHDDKPHG

SEQ ID NO: 47997 - protein, 221 aa, Zea mays
  Clone ID: 700203110_FLI.pep
PLLASCIGALHRPGPFLHHRAAASVHFLAPRRKTRPPPAMSWLGKLGLSGLGGSPRASEASAALAQGPDEDQPAPGNEFAQFGAGCFWGVELAFQRVPGVTRTEVGYSQGNIHDPTYEDVCTGTTNHNEVVRVQYDPAACKYDDLLDTFWARHDPTTPNRQGNDVGTQYRSGIYYYNPEQEKAARESLEKQQKLLNRKIVTEIVPAKRFYRAEEYHQQYLE

SEQ ID NO: 47998 - protein, 297 aa, Zea mays
  Clone ID: 700203210_FLI.pep
CNKKREPCEIHQPFMEATYLWEDDDDRFSVENIPLYDSADDEPTSINKEILVSSDGMVTQYSNISRVQSTENPGNTGTNEFAPIIVDELTTSSNGLAPMNVEPLTVSSNEFTPSNAMPMVARLVENGSTGYSAQDTHDASQNSAPKAANHANQTGPQNNSNHSTLVPVKPAPKRRGRKPKRVVHKQLDIPDICDRLTSSVACEEILYCEEVKNHAVSEIDALYDEIRPAVEEHERDSQDSVSTSLAEKWIEASCRKYKAEFDLYAAVLKNVASTPLRSKDDVGPREQNGLKYLENGS

SEQ ID NO: 47999 - protein, 233 aa, Zea mays
  Clone ID: 700203418_FLI.pep
ARLGSNPKQGVDLSAAAMSKLQSESVKDAISQIVGDAKEKNRKFTETVELQIGLKNYDPQKDKRFSGSVKLPHIPRPKMKVCMLGDAQHVEEAEKMGLDYMDVEALKKMNKNKKLVKRLAKKYHAFLASEAIIKQIPRLLGPGLNKAGKFPTLVTHQESLESKVNETKATVKFQLKKVLCMGVAVGNLAMEEKQIQQNIQMSVNFLVSLLKKNWQNVRCLYVKSTMGKPYRVF

SEQ ID NO: 48000 - protein, 257 aa, Zea mays
  Clone ID: 700203527_FLI.pep
FAELMARVYVGNLDPRVTAREIEDEFRMFGVLRSVWVARKPPGFAFIDFDDRRDAQDAIRELDGKNGWRVELSTKVGGGRGRDRNGSDMKCYECGEAGHFARECRLRIGSGGLGSGRRRSRSPRYRSRSRSRSPRYRRSPSYSRSPRDRSPRRRSYSRSPLGSPARSLSRSPPLPPPPPRNNSRSPPGAREVSRSPPPPPPRNNSRSPPAARDVSRSPPAARDVSRSPPPPPDARRSYSGSPGQQPQRDESPYANDA

SEQ ID NO: 48001 - protein, 201 aa, Zea mays
  Clone ID: 700203568_FLI.pep
AIINHDAEKRRSDALPGRCARAGRPRGLGGGAPALALLLGVRGPGRGPWDEHAGALAAALQLLPRRPGAVVPAVAGAVVVVVQRVGRWRQQRRLRRHMGARREPLEGRGGGGGGGDELRGGEVRALVVVGDEQRYPLAELGEEHVVVQHRLHLHYLGLLHWRCVLSLSESVLCCAEVAAARASSESCGSKWRRVERRGAAR

SEQ ID NO: 48002 - protein, 98 aa, Zea mays
  Clone ID: 700203758_FLI.pep
KSLPQLAWNRGICCCFCSFYGTTQVNSQKKLFFSLVIRWCFVLIFHCSLEETSVGGAECLVLFKLARVILLMFGAYISNMLDAFLLCHSKLIYVMLFL

SEQ ID NO: 48003 - protein, 191 aa, Zea mays
  Clone ID: 700204362_FLI.pep
YCVIDNKVKHNRRPKCWVNKHGSTTTQQYSPTLSMKLTRSSTSVLDLLLGPQLVAVTTLLLAAVDSPRVQSCIAFAADHLVLVVLASERLQRGLNDATAEPKHEVKRRLLLDVIVRKGAAILQLLPGKDQPLLVRRDPFLVLDLGLDIVDGVAALDLEGDGLPCQRLHEDLHLVGPGLSPGCCDCCGGGFS

SEQ ID NO: 48004 - protein, 262 aa, Zea mays
  Clone ID: 700204616_FLI.pep
IFVRWPIILHLYFLNMASSGMNVVKYVFGLFNLAFMIGAGVLIYFGVQVFIGEITVEHEIISRHAQAQTVAIVLITSGAIVFVISFLGCWGAFRENTCMLLTFGSILGAIVFTQILLCTLIFVFREEVHEKATGELLPEIIRSYNFTDSADRLTKVVDDMQSRFHCCGVNGSDDWKTGIPFSCCSDYTPSLLDGTVQTVRYCPNDLRQPAYSQGCFSKVVNAVNAHYWYLASTVVSFALIQIMAVVLACCVAYSVKKHYQTI

SEQ ID NO: 48005 - protein, 248 aa, Zea mays
  Clone ID: 700204669_FLI.pep
KDNTVPMASLDAVRGDLALLILYLNKAEARDKICRAIQYGSKFISNGEPGPAQNVDKSTSLARKVFRLCKPSCQGDSAPADPTREVQERDAVDFPLPGPDRVGGEDRNIQEQGAGGVPREDSVLLLPRLQHLHGHHRASRAATAVHVDEEAGEGAEAPRAVQERAVPHEAAQIERAAAGARQVEPGHRGGRGAPAAGPEEGDPPRHGRVWFRQLPHRLLPAASKPTSKAEQVRTPTPSTVYQENNPPG

SEQ ID NO: 48006 - protein, 55 aa, Zea mays
  Clone ID: 700204825_FLI.pep
IPSQFLHPTLCLTQSLDHKSCTKLKKKSNMSSLAQKCLYVQTHGGVRTCNKKVAR

SEQ ID NO: 48007 - protein, 161 aa, Zea mays
  Clone ID: 700205079_FLI.pep
VTVSSWFNLSLLRLREPEAPVLLAADGDLQRSVLAVLARSRPHEDALLFLQVLPLHLQPRLLPRDLSLAAGELGLPRGLPLGNLALALRDVALHLPLLHDAVLDVRVQCLLELHHEPVHHRLYPHRHLAAPHGHRYHQKRLRAPPELLLSAPCHRWSVDGT

SEQ ID NO: 48008 - protein, 168 aa, Zea mays
  Clone ID: 700205181_FLI.pep
PRVRDKLGRPPPPYAQLPTCPGLRLFVVRFAGGEHPSHQVLYWVRPYGRMALRGVWQLQKLVVNYCDWGGSSRGIRAFMEAHLPAFKEKNPHLEVVTELVRGQHPNLKGIYKNHNERVVCVRNLPPEEILLQATRLRNSLGRKVVKLRTRHVTKRPSVQGTWTTELKM

SEQ ID NO: 48009 - protein, 273 aa, Zea mays
  Clone ID: 700205957_FLI.pep
GVWRPKTMAASIGIMDGAYFVGRGEILHWINATLQLSLAKVEEAASGAVQCQLMDMVHPGVVPMHKVNFDAKTEYDMIQNYKVLQDVFNKLRIGKNIEVNKLVKGRPLDNLEFLQWLKRYCDSVNGGIMNENYNPVERRSKGCKERVSKGSNKPSKSLQANRLSGADPTDGGHGVGKVCNTFSEEHYIEQIQKLSEKIADLKVSVDSTEKERDFYFSKLRDIEILCQRPELEHLPMTKAVRKILYAADAKDSPLPEANDIITKSPSLFSNETE

SEQ ID NO: 48010 - protein, 204 aa, Zea mays
  Clone ID: 700206406_FLI.pep
ASAWSCTMAEDSGAILRHISSVKDMVDKVNEEIEQNIQKTREIESEIVQHSETEKHYLNKESELTKEVSVTEFELNGLIQVAVAEGNLEFQKVAHDVIRKRVSDKMEKFINESMGFQANMLKSSNEDLVLLLNEKSSLEDESAKLKVKINSIHSSSKEYIAEILEEVNTENSVLESELRYMISEYKDVQKDINNLKILFSSSNS

SEQ ID NO: 48011 - protein, 161 aa, Zea mays
  Clone ID: 700206507_FLI.pep
KQCLLLAYKVKYPENFFLLRGNHECASVNRIYGFYDECKRRFSVKLWKTFTDCFNCLLVSALIDEKILCMHGGLSLELNKLEQILNLNRPTDMPDTGLLCDLLWSHPSNEATGRAINDRGVSFTFGPDKVSEFLEKHDLDLICRAHQGTKLWLSRQSDACF

SEQ ID NO: 48012 - protein, 210 aa, Zea mays
  Clone ID: LIB3061-057-B3_FLI.pep
PRALADWRPCLEGAGKMIGVGKAKQYANVLDKPLSRGRQEVSLSAFAFLFSELVQYNQTQVDNITELERRLEDAGYAVGARVLELLCHREKGNRRETRLLGILSFIHSTVWKVLFGKVADSLEKGTEHEDEYMISEKELLVNRFISVPKDMGAFNCGAFVAGIVKGVLDNAGFPAVVTAHFVPIEGQQRPRTTILIKFAEEVLHREARLG

SEQ ID NO: 48013 - protein, 166 aa, Zea mays; identical to SEQ ID NO: 41311
  Clone ID: LIB3062-022-E9_FLI.pep

SEQ ID NO: 48014 - protein, 133 aa, Zea mays
  Clone ID: LIB3062-030-H4_FLI.pep
TKTEQRNDIDRLYNPSWKIQLRQAAATWRTSHLVSVGKLLLLFVPHGVLVGADDGGEEERGGDPVLGDLVVDLGGDVLPQPRHHLLLEGRQRVHHRLHPHRRLPHFPPRRRPEFLLLGRDAPIASRTPMGGFW

SEQ ID NO: 48015 - protein, 320 aa, Zea mays
  Clone ID: LIB3066-026-E6_FLI.pep
ERGTRTTNDRLIAMARSVPIAVAVAPLLLLLLVSTASAARTVGDTVQDACSKTQFPKICVDSLAAKPESQKATPRRLAELFVNIAAEKGSGMATFVHGKYNNAKDSTVFKCYDSCSDDVEEAVAHLNGLVREPTDAKFLELKSWLSSTLGGTSTCEDACKDLPKNGDKDDVVNFSLDFEKLQRVTLDLITEASGSMSAGIALPPSNAGAPSYGAAAPFGGAADAPAGTSEGPASASGPSAGDAPAYGASASASGPTADAPATATAAASSGPSSAPAPSSSESSGAPGPSSSDGSSGAPAPSSSDGSSSAPAPSSGDDGSA

SEQ ID NO: 48016 - protein, 214 aa, Zea mays
  Clone ID: LIB3066-027-F9_FLI.pep
VPLHHHGAQPRERAEHHGEPDGRHRLAPTAPVVGLLPVHAKLAVQAAHGVAHLQHLHAVEQRVDPPRVLPHGPDLDAQLAVLQQRRVHHEVLVVGRRQLAAGHRRQVQPGHGLAPADVHVEVEVVGGLAHDVGEEEADQVAEGRVHVHLPRQVEVGAPHVGVRHPGSAGVHQRRRHQPGRPVGEPDGAGGHRHVLHRLLGLHVRGVGLPPPAQR

SEQ ID NO: 48017 - protein, 362 aa, Zea mays
  Clone ID: LIB3060-094-C6_FLI.pep
QLDDGALRWWPPATMSSSAGDKRKKTACVTGGNGYIGSALIKMLLEDGYAVKTTVRNPDDMDKNSHLKGLQQLGPLTVLRADMDEEGSFDDAVAGCDYAFLVAAPVNLSAQDPEKEQIEPSVRGTLNAMRSCAKAGTVRRVILTSSVAGVYIRPDLLQLRGDGHVLDEESWSDVEYLRANRPPTWGYCVSKVLLEKEACRFAGEHGISLVTVCPVITVGAAPAPKVRTSIIDSLSMLSGDERGLAVLKGIEKTSGAVQLVHVDDLCRAELFLAEAAAADGRYICCGLNTTVLELARFLAHKYPQYGVKTNLDGDEQQLLEKPRVRVSSEKLVREGFEYRHNTLDEIYDNVVEYGKALGILPY

SEQ ID NO: 48018 - protein, 225 aa, Zea mays
  Clone ID: LIB3060-108-F8_FLI.pep
LWDRSKPVSERVRTGTSASIMASEHAQLSAKAAGGSRFAVTYGLLRQYMKEQGGSGATRCLAPAVGVGLMPEADAAAAAAEATEERTTVLELFPQQAGTLKDEQQRKRKERADGRAPLTIFYGGKMVVFDDFPAEKAEELMQLAGSGNAAQDALAGQPSLTDMPLARKVSLKRFLEKRKNRLTAADPYPAAAAAAAAASESSTKPPAVKDEGAPWVGVNSALSLS

SEQ ID NO: 48019 - protein, 178 aa, Zea mays; identical to SEQ ID NO: 41250
  Clone ID: LIB3060-109-B12_FLI.pep

SEQ ID NO: 48020 - protein, 250 aa, Zea mays
  Clone ID: LIB3060-112-D6_FLI.pep
AAETSSGVGGGEVHISIPPMAATTPDGIRESSAAPSPLRSRGSTPPRQLKAAPALAVADTPATAMDKTLASVANLAKLLPTGTALAFQSLSPSFTNRGACLPSNRYLTAALLYLCLVSCVFFSFTDSFVGTDGKLYYGLATVKGFLVFNYTGDDDDEGDAERRRQVFKDLRRLRIRWVDYVHAGFSAVVFLTVAFGTAAVQSCFFPNAGENVNQMLINLPLGAGFFSTMVFLVFPTTRKGIDYTGHFTNV

SEQ ID NO: 48021 - protein, 125 aa, Zea mays
  Clone ID: LIB3060-114-E2_FLI.pep
QHLCLLCRAVSLHASSSRAESSPMLTRSCSSLSCRVVITFCRELDSRCHRALCVLAFAVESLNPSSFAQPYPASSLQIQSCYRPARHQESQESGENEASSAIFPKRSTIAWIGKSLPISRIRVGY

SEQ ID NO: 48022 - protein, 198 aa, Zea mays
  Clone ID: LIB3061-021-H7_FLI.pep
QSRSAKRQCVERIVEQNSMKMVIVLVVCLALSAASASAMQMPCPCAGLQGLYGAGAGLTTMMGAGGLYPYAEYLRQPQCSPLAAAPYYAGCGQTSAMYQPLRQQCCQQQMRMMDVQSVAQQLQMMMQLERAAAASSSLYEPALMQQQQQLLAAQGLNPMAMMMAQNMPAMGGLYQYQYQLPSYRTNPCGVSAAIPPYY

SEQ ID NO: 48023 - protein, 250 aa, Zea mays
  Clone ID: LIB3061-022-B5_FLI.pep
KVESSSNNRATMATKILSLLMLLALSACVANATIFPQCSQAPIASLLPPYLPSMIASVCENPALQPYRLQQAIAASNIPLSPLFQQSPALSLVQSLVQTIKAQQLQQLVLPVINQVALANLSPYYQQQQFLPFNQLSTLNPAAYLQQQLLPFSQLATAYSHQQQLLPFNQLAALNLAAYLQQQILLPFSQLAAASRASFLTQQQLLPFYQQFAANPATLLQLQQLLPFVQLALTNPAASYQQHIIGGALF

SEQ ID NO: 48024 - protein, 250 aa, Zea mays; identical to SEQ ID NO: 48023
  Clone ID: LIB3061-025-E5_FLI.pep

SEQ ID NO: 48025 - protein, 250 aa, Zea mays; identical to SEQ ID NO: 48023
  Clone ID: LIB3061-044-B3_FLI.pep

SEQ ID NO: 48026 - protein, 177 aa, Zea mays
  Clone ID: LIB3061-047-H6_FLI.pep
QQPTPSILFPLLASLPRRIPPPSTVPVPVPFRRASSPEMANARSGVAVNDECMLKFGELQSKRLHRFLTFKMDDKFKEIVVDQVGDRATSYEDFTNSLPENDCRYAIYDFDFVTAEDVQKSRIFYILWSPSSAKVKSKMLYASSNQKFKSGLNGIQVELQATDASEISLDEIKDRAR

SEQ ID NO: 48027 - protein, 307 aa, Zea mays
  Clone ID: LIB3061-062-C8_FLI.pep
DTEIFCEGEPIKREDEERLDEVGYDDVGGVRKQMAQIRELVELPLRHPQLFKSIGVKPPKGILLYGPPGSGKTLIARAVANETGAFFFLINGPEIMSKLAGESESNLRKAFEEAEKNAPSIIFIIGATNRPDIIDPALLRPGRLDQLIYIPLPDEQSRLQIFKACLRKSPVAKDVDLNALAKYTQGFSGADITEICQRACKYAIRENIEKDIERERRRKDNPEAMEEDEVDDIAEIKAAHFEESMKYARRSVSDADIRKYQAFAQTLQQSRGFGSEFRFPDQPTAAAAAADPFASAGAAADDDDLYS

SEQ ID NO: 48028 - protein, 211 aa, Zea mays
  Clone ID: LIB3061-068-C8_FLI.pep
VVLERRCWRCSAGRWWRCRRSWWRRAAGRRRPRRRRRSSWGASWPRPSRPCPCSSATTATSPTPTPTRRSSAPGPRGQGAALLGDHRRRLRRLLRRHRHAQRLMRQVARAVPARLLLLQRPRRAQVLREPQAQGHRCPRRRRRDLRCHFQGGGRVYCPDGAALIDHHQAEAMRRYRTLYMRGGCNIVAGNKPCSCKPMNLSLYHASISVAC

SEQ ID NO: 48029 - protein, 204 aa, Zea mays
  Clone ID: LIB3061-100-E10_FLI.pep
AEMFSLFYGLWKYVFAKDEFRVLILGVDRAGKTTLLEKLKSIYLKGEGLPPDRVVPTVGLNIGRIEDAKAKLVFWDLGGQVSLRTIWEKYYEEAHAIMYVIDAATASSFEDSKSALEKVIRHEHLRGAPLLIVANKQDLPGAIDEEELAKFLHKELDERPYTFQAVSAYDGRGIKSGIDWLVEQMEKSKRTETLQARAGVAGQI

SEQ ID NO: 48030 - protein, 160 aa, Zea mays
  Clone ID: LIB3061-116-H12_FLI.pep
HDTCKSEWMEYNVPEILNASTKHRSCHKNFHLPLFIIKVMLSPLRSIRPSVFLVFFLTLISSASSRTKFMYSSNPMMRPSIRRSFCSKSQIWMRALLWRKRKMRLMGWVMIRCTLVDAMATAAAGASPPPPPPRTSRSFRRRARRDQNPSYTRLVCEGAV

SEQ ID NO: 48031 - protein, 273 aa, Zea mays
  Clone ID: LIB3062-010-B10_FLI.pep
PQTEYNRTAGTALFIGNKLASTTPSSETKKAKKRCSLGAGELGADELSGGDHVGQGGLDLRVLAGLEAAVGVHPEDVGVQHRQHLVDAVGDLLSRRDPGGVDVVDTGADARAVLDALAEHGEQLLVGPRVLNGDHVRVHVDDRVDDVVEVGVAHVGVDLGGVLDLAVGNSEGVDSPVQVECMLSLAERQPFSQCSLVDLDNLNTTSLKILDFLLDRKSDLVASLKPRLVIPDEGPVEDCDWASQHPLHWARRHALCRLRPENGHGVGAAHVTV

SEQ ID NO: 48032 - protein, 241 aa, Zea mays
  Clone ID: LIB3062-012-E1_FLI.pep
AGERKPRQGAAVHDHYRRQALKASDWHLEGAFDFFYSQPQVSVVNTRHLEDIFNRYKEPDADMIMVEGISQFCNDLQVDPQDIVMLVISWHMKAATMCEFTRQEFIGGLQSIGVDSIEKFRGKLPSLRAELKDDNKFRDIYNFAFTWAREKGQKSLSLETAIGMWQLLFAERNWPLLDHWCQFLQVRHNKAISRDTWSQLLEFVKTTDPQLSNYDDEGAWPYLIDEFVEYLTENGLVQRKR

SEQ ID NO: 48033 - protein, 245 aa, Zea mays
  Clone ID: LIB3062-013-B10_FLI.pep
RVFDFSRRRCSSHIPREDACSSPIDTMAVFSDLHTADGLKSLEAHLAGKTYVSGDSITKDDIKVFAAVPSKPGAEFPNAARWYETVSAAVASRFPGKAVGVNLPAGSAPAAAAPADEAEDDDDLDLFGDETEEDKKAADERAAAAKASSKKKESGKSSVLMDVKPWDDETDMKKLEEAVRSVQMEGLTWGASKLVPVGYGIKKMTIMLTIVDDLVSIDTLIEDHLTQEPINEYVQSCDIVAFNKI

SEQ ID NO: 48034 - protein, 169 aa, Zea mays
  Clone ID: LIB3066-012-H6_FLI.pep
GRMASEPVARAVAEEVARWGAMRQTGVSLRYMMEFGARPTERTLLLAAQFLHKELPIRIARRALDLDSLPFGLSTKPAILKVKDWYVESFREIRSFPEVRNQKDELAFTQMIKMIRVRHTNVVPAIALGVQQLKKDLGGPKAFPPGIHEIHQFLDRFYMSRIGIRMLIG

SEQ ID NO: 48035 - protein, 201 aa, Zea mays
  Clone ID: LIB3066-035-H5_FLI.pep
ERSRLILSIELGAFFVPRSVFICNLKLTGTFEWIMDGLVGLLKVRVVRGINLAYRDARGSDPYVVLRLGKKKLKTSVKKRSVNPIWHEELTLTVTDPSLALKLEVFDKDTFSRDDPMGDAEIDVAPLVEAANASPEASLRNGAIILSVRPSATNCLADESHVCWRNGKFAQDMILRLRNVESGEIQLQLQWVSIPPAAASR

SEQ ID NO: 48036 - protein, 110 aa, Zea mays
  Clone ID: LIB3066-038-F10_FLI.pep
RPPHGEVGILGAAAWNIADDCHSGCSYGQVGSGGRGLGRALVGTGCEGIGQIWGNSSPKINSAADPLLTMTVSTTTSTAIEREDTCHPKSKLVPGISSARRRTGGRRGAA

SEQ ID NO: 48037 - protein, 170 aa, Zea mays
  Clone ID: LIB3067-011-F9_FLI.pep
IRQEELQCTPIENKLRDQIRGNATLEKSLTCQHSYFTVQSNPIEPAVLTDPKKHDYRTTKQPATTTTTIRTQEGSQTSTTDPRHLDRQLPTPNLAAEAIESAALAFEGVHDVHSGDGFATGVLRVGHSVADDILEKDLEHAAGLLVDQPGDALHATPPRQPPDRRLRDPL

SEQ ID NO: 48038 - protein, 199 aa, Zea mays; identical to SEQ ID NO: 41257
  Clone ID: LIB3067-028-C1_FLI.pep

SEQ ID NO: 48039 - protein, 78 aa, Zea mays
  Clone ID: LIB3067-058-C5_FLI.pep
VLDLPYPHLLRLPPRHHLRRLGHHQVAGRCVSMQCARRVISWRGTRCARVLRCDSFLPCLVAAAPAGVVLVYPVLLIS

SEQ ID NO: 48040 - protein, 81 aa, Zea mays
  Clone ID: LIB3068-019-C1_FLI.pep
KGQKGRGKKYYVQDTGDSKEKTKGEMMLSTDSTKWHSYHQETMSRDQAVCMHAPRAHGKRPKKIGESALLVPRIPSAVPGR

SEQ ID NO: 48041 - protein, 345 aa, Zea mays
  Clone ID: LIB3068-031-B5_FLI.pep
RDFIKNMITGTSQADCAVLIIDSTTGGFEAGISKDGQTREHALLAFTLGVKQMICCCNKMDATTPKYSKARYDEIVKEVSSYLKKVGYNPDKIAFVPISGFEGDNMIERSTNLDWYKGPTLLEALDQITEPKRPSDKPLRLPLQDVYKIGGIGTVPVGRVETGVIKPGMVVTFGPTGLTTEVKSVEMHHEALQEALPGDNVGFNVKNVAVKDLKRGFVASNSKDDPAKEAASFTSQVIIMNHPGQIGNGYAPVLDCHTSHIAVKFAELITKIDRRSGKELEKEPKFLKNGDAGMVKMIPTKPMVVETFSAYPPLGRFAVRDMRQTVAVGVIKSVEKKDPTGAKVT

SEQ ID NO: 48042 - protein, 70 aa, Zea mays
  Clone ID: LIB3069-057-H9_FLI.pep
TRQSQVLNSLATLPLCFTFKQRDCKYKERRIEKSDGGWFASGTGREDTRHLQGSLHGITPNHCTPNTISE

SEQ ID NO: 48043 - protein, 141 aa, Zea mays
  Clone ID: LIB3070-001-G9_FLI.pep
CNHNEQKLSISPTPRKKRSMASEQGVVIACHSKAEFDAHMTKAQEAGKLVVIDFTAAWCGPCRAIAPLFVEHAKKFTQVVFLKVDVDEVKEVTAAYEVEAMPTFHFVKNGKTVATIVGARKDELLAQIEKHAAPAPASASA

SEQ ID NO: 48044 - protein, 77 aa, Zea mays
  Clone ID: LIB3067-004-A4_FLI.pep
AAATRPVSISMTTSRRLADRKISRFEKNITKRGAVPETAKKANDYPVGPILLGFFVFVVVGSSLFQIIKTASNAGLF

SEQ ID NO: 48045 - protein, 158 aa, Zea mays
  Clone ID: LIB3067-008-E2_FLI.pep
RLVRARYLLHITSPELGGRRGRSRRSASGGVLPDGVPELVLVDGSKALERLAVPDEAEGRHHMDAVDLRDFQQFVDVDLEEDRGRVLAGAVRVHRGHHLAPTAPGGHEVDDHQLALLLGLGHAGVELVLGVARDHGTLLGRHYSDPLFSFPRCGIRSP

SEQ ID NO: 48046 - protein, 95 aa, Zea mays
  Clone ID: LIB3067-012-F9_FLI.pep
VAAHIHINFTIQCFSRVGSASRTTLLVQQQKMNKIHGDWEREKKLYMLLQDREELKVSTGALASKTQESQCNRIVGLPEQFGYKNEQGNLHGSTW

SEQ ID NO: 48047 - protein, 128 aa, Zea mays
  Clone ID: LIB3067-017-C12_FLI.pep
QRTFSPLVLQHSPYHTEPTRGARGSYSSLAHTTTHHRHRATELPRVCCALLIDRPIDLGMADWGPVLIGLVLFILLSPGLLFQIPGKGRIIEFGNFQTSGLSILVHAVIYFALLAIFLLAVGVHIYLG

SEQ ID NO: 48048 - protein, 70 aa, Zea mays
  Clone ID: LIB3067-023-E2_FLI.pep
GLSRWLLARLAEEVEFNNRMRKLCRSLPNLSPVTLSHKVYFLALCLLLMFVWMCQPAVTLVEPGSHAPLT

SEQ ID NO: 48049 - protein, 143 aa, Zea mays
  Clone ID: LIB3067-025-C8_FLI.pep
RSGASAPRRRGASLCAPTASGPSTASTRSSPGTCRSARLPVAGTLTTTSSPATPAPRRLPKRPCRSLRRRSTWASIRIWSRQTDCDSIIFCLKMLPTNYHVFFVSLAWKQKLCASILKLLSLYYEIMKYSIIHMEHSFAFTIQ

SEQ ID NO: 48050 - protein, 500 aa, Zea mays
  Clone ID: LIB3067-028-H7_FLI.pep
SEPRGRAGTLAQHRRGAETGVFVLAYLRDSKLLPFPTAAAAAPPHSVDTMRECISIHIGQAGIQVGNACWELYCLEHGIQADGQMPGDKTIGGGDDAFNTFFSETGAGKHVPRAVFVDLEPTVIDEVRTGTYRQLFHPEQLISGKEDAANNFARGHYTIGKEIVDLCLDRIRKLADNCTGLQGFLVFNAVGGGTGSGLGSLLLERLSVDYGKKSKLGFTVYPSPQVSTSVVEPYNSVLSTHSLLEHTDVAILLDNEAIYDICRRSLDIERPTYTNLNRLVSQVISSLTASLRFDGALNVDVNEFQTNLVPYPRIHFMLSSYAPVISAEKAYHEQLSVAEITNSAFEPSSMMAKCDPRHGKYMACCLMYRGDVVPKDVNAAVATIKTKRTIQFVDWCPTGFKCGINYQPPSVVPGGDLAKVQRAVCMISNSTSVVEVFSRIDHKFDLMYAKRAFVHWYVGEGMEEGEFSEAREDLAALEKDYEEVGAEFDEGEEGDDGDEY

SEQ ID NO: 48051 - protein, 123 aa, Zea mays
  Clone ID: LIB3067-043-D7_FLI.pep
LRQYSLTLRSPWTATVVAVEAAATAVAGADRFRRREANQDVSRLAPAAPEQGGCLQAAAVAHHHHGLLRRRHPRHPLHPPFPRPRRRHPGTQARSVGPSVASPPPEVLQRQPLVRAHCKVLWS

SEQ ID NO: 48052 - protein, 71 aa, Zea mays
  Clone ID: LIB3067-051-H2_FLI.pep
KTQPCFPSYSSASPLFLLPFLEYLRFLRNLGSIPLVEVCRWRLGFLMPFLCALYDWLCAVWFFDLAISSGS

SEQ ID NO: 48053 - protein, 193 aa, Zea mays
  Clone ID: LIB3068-017-F7_FLI.pep
RRRGCQAASVAMGIVFTRLFSSVFGNREARILVLGLDNAGKTTILYRLQMGEVVSTIPTIGFNVETVQYNNIKFQVWDLGGQTSIRPYWRCYFPNTQAIIYVVDSSDTDRLVTAKEEFHAILEEDELKGAVVLVYANKQDLPGALDDAAITESLELHKIKSRQWAIFKTSAIKGEGLFEGLDWLSNTLKSGSS

SEQ ID NO: 48054 - protein, 124 aa, Zea mays; identical to SEQ ID NO: 47585
  Clone ID: LIB3068-017-G4_FLI.pep

SEQ ID NO: 48055 - protein, 174 aa, Zea mays
  Clone ID: LIB3068-021-C4_FLI.pep
HDCILNAYNRPLPHLRAELTGGRGHPFPGIVHTLANLPPWNIFHNPRLLLKILLPLFDKSFILFSLEHRQYSTTSSNFLFFECPAHLVPLTDLVHAIREGAEGREEDGSGAGARGGNPARVAHGRETARRRPVLQHRHLLDAGHPRLVPHQGLRHPRSPTRTPDRRGDQTSAAA

SEQ ID NO: 48056 - protein, 159 aa, Zea mays
  Clone ID: LIB3068-029-H3_FLI.pep
LRSLIFLNPTQVQLIRGNPRYTQMTPEEVIGNFVSFECMIKGSKKINELDEPSTSEAQPVAFKATEEKKEESTPSRQQIDASKLDNEEMALIIKSFRQILKQRKGKDYKPRSKKVCYKCGKPGHFIAKCPLSSDSDRGDNKKGKRREKKRYHKRRAAAR

SEQ ID NO: 48057 - protein, 66 aa, Zea mays; identical to SEQ ID NO: 41517
  Clone ID: LIB3068-038-C10_FLI.pep

SEQ ID NO: 48058 - protein, 76 aa, Zea mays
  Clone ID: LIB3068-047-C7_FLI.pep
QSKNHVSLFSCTYNTSLDRLLDQKALNSTHLVKIIALHYTSTYTEQQLTKQRSDAAWLVQHTAPCSWHSGMTWPWC

SEQ ID NO: 48059 - protein, 98 aa, Zea mays
  Clone ID: LIB3068-057-A5_FLI.pep
QYLVFSIQALLSAPNPDDPLSDNIAKHWKSNEAEAFETGTCSCSKHSYEHSVGMVSASRLYYRCPNMAVSCSEGVDSPVCKWGIVTKCCFRCDVITFP

SEQ ID NO: 48060 - protein, 315 aa, Zea mays
  Clone ID: LIB3069-004-G6_FLI.pep
VARHCSTAKPRSSRVAPEGAEGLDGASPEDVLVVEGRDGSAHERAHPEDPVVVPGLVLVVDDGGAQAPGRVDAGAGDGDGGQVHHEHGEADGEGSQNRDVGVAGVALGVGGGEDGVDEHEGADDLGAEAGAAGVAGGERVGAAAVPVEVGALERLDEADAADGAEALRHDVEQRAHQGDLARQEEAEGDGGVDVAPRDAGGAVDEDEDHAAEGPGDAQHPHAAARRVGTRRRRVRLVLVPDHGGHRDVQEQQRGDELGDHGAVQRPGPQLSRVDQRRRGRVRVVLGSELAAASAALDHVVLAHRLLEPPRLYLQG

SEQ ID NO: 48061 - protein, 323 aa, Zea mays
  Clone ID: LIB3069-005-H6_FLI.pep
QKMFYGGYAYHGNSFEQTYRCYPASFFDKPHLEGGDKVIMPPSALDRLASLHIEYPMLFELHNDATQRISHCGVLEFVAEEGMIIMPYWMMQNMLLQEGDTVHVKNATLPKGTYVKLQPHTTDFLDISNPKAILEKTLRNFSCLTTGDSIMVAYNNKQYYIDIVETKPASAVSIIETDCEVDFAPPLDYKEPEKPRQPTVLASKTPAEDGNTAAEDEPKFKPFTGFGKRLDGKASKLQASEVPSTALSAPSDSNKRANQQISAPAASGASSYSRQKTGKLVFGSSASNNKEPQKAPAKEEQPAKKDDELRFQAFSGKSYSLKR

SEQ ID NO: 48062 - protein, 276 aa, Zea mays
  Clone ID: LIB3069-030-G8_FLI.pep
ACSRAEAPPNAQRTQTHTSPAPRDHPAAGEMSRGTGAGYDRHITIFSPEGRLYQVEYAFKAVKSAGVTSIGVRGADSVCVVTQKKVPDKLLDQTSVTHLFPITKYVGLLATGLTADARSLVSQARNEAAEFRFKWGYEMPVDVLAKWIADKAQVYTQHAYMRPLGVVAMVLGYDEEKNAQLFKCDPAGHFFGHKATSAGLKEQEAINFLEKKMKDDPKFTYDETVQIAISALQSVLQEDFKATEIEVGVVRKEERLFRVLTTEEIDQHLTAISERD

SEQ ID NO: 48063 - protein, 94 aa, Zea mays
  Clone ID: LIB3069-043-A12_FLI.pep
GMSTSTSSRPTTHLFPITLPQVKQRTGIIIFTCGKVIGNKWDVYLDLLQADYSEGDALDALELFRYCCRRMLMTHVDLIEKLLNYNTLEKTETS

SEQ ID NO: 48064 - protein, 287 aa, Zea mays
  Clone ID: LIB3069-056-G11_FLI.pep
VPRQAGRRGGQEDRRPSRAGARDGNGTGPQNLRSFLPARPCPSTRRSCRPRPTSALSSSRGIGYATGCAMVLWVFGYGSLIWNPGFDFDDKILGFIKGYKRTFNLACIDHRGTPEHPARTCTLETDDEAICWGIAYCVKGGPEKELKAIQYLERRECEYDQKISIDFYKEGDPLKPAVTGVLVFVSTPDPIGNKYYLGPAPLQDMARQIATANGPTGYNRDYLFSMEKALASISHEDDSIIELANEVRKVLNRTKETKITGANASLKSHAPLVHLSALPEGTVVDSR

SEQ ID NO: 48065 - protein, 47 aa, Zea mays
  Clone ID: LIB3070-010-G4_FLI.pep
LFSLSAVCFSWGQPERSVKRSMFREVSENSQCYYSVDSSSLKTIQGR

SEQ ID NO: 48066 - protein, 309 aa, Zea mays; identical to SEQ ID NO: 47615
  Clone ID: LIB3075-042-E5_FLI.pep

SEQ ID NO: 48067 - protein, 162 aa, Zea mays
  Clone ID: LIB3078-007-G12_FLI.pep
RRRRRSRSSVCERGRNAGGEGAGGGHGHAGADAGRGDLRGLARARPLRRRRLPRHRRPHQDGVRQAVRRRVAVRGGRQLRVLLHPQQRHLHLLLHGAPLLPPLQGRRRRSRRRRCRRLLINQVSVHHTVHFVLLASIYIYLYMPFVMSRSSDPVRPAARVVV

SEQ ID NO: 48068 - protein, 182 aa, Zea mays
  Clone ID: LIB3078-012-C3_FLI.pep
SPPPSHHSLLAHSHLPAPSSTATKMNKERLMKMAGAVRTGGKGTMRRKKKAVHKTVTTDDKRLQGTLKRVGVNTIPAIEEVNIFKDDLVIQFLNPKVQASIAANTWVVSGSPQTKKLQDVLPGIINQLGPDNMEHLKRIAEEMQKQVAAAGAAAQVKEDNDDDVPELVPGETFEEVAQETKA

SEQ ID NO: 48069 - protein, 127 aa, Zea mays
  Clone ID: LIB3078-027-B1_FLI.pep
IRVAYIFSVLVPRSYTSTCIHTRIHTIDYVATLIRASHERIHTYARTTRRALDITLTRTRSTRGGTTIREDQSAEEVVLLLAAGLLGLLVVLLLLVVLVEGEAAGADGRRRRDLLLDLVAVRVLRVL

SEQ ID NO: 48070 - protein, 180 aa, Zea mays
  Clone ID: LIB3078-037-E6_FLI.pep
LVITSHVRPPETTMAMETCFRAWALHAPAGSKDRLLVGNLVLPSKRALAPLSVGRVATRRPRHVCQSKNAVDEVVVADEKNWDGLVMACETPVLVEFWAPWCGPCRMIAPVIDELAKDYAGKITCCKVNTDDSPNVASTYGIRSIPTVLIFKGGEKKESVIGAVPKSTLTTLIDKYIGSS

SEQ ID NO: 48071 - protein, 109 aa, Zea mays
  Clone ID: LIB3078-038-G11_FLI.pep
RRKTRRGWKWTGRRKMSRGGRVGRRRRGPARRGRQRSSWRTRRRSTSPSSTSTPPSRPPRGTARTRCSGGTVDAEAVSIAFQKRGYFDDTKSCSSSKSNDSLELVDIQI

SEQ ID NO: 48072 - protein, 264 aa, Zea mays
  Clone ID: LIB3078-052-G1_FLI.pep
QSSEGRRSLPKLRIAMQPVKVYADRRSQPSRAVIIFCRVNQIDFEEVTVDLFKSQHLTPEFKKINPMGQVPAIVDGRFKLFESHAILRYLASVFPGVADHWYPSDLFTRAKIESILDWHHSNLRRGAATLVMHTALAPFLGLTTSHEAVKQAEKLVMQSLGVIESVWLKGDAKFLLGIPQPSIADLSLVCEIMQLEILGDEVRDRFLGAHERILVWMDKVKKATSPHFEEAHELLFQVKKARMVQGSSSKAFESSTKLKTASKL

SEQ ID NO: 48073 - protein, 155 aa, Zea mays; identical to SEQ ID NO: 37872
  Clone ID: LIB3079-015-G4_FLI.pep

SEQ ID NO: 48074 - protein, 55 aa, Zea mays
  Clone ID: LIB3079-027-D6_FLI.pep
FTTPLKHGFLHASPPPEIASGFYHYNVSFYVVLRRDIVYVCVYIHTNNWKTKNRV

SEQ ID NO: 48075 - protein, 124 aa, Zea mays; identical to SEQ ID NO: 41198
  Clone ID: LIB3088-023-E2_FLI.pep

SEQ ID NO: 48076 - protein, 382 aa, Zea mays
  Clone ID: LIB3075-031-A1_FLI.pep
TMGKGDVATRSKSQKSPAIQNEQSTPANPPTAYPDWSQFQAYYNAAGTAPVTPPFFHPSVAPSHQGHPYMWGPQMMSPYGTPPPYAAMYAQGTPYQQAPMPPGSHPYSPYPMQLPNGTVQTPTSGAGGTATDKSNKNKRKASLKRSKGSLGSLDVVAVKNNKSPAKPSTSSSNEGSSQSESGSGSSSEGSSTNSKSGSRVKDNSEQGQGNDARSKCTQSSVVEPTQPSSGSVVLNPMMPFWPVPPPMAGPATTLNMGVDYWGTPASVPMHGKVIAAPTSAPSSNSRDIVLSDPTIQDGRELKRQKRKQSNRESARRSRLRKQAEWEEVANRADLLKQENSSLKEELKQLQEKCDGLTSENTSLHEKLKALEDEKSNGNWYKD

SEQ ID NO: 48077 - protein, 127 aa, Zea mays
  Clone ID: LIB3075-032-A4_FLI.pep
AGPKFEYRWADGVQIKKPIEVSAPKYVEYLMDWIEAQLDDESIFPQKLGTPFPQNFKEVVKTIFKRLFRVYAHIYHSHFQKIVSLKEEAHLNTCFKHFTLFTWEFTLIDKAELAPLIDLIESIVSVC

SEQ ID NO: 48078 - protein, 454 aa, Zea mays
  Clone ID: LIB3075-033-G3_FLI.pep
RDTMRECISIHIGQAGIQVGNACWELYCLEHGIQADGQMPGDKTIGGGDDAFNTFFSETGAGKHVPRAVFVDLEPTVIDEVRTGTYRQLFHPEQLISGKEDAANNFARGHYTIGKEIVDLCLDRIRKLADNCTGLQGFLVFNAVGGGTGSGLGSLLLERLSVDYGKKSKLGFTVYPSPQVSTSVVEPYNSVLSTHSLLEHTDVAILLDNEAIYDICRRSLDIERPTYTNLNRLVSQVISSLTASLRFDGALNVDVNEFQTNLVPYPRIHFMLSSYAPVISAEKAYHEQLSVAEITNSAFEPSSMMAKCDPRHGKYMACCLMYRGDVVPKDVNAAVATIKTKRTIQFVDWCPTGFKCGINYQPPSVVPGGDLAKVQRAVCMISNSTSVVEVFSRIDHKFDLMYAKRAFVHWYVGEGMEEGEFSEAREDLAALEKDYEEVGAEFDEGEDGDEGDEY

SEQ ID NO: 48079 - protein, 297 aa, Zea mays
  Clone ID: LIB3075-041-D3_FLI.pep
QCSLTTEQTPASVTLLPLGSLRLPSSPSLRSLGYERIRIASPPPRPGEMAGLGKAMYAVGFWIRETGQALDRLGCRLQGKYFFHEQISRHRTIMNIFDKSLIGDVQVGQGASIWYGCVLRGDANNIQIGSGTNIQDNSLVHVAKSNLSGKVFPTIIGNNVTIGHSAVLQGCTVEDEAFVGMGATLLDGVVVEKHGMVAAGSLVRQNTRIPCGEVWGGNPAKFLRKLTDDEIAFITESASNYSNLSKVHAAENAKPLEKIEFEKVLRKKFAHQDEEYDSSIGITRGAPPELTSPNPAQ

SEQ ID NO: 48080 - protein, 369 aa, Zea mays
  Clone ID: LIB3075-046-D6_FLI.pep
RLETHDLGTGPVKLNSSFNEMHSADRQCLDSADVPASTQPLSVSPVLMSDEQHVDDAHSAVKAIEHLGNNLANIKQKSLHMDVLMLEDAQVASMAAVPGHEGESVDAGSNSFDILLGALAEESKAADAPGKDEVGKASLTLITLASNEPSVTEGRVVDVVETDTILGAGKDDKQVDQAHDFHLSDLVSRCIGSSNRSDIICYVRRKHKRKRDYSCFVRSPCESLRPRSKPAVVEESEWSRTAEASFAKRGKRTQAVGSFQCDIDLCGMAFETRAELNAHKRNICTDESCGKRFSSHKYLKRHQCVHSEMRPFKCPWEGCKMTFKWLWAQTEHVRVHTGERPYKCSAPDCGQTFRYVSDYSRHRKKFNHY

SEQ ID NO: 48081 - protein, 178 aa, Zea mays
  Clone ID: LIB3076-008-B9_FLI.pep
SRLPHTALQPLALTQPDNQYTTATKPGPNNSAGQPPPFAGKERPPDPPRPAMESAVNPKAYPLADAQLTMGILDIIQQAANYKQLKKGANEATKTLNRGISEFVVMAADTEPLEILLHLPLLAEDKNVPYVFVPSKQALGRACGVTRPVIACSVTSNEGSQLKQQIQGLKDSIEKLLI

SEQ ID NO: 48082 - protein, 402 aa, Zea mays
  Clone ID: LIB3076-009-D2_FLI.pep
SMAKLASIARSMLRFPNGSMRLVMVTVIGAVLGFFIGISFPSVSITKLHFPDSFISYIEDKDAGLTTQAILNHAWTSARNARGNGTEPTSNSTLKIYVPTNPKGAEGLAPGIVVSESDFHLRRLWGDPSEDLPFKPKYLVTFTVGVEQKANINRAVKKFSDNFAILLFHYDGRVSEWDEFEWSQRAIHISVRKQTKWWYAKRFLHPDIVAAYEYIFIWDEDLGVEHFNAEEYIKLVKKHNLDISQPGLEPDRGLTWQMTKRRGDSEVHKDTEERPGWCSDPHLPPCAAFVEIMAPVFSRDAWRCVWHMIQNDLVHGWGLDFALRKCVEPAHEKIGVVDSQWIVHQVVPSLGNQGQSENGRAPWEGVRARCRKEWGMFQTRMAEAEKAYYKMMGITPPNSTRV

SEQ ID NO: 48083 - protein, 316 aa, Zea mays
  Clone ID: LIB3076-032-E8_FLI.pep
VARHCSTAKPRSSRVAPEGAEGLDGASPEDVLVVEGRDGSAHERAHPEDPVVVPGLVLVVDDGGAQAPGRVDAGAGDGDGGQVHHEHGEADGEGSQNRDVGVAGVALGVGGGEDGVDEHEGADDLGAEAGAAGVAGGERVGAAAVPVEVGALERLDEADAADGAEALRHDVEQRAHQGDLARQEEAEGDGGVDVAPRDAGGAVDEDEDHAAEGPGDAQHPHAAARRVGTRRRRVRLVLVPDHGGHRDVQEQQRGDELGDHGAVQRPGPQLSRVDQRRRGRVRVVLGSELAAASAALDHVVLAHRLLEPPRLYLQGG

SEQ ID NO: 48084 - protein, 268 aa, Zea mays
  Clone ID: LIB3078-003-B1_FLI.pep
SMAAQALLSGRQLLGRPVQSAVSRSSARKAPFVVRASSSPPAKQGADRQLWFASKQSLSYLDGTLPGDYGFDPLGLSDPEGTGGFIEPKWLAYGEVINGRYAMLGAVGAIAPEIFGKMGIIPPETALPWFKTGVIPPAGTYNYWADSYTLFVFNMALMGFAEHRRLQDWYNPGSMGKQYFLGLEKFLAGSGDPSYPGGPLFNPLGFGKTEKEMNELKLKEIKNGRLAMLAILGYFIQGLVTGVGPFQNLLDHLADPVNNNVLTSLKFH

SEQ ID NO: 48085 - protein, 107 aa, Zea mays
  Clone ID: LIB3078-008-B1_FLI.pep
TSSDPDSTEGLQLYSKSSCSTAGRGHAAATVVLQLRQELVHLQIRRGIKKCQSALKKGIGWQACRRLMASMAYSTWNSRPSGEKVFTPRSYSVLVRNILSETAADAG

SEQ ID NO: 48086 - protein, 222 aa, Zea mays
  Clone ID: LIB3078-018-B1_FLI.pep
PAMVHSAYDAVELVADVPGHIEAVASHAGKLLVAVSDTEGFLWGSDCSLRIYSAPSPSDGGGEIRWDGPYALERQEPRFWRRPPLAMEVSASRDLLISLSEWIALHRLPGLETVAVVSSKTKGANVFAWDERRGFLAVGRQKRLTVFRLDSGREFVEVKEFGVPDILKSMAWCGDNICLGIRREYMIINSMTGALTEVFSSGRIAPPLVVPLLTGELILGKV

SEQ ID NO: 48087 - protein, 112 aa, Zea mays
  Clone ID: LIB3078-031-B5_FLI.pep
AAAPTMDEDEFRRMLDLFPVVRSRDYCCSDLGTSSRGTRQRSRVQEATKGDNKDSSGGRDMFMQKLKMAAENKIGATKAEFFCKTFEEVHEKLVHRELNLDAAKKFLSAYES

SEQ ID NO: 48088 - protein, 180 aa, Zea mays
  Clone ID: LIB3078-050-F11_FLI.pep
CLLRSSLSTVDDACEGAKTSARVRSVHTSKGGGWLVVPGGVALSYASDNDFLLNRPPAPANGEMGGVVPSGEAGGVLAALLGDDGYPAGRLIMMLRVTFTGVSSLPEAGEGGTNAAASPAGSLILTAAGRTGCLRRRPSPVSGRGPATVSSHSLSRRPISLRRNHPTATARCQTLDLQSL

SEQ ID NO: 48089 - protein, 140 aa, Zea mays
  Clone ID: LIB3078-055-G12_FLI.pep
HTYMNVHERETLSKENTQERHQSSRACTRCRRSRTRSRRTATGSFRSSRGSAPSWPATGRTPGRGRRASTQAGRRRPPRASPHSCCGRRPPRTECPGLRAPCLPPPLPRRLCRRQPTAVPPGRWSPPAACSSPPSAADLP

SEQ ID NO: 48090 - protein, 129 aa, Zea mays
  Clone ID: LIB3079-004-C12_FLI.pep
SVPHSRANDLVIPSTPAYRSRSISRNLHTSSIFSCRAVQRRSKYLGSRDMNLVPSGSVLQRCAYVNDEATRGRTSPWSTLFEILEGFITHCVCTHSVNVKNSPESLGLQILRGGKEVAGSTIDKNVQFA

SEQ ID NO: 48091 - protein, 137 aa, Zea mays
  Clone ID: LIB3079-046-C7_FLI.pep
AFIERVEPEAGPVAPVVPRHPKSYMEIMEMIQRGERPDDIQDINDDPPNPDQPISEPRMAPKPKPWEKQGQGSLACDLKSLPRESDVLRSEVQHDDGTNQVTESADGANQADSLLQAGVAAGSESPGVPDDAASSLE

SEQ ID NO: 48092 - protein, 179 aa, Zea mays
  Clone ID: LIB3079-047-D10_FLI.pep
QAQYQNRNSLNGFRYNKLTTKVVTMRGARRLEAELGKEPPVLAGLEPLLEARLGGLAGFDLLVPGGERVGPARGDVFEIDVEGVAGGHEVSEIDELDETLDAGLLGRLLGGVLADHLLGVLGQAGDEAVPIGTVAGALLEHAHDHRLPAGEPALEEDYGLAGLEKLHHLRAVVVMLLRR

SEQ ID NO: 48093 - protein, 106 aa, Zea mays
  Clone ID: LIB3088-010-C2_FLI.pep
RADLSQMVAGRETKVQNMSRLSMNLATQRHAPSTFILGIHKQQPSMRSRGEKPLLGLEHVADQVDDAVAVAPLVVVPRDELDEVVVQSDPGLGVEDARPAVTKEVG

SEQ ID NO: 48094 - protein, 62 aa, Zea mays
  Clone ID: LIB3088-014-C9_FLI.pep
LLQICRTNSHQHFKSIHILCLYLIFRLILIPLNADCLTLQLWNMLQQSSTPTTRAGTSALKH

SEQ ID NO: 48095 - protein, 241 aa, Zea mays; identical to SEQ ID NO: 46928
  Clone ID: LIB3088-021-B6_FLI.pep

SEQ ID NO: 48096 - protein, 262 aa, Zea mays
  Clone ID: LIB3088-039-D10_FLI.pep
AMWRRALAMVLFMAGAALLAGAAGAGAQQGVWSIITRPMFQSMLSHRGDSGCQGAFYTYDAFIEAASKFPGFGTTGDEQTRRRELAAFFGQTSHETTGGWATAPDGPFAWGYCRVKEQKQTDPPYYGRGPIQLTHKYNYRLAGQALNLNLVGDPDLVARDPVVAFKTAIWFWMTPQSPKPSCHAVMTGDWRPSATDRAAGRLPGYGLTTNIINGGLECGEDRSTDGAKAAKDRVGYYKRYCGMLGVGYGDNMACGSQKPYGG

SEQ ID NO: 48097 - protein, 127 aa, Zea mays
  Clone ID: LIB3115-003-F10_FLI.pep
RPRRSTTAQASRCSRWRPATCLVATRATGPCSRRPSPPRRRRRRAGVWSGWTGTTCPTTSQRRCSRARRAMTLAASSARRRTRTASPRSWRTPEDPDPSISVHHAMYVCVADGLHLRVRARRAGEAS

SEQ ID NO: 48098 - protein, 172 aa, Zea mays; identical to SEQ ID NO: 36903
  Clone ID: LIB3115-038-H1_FLI.pep

SEQ ID NO: 48099 - protein, 186 aa, Zea mays
  Clone ID: LIB3116-025-C8_FLI.pep
GERGTRGGRRERRRLSPLGVPVPQPLVCCLPACKKEFVMASKRILKELKDLQKDPPTSCSAGPAGEDMFHWQATIMGPPDSPYAGGVFLVNIHFPPDYPFKPPKVSFKTKVFHPNINSNGSICLDILKEQWSPALTISKVLLSICSLLTDPNPDDPLVPEIAHMYKTDRPKYESTARSWTQKYAMG

SEQ ID NO: 48100 - protein, 92 aa, Zea mays
  Clone ID: LIB3116-027-F7_FLI.pep
IKGKKFNIHIIGYGVTVSTYNLSMSQEPHLLDSNNQKFYPNRMIQQQRDQPRSRRGISSPGRPLPPLLLCLPSSTCRQRKRRTRPGRRGSCR

SEQ ID NO: 48101 - protein, 135 aa, Zea mays
  Clone ID: LIB3118-012-H8_FLI.pep
SPPPPLVPRPIAMARIKVHELRGKSKADLQAQLKEFKSELSLLRVAKVTGGAPNKLSKIKVVRTSIARVLTVISQKQKSALREAYKKKKLLPLDLRPKKTRAIRRRLTKHQLSLKTEREKKREKYFPMRKYAIKA

SEQ ID NO: 48102 - protein, 77 aa, Zea mays
  Clone ID: LIB3118-025-B5_FLI.pep
IPKLKFPYIINSITYHYNVYNNNDLIFCLEAGMTTLSKRRVASMSSPPNAAVALVIFAWRKPLSTSCSVSLHNSFFS

SEQ ID NO: 48103 - protein, 174 aa, Zea mays
  Clone ID: LIB3118-025-D6_FLI.pep
IYRTLGENFNERVLPSIIHETLKAVVAQYNASQLITQRETVSREIRKILTERARFFNIALDDVSITSLSFGKEFTHAIEAKQVAAQEAERAKFIVEKAEQDKRSAIIRAQGEAKSAELIGQAIANNPAFLALRQIEAAREISHTISASANKVFLDSNDLLLNLQQLNVSSKQKK

SEQ ID NO: 48104 - protein, 52 aa, Zea mays
  Clone ID: LIB3088-035-C9_FLI.pep
QVETAPPRGTKQELHQEVPKQLKGIIITLRSHYNILPENNRTTEKGPLISNI

SEQ ID NO: 48105 - protein, 132 aa, Zea mays
  Clone ID: LIB3114-013-E11_FLI.pep
PCLNTNCTFNQDKQNCNLITRLTTLKTGSQKFKHSTNSKTPKTIQEPTKNARASAQPPGLPLGLEQGEDVTLANGPLDIPHDEPVLVIQKLHSDLGHLTPGAGPAHHLHHNSKLHLGVHALASRVDGSRRAL

SEQ ID NO: 48106 - protein, 37 aa, Zea mays
  Clone ID: LIB3115-016-E5_FLI.pep
YIVVVQCCEAELSTCVLISWLSCRLFFLTARPVEKSQ

SEQ ID NO: 48107 - protein, 94 aa, Zea mays
  Clone ID: LIB3115-016-E7_FLI.pep
KIKATFIRWASYHSALPGRKHSYSIIPCTLDRNANRDDGTVYQLSMATPGSWKGSSSWLSCCLSIHFLKGGRGSPWSRCTAAAGNGTFIDCPAP

SEQ ID NO: 48108 - protein, 265 aa, Zea mays
  Clone ID: LIB3115-025-F6_FLI.pep
FPNTRITNKQKFEKVVADAWGVFDFSRRRCSSHIPREDACSSPIDTMAVFSDLHTADGLKSLEAHLAGKTYVSGDSITKDDIKVFAAVPSKPGAEFPNAARWYETVSAAVASRFPGKAVGVNLPAGSAPAAAAPADEAEDDDDLDLFGDETEEDKKAADERAAAAKASSKKKESGKSSVLMDVKPWDDETDMKKLEEAVRSVQMEGLTWGASKLVPVGYGIKKMTIMLTIVDDLVSIDTLIEDHLTQEPINEYVQSCDIVAFNKI

SEQ ID NO: 48109 - protein, 185 aa, Zea mays
  Clone ID: LIB3115-028-G12_FLI.pep
GHTRRSELTTIDERQPPAAEPERPFLFSFTQRDGERSQSAKATHRFYPPIGVAAASIVGFSSIQIHRQQASKQAGAMGLPMRRERDAEAELNLPPGFRFHPTDDELVEHYLCRKAAGQRLPVPIIAEVDLYRFDPWDLPERALFGAREWYFFTPRDRKYPNGSRPNRAAGNGYWKATGADKPVVP

SEQ ID NO: 48110 - protein, 94 aa, Zea mays
  Clone ID: LIB3116-010-H10_FLI.pep
GYHKHIECSSNILCNMLLANAVEETSTRRAALEASINEVLFQIIKFANEKKDHIPAIPDRIFNHEIMIPSSDSVFGWNTDVIRRVLNSGHPYSL

SEQ ID NO: 48111 - protein, 254 aa, Zea mays
  Clone ID: LIB3116-032-E10_FLI.pep
DGRTLADYNIQKESTLHLVLRLRGGMQIFVKTLTGKTITLEVESSDTIDNVKAKIQDKEGIPPDQQRLIFAGKQLEDGRTLADYNIQKESTLHLVLRLRGGMQIFVKTLTGKTITLEVESSDTIDNVKAKIQDKEGIPPDQQRLIFAGKQLEDGRTLADYNIQKESTLHLVLRLRGGMQIFVKTLTGKTITLEVESSDTIDNVKAKIQDKEGIPPDQQRLIFAGKQLEDGRTLADYNIQKESTLHLVLRLRGGY

SEQ ID NO: 48112 - protein, 105 aa, Zea mays
  Clone ID: LIB3116-034-E10_FLI.pep
NQARLPGPGDRDSVRDQWSWTNADMHTRHTIASSRLATSHTHPPAVVPRHYRRQRARPAQQERTGTGTGTGTGTGSVHQMLQMSWSNAAASASASQERAPAHRKS

SEQ ID NO: 48113 - protein, 130 aa, Zea mays
  Clone ID: LIB3118-035-H12_FLI.pep
KPRRTLRPARFPIQIRPRHLLLFSATPMVYVDSWDEFVERSVQLFRGDPNATRYVMKYRHCEGKLVLKVTDDRECLKFKTDQAQDAKKMEKLNNIFFALMTRGPDVDISEVSGKEQAEQQQAKKGRGRRQ

SEQ ID NO: 48114 - protein, 146 aa, Zea mays
  Clone ID: LIB3150-012-A11_FLI.pep
RGRGAEESRGPEAQKAVADRRKRKKKRQRARMPCLNVSTNVNLEGVDTSAILAEASKSVANIIGKPEAYVMVVLKGSVPMAFGGTQEPAAYGELVSIGGLNPDVNKKLSAGIASILESKLSVPKSRFYLKFYDSKRSDFGWNGSTF

SEQ ID NO: 48115 - protein, 131 aa, Zea mays
  Clone ID: LIB3150-012-H12_FLI.pep
DSSYQGDSSNPRDLTADQDGKAEPRCPSKHAQVRDTAGRRRPRSLQRPARVPVRSTLTHREVPERPVRDSVEHSPGGNARVLSLLLTHGHGEAIDFFCVEWWCIQIDRRGETQSAGLVAIGERQSRRGFRS

SEQ ID NO: 48116 - protein, 464 aa, Zea mays
  Clone ID: LIB3150-015-G9_FLI.pep
AVPAAERMASSFSFPLMNPADIAEALHSYCIAPSPGLRAEHIVTPQPGLVAEVLALFLANFVGDDEPDEQLEFQALQAIDNPEHHMRAIALSRLYRRANAFLHSILFRDLTLRDLLRADGRRVVYILSAIINFLHYRQDKLSFLEPIVQEYSPLQERHTELRAKIAELRNAKEDHLLKEQMEAPVVQQLEKEVNALKQRLREYNKEQLSLRVATKAIDEKKQELLGKMNQADFELVKVMQEKERLSAKIVHSPEKLLRTLEEKKAVRDELRNSEKVAMQKVQEKTNTLETYTKVSEKLVKHLSKISAVHEKGTVAKASEKDVKAHKEKIGDQNLEIKALRNKAAEWQLKVLENEGILNAKEKERDQRVAENNLKMNALKSEVESEHKCHAEKEIKIKEKLEKVAELCSQADSVAEAGNKKIQEICGKYNQVCEAANMYMDGIDRSFEEIDEAAVSLKAIGQSGA

SEQ ID NO: 48117 - protein, 133 aa, Zea mays
  Clone ID: LIB3150-033-B12_FLI.pep
TMSRSLGIPVKLLHEAAGHVVTVELKTGEVYRGSMVECEDNWNCQLENITFTAKDGKVSQLEHVFIRGSRVRFMIIPDMLKNAPMFKRLEARIRGKGSAVGVGRGRAVAMRARAAAGRGGGPVGRGGAPPVRR

SEQ ID NO: 48118 - protein, 251 aa, Zea mays
  Clone ID: LIB3150-019-D4_FLI.pep
AKPKRLDSHSNCRLDLSNGLEESLPRSTLLKSSMVTEQLCVDTIRNNSTLTLVLQVVGTAELGEAPLSALNNLLAARELELGATQSFTGMCSIVVLASNRKEDLTNVHPSTGALRLAKGTPHSSLEPISPSTRKHLVDTKDMEGVNPDPKVEGILSCRLGHVLVAGNTGSLKSLTGDILLLPRDKVHTVGELINTLSLHANIVDPDLGVRDTTAVPGLGVWLVLDLAIASRRPSPHGDGSREQAAAANERR

SEQ ID NO: 48119 - protein, 99 aa, Zea mays
  Clone ID: LIB3150-031-G12_FLI.pep
HTALSVYPSLSFNLTLRQCLLGGTRLASIHWSCPSFFRSSTNCILWLAPHQWLDHHLSIHKQTQSAFARTTVIPICASLRHRRASSGLPSPRKTRGSLL

SEQ ID NO: 48120 - protein, 195 aa, Zea mays
  Clone ID: LIB3150-059-D4_FLI.pep
ACLASGKLELSSPRFANLPQRGRRQDSLQAPHLAQGGSPEITETMVKAVAVLAGTDVKGTIFFSQEGDGPTTVTGSISGLKPGLHGFHVHALGDTTNGCMSTGPHFNPVGKEHGAPEDEDRHAGDLGNVTAGEDGVVNVNITDSQIPLAGPHSIIGRAVVVHADPDDLGKGGHELSKSTGNAGGRVACGIIGLQG

SEQ ID NO: 48121 - protein, 180 aa, Zea mays
  Clone ID: LIB3150-065-F9_FLI.pep
QNRCIEGYCYARMPSSPIRRHRFCREQIFHSREHRVVRWIIWMVLGWDLQNSRDGLVVAIHQKPYHVGNILTDEHNSNILPRSKFFERILDLFNCRLVVDEEVVGFLAQINIANAGHQEASDGVLVGDDCDEGGVVSGDVGPPRHGLWLWMLLPCLLVIEVLRPCCEPGGDQASAQAEIG

SEQ ID NO: 48122 - protein, 190 aa, Zea mays
  Clone ID: LIB3150-105-D10_FLI.pep
AKATLPPSLLPRRLPAVAAMVKYSQEPGNPTKSAKAMGRDLRVHFKNTRETAFALRKLSLTKAKRYLEDVIAHKQAIPFRRYCGGVGRTAQAKSRHSNGQGRWPVKSARFILDLLKNAESNADVKGLDVDNLYVSHIQVNQAQKQRRRTYRAHGRINPYMSSPCHIELILSEKEEPVKKEADNIVAARKQ

SEQ ID NO: 48123 - protein, 193 aa, Zea mays
  Clone ID: LIB3151-004-E9_FLI.pep
QGHVQQHEQSHEQHQGQSHEQQHQQQFQGHDKQQQPQQPQQYQQGQEKSQQQQCHCQEQQQTTRCSYNYYSSSSNLKNCHEFLRQQCSPLVMPFLQSRLIQPSSCQVLQQQCCHDLRQIEPQYIHQAIYNMVQSIIQEEQQQQPCELCGSQQATQSAVAILTAAQYLPSMCGLYHSYYQNNPCSSNDISGVCN

SEQ ID NO: 48124 - protein, 251 aa, Zea mays
  Clone ID: LIB3151-045-H6_FLI.pep
DVAHVHHVPRLLLGVFSFQVRHEAHAGGVHRRLQQRPQNPRRADGDHVHRPSPLAVRQRLAFGHRLGNAVPVLSGSAVVLVRPAVFVDDGAVGDAGVRDHRADRRHHHDAADAGRVASLEHVLRAGHRRNEDFVGVRGLDGRDGAGDVEDAVAASHGRGDAGRVQQVRLEQPQPLAGAAQRRQVRVLGVTGVANSATHEVVASGEEELHEPRGDEAPGARHAHRLHPRLGRVAAAVHGYAGWSWPLSILPR

SEQ ID NO: 48125 - protein, 288 aa, Zea mays
  Clone ID: LIB3180-017-A10_FLI.pep
FLTLPPRCFLLPVDLANLPPANPSPAPEIYSAQTAMAETLDMTLDDIIKNNKKSNSSSRGARRSRGGSAPGGGTGGVGPTRRPFKRAGNRQAPYQPPKAPDAAWQHDMYPAVAAGGGGGGRVSALETGAKLYISNLDFGVSNEDIKELFSELGDLKRFSINYDRSGRSKGTAEVVFARRSDAVAAVKKYDNVQLDGKPMKIEIVGTNTPAAAAAHPVPNGGHARNAARSAPKDAAPAGMSQHRPHQRGGRRAAGSGGGRRGKERSKPKSTEELDADLEKYHADAMQTN

SEQ ID NO: 48126 - protein, 144 aa, Zea mays
  Clone ID: LIB3279-009-E4_FLI.pep
LASSSVIQVLAAQRSVSTICRGAARAARVWARAAPSATARSCATISRASPSRRSGGWLGGAASSASPGSSTRRPAVCSRSFWRTSFVTPSPTPSTPGARPSPPWMSSTRSSDRAAPSTASAARSLRHLVANCMCVGGGRVVCLI

SEQ ID NO: 48127 - protein, 161 aa, Zea mays
  Clone ID: LIB3279-043-H12_FLI.pep
SRTIREAEHLEAELGKEPPVLAGLEPLLKARFGRLAGGDLLVVGRECVGPTGGDILEIDVEGVAGGHEVSEVDELDEALDARLLRSLLGGVLADHLLWVLGEACDEAVAIGAVAGALLEHAHDNCLPAGEAALEEDNGLAGLEELHHLRMLLPLLRRRRRR

SEQ ID NO: 48128 - protein, 149 aa, Zea mays
  Clone ID: LIB3180-059-B3_FLI.pep
SMASKRILKELKDLQKDPPTSCSAGPVGEDMFHWQATIMGPSDSPFAGGVFLVNIHFPPDYPFKPPKVSFRTKVFHPNINSNGSICLDILKEQWSPALTISKVLLSICSLLTDPNPDDPLVPEIAHMYKTDRAKYESTARSWTQKYAMG

SEQ ID NO: 48129 - protein, 141 aa, Zea mays
  Clone ID: LIB3180-059-F10_FLI.pep
SSPEGKARSKMSWQAYVDEHLMCEIEGQHLSAAAIVGHDGSVWAQSESFPELKPEEVAGIIKDFDEPGTLAPTGLFVGGTKYMVIQGEPGVVIRGKKGTGGITIKKTGMSLIIGVYDEPMTPGQCNMVVERLGDYLIEQGF

SEQ ID NO: 48130 - protein, 135 aa, Zea mays
  Clone ID: LIB3227-024-D3_FLI.pep
ACMYICIYRQTVTKKDPGPGYGARRLVRGDVHPDGDEEDGGEGEEDDGVDEDGGAAGLEVAELHEAPALGRQLQQQARRQQHEQHHRHHHGAPVGHLDRRRARGACENPTKTKTKPNQTSWEGSASATLHVYTPA

SEQ ID NO: 48131 - protein, 161 aa, Zea mays
  Clone ID: LIB3279-009-D9_FLI.pep
RIHNLPLSSPGGVRGRMAESTARTVKDVNPHEFVKAYSAHLKRSGKMELPEWVDIVKTARFKELPPYDPDWYYIRAASIARKIYLRQGIGVGGFQKIYGGRQRNGSRPPHFCKSSGAVARNILQQLQIMGIIDVDPKGGRLITNQGRRDLDQVAGRVAVEA

SEQ ID NO: 48132 - protein, 190 aa, Zea mays
  Clone ID: LIB3279-009-F7_FLI.pep
YCVIDNKVKHNRRPKCWVNKHGSTTTQQYSPTLSMKLTRSSTSVLDLLLGPQLVAVTTLLLAAVDSPRVQSCIAFAADHLVLVVLASERLQRGLNDATAEPKHEVKRRLLLDVIVRKGAAILQLLPGKDQPLLVRRDPFLVLDLGLDIVDGVAALDLEGDGLPCQRLHEDLHLVGPGLSPGCCDCCGGGF

SEQ ID NO: 48133 - protein, 141 aa, Zea mays; identical to SEQ ID NO: 48043
  Clone ID: LIB3279-018-A8_FLI.pep

SEQ ID NO: 48134 - protein, 297 aa, Zea mays
  Clone ID: LIB3279-041-E6_FLI.pep
SPVANSVSPVTGADGKSKEPIQRSGSFKDSKKNVTKKDVRNSYEPPNPASFVEDKVQTVKVGDVDLQETKKLNNELDLTNSSSAPTVPLAVSTENADSTAVTNTSSRRPSSEGTGEPGVESFTVSAVECDESKRTHKVVKDPSKDNISSDATKHELPKECAVDSTEQASAVTSNTDDSYAAPLVTNQEQLLKGSASEKQAVMNNSSKNSDTSAHFFDGNDVGVTTSGTSEPTAQTSNDEGDSDISPETDLAVYNVPLGSSELQLKSESRANDQQPAAPTVSVRPVSREKPSTKSTAG

SEQ ID NO: 48135 - protein, 228 aa, Zea mays
  Clone ID: LIB3279-180-G1_FLI.pep
VSVASAAMSMFNRIFGKPKEQANSSALATLDKLNETLDMLEKKEKVLDKKAAAELERAKEFSKAKNKRAAIQSLKRKKLYEQQIEQLGNFQLRIHDQMIMLEAAKATTETVDALRTGAAAMKAMQKATNIDDVDKTMDEINEQTENMKQIQDALSTPLGASDFDEDELEAELEELEGAELESQLLEPVAALPVHPVHVPGNKQPARPAPQKATAEDDELAALQAEMAL

SEQ ID NO: 48136 - protein, 153 aa, Zea mays
  Clone ID: LIB3279-184-A11_FLI.pep
TMVKAVAVLGSSDGVKGTIFFTQVGDGPTTVTGSVSGLKPGLHGFHVHALGDTTNGCMSTGPHYNPASKEHGAPEDENRHAGDLGNVTAGADGVANINVTDSQIPLTGPNSIIGRAVVVHADPDDLGKGGHELSKSTGNAGGRVACGIIGLQG

SEQ ID NO: 48137 - protein, 93 aa, Zea mays
  Clone ID: LIB3279-184-G5_FLI.pep
ALISLKKNYCATLFHKMILRTALVAQFNIRVSHFLISHMHSATNDFFMALHSILEHRNKATVGSGSGSGGNKRYCISVCSFMFTQQMCLKEGG

SEQ ID NO: 48138 - protein, 147 aa, Zea mays
  Clone ID: LIB3279-206-E12_FLI.pep
KKRVLHTFRLSLDAAGVHEHPDLTAHGFRRQVGPELGADDAGVAMRAGDLAPDAAVVGAAALGLGLVDVGHPLPAVPRDVLLGVHPLDLHQRRSLVLVRLGPLVSKDGAPDVEPHALPRAPLHHLDAAAFAPGVRGGWDGDDGFGGE

SEQ ID NO: 48139 - protein, 78 aa, Zea mays
  Clone ID: LIB3279-225-F3_FLI.pep
FRREYSSHNVKYKKQIQLVAKISVCIDRRLTWRKRSRELIFSLGEETNIGLVLPPGQGPPAPGNSKMLHKHILCSVIH

SEQ ID NO: 48140 - protein, 116 aa, Zea mays
  Clone ID: LIB3355-004-E10_FLI.pep
FRRRYGVRSGKQEGAGPQGPRGRDRRPRRDRRQERRGPGAPRRRAQPRRPDSQGAAGAAGVQRDGEEGRSEHHGRVRRRARRQGGRQHRRVQVHQVVLSRACVRSVRSCLRSVPWP

SEQ ID NO: 48141 - protein, 123 aa, Zea mays
  Clone ID: LIB3355-034-H7_FLI.pep
ASPSRSSRFTAPPLASPTAARMPFKRFVEIGRVALVNYGKDYGRLVVIVDVVDQNRALVDAPDMVRCQINFKRLSLTDIKKLIVQKRRAALSDFDRFKVMLARIKRGGAIRQELAKLKKASTA

SEQ ID NO: 48142 - protein, 213 aa, Zea mays
  Clone ID: LIB3356-016-B8_FLI.pep
PPPVAFVPSISGCVAGEPDTANRIRRQGEREEMGLTFTKLFSRLFAKKEMRILMVGLDAAGKTTILYKLKLGEIVTTIPTIGFNVETVEYKNISFTVWDVGGQDKIRPLWRHYFQNTQGLIFVVDSNDRDRVVEARDELHRMLNEDELRDAVLLVFANKQDLPNAMNAAEITDKLGLHSLRQRHWYIQSTCATTGEGLYEGLDWLSSNIATKS

SEQ ID NO: 48143 - protein, 491 aa, Zea mays
  Clone ID: LIB3356-016-F4_FLI.pep
PRPLLAATTPVTSSRADAAAMDPVATWGLTPLAGADPEIYDLLEREKRRQRRGIELIASENFTSFAVMEALGSALTNKYSEGMPGARYYGGNDVIDEIENLCRSRALAAFRLDAASWGVNVQPYSGSPANFAAYTALLNPHDRIMGLDLPSGGHLTHGYYTAGGKKISATSIYFESLPYKVSAATGYIDYEKLEEKALDFRPKLIICGGSAYPRDWDYAKLRAVADKVGALLLCDMAHISGLVAAQEAANPFEYCDVVTTTTHKSLRGPRAGMIFYRKGPKPPKKGQPEGAVYDYEDKINFAVFPSLQGGPHNHQIAALAVALQQTMSPGFKAYAKQVKANAVAIGNYLMSKGYKMVTDGTENHLVLWDLRPLGLTGNKVEKLCDLCHITLNKNAVFGDSSALSPGGVRIGAPAMTSRGLLEKDFEQIGEFLHQAVTICLNIQKEYGKLLKDFNKGLVNNKDIENLKVQVEKFADSFDMPGFTLESMKYKE

SEQ ID NO: 48144 - protein, 154 aa, Zea mays
  Clone ID: LIB3356-019-E1_FLI.pep
PPPPFRAPYPSPRQRRLRAHPAMTFKRRNGGRNKHGRGHVKYIRCSNCAKCCPKDKAIKRFLVRNIVEQAAVRDVQEACVHDGYVLPKLYAKVHHCVSCAIHAHIVRVRSRENRRNREPPQRFRRRDDGPRPGQGPPRPGGAAPAAAAAAAPRT

SEQ ID NO: 48145 - protein, 207 aa, Zea mays
  Clone ID: LIB3356-021-F6_FLI.pep
RGGKMLRHAARRLVSRAVAPPTARRALATAEVPAEAVEDSTFVEAWKKVAPNIEPPATPLSLMQPRPPTPATIPTKLTVNFVLPYKSEIANKEVDMVIVPATTGQMGVLPGHVATIAELKPGVLSVHEGNDVSKYFVSSGFAFVHANSIADIVAVEAIPVDQIDPALVQKGLAEFTAKLGSASTDLEKAEAQIGVDVHSALNAALTG

SEQ ID NO: 48146 - protein, 242 aa, Zea mays
  Clone ID: LIB3356-045-H8_FLI.pep
TDMIGSMKPEELQKMFEVASSLNSTSSAGPNLGPNMPEMSPDMLKMASDMIASMPPDDVQKMMSFASQMGGPGGAPRSSENINFGPSVRATTSNSARGSSSQPVLENPDELSDDQRMSQSSSSLPPSTADMQETMRNSMKDPAMRQMLTSMMKNMSPEMMANMSEQFGMKLSKEDAAKAQQAMSSLSPEDLDRMMRWMERAQKGVEVAKKTKNWLLGRQGLILAIVMLILAFILHQFGFIGR

SEQ ID NO: 48147 - protein, 231 aa, Zea mays
  Clone ID: LIB3357-025-E12_FLI.pep
LGSNPKQGVDLSAAAMSKLQSESVKDAISQIVGDAKEKNRKFTETVELQIGLKNYDPQKDKRFSGSVKLPHIPRPKMKVCMLGDAQHVEEAEKMGLDYMDVEALKKMNKNKKLVKRLAKKYHAFLASEAIIKQIPRLLGPGLNKAGKFPTLVTHQESLESKVNETKATVKFQLKKVLCMGVAVGNLAMEEKQIQQNIQMSVNFLVSLLKKNWQNVRCLYVKSTMGKPYRVF

SEQ ID NO: 48148 - protein, 232 aa, Zea mays
  Clone ID: LIB3354-121-E3_FLI.pep
TRRGRPARSPAASSLSLIHPQSPAGQRPPPARRRLWPEDRRYMGQALRRASGRVKPPPAPSPPARQPHPPPPPPQASPAPAGGATQDRLDGLSGDDITAPTEHGHGVLEERDPSYDEMLKHMVGRITTKPGGKPEMGEASVVQRYNRPLPKVRTSKAEPGQGGGRQLPSGALNVQHIQEIIRLYQGKSTNHQGPMSVDDIASRFGVEASAVQNIVRFVSLPQDEGVEKKEEH

SEQ ID NO: 48149 - protein, 214 aa, Zea mays
  Clone ID: LIB3354-122-D11_FLI.pep
LIDLNVAEDGDGAVALVNERDARGAVGLDGPSLCVPDGEHDGDGHVDHPAILAADGIEMKCLEELMLAHEPLQRARPPFAEDVDPFLVDAAQAQPVRQLRRLPPQRRAPPALLGRHQVHQPPAVGLDQAGPAPHPEARHRRGPGRPRLHAQLGATHRRNGHPGRARRRRHRHRHGAVAARLRGELREPREESGLCRHAKVVSAARFGSAGGAPR

SEQ ID NO: 48150 - protein, 140 aa, Zea mays
  Clone ID: LIB3355-004-D6_FLI.pep
QPVPVQGGRADAGVRRVRGGRGHRVAAGGRRVPVPPPQGTTHHGAPGHRRVPARYQGHPDLIGRPISQVAVSCPGLCRQRTEMSSVQICESFYTRLPFFLNKSRKCVWFQFAYICTPIVSIAVNVRNTMYVISVYPSNFL

SEQ ID NO: 48151 - protein, 210 aa, Zea mays
  Clone ID: LIB3355-006-E4_FLI.pep
AASSPSLSIWRRKKEMGKEGLMVVAQLKRLAALPPAGGHPRLEQFMRSHVSRLLRTDLLAVLAELLRQDHVSLSMKIYGVVRKEIWYRPDMYFYRDMLYMLARNKKINETRQVWADLKSEDVLFDQHTYGDIVRAFCDADLIDLAMEIYDDMRSSPDPPLSLPFRVILKGLVPYPELREKIKQDFLELFPDMIVYDPPDTLSDIDEEFKF

SEQ ID NO: 48152 - protein, 116 aa, Zea mays; identical to SEQ ID NO: 48140
  Clone ID: LIB3355-015-H11_FLI.pep

SEQ ID NO: 48153 - protein, 196 aa, Zea mays
  Clone ID: LIB3355-021-C6_FLI.pep
EGIPPDQQRLIFAGKQLEDGRTLADYNIQKESTLHLVLRLRGGMQIFVKTLTGKTITLEVESSDTIDNVKAKIQDKEGIPPDQQRLIFAGKQLEDGRTLADYNIQKESTLHLVLRLRGGMQIFVKTLTGKTITLEVESSDTIDNVKAKIQDKEGIPPDQQRLIFAGKQLEDGRTLADYNIQKESTLHLVLRLRGGQ

SEQ ID NO: 48154 - protein, 153 aa, Zea mays
  Clone ID: LIB3355-022-D1_FLI.pep
TPKVGDGRSREIKHASRGRGKVAQRILRWSCQLEEGRGMESSQSSKLTATMAGAERDSAGRWSRTHDSLRSGSETASRGGARRGQGMTRRTSSRGRTPMAGRSGDAVGLAGEAYAHSSELQDKARWRGLALGVGEVGAMADAGKGNAAALATS

SEQ ID NO: 48155 - protein, 280 aa, Zea mays
  Clone ID: LIB3355-022-E4_FLI.pep
ATRRRKRAEDGSDLSLASDMDLDADAQRAAVRSFLTWSSEEWTHAMNASEDKLKAVSEELGHEIRVFSSENFALQPSKLPSADHEEGDDFYELQPADYYNLISNRMGELSKMLKTRKMREAELAAQRAKRTKAVMRVRFPDGYILEADFLPSERIHSLVDLLMKVLARPDLPFYLYTVPPKKRILDTSQDFYTSGFVPGANVHFSYDLPEGLLLNADDLKAGPFLREGILSLDGLSLLLKPASQPDDSRMNSSTHQSGASQSDPVPTTNKKPGRPKWLKR

SEQ ID NO: 48156 - protein, 178 aa, Zea mays
  Clone ID: LIB3355-049-D6_FLI.pep
VFLVLTKSLFIYKEKGHPFDLLSCVMLIPCRSIPGHGGTGENGPDGGVQGSILDDCAPWSSLLRAFQRSRLACGQEIQYVRRADCLRGLWRISPLVVWAWLVSERRRSFSLHSIHDHHGYLASSSCELAPLVYRWPQVSQFAALVRAFPWSCRLHRPLLDSRGGGLPEEELQVLTQAA

SEQ ID NO: 48157 - protein, 99 aa, Zea mays
  Clone ID: LIB3355-054-D12_FLI.pep
YFRPHQWTQPRSTGSPGSGGFDGSWGRPGEEFEAMSRLASGLQRPRRSLSPCEVLWAGVTRGYRARPPVEEVHRSDGVGAALRALQHPPIVGRLHLRNP

SEQ ID NO: 48158 - protein, 116 aa, Zea mays
  Clone ID: LIB3355-054-H7_FLI.pep
FRRRYGVRSGKQEGAGPQGPQGRDRRPRRDRRQERRGPGAPRRRAQPRRPDSQGAAGAAGVQRDGEEGRSEHHGRVRRRARRQGGRQHRRVQVHQVVLSRACVRSVRSCLRSVPWP

SEQ ID NO: 48159 - protein, 202 aa, Zea mays
  Clone ID: LIB3355-059-D3_FLI.pep
AKIQDKEGIPPDQQRLIFAGKQLEDGRTLADYNIQKESTLHLVLRLRGGMQIFVKTLTGKTITLEVESSDTIDNVKAKIQDKEGIPPDQQRLIFAGKQLEDGRTLADYNIQKESTLHLVLRLRGGMQIFVKTLTGKTITLEVESSDTIDNVKAKIQDKEGIPPDQQRLIFAGKQLEDGRTLADYNIQKESTLHLVLRLRGGQ

SEQ ID NO: 48160 - protein, 313 aa, Zea mays
  Clone ID: LIB3356-013-H1_FLI.pep
GFRLLAHTGGAAYQGLPLPAPMPRKHAPAFTPEAASVSSSGGAGQPHNLPVLQAKMKRDPEGYEEELRQLHRHFESSVFLFQQQAALATTSSSGGGGEVAKELGDLALFLAHVAPFYPDDLADLPDQIGGLLDTNARGLPPGLRSHLVQALVLLVNRKIVDLEDTMELFMELQVIGDRAVKKLAFSHIVHSIRRMNQKHKNESTNRKLQNVLFKFLQAEEESRAKRAFTILCDLHRRRVWFDERTTNAICDACFHPSSRIMIAAISFLLGYENAPQEDDSDASSSEDEADQNPQILLSKQDVYKANHKGTSAS

SEQ ID NO: 48161 - protein, 276 aa, Zea mays
  Clone ID: LIB3356-014-G9_FLI.pep
TYRHELIIGRARHGTRSCDETLSLGVVHSAQGLQEREHLVEVVGHDALGHVGGAEPVLPRGQQRRPGRVDEPAPDDPADGPEPAEVPAENGVHEPDVVAAEERPPPGAVPERALQRVERLAGARHRRRPLLLVRAPEQHPQPRRLHLVVDVRAPEPRHRALVGVGRKHGRPRPRPHLVDVLQDDLGLVYGAAGVEEHRHALVHRVGSQEERALVAEVLLHVLVRQALQVEHDADPDHERARPHAEHLQVVASRHWKLQLSALFDEIHAQRIYAECL

SEQ ID NO: 48162 - protein, 182 aa, Zea mays
  Clone ID: LIB3356-018-E1_FLI.pep
PTPQRDEGKMFLRRILTGGGGLAALRAARAVKETTGIVGLEVVPNAREVLVGLYERTLKEIKAVPEDEGYRKAVESFTGHRLQICQEEEDWKRIEDRIGCGQVEELIEEAEDELKLIAKMIEWDPWGVPDDYECEVIEDDTPIPKHVPQHRPVALPEEFFKALDAVKSDPALQGDAPPQVKA

SEQ ID NO: 48163 - protein, 198 aa, Zea mays
  Clone ID: LIB3356-018-G11_FLI.pep
DKEGIPPDQQRLIFAGKQLEDGRTLADYNIQKESTLHLVLRLRGGMQIFVKTLTGKTITLEVESSDTIDNVKAKIQDKEGIPPDQQRLIFAGKQLEDGRTLADYNIQKESTLHLVLRLRGGMQIFVKTLTGKTITLEVESSDTIDNVKAKIQDKEGIPPDQQRLIFAGKQLEDGRTLADYNIQKESTLHLVLRLRGGQ

SEQ ID NO: 48164 - protein, 138 aa, Zea mays
  Clone ID: LIB3356-018-G7_FLI.pep
SPSNDYDFPLVPRLKSQNKTNYSDVMTAHTAQSKRLKPMSSSLSSFSSTFSSFFASAAGAAPPAAGPAAATAIPPPPPHGTEANFSLPAAMSSVMSLPLSWDSRSSIFSLSTSQPTDSRMAVKSSAEGLEFPARTASR

SEQ ID NO: 48165 - protein, 98 aa, Zea mays
  Clone ID: LIB3356-021-B12_FLI.pep
ANAGDSGAAAGSKDYVHVRIQQRNGRKSLTTVQGLKKEFSYSKILKDLKKEFCCNGTVVQDPELGQVIQLQGDQRKNVSNFLVQAGIVKKEHIKIHGF

SEQ ID NO: 48166 - protein, 155 aa, Zea mays; identical to SEQ ID NO: 37872
  Clone ID: LIB3356-022-D1_FLI.pep

SEQ ID NO: 48167 - protein, 218 aa, Zea mays
  Clone ID: LIB3356-022-H10_FLI.pep
TITLEVESSDTIDNVKAKIQDKEGIPPDQQRLIFAGKQLEDGRTLADYNIQKESTLHLVLRLRGGMQIFVKTLTGKTITLEVESSDTIDNVKAKIQDKEGIPPDQQRLIFAGKQLEDGRTLADYNIQKESTLHLVLRLRGGMQIFVKTLTGKTITLEVESSDTIDNVKAKIQDKEGIPPDQQRLIFAGKQLEDGRTLADYNIQKESTLHLVLRLRGGQ

SEQ ID NO: 48168 - protein, 136 aa, Zea mays
  Clone ID: LIB3356-023-D2_FLI.pep
AKLSKARQPIPVLVPLSLSLLSLAARSPPFLGALAAAAAAGSVRVRRRADLSRGEEGGLPAGAGRHERDQVHQVRHGGRRRGGQDLHAHLLHQQQVPHGLHPHGVRQLQRQRLRGRQHRQPGPLGHRGARGLQQAA

SEQ ID NO: 48169 - protein, 54 aa, Zea mays
  Clone ID: LIB3356-032-C10_FLI.pep
IKKKLQNYLELAGAARTRTPSTTNYDVHSPTWGDGKPTHPPSAMWAIDLGHGPS

SEQ ID NO: 48170 - protein, 228 aa, Zea mays
  Clone ID: LIB3356-032-F11_FLI.pep
IKLRAIHDKLRPPLRSPPSYSDPKERTQGESTMTEGGRPNRPDQRDLGELSAVSDLDHLGGGAVAGAHLLDGLDDVHALDDLAEDDVLAVEPRGRDGADEELGAVGVGPGVGHGEHTGGGVLAHELLVGELLAVDGLAAGAVAAGEVAALAHELGDDAVEGGALVVERLPGLAHALLARAQRAEVLRGLGHLVGVQLHHDPARRGAADGHVEEDARVRHRDRELGFGD

SEQ ID NO: 48171 - protein, 171 aa, Zea mays
  Clone ID: LIB3356-040-D6_FLI.pep
LGLSGPHRSVPPVPVVVAVAAAAVCTTVSPTAAVASTTTAVASTATAVAASITAPATVSATAASTAAAGLGLVNGDVAAVELLAVHALDGAAHRVLRGEGDEAEAAGPLRLPIQDDLRLEDLAVGAEGVVEGVVVGGPGEAANEATVLNVRRRHLFPLAHEPEPEHEPVGE

SEQ ID NO: 48172 - protein, 124 aa, Zea mays; identical to SEQ ID NO: 41198
  Clone ID: LIB3356-043-A10_FLI.pep

SEQ ID NO: 48173 - protein, 209 aa, Zea mays
  Clone ID: LIB3356-047-G10_FLI.pep
ERRCQMERRCQRERRCSGHGCVEGAAQRELNRGSRRGRRRGSCRGSCAEIGGHGCSGQIWPSGRRANQQRDGRPFDGQQTDEREPTEGRWRPGARASRKMTAGRASQQRRKVTAGRARASRKVMDGRAREPAEERAASRGRWRRRPAEVGVPVAASREREVYLSRSQQRAVRRAGWERSRSVPSIFWSGMVPDLERIFSNWSDSVLVSC

SEQ ID NO: 48174 - protein, 113 aa, Zea mays
  Clone ID: LIB3356-050-D10_FLI.pep
LILKEDDIIGILETDDVKDMKPLNDRVLIKVAEAEDKTPGGLILTETTKEKPSIGTVVAVGPGPLDEEGKRQPLSVSAGSTVLYSKYAGSEFKGADGTAYIVLRASDVMAVLS

SEQ ID NO: 48175 - protein, 101 aa, Zea mays
  Clone ID: LIB3356-061-D6_FLI.pep
FKTEAELAVHKKNMCTVSSCSRHFRSHRYLRRHQSAHNDDMPYKCPWDGCNMAFKWSWDRAEHFKVHAGAKPYKCTTPGCSKIFKFVSDFTRHRRRCKPQR

SEQ ID NO: 48176 - protein, 145 aa, Zea mays
  Clone ID: LIB3357-029-G8_FLI.pep
LVIPHSSMAAALGAVLRRLHTAAAQPPRLTKFALHPPKFVEIEFADGSSFHLSAEFLRVYSPAADSKIRSVGGEKVIFGRRHVGIMSAESVGNYGVRILFDDLHKTGIFTWDYLHHLGSNKFSLMRNYIRTLRKHGLSREPQRRK

SEQ ID NO: 48177 - protein, 169 aa, Zea mays
  Clone ID: LIB3357-053-E7_FLI.pep
PPSSASTLLAASLPLQRSQIRPVRRSRPHPWPPVSSPAPTPPSSSATTASPSPCVLSRCSFLLIEFSFFERSSCYVGGVSCLQAEKIATIVKAANIKLESYWPALFAKLLEKRSVEDLILSVGSGGGAAPVAASAPAGGAAAAAAPAAEEKKEEPKEESDDDMGFSLFD

SEQ ID NO: 48178 - protein, 249 aa, Zea mays
  Clone ID: LIB3357-066-G8_FLI.pep
WAAWEDYEQEQDMEVEALQAILMDDIKEIDPSESGIATTARCFQILLSPQDDDFDESAYVPVQLALIFAHTEKYPDEPPLLNVKSVRGIKPHDLASLKEKLEQEAKENLGMAMVYTLVSSAKEWLSEIYGQNGGDEEPEETEAEEEVIIPHGEAVTVESFLAWRDRFEAELALQRAKLMPDSALTSSKEKKLTGRQYFESGRHAVKGASTVADEDEEEEEDIEFDDDFEDDEEDMLEHYLAQQSENSAA

SEQ ID NO: 48179 - protein, 90 aa, Zea mays
  Clone ID: LIB3587-209-H12_FLI.pep
KRNSGFMAAPSRRTSFSSPNLLSGLDDEVLAADGVHDNRWPSSARPGLELGVCGLPPLLLRNSLGGATSKCLLVRDKCVTQVCNGKGSDQ

SEQ ID NO: 48180 - protein, 178 aa, Zea mays; identical to SEQ ID NO: 41250
  Clone ID: LIB3587-216-A11_FLI.pep

SEQ ID NO: 48181 - protein, 232 aa, Zea mays
  Clone ID: LIB3587-233-B7_FLI.pep
CGSNMVTVREEMRKGPWTEQEDIQLVCTVRLFGDHRWDFIAQVSGLNRTGKSCRLRWVNYLHPGLKHGRMSPQEERIIIELHARWGNRWSRIARRLPGRTDNEIKNYWRTHMRKKAQERKMGMPSPSSSSSSLTYQTCLLDTIPVIGMGSGDTHNGSCVTSTLENTQSVMDGYPMDQIWKEIEAPHAPNLLSIAEGKEKTCSSIPCHLPSPVMWDYKCPEIFWKMGDQEIMM

SEQ ID NO: 48182 - protein, 267 aa, Zea mays
  Clone ID: LIB3591-005-B12_FLI.pep
ATASSKTRGKEEEGGGDSTEARFRSLVLRLRPDLPAMASSSDPWMKEYNEASRLADDISSMIADRGSLPQSGPEIMRHTSAIRRKITILGTRLDSLESLFGRIPPKSITDKEMHKRQDMLSSLKSKAKQMATSFNMSNFANREDLLGQSKMPDDMSRVAGLDNQGIVGLQRQIMKEQDEGLEKLEETVLSTKHIALAVNEELTLHTRLIDDLEDHVDVTNSRLQRVQKRLAILNKRTKGGCSCTCLLLSVVAIVILAVIVWLLVKYL

SEQ ID NO: 48183 - protein, 437 aa, Zea mays
  Clone ID: LIB3591-011-E3_FLI.pep
FPSCLCGKGLSRTMGKHEFLTPKAIANRIKAKGLQKLRWYCQMCQKQCRDENGFKCHCMSESHQRQMQVFGMAPDRVVEGFSEEFLESFLSLIRRAHRHSRVAATVVYNEYIADRHHVHMNSTRWATLTEFVKFLGREGYCKVEDTPKGWFMTYIDRDSEQAVKERLKRKRIKSDMADDERQERMIARQIERAHKSLAKPNGGGAAEGEPESGSEGEYSGSDDDEQEPEDDSKEADKATGKIAIALQKAVPGPKVNPFDDKPKMKFGFDEEDGSGTRDQEKNELTKKMGKDVKAAEAKRSALDELMKEEEKAKERSNRKDYWLCPGIVVKVMSKSLAEKGYYKQKGVVKKVIDKYVGEIEMLESKHVLRVDQDELETVIPQIGGLVRIVNGAYRGSNARLLSVDTEKFCAKVQVEKGLYDGKVLRAVEYEDICKISS

SEQ ID NO: 48184 - protein, 101 aa, Zea mays
  Clone ID: LIB3591-013-G3_FLI.pep
SPHRIFYLRFLALHRRLLIHIPWCPAEQPMEASHAQPSLLMAAVPTPSYGTALCLSHGRARPAPHLLHHAAPCLLVGRPYPLLLPTVRSPDVVAVFSHGDS

SEQ ID NO: 48185 - protein, 117 aa, Zea mays
  Clone ID: LIB3591-068-E5_FLI.pep
ELTYQTLKHGEEQYSDSEGRGGRADVERVRWRRRRERRRGEGEAPEHEEAHAAREGRAVEQLLQHARHQRRVLLQQLRHDGHQNHLVRCASPAVGLTRRGRRSSAGAGAGAGAGARG

SEQ ID NO: 48186 - protein, 137 aa, Zea mays; identical to SEQ ID NO: 37029
  Clone ID: LIB3591-072-B11_FLI.pep

SEQ ID NO: 48187 - protein, 117 aa, Zea mays
  Clone ID: LIB3591-079-E11_FLI.pep
RRHACAAAPTMDEEEFRRMLDLFPVVRSRDYCCSDLGTSSRGTRQRSRVQEATKGDNKDSSGGRDMFMQKLKMAAENKIGATKAEFFCKTFEEVHEKLVHRELNLDAAKKFLSAYES

SEQ ID NO: 48188 - protein, 250 aa, Zea mays
  Clone ID: LIB3591-084-E7_FLI.pep
FFGMDAKRFLHLVEEKKRRVLEKKEAPLKWEQKLETAAKAKVDAEAKVKKLNSRKHRRRGDLSSDSDSDYGSDVDRKHLKRKNRRRNKKHEHSDSDDARRRNRRSRRSTDSSDESNSEYETRSEEERPRKKRSHRRRHHRHSSKSDSENYSSDEEQRRPAKDHSQSRRRHHRSSDDDSDKDKVKSRHGKGLRSRDEDARADFNSNKHLRSQSLEESSDDRDADESEKMRNGKRSHKNGGHRHHHHRHHHE

SEQ ID NO: 48189 - protein, 92 aa, Zea mays
  Clone ID: LIB3591-088-A3_FLI.pep
THSMFAPLLSAKTETKPTNDEITPSEENTDKPAHSSNEAPSKEVIHLAIVQKILKFRPFSAGVSAAWSISSQGQGAPDKKKPFSCSIPPVYI

SEQ ID NO: 48190 - protein, 167 aa, Zea mays; identical to SEQ ID NO: 41527
  Clone ID: LIB3591-092-H11_FLI.pep

SEQ ID NO: 48191 - protein, 166 aa, Zea mays
  Clone ID: LIB3591-108-C6_FLI.pep
TPQEAGQSKFRPRLTSSGVGGESGDDGVLGLELDLPVGEDAELLVGEPGEVPGDVGLVLGHLAEGAAGLAAREDGVGAAGAVEAAAGGDVVDLAPDGDVDGLGRVGAVVRAQLRRRQLRRHRSPGEGVRVAGGAALGWCRWIVGATRNCQLKRWADGGAIRIRCVV

SEQ ID NO: 48192 - protein, 157 aa, Zea mays
  Clone ID: LIB3591-109-B6_FLI.pep
VLTMQCCLQLKDMVLKFSGSSKQCRGTPGGQSFRSSGGGRYLRPYPSFIDVTGFTPANKVLGNALAGAGAAGGGARTASSDTLDLTRSNRKTPQSRAAAAGDDVREWTAQVEPGVQITFVTIPSGGNDLKRIRFRCVVVTLPLLLPCSTTTTRCDDH

SEQ ID NO: 48193 - protein, 226 aa, Zea mays
  Clone ID: LIB3591-111-D4_FLI.pep
PSIYSHGHTASTRAARRPQASVPPAREGIRAGSWVASHRLTMPPAPKSGDALFASVDRVNAELFTLTYGAIVRQLLTDLEEVEEVNKQLDQMGYNIGTRLVDEFLAKSNVSRCVDFKETADVIAKLGFKMFLGVTATVTNWDAEGTSCSLVLEDNPLVDFVELPDTCQGLQYCNLLSGVIRGALEMVSMKAEVTWVRDMLRGDDAYEMRVKLIKQVPEEYPYKDDD

SEQ ID NO: 48194 - protein, 89 aa, Zea mays
  Clone ID: LIB3592-069-F11_FLI.pep
LISPYTCASLCNGFVRSTECLYNLSTTISNKMQNEHDQRHKHMYATIQSKFRESKTFSSLRIYMCVNMFVWIRVREGEESEVEKNPDVS

SEQ ID NO: 48195 - protein, 258 aa, Zea mays
  Clone ID: LIB3592-091-E9_FLI.pep
PSNHLIPLRHGPRPTAGSVALTPVDEEHLYSTAQIGRCLVNIRRRHMSTLPLCDGTANSPCWSECSGSRLAAARRVGREAAVSCRWEKPGTLCLLRAKSPSLRRHSRKVQWAIRTMSDDSGDQSGNSTRLFSAIRSFWNQLSAKLKKARRGLPVKILFFLIGFYCATAFATVIGQTGDWDILSAGLAVAIVEVIGALMYRASFAFLGRIGNMITVFNYWKAGLTLGLFLDSFKYEVDEFLESCNPFNFQINIFTGFCW

SEQ ID NO: 48196 - protein, 191 aa, Zea mays
  Clone ID: LIB3593-002-C11_FLI.pep
LRRAAPARLRLRERENMGKKRGIISPLDHLAGLLEVRVVRGVDLAIRDLRSSDPYVVLRIGKAQKVKTRVVKKSINPEWNEKLTLSIEDPAVPIRLEVFDKDTFVDDAMGNAEVDIRPLVEIVKMKLQGVADKTVVKKLVPNRQNCLAEESSIYISEGKVKQDLVVRLRNVECGEIELQLQWVHLPGSKGV

SEQ ID NO: 48197 - protein, 95 aa, Zea mays
  Clone ID: LIB3593-007-B11_FLI.pep
NQLHFWTLSFHLPHPALALVVTVDSLVQASNLEIQPRSSHEGDSPHPGWTVRQPDRFQVLGGRLRRAWYRPHRTLCRHLRPPARARQCLLQRGLV

SEQ ID NO: 48198 - protein, 144 aa, Zea mays
  Clone ID: LIB3593-008-E7_FLI.pep
KMTATIDRRLSTLNPNAPVFDPVDFREVEDFSPKWWDLVTTSKWFRDFWLSANSENEFLGGDDFSVMEEEFEEMIASSDGGSMADTVTEADVASYLKMLLNIAESTKEKIYRSKVSSCSPKYNQKKYMNPNFNCRRNHHIYQPR

SEQ ID NO: 48199 - protein, 192 aa, Zea mays
  Clone ID: LIB3594-005-G8_FLI.pep
SYQGCLARRRRTPRSSRSAKVHALPRRPPLLPSSPFSTTVQSLGARAARVFVLPLELTRKPVGAEFLKAKCLMNCEVAIILEHKYEQIQQHASSESDPSSQVSQVFEKSLQYVKRFSRYKNPDAVRQVRETLSRYGLAEFELCTLGNLCPDTSGEATALVPSLKSGGRFVGDPGDEKIEKMLNDLSLIKKFE

SEQ ID NO: 48200 - protein, 115 aa, Zea mays
  Clone ID: LIB3594-008-A10_FLI.pep
YCETVVLSEHDMLAHLTCLGLLQCVVVEQLLNEVNMGHEHSPAAVAEQFQSIQSIPFRVVGLEEVEVEVPLVPNHLAAGEAAHRYDHLRRRRRRWNPDRLVVEEVVNEGTERAMG

SEQ ID NO: 48201 - protein, 169 aa, Zea mays
  Clone ID: LIB3594-012-A3_FLI.pep
FNNLSSENMQWVDSSKSSTNAPVVVCAKQKLIRYPALRSISMRPSRRARATSGDGDWARGRLVGRLLGVSKVLGVVNDGEEERTRRAARNLLPDAEVVERDLEEVAAGARVRVRLQLRVPLHVLDLHLVVRRHLAAAKSYTLLATGEKTCWCFAPPRRGSCVRVDGGGY

SEQ ID NO: 48202 - protein, 244 aa, Zea mays
  Clone ID: LIB3594-022-D4_FLI.pep
QKESTLHLVLRLRGGMQIFVKTLTGKTITLEVESSDTIDNVKAKIQDKEGIPPDQQRLIFAGKQLEDGRTLADYNIQKESTLHLVLRLRGGMQIFVKTLTGKTITLEVESSDTIDNVKAKIQDKEGIPPDQQRLIFAGKQLEDGRTLADYNIQKESTLHLVLRLRGGMQIFVKTLTGKTITLEVESSDTIDNVKAKIQDKEGIPPDQQRLIFAGKQLEDGRTLADYNIQKESTLHLVLRLRGGQ

SEQ ID NO: 48203 - protein, 159 aa, Zea mays
  Clone ID: LIB3594-025-G9_FLI.pep
TISPESRAIAKYVLRKYSKSAQVDLLREGNPEEAAMVDVWTEVEAHTYLPAIAPIFYEYVVYPAEHGTTPNQEVVDESVERLRKVLDVYEAHLYKTKQLYLAGDYFSLADLNHVPYTFHLMRTPHASLFEAYPHVKAWWERVIARPSLQKLAPDMVIKA

SEQ ID NO: 48204 - protein, 280 aa, Zea mays; identical to SEQ ID NO: 46474
  Clone ID: LIB3594-029-E11_FLI.pep

SEQ ID NO: 48205 - protein, 247 aa, Zea mays
  Clone ID: LIB3594-034-G4_FLI.pep
SRLPPQKKTRGARVLASAGTHFNGQLPGGGGGGGDGADPAPRRRRHGARLLGALCRDRHGGQSGPLRRGRHHHRAAGRGRRSSLFCCRAREAPQAAPPRRHAPARPRLPPRQLRRGAEGVRVEQAAGEAEPRDGKGQGRRRGREAGVEASPRQWRRRRAQGIREVTRQGPAPDGGAGAGGRPVVGPQRQAQASRHRHASRPGGPPAAQGAARPPSRPAMEARAAEHRRRRRVSGRDSSVQSQSLFAR

SEQ ID NO: 48206 - protein, 193 aa, Zea mays
  Clone ID: LIB3594-036-D6_FLI.pep
DFFHPTPPTQPRARTLHVASAGNWHSHCAAVGSTGSSPPMGFFRRIAGFLGISRDDADHPDSPTSVGGAAAAAELPHDRAAAHGVRQGFSVKVPVHVERQVPVPVLVPCPQGDGGVQGFRWYTRRLRIDEDGDVADEFLDEIIPEGSISNDKSARFQVKYNNKPAAVALRKQVIAVDGDIRHSLEHQGQLRWV

SEQ ID NO: 48207 - protein, 180 aa, Zea mays; identical to SEQ ID NO: 37897
  Clone ID: LIB3594-051-B3_FLI.pep

SEQ ID NO: 48208 - protein, 194 aa, Zea mays
  Clone ID: LIB3594-052-B1_FLI.pep
APAFCELSLPLTKEEAAFSPSHPAMQRHVASGRPSGTDGSDFSYRMVVESRYQRVAEGRSRLARLILVQALHLVAGGLLLLLSLSKGAAVNKFAVLSMAAGFLAIVVGELGRMRTMSVLLRLYTSLSSIAVAFSVTCIIRSELFLKVMKQNTEAITSYEMLDAVRVALGILLQMVVIATTTRLLQNMSPPKRAS

SEQ ID NO: 48209 - protein, 121 aa, Zea mays
  Clone ID: LIB3594-056-C4_FLI.pep
LLQVRKGFVLMAPPQPKSGLFVGINKGHVVTKRELPPRPCHRKGKSTKRVSMVRGLIREVAGFAPYEKRITELLKVGKDKRALKLAKRKLGTHKRAKKKREEMAGVLRKMRSAGTHTDKKK

SEQ ID NO: 48210 - protein, 165 aa, Zea mays
  Clone ID: LIB3594-060-A6_FLI.pep
LRFPLRSTCSLPTTEPMADQLTDDQIAEFKEAFSLFDKDGDGCITTKELGTVMRSLGQNPTEAELQDMINEVDADGNGTIDFPEFLNLMARKMKDTDSEEELKEAFRVFDKDQNGFISAAELRHVMTNLGEKLTDEEVDEMIREADVDGDGQINYEEFVKVMMAK

SEQ ID NO: 48211 - protein, 356 aa, Zea mays
  Clone ID: LIB3595-001-H8_FLI.pep
LVGQSPSAQYPPSPPTAGRRGGAEQRATMASKQMEEIQRKLSLLEYPRANAPAQSLLFAGVERYRLLEWLFFRLLGDRSPFTQQNWQGDSLDRDEENNRIQHLAEIANFLGITPSADTEAIQGRGSYEERVELLHLIVDLVEASCYADNPEWSVDKQLEKDVQLVDSIAEKQAQIFSEECKLFPADVQIQSIYPLPDIAELELKLSEYTKKMSNLQQMVQELASKYDYNPNEDYAETELKLREYLQSFLETVKSFNTIYTKEIHPWTHMMEVPQLHGFGPAANRLLEAYNTLLKFLGNLRSLRDSYTAMAAGSLSASNEPSSVTKIISDCESALTFLNHSLSILSTSVAREQGGTL

SEQ ID NO: 48212 - protein, 308 aa, Zea mays
  Clone ID: LIB3595-002-B8_FLI.pep
VASIRVPKTQRARRELLKHAPKLVETSKKTLILHGTKTSAVLNSVLSDIYHLKRDNAVKYTKKNDNIRPFESGGESSLEFFSLKADCSLIVYGSHSKKRPNNLILARTYDHHIYDLVEVGVENYKSMESYVYDKKLAPLLGSKPFFAFIGEHFESSEELKHLKEVLLDLFRGEVVENLNLAGVDRIYVCTAISPTTVYMMHCALRLKRSGTSIPRMELVEVGPSMDLVVRRHRLPAESLKKEAMKTAEHAKKMKNVTKDPVQGKLGKVYMPDQQVGKLTLSNDVKGLKRERREAKKNQDSKKQKVNPE

SEQ ID NO: 48213 - protein, 284 aa, Zea mays
  Clone ID: LIB3595-006-A10_FLI.pep
AFSSLLLPSFFLFPGQPLQLLPNPPTRFSRLRCHRRDSTSVATMVKSKAIRVHELGGPEVLRWEEVEVGEPGEGEIRIRTTAVGVNFIDIYFRKGVYAAPTMPFTPGMEAVGVVTAVGPGLTGRKVGDVVAYAGNPMGSYAQEQILPAAVAVPVPPSVDHKQAASVMLKGMTAHVLLRRVFKASLECLASRGFLVSFGQSSGKPDPIPTSDLASKSLFLTRPSLMHYTATRDELLESAGEVFANVANGVLHVRVNHTYPLSEAAQAHADLEGRKTSGSIVLIPG

SEQ ID NO: 48214 - protein, 349 aa, Zea mays
  Clone ID: LIB3595-027-C10_FLI.pep
AAAVRGSPGFRLVWPSSLGAAMDAYEATKVVFSRIQALDPDHAAKIMGLLLIQDHGEKEMIRLAFGPESLLHAVMAKARKDLGLLLPASPTSVAAAGHAPFLQLPRQNSGRAGAPSPLSVSSPSSWSHAPVFSRSNSTSNGTAEEAAGAGEELPSPVNGGAAPFFPRQAGDALLDDLQLQEQLAFLNEGGGNPAHQLLGFDGGECRSPGPGDADGMFAFGLGWHNGGPAHRRSSSVNELCLGGGGGGGDGFGWKPCLYYARGFCKNGGSCRFVHGGLSDDAAALAGAKMEAAADQQQQCQDFLIRSKGQRLGPAAFPYSPTGSLPGSPSAASKCLSFLLQQQQQQHDRA

SEQ ID NO: 48215 - protein, 192 aa, Zea mays
  Clone ID: LIB3595-031-G8_FLI.pep
LSSLLVFCKKPVTVSVSLIPFHHSAGLPLPPLVLAMASSASRFIKCVTVGDGAVGKTCMLICYTSNKFPTDYIPTVFDNFSANVVVDGTTVNLGLWDTAGQEDYNRLRPLSYRGADVFVLAFSLVSRASYENVMKKWLPELQHYAPGVPIVLAGTKLGTTGYASSFILRLERCWCSTPCTPSLRPIQNSSAS

SEQ ID NO: 48216 - protein, 139 aa, Zea mays
  Clone ID: LIB3595-033-C7_FLI.pep
VLVGMASTACFVIVSKNDIPIYEAEVGSAPKKEDLSYHHQFILHAALDVVQDLAWTTNAMFLKSVDRFNDLVVSVYVTAGHTRFMLLHDSRSEDGIKSFFQEVHELYIKIFLNPLYLPGSRITSSHFDTKVRALARRYL

SEQ ID NO: 48217 - protein, 376 aa, Zea mays
  Clone ID: LIB3595-033-H5_FLI.pep
SLSAGAMEDAAESRKLFVGGIPAGAQEADLRAHFARFGEVRSVVVMRDRETGHGRGFGFVEFEDKAAAAAAAALGDADRPRHFLCGRAVDVKRARARAPRNQREQHSQPHQVEQGLDQGNQDNQYPMGNGTADSGDNVNYGSKKVFVGGLQDDTTEEEFRAYFETFGTVTDVAVIYDSATNRSRGFGFVTFDSEEAVGKVMRQSFHDLNGTKVEAKIAIPKDEQYYRNRGRGARSSGGRVPAGYEGSMYQPPYNAGYGSYNGYMPQPVHVQPYFPAPYFPVAGYPYGSGYPSQVVMANAPDMMSRWVPPAYGNYPQMYPWYILYRAGYGGPATSFQHGINGGGADNKKDQTNVDMQQADNTSSVTTMLEHMKLGSQ

SEQ ID NO: 48218 - protein, 232 aa, Zea mays
  Clone ID: LIB3595-036-F11_FLI.pep
PTPQKPRVLIARGSRRGEARRRGCLPPHRRRRRKRSPYPSAPLPAGPMDSEHWISRLAAAKRFYAAQLGHSDRAGMDELEMDEEVRPEFPCPYCYEDHDVGSLCAHLEEEHPFEPLSLLSRDLREAHLQVLLGGGGQRSSDNSSSSSATNISADPLLSSFGLGFPTSDAEQASKSTVSIPDDATTVKEAPAQARKLSIDSSLTSEERELKRKQARVRATFVQDLLLSTLFGD

SEQ ID NO: 48219 - protein, 191 aa, Zea mays; identical to SEQ ID NO: 40423
  Clone ID: LIB3595-038-B1_FLI.pep

SEQ ID NO: 48220 - protein, 274 aa, Zea mays
  Clone ID: LIB3595-041-B2_FLI.pep
EKEKGFLFNSSRPSFFNVIFESRSISDVYDAGCCALELEVAEPPTGVGAVASLSVVDGEQRGAAHPEVVVAGDEGPGLPADPAVDADGDEQVPRRLVLCERGGEVGRQRDVGGGEEGRPDGGVVGRLEEGRQRGGHRDLHRPVLGVHVGAVVVDADAVVGVARRQRGLHGDGEVGGGADVDAHDAHVVEEEARLGGAEDEPDDEHDEEDEHDDAHQGGAEATVQTLPLAVLVLVAVLDRHFVMLVADCCLLLVVGVVVVFFFFFSSSSLPLFFV

SEQ ID NO: 48221 - protein, 347 aa, Zea mays
  Clone ID: LIB3595-052-A12_FLI.pep
IANEITGWFRGPTMGTLIRPGPAASPLPIASPSSSSAHVAVVGGGARSLRHRVSVSVAVFRSPSTQVLATRWRRRRGMVVRSDVVAGGAAAAAAGDSTRALPGQQLASRVRGVCFYLVTAVAAIFLFVAMVVVHPLVLLFDRYRRRAQHYIAKIWATVTISMFYNLEVEGMENLPPNSCPGVYVANHQSFLDIYTLLTLGRCFKFISKTSIFMFPIIGWAMYLLGVIPLRRMDSRSQLDCLKRCVDLVGKGASVFFFPEGTRSRDGKLGVFKRGAFSVAAKTGAPVIAITLIGTGKLMPSGMEGILNSGSVKVIIHRPIQGNDAETLCSEARNVIADTLLLHGYGAH

SEQ ID NO: 48222 - protein, 267 aa, Zea mays
  Clone ID: LIB3595-066-C4_FLI.pep
LLLALARLVCCKKVTAQAWRGRRRTSAWAPTSSRSASPSARRRRARTTRTTRSPRRRRSSSPGSSSPGPSTAPASPSSSPPSSSSTSPSSPSWASPAVTFGLFLARKLSLTRAVFYIIMQCLGAICGAGVVKGFQQGLYMGNGGGANVVAPGYTKGDGLGAEIVGTFILVYTVFSATDAKRNARDSHVPILAPLPIGFAVFLVHLATIPITGTGINPARSLGAAVIYNQHHAWADHWIFWVGPFIGAALAAIYHQVIIRAIPFKSRS

SEQ ID NO: 48223 - protein, 108 aa, Zea mays
  Clone ID: LIB3596-004-A6_FLI.pep
DEEAGVQYEIQGAQWSRHLCRSRRSQAQQVKEIRLWQLCCSVTSEKCKTMPKKDSASAEKQPPNRARPKGMSGSSNFADGKASTSTTGDHEGRRTRQPPGGDSSILLG

SEQ ID NO: 48224 - protein, 207 aa, Zea mays
  Clone ID: LIB3596-017-D10_FLI.pep
TLWTRVNNTVANRITWPRGPHRSVPPVPVGVAVAAATVATAVAAATTTVAAAATTVAAATAVAAAAITAPATAVAAASTATTVPAAAAASTAAAGLGLVDGDVAAVQLLAVHALDGVPHRLLRGEGDEAEAAGPLRLPIEDDLGLEDLAVGAEGVVEGVVVRGPGEAADEAAVLNIRRRHLDPLTHETEPRRTSRTRTRTGGGGEAN

SEQ ID NO: 48225 - protein, 316 aa, Zea mays
  Clone ID: LIB3596-026-A9_FLI.pep
GMAMQTGVATSKVLILVGAGMTGSILLRNGRLSDVLGELQEIMKGVNQGTSSGPYDIALIQAQIRNLAQEVRDLTLSKPITILNGKSDSGGSLSSYILPAAAVGAMGYCYMWWKGLSLSDVMFVTKHNMANAVQSMSKQLEQVSSALAATKRHLTQRLENLDGKMDEQVEVSKAIRNEVNDVKDDLSQIGFDVESIQKMVAGLEGKIELLENKQDVANTGIWYLCQVAGGLKDGINTRFFQETSEKLKLSHSAQPENKPVKGLEFFSESTMEQKVADSKPIAVTVDAEKPEKTAAVMGTTVHRSIRFSYRNAGLAL

SEQ ID NO: 48226 - protein, 96 aa, Zea mays; identical to SEQ ID NO: 41063
  Clone ID: LIB3596-037-G9_FLI.pep

SEQ ID NO: 48227 - protein, 153 aa, Zea mays; identical to SEQ ID NO: 44881
  Clone ID: LIB3596-038-A11_FLI.pep

SEQ ID NO: 48228 - protein, 171 aa, Zea mays
  Clone ID: LIB3596-040-B11_FLI.pep
AGAEMLVYQDLLSGDELLSDSFTYKELENGVLWEVEGKWVTQGPVDVDIGANPSAEGGEDESVDDTAVKVVDIVDTFRLQEQPPFDKKSFVSYIKKYIKNLTAVLEPEKADEFKKGVEGATKFLLSKLKDLQFFVGESMKDEASVVFAYYKDGATNPTFLYFSHGLKEIKC

SEQ ID NO: 48229 - protein, 74 aa, Zea mays
  Clone ID: LIB3596-042-A6_FLI.pep
GDGWLDLAAVGEVLGAEARRHGHRRHEQVHHVADHPPHNQRVHMGSHGGSGHTHEQLLLINPELLRCVIYLLST

SEQ ID NO: 48230 - protein, 153 aa, Zea mays; identical to SEQ ID NO: 44881
  Clone ID: LIB3596-043-E7_FLI.pep

SEQ ID NO: 48231 - protein, 121 aa, Zea mays; identical to SEQ ID NO: 46051
  Clone ID: LIB3596-043-G3_FLI.pep

SEQ ID NO: 48232 - protein, 210 aa, Zea mays; identical to SEQ ID NO: 42761
  Clone ID: LIB3596-043-F5_FLI.pep

SEQ ID NO: 48233 - protein, 137 aa, Zea mays
  Clone ID: LIB3596-045-D5_FLI.pep
EQKLSISPTPRKKRSMASEQGVVIACHSKAEFDAHMTKAQEAGKLVVIDFTAAWCGPCRAIAPLFVEHAKKFTQVVFLKVDVDEVKEVTAAYEVEAMPTFHFVKNGKTVATIVGAKKDELLALIEKHAAPAPASASA

SEQ ID NO: 48234 - protein, 111 aa, Zea mays
  Clone ID: LIB3596-050-F6_FLI.pep
DCHGAQECLLYICRGAFPEETHGILYGCSITRERDPPMAHEAKLLVGHPQEFRKTPACQGTPAAPRTSSRLNCTSCSGPCSPQRRRIDPRLPFPPSRRAAFSPTLPFSATS

SEQ ID NO: 48235 - protein, 180 aa, Zea mays
  Clone ID: LIB3596-055-C9_FLI.pep
ASERGTAADLAAQAEGSAGAGKSAPNMGRGRVELKRIENKINRQVTFAKRRNGLLKKAYELSVLCDAEVALIIFSNRGKLYEFSSTQSMPKTLEKYQKKEQMFCEANKCLRRRLEESNQVIWQHAWEQSERHSEVQPQQLNGNNFFHPLDGAGEPTLQIGYPSEALTSSCMTTFLPPWLP

SEQ ID NO: 48236 - protein, 191 aa, Zea mays
  Clone ID: LIB3596-064-B5_FLI.pep
KPADPNTGKSIIMPLNCDERLLMPRGYCAVVAAPTAAAAAGFGAGGCGWWETTSGGLGARISASACFRALYISSVSTVTRRFTWVSIPRSDGVVRCSTVRWQRRRRMASSVRRWRRRVPGRPRTSVMYSRGLHATGTRDLNALNALPLISAPPLPATFFSSWSWRGRCGGRKPKPRRGVPVPCNPRRGWAG

SEQ ID NO: 48237 - protein, 92 aa, Zea mays
  Clone ID: LIB3597-005-D12_FLI.pep
LPLHQHLVRLGVGDHILHSVEAPEDLLDLAGAPLAVHVDPHLDLLRWRRRGRVLLLLLLLLPVLGLLAAAAAAYFLGLVVLLLLLCRRGLLG

SEQ ID NO: 48238 - protein, 162 aa, Zea mays
  Clone ID: LIB3597-006-A8_FLI.pep
TQHSTAYTGIIFPFIDRSLLQKSIRQTSVVGAGSIAGIGLHHERRVVEVAVPGVPAIGGIVEVHGDGGARHQVVRVVARPALLDHAAAHLGARVVEVQRQDIVGRRRLGNAPRFLCSSSSNTSYKTAFIPSSSCSNQQQLTHSTAILRMKWNKEKSIGKRYT

SEQ ID NO: 48239 - protein, 163 aa, Zea mays
  Clone ID: LIB3597-010-G11_FLI.pep
LHKTYKSRASSEQFADRQAGSYHRHLHHVPHRVASLSLAIMGSCLSSEAPATGDGPAAWRKRHHGSQEGAAGGGGKKLPGGAGEMTEDELAWVLERLCGKGASAVASLHTQQDRKGTNQDAMVVWEGGGTAEGADAGRGGDGLGQRSCGGDRRREDGADAACR

SEQ ID NO: 48240 - protein, 159 aa, Zea mays
  Clone ID: LIB3597-043-D7_FLI.pep
FPSLYKPENLQCSAGRVLRLISVICLHDKECTVSSSLLQNKGKMARGGRLLILSLGLVLLYFVSGSVAAAAAQKTWCVAKPSASNDILSLNLNYACSQVSCGVIQKGGPCYYPDNLVSRAAVAMNLYYAANGRHPWNCYFNNSALVVQSDPSYGSCTYY

SEQ ID NO: 48241 - protein, 179 aa, Zea mays
  Clone ID: LIB3597-052-E1_FLI.pep
TEQGNPPLRGTQRSRKPETKMSSVFSGDETAPFFGFLVFSCMGAAYGTAKSGVGVASMGVMRPELVMKSIVPVVMAGVLGIYGLIIAVIISTGINPKAKPYYLFDGYAHLSSGLACGLAGLAAGMAIGIVGDAGVRANAQQPKLFVGMILILIFAEALALYGLIVGIILSSRAGQSRAD

SEQ ID NO: 48242 - protein, 232 aa, Zea mays
  Clone ID: LIB3597-053-F12_FLI.pep
RLGSNPKQGVDLSAAAMSKLQSESVKDAISQIVGDAKEKNRKFTETVELQIGLKNYDPQKDKRFSGSVKLPHIPRPKMKVCMLGDAQHVEEAEKMGLDYMDVEALKKMNKNKKLVKRLAKKYHAFLASEAIIKQIPRLLGPGLNKAGKFPTLVTHQESLESKVNETKATVKFQLKKVLCMGVAVGNLAMEEKQIQQNIQMSVNFLVSLLKKNWQNVRCLYVKSTMGKPYRVF

SEQ ID NO: 48243 - protein, 248 aa, Zea mays
  Clone ID: LIB3597-053-G7_FLI.pep
RRYDSRTTIFSPEGRLYQVEYAMEAIGNAGSALGILAADGVVLVGEKKVTSKLLQTSRSAEKMYKIDSHLACAVAGIMSDANILINTARLHAQRYALSYQEPIPVEQLVQSLCDTKQGYTQFGGLRPFGVSFLFAGWDKHHGFQLYMSDPSGNYGGWKAAAVGANSQAAQSMLKQDYKDALTREEAVGLALKVLSKTMDSTSLTAEKLELAEVFLQPDTGEVQYQVCSPEALGKLLANSGLTQPTPEA

SEQ ID NO: 48244 - protein, 242 aa, Zea mays
  Clone ID: LIB3597-073-B4_FLI.pep
TRRAAARADKEQAEEELCQATMGISRDSMHKRRATGGKQKAWRKKRKYELGRQPANTKLSSNKTVRRVRVRGGNVKWRALRLDTGNYSWGSEAVTRKTRILDVVYNASNNELVRTQTLVKSAIVQVDAAPFKQWYLTHYGVDIGRKKKTPAAKKDNAEGQEVEAAAEETKKSNHVTRKLEKRKEGRTLDPHIEEQFGSGRLLACISSRPGQCGRADGYILEGKELEFYMKKLQRKKGKSAVA

SEQ ID NO: 48245 - protein, 125 aa, Zea mays
  Clone ID: LIB3600-031-F7_FLI.pep
PDRAADGRRRRAGRPAVDRGRGVDDRRHRHGVAAALLHPHALAPLLHRRARAALAALPHPSRHTITVMTSLVALSFYGASQIKFHWVERYDKILVGTVLCLVGVLTYVFHHHDGDEHVHQKLVSP

SEQ ID NO: 48246 - protein, 298 aa, Zea mays
  Clone ID: LIB3600-039-E3_FLI.pep
NLAASSVALAPQSSSPSLPFPSLLAKKPTQPLLLLLRLLRSLPYFPPARLSLHSATHATDRPTTSPFPPRNPQGSGLGGTEGEGPPTGTGPGDMLGDLLSRILLLLFGYAMPAFECFKTVEARPNDARMLRFWCQYWIIVAMVIAVESVISWMPMYSEMKLAFFVYLWYPKTKGSDVVYDTFLRPIVMQYEPNIEQRLFHLRAKSGQLISFYMKNFADKGTAFFMDVLRYVVSEKPEGSNAEQRSKKSGWSPFATKRRPPSPPPEPLFDSNPDAAVLAEALRGAIGAKPRRSPNDKHY

SEQ ID NO: 48247 - protein, 169 aa, Zea mays
  Clone ID: LIB3600-046-A9_FLI.pep
STMAGSTRAAHKAFLLCNYTLLGAASACIFLTLSLRLAPSACGLLLVFLHALTAVFAAAGCSGSFTDGGAGAGRAHAAHTAGAVLTAIFQGAAALLAFTRTADFLAELRSYVREEDGEVILKLIGGLGTAIFVLEWAALALAFALRLDDDGNEEIDGEHCKSWASAYHV

SEQ ID NO: 48248 - protein, 330 aa, Zea mays
  Clone ID: LIB3600-046-D3_FLI.pep
KHSDTPSPSAPPPSSSSSRRGFPRLASGAGPSPTRPPRASMDGLHGTDACFSPARAVSPQVRLPGPPDVGSQYLAELLQEHQKLGPFMQVLPICSRLLNQEIMRVLNIRRQHGAAVDFEKFAAASPNQIHPSPPMPNFCGNGFSPWNGMHSERVGVPQGAMGWQGPPQSPASYIVKKILRLEVPTETYPNFNFIGRLLGPRGNSLKRIEACTGCRVFIRGKGSIKDSGKEEQLKGRPGYEHLSEPLHILIEAELPANVIDARLAKAQEILEELLKPVDESQDYYKRQQLRELAMLNSPLREESPRSGGAPPSPFSKTVSGRPNKTGDTEL

SEQ ID NO: 48249 - protein, 129 aa, Zea mays
  Clone ID: LIB3600-049-B4_FLI.pep
TEASKLARAKDRDRPTDRRSASMARFVDPLVVGRVIGEVVDLFVPSISMTVAYDGPKDISNGCLLKPSATAAPPLVRISGRRNDLYTLIMTDPDAPSPSNPTMREYLHWIVINIPGGTDATKGEEVVEY

SEQ ID NO: 48250 - protein, 193 aa, Zea mays; identical to SEQ ID NO: 45273
  Clone ID: LIB3601-009-C3_FLI.pep

SEQ ID NO: 48251 - protein, 231 aa, Zea mays; identical to SEQ ID NO: 43391
  Clone ID: LIB3606-034-F9_FLI.pep

SEQ ID NO: 48252 - protein, 324 aa, Zea mays
  Clone ID: LIB3606-035-A2_FLI.pep
NHTRIALHSFSSVVCSDSEMASVKVFGSPTSAEVARVLMCLFEKEVEFQLIRVDAYRGTKRMPQYLKLQPQGEALTFEDESLTLSDSRGILRHISHKYAKQGNPYLIGTGALERASIEQWLQTEAQSFDAPSAEMVYSLAFLPPTLPRQNDNGNGGAFNAREATVGSNADASSSKRGVAGSQPAASQTKVSAQKEEEMLKLFEQRKKDLEKLLDIYEQRLEEATFLAGDNFTIADLSHLPYADHLVSDPRSRRMFESRKNVSRWWHDVSGRDTWKYVKTLQRPPSTSTDAIAKNGQLGQQQHLPSSTDGHGVKSQRLVQNERHF

SEQ ID NO: 48253 - protein, 129 aa, Zea mays
  Clone ID: LIB3606-040-G3_FLI.pep
HISDDNKRCYDTTQIYPDLKSEREGKGSRARRRRWRAEGRDSTRLGSSSGGGTSGGGTLWRGTSCATPHPGSASPSSPSGSTSSARPPTTASTAPPATTTTRSPAGSVTRSRSWSQLYQALVLLMFLQF

SEQ ID NO: 48254 - protein, 288 aa, Zea mays; identical to SEQ ID NO: 47549
  Clone ID: LIB3606-050-A7_FLI.pep

SEQ ID NO: 48255 - protein, 241 aa, Zea mays; identical to SEQ ID NO: 47787
  Clone ID: LIB3606-052-H5_FLI.pep

SEQ ID NO: 48256 - protein, 200 aa, Zea mays
  Clone ID: LIB3606-057-A4_FLI.pep
FSLVTPLEIIYHIIGNRSNGLKCSTLNHEARFGSHRLPLGADHLATVLGINLELIVLGFPQAELLCATGGLHMLHTDMDTLPDDAAINLLVDLNADGALGDVPDATGAAVVELVRHALVHGAVHLDVDVVADLVGAQVRGERDVTLLAERPREQVAGPRPKPVPRRHLPPVSCGWAAAAAAAATAGVCCCGSRVREGPGT

SEQ ID NO: 48257 - protein, 190 aa, Zea mays
  Clone ID: LIB3607-007-A4_FLI.pep
IHHVVQIYSESERFYEPQIVRTREPLGHDPPYGYTSSQAYREPEKINILIFLSYRFLARRARDDEPPAPASRKMEQGAQQMASTLGDGGSAAGATSLVRNAFLPGTSSSCFLWWPFRFGLASVSFLLSSRSASPPSSSMATLPPTLLECRSSGCWRGAAAPAPSVMKRSSQTSPDEPDLLNVCADLCSPS

SEQ ID NO: 48258 - protein, 178 aa, Zea mays; identical to SEQ ID NO: 41250
  Clone ID: LIB3607-012-D8_FLI.pep

SEQ ID NO: 48259 - protein, 202 aa, Zea mays
  Clone ID: LIB3607-033-F1_FLI.pep
HSIAIAITKKRARFSDCCLRITFYSTPANFTCVSLACHSVSSTLSAIAADCLCAGLRYRAITSAYYRGAVGALVVYDVSRRTTFDNAERWLRELRDHTDANIVVMLVGNKADLRHLRAVSPEDAAAFAERHGTFSMETSALDATNVERAFAEVLRQIYHVVSRNALDIGDDPAAPPRGKTIDVSAAKDEVSPVNAGGCCSSA

SEQ ID NO: 48260 - protein, 304 aa, Zea mays
  Clone ID: LIB3608-002-F7_FLI.pep
QTPASVTLLPLGSPRLPSSPSLRSLGYERIRIASPPPRPGEMAGLGKAMYAVGFWIRETGQALDRLGCRLQGKYFFHEQISRHRTIMNIFDKTPHVHRDAFVAPSASLIGDVQVGQGASIWYGCVLRGDANNIQIGSGTNIQDNSLVHVAKSNLSGKVFPTIIGNNVTIGHSAVLQGCTVEDEAFVGMGATLLDGVVVGKHGMVAAGSLVRQNTRIPCGEVWGGNPAKFLRKLTDDEIAFITESASNYSNLSKVHAAENAKPLEKIEFEKVLRKKFAHQDEEYDSSIGITRGSPPELTSPNPAQ

SEQ ID NO: 48261 - protein, 117 aa, Zea mays
  Clone ID: LIB3607-040-C12_FLI.pep
MSTPGAPSLATTAAAVLCVLAAALAVTVASGQQCGQQAGGATCRDCLCCSRFGFCGDTSEYCGAGCQSQCTGCGPRPAGPGVASVVPRDLFERLLLHRNDAACPARGFYTYDAFLAA

SEQ ID NO: 48262 - protein, 125 aa, Zea mays
  Clone ID: LIB3607-042-A1_FLI.pep
NTRFYHLSKMLILTSSGGTAWLARASVCFVVQLVIAVRCPSYQTLAALAAHPRFRPARHKDAGTRQRSHLWLTPRLAAAVPDKQLPQPAAPPSRGLARASCPAPYTASRPAPRTRLPLRLHRGDA

SEQ ID NO: 48263 - protein, 137 aa, Zea mays
  Clone ID: LIB3607-058-F7_FLI.pep
MADIRAAVGGRVFFTKMKIAFSALSLIRFRTTYTNCPTVRSAGTRYFFLSMSGMSLLSAFSTMTGILSGYFSLMRLASACLLSKGCSNLNELLAILLLLLIYSIARGTERSDEMDGWMDGWMEARLDRRLIGRGITA

SEQ ID NO: 48264 - protein, 329 aa, Zea mays
  Clone ID: LIB3608-005-F6_FLI.pep
PVRSFRYPAALNPSSHSIFVSAPPPSMEFWGLEVKPGSTVKCEPGHGFILHVSQAALGESKKSDSALMYVKVDDKKLAIGTLSIDKYPQIQFDLVFNKEFELSHTSKTTSVFFSGYKVEQPIEGDEMDLDSEDEEEELNIPVIKENGKADGKEEQKNQEKAVAATASKSSLGLEKKSKDDSDDSDEDESDDSDEDDSDDSDEGEGLSPDEGDDDSSDEDDTSDDDEEETPTPKKPEAGKKRGAENALKTPLSDKKAKVATPPAQKTGGKKGATHVATPHPAKGKTPANNDKSTEKSPKSGGSVPCKSCSKTFNSEMALQAHSKAKHGAK

SEQ ID NO: 48265 - protein, 153 aa, Zea mays
  Clone ID: LIB3608-006-A5_FLI.pep
QHFPDRRGWNHNQFEGKEFLIDAQVDLLGKDRNGCSGRRRRARVAGDEVVVGVPTAGGLADLGIPGELRVEAVEGPEAVGAQREAPRRLSALAPLLHLVDMLPPNLVALVRVLHQTEDQILREVHDETHRRLRSPSSPSPVSLGSAGASVSLS

SEQ ID NO: 48266 - protein, 162 aa, Zea mays
  Clone ID: LIB3608-017-B12_FLI.pep
APLPPPLGFLLPPRPPPNHFRSFQCAAAMSDGKDSLDLSALGAAIPNSAELSAEDKANLVASIKNTLEGLASRHTDVLESLEPKVRKRVEKLREIQGEHDELEAKFFEERAALEAKYQKLYEPLYSKRYEIVNGVVEVEGITVESAAETPAEQKTGDETSAD

SEQ ID NO: 48267 - protein, 288 aa, Zea mays
  Clone ID: LIB3608-018-B5_FLI.pep
TKRKGDRGGWRKPTRSGEQQVSSGRDRKRRVEGPEPVGVRQVERRQRVASSGGAPRADVLHGEERGHGVAEDALLRLRDGERRGGGLAPIARLREHGLHQGLALPHQMRHRLRLEEGLLQHRLHHGKPQHRAGALVVLLEDLGQAYVVDAAVVEEQHHDAVEVDDLPADGGDLGLVQRRRRRRPAAAQRALDVVLQLPVADDELLLLVEEEGVDLLGLRVDLGHELGLLRGQRRAAAGAGLDAPLQLLVAQELVLPLREAPLDLPPQPLAELHHLLDSIDSCFASLCF

SEQ ID NO: 48268 - protein, 278 aa, Zea mays
  Clone ID: LIB3608-019-D5_FLI.pep
CWTSSPSSLLENRNPRPRAPSPSGLPRPIRSKMHKLGRGSRDKVQQFMAITGASEKAALQALKASDWHLEGAFDVFYSQPQIAVANTRHLEELYNRYKEPDADMIMVEGISQICNDLQVDPQDIVMLVISWHMKASTMCEFTRQEFIGGLQSIGVDSIEKLQAKLPSLRAELKDDQKFHEIYNFAFAWAREKGQKSLALETAIGMWQLLFAERSWPLIDYWCQFLQVRHNKAISRDTWAQLLEFVKTIDPQLTNYDEEGAWPYLIDEFVDYLKENGLA

SEQ ID NO: 48269 - protein, 148 aa, Zea mays
  Clone ID: LIB3608-019-H7_FLI.pep
GAGVAANGWSGSGPGLRLARRLCTYDERDDRALEEEVEKKFGWILKIIFLGTAGLVGYQFFPYMGDNLLQQSISLLRVKDPLFKRMGASRLARFAVDDQRRMKVVEIGGAQELLNVLEGAKDDKTRKETLKALAALSKSGATWSFVQQ

SEQ ID NO: 48270 - protein, 306 aa, Zea mays
  Clone ID: LIB3608-027-E10_FLI.pep
VRPSGTHKRTATVSREETHPQKGQTSGADSTFQSRSRSMGAGKGGDGGEAAPEAAQPVVLKMKLHCAGCAHKVKKAIKRVPGVDSIVTDVAANTVVVVGTADAGALKARLEAKTNKPVEIVSAGGAPKKPPAAEPKQDAGAGVGEKKGVKSASPNEEEKEKGKKQQAEEKEREKEKGKKQQVESVLLKIRLHCDGCAYRIRQRIGKIKGVKDVVLEANAKDEVEVTGTMDIPNMVSYLKEKLNRDVEAVALPVRKDGGGGGSEGEGEGKDDKKHSGGGKDKVVAGAAGDDRMDKGKGIEASAAGPS

SEQ ID NO: 48271 - protein, 351 aa, Zea mays
  Clone ID: LIB3608-027-A7_FLI.pep
PLVLLVPCGRAMSNAADVEAGAQARAAPATTGIKPPPGRYNNMTSNGPYTPPSPFYYDPAAAHGRHHWSWLVPLVVIANVLMFVLVMFYNNCPRSGGDCVGRGFLRRFSFQPLKENPLLGPTAATLQRYGALDWYKVVHGNQAWRLESCTWLHAGLIHLLANMISLIFIGVRLEQQFGFWKVGLVYLVSGFGGSVLSVFFIRKGVSVGASGALFGLLGAMLSELITNWSIYTNRFAAMLNLIIIAAINLALGILPHVDNFAHIGGFATGFLLGFVLLIQPQFGWLEQPFGAKTKSKYKAYQIILLLAALVLLAAGFAVGLVMVFRGENGNDHCSWCHYLTCVPTSSWKCDN

SEQ ID NO: 48272 - protein, 157 aa, Zea mays
  Clone ID: LIB3608-028-D9_FLI.pep
SKAAAAAMGSDLETEKKKTPVALMPIAKPLAGKKLCKRTLKLVRRASEAKCLKRGVKEVVKSIRRGNKGLCVIAGNISPIDVITHVPILCEESNVPYIYVPSKEDLATAGTTKRPTCCVLVLTKPNKGELSDEVKDKLKSDYDQVVTEVAEATSAMF

SEQ ID NO: 48273 - protein, 299 aa, Zea mays
  Clone ID: LIB3608-029-B9_FLI.pep
LVFFSPSCVDTLAMSSGTTTTEEESGKGPPPQHQHHFVLVHGACHGAWCWYKVATLLASAGHRVTALDMAGCGASPVRGEDVASFEDYSRPLLDAVGALPPGERAVLVGHSFGGQSLALAMERYPERVAVAVFVSAAMPAAGKPMALVLQEFSREIGPDFYMDCIYSTGSEPEHPVETLLLGPEYLAKRLYQLSPPEDLTLAMAMVRPSRWFEDDATLRRDDGLTAGRYGAVRRVCVVAEDDASWSAEFQRRMASWSPGAEVRGLRGADHMPMLSKPADLSDMLVEVANKYSSDLEDPA

SEQ ID NO: 48274 - protein, 275 aa, Zea mays
  Clone ID: LIB3608-030-H12_FLI.pep
LSSPSSPVRNATLPTAEMAPKRGGRAPVPAKKKTDKVTNPLFEKRPKQFGIGGALPPKKDLHRFVKWPKVVRIQRQRRILKQRLKVPPALNQFTRTLDKNLATNLFKMLLKYRPEDKAAKKERLLKRAQAENEGKTVESKKPIVVKYGLNHVTYLIEQNKAQLVVIAHDVDPIELVVWLPALCRKMEVPYCIVKGKARLGSIVHKKTASVLCLTTVKNEDKLEFSKILEAIKANFNDKFDEVRKKWGGGIMGSKSQAKTKAREKLLAKEAAQRMT

SEQ ID NO: 48275 - protein, 98 aa, Zea mays
  Clone ID: LIB3608-045-D7_FLI.pep
DHNIICMKFNTEGKCLEQTSILKATEPTQHIYGSNEATQGERLCLQVKPRYNNSGLKGRKGTKNSLVQHSTVEITIWLSCVLDTNLRNMLHLLVHPVR

SEQ ID NO: 48276 - protein, 152 aa, Zea mays
  Clone ID: LIB3608-052-H6_FLI.pep
DDDEALVRASGDAALLARDRVRVVAVPRLADLEVLELQEESGDAAMVSSRPGRASKLRRRAGAPPPPPPRARDLSSIHRVALEESRNRTLVIASRRLPSSDCDRFFALGVVSSSVSMDDPPACFSFSSPAVVVLVVVVEDSKCWSCGRQGTH

SEQ ID NO: 48277 - protein, 234 aa, Zea mays
  Clone ID: LIB3632-007-C9_FLI.pep
RPKKPKGSMAAGLQVFGQPASTDVARVLTCLFEKKLEFELVRIDTFKTHHRLPEFIRLRDPNGQVTFKHGDKTLVDSRDICRYVCNQFPNYGNKSLYGSGALERASIEQWLQAEAQNFGPPSSALVFQLAFVPHLSHLGVRQDPAVIAENEDRLKQVLDVYDEILSKNEYLAGDEFTLADLSHLPNSHYIVNTERGRKLFTNKKNVAKWYDRLSKRETWVQVVKMQKEHPGAFK

SEQ ID NO: 48278 - protein, 77 aa, Zea mays
  Clone ID: LIB3632-011-F8_FLI.pep
KNQHDFMRKKSIHYFGISCQVLQSLHGTHNTAHACGVKARLPQAVFFERISSNCRCKLILLLFKSCWSSICQYRKNL

SEQ ID NO: 48279 - protein, 310 aa, Zea mays
  Clone ID: LIB3632-018-E12_FLI.pep
VARHCSTAKPRSSRVAPEGAEGLDGASPEDVLVVEGRDGSAHERAHPEDPVVVPGLVLVVDDGGAQAPGRVDAGAGDGDGGQVHHEHGEADGEGSQNRDVGVAGVALGVGGGEDGVDEHEGADDLGAEAGAAGVAGGERVGAAAVPVEVGALERLDEADAADGAEALRHDVEQRAHQGDLARQEEAEGDGGVDVAPRDAGGAVDEDEDHAAEGPGDAQHPHAAARRVGTRRRRVRLVLVPDHGGHRDVQEQQRGDELGDHGAVQRPGPQLSRVDQRRRGRVRVVLGSELAAASAALDHVVLAHRLLEPPR

SEQ ID NO: 48280 - protein, 165 aa, Zea mays; identical to SEQ ID NO: 47592
  Clone ID: LIB3632-020-A4_FLI.pep

SEQ ID NO: 48281 - protein, 217 aa, Zea mays
  Clone ID: LIB3632-023-D1_FLI.pep
LAPAPPFRFPHSLLQLRVRRRREGKMYTARKKIQKEKGLEPSEFEDSVAQAFFDLENGNQELKSDLKDLYINNAIQMDVTGSRKAVVIHVPYRLRKAFRKIHVRLVRELEKKFSGKDVVIVATRRIVRPPKKGSAVLRPRTRTLTAVHDGILEDVVYPAEIVGKRVRYRLDGSKIIKIFLDPKERNNTEYKLETCTAVYRRLCGKDVVFEYPMTENA

SEQ ID NO: 48282 - protein, 323 aa, Zea mays
  Clone ID: LIB3632-038-B11_FLI.pep
GWYLHDGQTREHALLAFTLGVKQMICCCNKMDATTPKYSKARYEEIVKEVSSYLKKVGYNPDKIAFVPISGFEGDNMIERSTNLDWYKGPTLLEALDQITEPKRPSDKPLRLPLQDVYKIGGIGTVPVGRVETGVIKPGMVVTFGPTGLTTEVKSVEMHHEALQEALPGDNVGFNVKNVAVKDLKRGFVASNSKDDPAKEAASFTSQVIIMNHPGQIGNGYAPVLDCHTSHIAVKFAELITKIDRRSGKELEKEPKFLKNGDAGMVKMIPTKPMVVETFSAYPPLGRFAVRDMRQTVAVGVIKSVEKKDPTGAKVTKAAAKKK

SEQ ID NO: 48283 - protein, 219 aa, Zea mays
  Clone ID: LIB3632-039-F7_FLI.pep
TASFISRMGSDEEAALLVPAVEEGCPGCVMERRKASSNGRIPYSELFFVAATSLASALPITCLFPFLYFMVRDFRVAETEEDIGFYAGFLAASYMVGRGFSSIFWGVIADRVGRKPVITFSILSVYGRIQRAVWSEHDVLDGDRHEARAGRSQRPARPDKGQGPVFQQELISSATLTRVFIWKKKKFACMLNLIEFSCVCMYVCMYVCICLRTISGVLR

SEQ ID NO: 48284 - protein, 341 aa, Zea mays
  Clone ID: LIB3632-042-F4_FLI.pep
REERWRFSRETRRGQTRHSPQEDARPSELACMSQHTRGSLRPALERDGPDDHLVVDGSQGGADEGADPEDPMVAPRMIPVVDDGGAKASSWVDAGAGDGDGGKVDQEHREPNWQWGKDGDMGVPGVPLGIGGREDGVHQDEGANNLSAKAIPLGVPGGDNIGATAVAHVKPLLEALHHSSSTDGTQALHDNVEDGPSQGQLPGQEQPEGHSWVDVSSGDAGGAVDEREDHPSEGPGDALDADGGALGGGLGDAHDGEDGDVEEEEGGDELGDARAVEGPGLELPGLEQRRRRADGLTLRELVGAQAHVLLLPLHRCSPAPRYCPWLPALSPACAVGLSVVS

SEQ ID NO: 48285 - protein, 206 aa, Zea mays
  Clone ID: LIB3632-044-E5_FLI.pep
EATLPLCPLPVAALIFSCRERPYTMADFSKESCPSVKNILLLDSEGKRVAVKYFSDDWPTNASKLAYEKSVFTKTLKTNARTEAEITLFDGYIVVYKFVHDLHFFVTAGDDENELILASVLHGFSDSVGLLLRGDVEKRTALENLDLILLCIDEIVDGGIILETDANTIAGKVATNAVDGSVPFSEQTISQALATAREHLARSLLK

SEQ ID NO: 48286 - protein, 402 aa, Zea mays
  Clone ID: LIB3632-057-C5_FLI.pep
PPPIWSHCILLPSPSKSAGPMGRPPSTTGAPAFRFLPSEVAEMEARLLQLNNGIPTRAMLQTLADKFSASPERAGKVAIQPKQVWNWFQNRRYSHRAKTTRVVPSPPAKMTPSGADHHQHAANASAFRAAQPSSVAVAHHGSSSTGKNPMEGVSVEFEAKSARDGAWYDVAAFLSHRLFESGDPEVRVRFSGFGAEEDEWINVRKCVRQRSLPCEATECVAVLPGDLILCFQEDKEQALYFDARVLDAQRRRHDVRGCRCRFLVRYDHDSSEEIVPLRKVCRRPETDYRLQILHAARAAAASADIHTPPREAKVELASNAKSPYEQKPQKQYKMMDVNTDEEVTMVSTLEQDETQGKTVAPVPSATAETRNSSSDAVMKDAEASSVAQDDDEVQVVDKMKEG

SEQ ID NO: 48287 - protein, 260 aa, Zea mays
  Clone ID: LIB3634-002-D9_FLI.pep
RVSNRPVPSHSQSHLDDMAAAAGPSSSVKETLPPALGSTSQPPPVFDGTTRLYICYFCPFAQRAWVTRNLKGLQDKMELVAIDLQDKPAWYKDKVYAQGTVPSLEHDSEVRGESLDLIRYIDSNFDGPALLPEDAAKRQFADELFASANAFTKALYSPLLSHAAVSDEVVAALDKLEADLSKFDDGPFFLGQFSLADVAYVTILERVQIYYSHLRNYDIAQGRPSLEEFIDEMNKIEAYAQTKNDPLFLLDLAKNHLKIA

SEQ ID NO: 48288 - protein, 172 aa, Zea mays; identical to SEQ ID NO: 36903
  Clone ID: LIB3635-001-F10_FLI.pep

SEQ ID NO: 48289 - protein, 170 aa, Zea mays
  Clone ID: LIB3637-196-F11_FLI.pep
GVEMLVYQDLLSGDELLSDSFTYKELENGVLWEVEGKWVTQGPVDVDIGANPSAEGGEDESVDDTAVKVVDIVDTFRLQEQPPFDKKSFVSYIKKYIKNLTAVLEPEKADEFKKGVEGATKFLLSKLKDLQFFVGESMKDDASVVFAYYKDGATNPTFLYFSHGLKEIKC

SEQ ID NO: 48290 - protein, 245 aa, Zea mays
  Clone ID: LIB3637-203-B7_FLI.pep
AKNGTLLRAYSVFCTIQKPDLKCWNAMIGGYGNHGDSEMAFKLFGDMIRSDLQPDHVTYISLLSTCSHCGLVEKGKLYWFCMINDGIVPGFKHYTSMVSLLSRAGLLEEAVELINKSPSAKRYPELWRILLSSSVTFKNLSIGVHAAEQALELDPDDLSTHILLSNLYASIGKWDSVSEIRRKIRGLMIEKEPGLSWIEIEKMVHVFSADDECHTRIDDCRDELLRIMENMVLLDSYENEIVLNG

SEQ ID NO: 48291 - protein, 187 aa, Zea mays
  Clone ID: LIB3637-243-C2_FLI.pep
SIRSHGISYVQLNTDPFDKMFRGSPKIVALSKAAQKKASPKAAKSKKCGGGVERAAWNVELEKSLVDLLFEHNMPPYRAQNGWSPDAWNKIVSEFHKKHEYVTFNKIQIQEKERELKREYKILKEARKQSGVSWNEKRCMIIAEPTIWDNIITGPRIKILSTSLEEEKVKSHLQSVQAVYSVSVNKA

SEQ ID NO: 48292 - protein, 174 aa, Zea mays
  Clone ID: LIB3637-248-E12_FLI.pep
MAETVFTPSLEDKFGAAMAIVKNDISGNITRLENKYSSDPSKYGHLYSMVQEEVQNKTAKGSSSCTNGLLWLTRAMDFLVELFRNLLEHPDWTMTQACTDSYTKTLKKFHGWLASSSFTVAMKLSPNRDKFMEVISGTGDINADIEKFCTTFSPFLKENHEFLASVGLDDMKAS

SEQ ID NO: 48293 - protein, 128 aa, Zea mays
  Clone ID: LIB3637-255-F11_FLI.pep
SIYLILLPISASNSYFGHRMEGRRSNEVSSAEAVLVGALSSGVNAPTWFVLKITFLLLALCFTAMLALAFSSKNFVIVAHVLLLVTIGTVLFVLLNRFLAEVGLVPVEQQIKEMGIHKTEATDEDKRN

SEQ ID NO: 48294 - protein, 127 aa, Zea mays
  Clone ID: LIB3637-256-E5_FLI.pep
RLGTEQKLEDHILEIDNRSSTNNRLALVSLPAERAALREPRLSSRGLAENSLAAWAHNNSLGVAENRGYAEASLALDIHEEGVGGLDEALLLVLELLELCRRVEKVDVVLENLRNQSISGSDRARWR

SEQ ID NO: 48295 - protein, 240 aa, Zea mays
  Clone ID: LIB3689-228-D9_FLI.pep
LPTAPMGDSQYSFSLTTFSPSGKLVQIEHALTAVGSGQTSLGIKAANGVVIATEKKLPSILVDETSVQKIQALTPNIGVVYSGMGPDFRVLVRKSRKQAQQYYRLYKEHIPVTQLVRETAAVMQEFTQSGGVRPFGVSLLIAGYDDNGPQLYQVDPSGSYFSWKASAMGKNVSNAKTFLEKRYTEDMELDDAIHTAILTLKEGYEGQISSNNIEIGIIRADREFKVLSPAEIKDFLEEVE

SEQ ID NO: 48296 - protein, 262 aa, Zea mays
  Clone ID: LIB3689-229-C11_FLI.pep
SYSYISHSPMQHRSQTRQAPKRGRKKGTPKCTSILVRRGIRSDHESPTLRRTSHTVSSSSSSSSSASTSPASASASSRNAPCHADTLRSRPISTSTEAELAVLRSLGGSIHTCMDFHSASSSALPPEALLGAMAWHLSNAHSVVTFSLIWLAMLRAICFGSAGITSAAAAAANQRRSALSSEATPPSSSILSLFLTSSRKASMLFSFFTSSGDPSEDSSTSSALSSGQGLRITILVGDSDLQWRDRAWVASPAHLVRRAAAP

SEQ ID NO: 48297 - protein, 168 aa, Zea mays
  Clone ID: LIB3689-233-A11_FLI.pep
DGCSRSVHPGGFVRSKAASELEDAGQAVGRRGGRASPGDGPREAPQGHHRPSARHQQRRGRRQLQAGAVDAVDPDDAGDAVVVVVVDDAARRRQRVAQRLPPGEQPGHQGHGRQPLRPAAAQLPHRLRLALQRRDQEQPPLDRARWMDSEEAMFAGPCGYLKRTHALL

SEQ ID NO: 48298 - protein, 486 aa, Zea mays
  Clone ID: LIB3689-233-H9_FLI.pep
ACRAQSMAALESNKKLRLLLVPFFATSHIGPFTDFAVRLATANPDAVELTLAVTPANVHVVRSALGRYGAEAGGVVKIATYPFPRVDGLAPGVENLSAAGDDGWRIDAVAVDEASTRPAQEALIREQSPDAVITDVHFIWNNAVAGELGVPCVTFSVVGIFSTLVMYHLGRDVVIRDGQEVTVPGLPLAGAGDTDPRIRVAGVPETPAGARRGQAVPCGDGQVLRRHPQLVRGSGAAILRHVREQRIPEARLLRRAPLAAVTTGRSKHQRFAMPRVARHQAEVFSGVRMLRHLRCHLGGPAPGTGAWARSFKEAIPVGGEGGRMDAAGGVGGARRREGDASERVGAADGDTVPSSGWRVPDALRVELAAGGGGGRRADADVAAGVRPVHRGETGDGGPQDRGEGVERDTEHEIRGAKGRGMAAEVVARAVARFLEPGGTGEAARSKAGVLAAKARSAVAEGGSSFCDLRRLVNDLIEARTAAGTNA

SEQ ID NO: 48299 - protein, 149 aa, Zea mays
  Clone ID: LIB3689-234-H5_FLI.pep
KVRFPRRPGEPDCSYYLKFGTCRFGMKCKFNHPARKKKTSRVRGVGSNGSGSNSSSNKASSPDDDQAPKEEYEGLVPDISDSMGFDDKGSLSSSENHRNMSYEVIDMKRGKLEPKEKVCEEPEKAIHFTKLDLVETLFTSGGIDHHSSL

SEQ ID NO: 48300 - protein, 253 aa, Zea mays
  Clone ID: LIB3689-239-A6_FLI.pep
GEPRAIRMEAAMDLMRRMPPRSAETALNALLSLLPDHSLDLLSQVCMDKESLKEYILCEYNRDADSYRSPWSNKYDPPLEDGTVPSQGMRNLEVEANEVFSVYRDQYYEGGISSVYIWEDEDNGFIACFLIKKDGQGKRGYMQIGSWDAIHVVQVGPEEEGAAHYCLNSTVMLSLTTDNKQSGTFNLSGSIRRQMSMTLAVADGHLVNMGKMIEEMEGKLRNSLDQVYFGKTREMVCTLRPPPEVLNMRLPDS

SEQ ID NO: 48301 - protein, 426 aa, Zea mays
  Clone ID: LIB3689-240-C2_FLI.pep
VYGICGPLCCPCERRACVAAVLRVMPLTRVAADAFGVLTIGLLALLAALGLFCIFQSVYFRCQIRRGPSFLPLGYFNGPWVTRVALVLITIWWGVGEVARLSFLKQKLFSSLTWQRNICDAYILSNLGFAEPGIFFAFAFLLHGSLQKKELGTLNQRWNWKSMAYTLVFCVPVFSVQAVLVFVVGPRLVRDSNHDLGRRKIAKYFVRTHTPVGDTSVCTYPLLGTIFLGLVDAFLMSYVSYVGSRALSLVINKSLRRRVYLLMLSVLCFLPTRVLLLGFSVLPRPGDAAFEGIVFLSFLTMLSCTAVGILLLVYYPVADSLALRDMGQRDTAAEMVPYDDYYCYEGASLVANRSFRELERNSDTSTKPGSISFRTMIREDQLQQDGAADEIGFSSRSGAHIGSPSPAGSSPSAAMPMLPVKEIPRY

SEQ ID NO: 48302 - protein, 160 aa, Zea mays
  Clone ID: LIB3689-250-A2_FLI.pep
SGPNQRSRAGSDVRQPSGRVELVVLVDGGGDVPGAAEPLGEDDEVAGAELHALRRPLDVRPHLALEQVARLPRVELHRELPRRATPLGPRPDAELLQARLRRVALDGDGEAAAKRVGVHAVRFRARGHGRAWQRATAWRRSTENGSSGGGATARSYGEAA

SEQ ID NO: 48303 - protein, 111 aa, Zea mays
  Clone ID: LIB3689-250-H6_FLI.pep
CRPHETQGGCRATPHLWTTSVCVSNLFSTKKLFKQKDRIEKDGTVMRLSGGGHNCFQDSDEARLTFKRKFWKKAMEIDDLCGNDGAWWGIKGYMRDNFNHSNKVTSQKEHF

SEQ ID NO: 48304 - protein, 131 aa, Zea mays
  Clone ID: LIB3732-058-E8_FLI.pep
QLAQSLCRYEYRWADGVQIKKPIEVSAPKYMEYLMDWIEGQLDDESIFPQKLGTPFPPNFKEVVKTIFKRLFRVYAHIYHSHFQKIVSLKEEAHLNTCFKHFILFTNEFGLIDKKELAPLQELIESIIVPY

SEQ ID NO: 48305 - protein, 359 aa, Zea mays
  Clone ID: LIB3732-019-D3_FLI.pep
LKKRLDRSSGVVSGLACRSLLFSGSVARQREQRRVFKPKTMDPVRKSVCVTGAGGFVASELVKLLLSRGQYAVRGTVRDPGASKNAHLKVLEGAEERLQLLKADLMDYDSIASAVAGCEGVFHVASPVLSHRPSNPEVEVIAPAVIGTTNVLKACYEAKVRRVVVVSSCGAVYANPIYPKGKVFDEDCWSDEDYCRKKEDWYLVSKTLSEREALAFAAKTGLDVVTVCPSLVFGPLMQPTVNLSSEMILKYFKDLETVENVLSNMVDIRDVADALLLTYEKPEASGRYICSSHAIKISDMINILKTMYPSYPYPKNFVEDDVNSVYSSEKLQKLGWSFKPIEESLRDTVESYKAFGILN

SEQ ID NO: 48306 - protein, 238 aa, Zea mays
  Clone ID: LIB3732-025-H11_FLI.pep
RGGGVEWPDYLDTSTATMGISRDSMHKRRATGGKQKTWRKKRKYELGRQPANTKLSSNKTVRRVRVRGGNVKWRALRLDTGNYSWGSEALTRKTRILDVVYNASNNELVRTQTLVKSAIVQVDAAPFKQWYLTHYGVDIGRKKKVPVAKKDATEGQEGEAIAEETKKSNHVQRKIEKRQQDRALDTHIEEQFGSGRLLACISARPGQCGRADGYILEGKELEFYMKKLQRKKGKGVAS

SEQ ID NO: 48307 - protein, 357 aa, Zea mays
  Clone ID: LIB3732-032-B8_FLI.pep
HSAPSPKTNRRAANTHARTETSQSNNGEGSVLREDGAEEGAMDARGGQGPGRPHPELRPQQLARAAQASRAAAVRQELPAPVDQLPAPGHQARQLQQGGGGRHHQPPRAARQQVVRHRRQAARADGQRDQERLAHAPQEAPGSHQAGAAAAARDDAGGWRRQEAQARSGGEARGRRSQEGDGQRRRRRRPGPGPGHRCAGVSRTVGGLVVGDRVVHDGAGAGARQHGELARVPQGGEPHHLLLGRRGVPVRRQLLVRDAVDAAGQPRRRRPHGALRRRRVRRRRRGCRLLLVRRRRRRPGLLAQSVHGVRRRAPRTAADLDRSRENFRLLIDSSFFCLYLSLHVLHRRGRTRTAAAD

SEQ ID NO: 48308 - protein, 268 aa, Zea mays
  Clone ID: LIB3732-032-E6_FLI.pep
KTRGKEEEGGGDSTEAGDSTEARFQSPVLRLRPDLPAMASSSDPWMKEYNEASRLADDISSMIADRGSLPQSGPEIMRHTSAIRRKITILGTRLDSLESLLGRIPPKSITDKEMHKRQDMLSSLKSKAKQMATSFNMSNFTNREDLLGQSKKPDDMSRVAGLDNQGIVGLQRQIMKEQDEGLEKLEETVLSTKHIALAVNEELTLHTRLIDDLEDHVDVTNSRLQRVQKRLAILNKRTKGGCSCTCLLLSVVAIVILAVIVWLLVKYL

SEQ ID NO: 48309 - protein, 248 aa, Zea mays; identical to SEQ ID NO: 46679
  Clone ID: LIB3732-047-E2_FLI.pep

SEQ ID NO: 48310 - protein, 186 aa, Zea mays
  Clone ID: LIB3732-051-B1_FLI.pep
LCYATEGVRDTIYLPDETADFRSPETDAPLRGNRPHPRAGLEPGSQQRTTRRIDGALARHVVVPSLAHQPVVSCCRIGYAELRDPCVTYSCVPRRAMWRLRRSPQLGKHSTVHINSRKTIDRHEAAARAQDFFSPDAYTAPPLSCQQQRVSLAMGHSFRLFRVWVGFCSVLFCSLSLNTCNAAAGT

SEQ ID NO: 48311 - protein, 222 aa, Zea mays
  Clone ID: LIB3732-059-F8_FLI.pep
AGRVAASLALAANLHGEVGVQQFLDHLLHVLLLQGPTAAAPLRGRRRRRRRGRGGCCCCRRRRRRLSLPLRGLHGRQVEPVQLVDERRGEERRRRAVGVGGEVGARAGPAHDPRRLVVGARRVLRRLEGAQPYPRLPACKSTAPAGRGQRRGWRISETQEPQWRCRTPRYRCCGLAIVAFGRRRRWRQCNYLVVRRWSLVLVLVPARAGGVRVRHSGRGVCA

SEQ ID NO: 48312 - protein, 175 aa, Zea mays
  Clone ID: LIB3898-012-F8_FLI.pep
MGSLLTRTGVLPWLHAKIVDPMLQVIRRGAEPKQLAFSAALGITIGIFPVCGTTVILGAVAVAVLGSRCNVVTVMVLNLAATPIELSLIVPFLRLGETITGSGHFPLTANALKNVLTGHASKDVLLSIVNAMLGWLIAAPFVLAVLYAVSFPCFKVLVNRFGSIPSSPRTPFKAV

SEQ ID NO: 48313 - protein, 237 aa, Zea mays
  Clone ID: LIB3898-016-E10_FLI.pep
RQVGKMSSLRNAIPRRAHKERAQPEARKKFGLLEKHKDYVVRARAYHIKEATIAKLKEKAAFRNPDEFYFKMINSRTVGGIHRPKPEDNKYTEEELLLLKNKDMGYILQSVQSEKKKIEKLSLTLHELDNKPQNKHVYFAEDREEAKEIQSRIGQSSNMPDLDNIPSRIKKKIASSYRELEERKQRLQKLEKLYADMALQKELKKPGRKRKLKLHEDEETDNQTSRPVYKWRAQRKR

SEQ ID NO: 48314 - protein, 237 aa, Zea mays
  Clone ID: LIB3899-002-B5_FLI.pep
LPSRSQGVVLAGGSGAPLQEEEGGGEDTRMASRSASKDIITLRGSAAIVSEFFGYAANSILYNRAVYPEESFSKVKKYGLTMLLTQDEGVKNFIASLTSQLSEWLEAGKLQRIVLVIMSKATSEVLERWNFNIVTDAEVVEKGAIKEKSDKEIMREIQAIMRQIASCITYLPCLDEPCVFDVLAYTDTDVDAPGTWVESDAKLIDNPQMVKLHSFDTKIHKVDTLVSYKKDEWDEEE

SEQ ID NO: 48315 - protein, 205 aa, Zea mays
  Clone ID: LIB3900-004-F1_FLI.pep
SARPIRNLELSRRRPQQRGGHSTTAPQGSYSRRSGSSEGKMSSVFSGDETAPFFGFLGAAAALVFSCMGAAYGTAKSGVGVASMGVMRPELVMKSIVPVVMAGVLGIYGLIIAVIISTGINPKAKPYYLFDGYAHLSSGLACGLAGLAAGMAIGIVGDAGVRANAQQPKLFVGMILILIFAEALALYGLIVGIILSSRAGQSRAD

SEQ ID NO: 48316 - protein, 171 aa, Zea mays
  Clone ID: LIB3912-005-H12_FLI.pep
LPQPHTTPPVGHRPSPSRSLYRLWHLLAQLFRQLHRSPHYCTALCRLLSSPPRCSDPARAPSARREVVRWSSCSSSRCRCSYSSSSSPSSSASSAARLAERPQRRRRRFSPVRLCSLHSASCDPTIPCVSADLTLYVQHDLINPPLSLSLSLSLSLSLSLSLSLSCLHCRT

SEQ ID NO: 48317 - protein, 277 aa, Zea mays
  Clone ID: LIB3912-024-H9_FLI.pep
LQKGVFETSGPTLKLKLKRPACAAMDVKCRRLEGKVAIVTASTMGIGLAIAERLGLEGAAVVISSRKQKNVNEAVEGLRAKGITAVGAVCHVSDAQQRKSLIETAVKSFGHIDILVSNAAANPSVDSILEMKESVLDKLWDINVKASILLIQDAAPHLRKGSSVIIISSIAGYNPEQGLTMYGVTKTALFGLTKALAGEMGPDTRVNCVAPGFVPTRFASFLTENETIRKELNERTKLKRLGTVEDMAAAAAFLASDDASYITAETIVVAGGVQSRL

SEQ ID NO: 48318 - protein, 201 aa, Zea mays
  Clone ID: LIB3912-046-A6_FLI.pep
ARILPTGMAMLHSVRPSVSLGAGAWVVNDDEILPVAAAEREVPEREAHDDGDKHAAVERHDGEHEQVAEAGVDPEHRGHGQARRPAPGAGREGGREKRRPRVGAGRWRDDGGGGWLGASSCDELHADPQGLEVLVESGGEEQGREGEKVVGPRGGAPAVEQDRGRLAPVEGHVHHVGRRRGRRRERLGLGSGDGNGNGREE

SEQ ID NO: 48319 - protein, 176 aa, Zea mays
  Clone ID: LIB3912-046-G9_FLI.pep
EARPGVAPPKLGAATSSLCGQLALILPLGSSSSVCLLATTPPHLLPPASLLPSWGPELRAEQGAKLCAEIELLLLGRRRRRQWGRRRSWRSCWPSCCRRSASSSATASGLSSGSACCSPSWDTSRASSTPSTSSSRESTTWCGRYDDDGDRPPARRELEYMRPRPSASDPSIPCMQ

SEQ ID NO: 48320 - protein, 154 aa, Zea mays
  Clone ID: LIB3957-007-E11_FLI.pep
QHFPDRRGWNHNQFEGKEFLIDAQVDLLGKDRNGCSGRRRRARVAGDEVVVGVPTAGGLADLGIPGELRVEAVEGPEAVGAQREAPRRLSALAPLLHLVDMLPPNLVALVRVLHQTEDQILREVHDETHRRLRSPSSPSPVSLGSAGASVSLSL

SEQ ID NO: 48321 - protein, 231 aa, Zea mays; identical to SEQ ID NO: 43391
  Clone ID: LIB3957-018-E11_FLI.pep

SEQ ID NO: 48322 - protein, 114 aa, Zea mays
  Clone ID: LIB3957-019-G11_FLI.pep
YSGRRWRIERAPVHRPIQWPRRLRCRRRSRWWWCGLHLHLHLPLDVRWVHQQRHQYHLIGDLALVGEETFDGERRGAIGRGESSGGGECMCALARESRAAAAAALGIGGEKGKA

SEQ ID NO: 48323 - protein, 79 aa, Zea mays
  Clone ID: LIB3957-022-B4_FLI.pep
ILMQLCNCPSRLWSPIQDVNSEMGIALQAGFYARHRPRLWSPSHDVSSETRRIAFQMVREARAEAMSSSNSSNRSPAWQ

SEQ ID NO: 48324 - protein, 203 aa, Zea mays; identical to SEQ ID NO: 37013
  Clone ID: LIB3957-022-F3_FLI.pep

SEQ ID NO: 48325 - protein, 166 aa, Zea mays
  Clone ID: LIB3957-026-G8_FLI.pep
AVASTPAAAMKRNPRVTSSRRKCRKAHFTAPSSVRRVLMSAALSTELRHKYNVRSIPIRKDDEVQVVRGTYKGREGKVVQVYRRRWVIHVERITREKVNGSTVNVGIHPSKVMVTKLKLDKDRKALLDRKARGRAADKAKGKFTADDVAAAAGGAAATGASLQEID

SEQ ID NO: 48326 - protein, 280 aa, Zea mays
  Clone ID: LIB3958-001-B2_FLI.pep
ANMQIILELTRCRGRNSRGGLHKCAPCTAMPNNKIVAANMEEKGAGGKAAVPHDELPRFTIFLIPNRREPPLDLVELVCLHHRISLGNGVPGSSPVVELAVVLVGVAVECAVQVPTPAVESRKSNPLPAGAAPVRPYLPPFGDRRHPLAGSGNISGLLHVHCLQLNLGNSYYRVAASNNRLHDGVAAVHDAVDRGGSQLGLILLRYHLLVALGAHVHGRRAAEEATVIDAEDGSLGGLAPSLLVLHGFLNSDETALFAIPLRRSPRGRRGGEGRGIAGNS

SEQ ID NO: 48327 - protein, 90 aa, Zea mays
  Clone ID: LIB3958-006-B7_FLI.pep
RRGRRQALQLRVAAAAAMFGLLPLASYHVLVDLLCSYTPMLHSRVKQRKIKLRISGLHNSHQRSVRRFSCYDKWNLYMLVCDSCPQGLKL

SEQ ID NO: 48328 - protein, 90 aa, Zea mays
  Clone ID: LIB3958-010-F7_FLI.pep
TMIHVISYKQRLCESCPSWNLVHLPSYSLIFFRPSNKNMLLLSARCKSRRFCNGGGGKSKLRTQELCYDTLRNRSNSDVTQFGNGLHLSP

SEQ ID NO: 48329 - protein, 177 aa, Zea mays; identical to SEQ ID NO: 44953
  Clone ID: LIB3958-021-G10_FLI.pep

SEQ ID NO: 48330 - protein, 135 aa, Zea mays
  Clone ID: LIB3959-004-A10_FLI.pep
RCAASGRIFLLLGDATGLAGLGPLQKVSAALRVLAYGLPTDAVDEYIQIGQTTARDCLIRFCHAIISCYNQRYLRIPNRNDVARILRVNADRGFPGMLGSIDCMHWEWRNCPTVWRGQFCGRNSRPTMILEAVAS

SEQ ID NO: 48331 - protein, 328 aa, Zea mays
  Clone ID: LIB3960-002-A3_FLI.pep
RPPLASPPACPCLSLSLLAESPPAMNNLLTDSFELPRRDSSRDTDIEMGMHQADASDNLKDFLKKVDTIESLIAKLTNLLNKLQTANEESKAVTKASSMKAIKQRMEKDIDEVGKIARQAKTKVDELEKDNLSNRQKPGCGKGSAVDRSREQTTGAVKKKLKERMDDFQTLREAIRQEYREVVERRVFTVTGNRPDEETIDDLIETGKSEQIFKDAIQHQGRGQILDTVAEIQERHDAVRDLERKLLELQQIFMDMAVLVEAQGDMINNIETHVSNATNHIQQGVSALQNAKKLQRNSRKWMCYAIIILLVIVVVIVVAVIQPWKKGT

SEQ ID NO: 48332 - protein, 168 aa, Zea mays
  Clone ID: LIB3960-004-A1_FLI.pep
SLLGALMYYLQDEFQLALFKTNRKDSMFADRVFDLFDTKHNGILEFEEFARALSVFHPSAPIDDKIDFAFKLYDLKQQGFIEKQEVKQMVVATLAESGMNLSDDIIEGIIDKTFEEADTKHDGKIDKEEWRSLVLRHPSLLKNMTLPYLRDITTTFPSFVFNSQVEDA

SEQ ID NO: 48333 - protein, 293 aa, Zea mays
  Clone ID: LIB3960-024-B6_FLI.pep
PAAATTGSPSAMSSQVDRRSQSAGKRARTDGSRREDDWVCPSCKNVNFAFRTTCNMRSCNQSRPADHTAMQTPPHYPTSGGYMGPGTPPSMYLGGGAPPYGSSMFNGPAVTRYGIPQFPGGSAYSYGYGGPIPMGSPYGPMQIAGPTPYSGGTMMTAGGMYGIPMDRYGPIPAGPGPMGTRAGSYSDEGSQKKPAGAGRDNDWECPNCHNINFGFRTVCNMRKCNTPRPANQGSKSDGLRGSKAKMPEGSWKCEQCNNINYPFRTKCNRPQCGAEKPSQTNNVNGSATDQDNQ

SEQ ID NO: 48334 - protein, 367 aa, Zea mays
  Clone ID: LIB3969-003-H6_FLI.pep
KQSRQRHSPAQAERERERSAEPRSGATTAGRGREEKARRQQPGGSSQEQDAARGLERAGDHQLHHLPDLDPDPGRRHLAGVAGQLHRLHPLPAVAHHHRGARPHGHLPHGLRRRLLPPDLAAPPLPLRHVLRRPRASLLHRLRLRRHRPRRRPGRHEPPLPRVPALRLRRLAPRPRRRPTVLDHHQRLPPRRPRLRRHEAPRAGPQHWHARAGDAHHVLRPQPLPDPVWMLQATDVMCVQLHERDVLDTKPQRPDGDQRPRLQKVEQRPADAVLPVRLVQGWRPRGHQEELAQGGRPEHRGADYPCDRLRRGLRCVPQREEDRQRRGDRHGADDQVPSEQVPVLGRCSAATAGSKALALYKWPVVWS

SEQ ID NO: 48335 - protein, 153 aa, Zea mays
  Clone ID: LIB3969-005-H4_FLI.pep
RICFLSSLQVHTIVLLSLSLKSLHATPYTNCRGRSMAGLQRSSQTFRRSGSSGLVWDERLTSQDDDQSGPEDADAATDLKELRHSRSVGSVGLQPQPQPQPQRRRSDDSGQGFRTRRVAPALDPPSPKVPGCIFCGIFRKAGASEPKSKPRRY

SEQ ID NO: 48336 - protein, 216 aa, Zea mays
  Clone ID: LIB4071-004-D7_FLI.pep
SVFFYSFGRNQKTFRPKKSAPSGSKGAQLRKHIDATLGSGNLREAVRLPPGEDINEWLAVNTVDFFNQVNMLYGTLTEFCTPESCPTMTAGPKYEYRWADGVQIKKPIEVSAPKYMEYLMDWIEGQLDDESIFPQKLGTPFPPNFKEVVKTIFKRLFRVYAHIYHSHFQKIVSLKEEAHLNTCFKHFILFTNEFGLIDKKELAPLQELIESIIVPY

SEQ ID NO: 48337 - protein, 126 aa, Zea mays
  Clone ID: LIB4073-001-A2_FLI.pep
YRRTRRRSSRPACTQPDRYAPPQIYSCFACRACYGPGGRSETMNLDVFLLHNAGLDKEIRDVLPLITLELNDLSKFWVLDHCTIAAKLFLEIFEDLAVAELLLQSLDSSQTLATITLLDAYMNVVL

SEQ ID NO: 48338 - protein, 134 aa, Zea mays
  Clone ID: LIB4073-001-F4_FLI.pep
LDSGTNAASAYVIKPFWGVLIKHLGLGLIGGGLRLGLGLRRGERLLDGDGVDLRHVRRQRGVHHPVPLQQPLPLELLRDHLDLVARTTPSGCVRDHEIGRAESGGDGRLDVLLGDAHRFFAFSSPVRRCVQGTS

SEQ ID NO: 48339 - protein, 208 aa, Zea mays
  Clone ID: LIB4073-001-H1_FLI.pep
TPMYVSQLGFSTPSTRQQVLPTNSRSEAAALVLAPNLLDSTDLFLAHGRHHGQEDVLSFIISTLDLGLQSFITGKLGVILSVATLSQKADKSIFRNVNQLILNTVNMWNVTVVRRRNNILKLLSSENVNSNKVALGMAMLPSLGSGDLNNLAGTVLDDDVAVLADGAGLLRVRLGGAGVGLGLEVVLLGVRHLRESFRDPAEKLGEEI

SEQ ID NO: 48340 - protein, 90 aa, Zea mays
  Clone ID: LIB4073-005-C4_FLI.pep
ISPKKPLTVSLSEYRFSFADPGAHERPPPPPPSTLLQRSASVRPSVRRFQILFPHLGFVWFVEELKLSYHHRVCLVSLSVVVKVLRRIEK

SEQ ID NO: 48341 - protein, 175 aa, Zea mays
  Clone ID: LIB4073-007-E3_FLI.pep
FILPGGRELLGALVVAGKAVDPALNKNEPEFGVLILPVPLQMLPNCHSLLNQEVQVLRDLRRQPMGLKDAEDLATSNALDERDAVLVTEQDANLRRHLTLLRSLGNHLLHLGGGRLEPGRRSPLVRQGRRRDTLPAAVHTPHGGGLVSTSGDDGGRELAAAAAAAAAAARGREEA

SEQ ID NO: 48342 - protein, 249 aa, Zea mays
  Clone ID: LIB4073-007-G3_FLI.pep
GHKFRLKYSNHLSDHRQYAILFRARKGKGIEQEHGRRRGEDDEPMTNDGGRRRQARHLSDLAAVGDLDLLSGGPTARPNLLNRLDDIHPLHNLPKHDVFPVEPGRRHGADEELGAVGVGPSVGHGQHPGPRVLAHELLVGELLAVDRLTSRPVAPGEVAALAHEVRDHAVERRPLVVERLARLPHALLARAQRAEVLGRAGNLVGVELHHDTTGRCAADRHVEEDARVRHRRRVGAARVLGIWSGWGIC

SEQ ID NO: 48343 - protein, 324 aa, Zea mays
  Clone ID: LIB4073-008-D12_FLI.pep
QLEMFDDACTCTRETKRRGGDPEIERIDDLLAAHGTEPKLGGGSPAAGLVVGGGELLVGLGDEEQLVDDASEAAADEWADPVHPLVSPLPADEGRAEGHGGVHGRAGEGAADQDVGADDEADGDGGDGAQAALLGVNGGGVHRVHQPEGHHDLHHHRLPHGDAGQAEGARGQPARGEAEQEARHRRAQQLRHPVQEAAEQGDVAAHERAEGHGRVHVTAGDVGAHGHRHEQREGVRHSRRDQARGGRRAAARQLAEGHAGTLAGEDEDEGGDELSQRRLEGARVVHLMVGPHGDPADRHFHGPLTTTVCLELECGAKLSSSLGV

SEQ ID NO: 48344 - protein, 61 aa, Zea mays
  Clone ID: LIB4073-011-B6_FLI.pep
RHTVKCISQVLRQHLATTVPCSNYHDVMLKNSITVTQISMTIPSQLYPDGSGGKHQCLNRI

SEQ ID NO: 48345 - protein, 147 aa, Zea mays
  Clone ID: LIB4073-011-B8_FLI.pep
SLRRCFLFLPAAAMASGDNSKQRSEEEWRAVLSPEQFRIIRQKGTELPGTGEYNKFYGDGVYNCAGCGTPLYKSTTKFDSGCGWPAFFEGLPGAINRTPDPDGRRTEITCAACGGHLGHVFKGEGFKTPTDERHCVNSVSIKFSPSS

SEQ ID NO: 48346 - protein, 217 aa, Zea mays
  Clone ID: LIB4073-023-D6_FLI.pep
RSHLLACPTHLPFPPSVPPSSPQRRGTPETEQSKPPHRGKERRRSRKPEANKMSSVFSGDETAPFFGFLGAAAALVFSCMGAAYGTAKSGVGVASMGVMRPELVMKSIVPVVMAGVLGIYGLIIAVIISTGINPKAKPYYLFDGYAHLSSGLACGLAGLAAGMAIGIVGDAGVRANAQQPKLFVGMILILIFAEALALYGLIVGIILSSRAGQSRAD

SEQ ID NO: 48347 - protein, 141 aa, Zea mays
  Clone ID: LIB4073-024-E7_FLI.pep
LFLPAAAMASGDNSKQRSEEEWRAVLSPEQFRIIRQKGTELPGTGEYNKFYGDGVYNCAGCGTPLYKSTTKFDSGCGWPAFFEGLPGAINRTPDPDGRRTEITCAACGGHLGHVFKGEGFKTPTDERHCVNSVSIKFSPSS

SEQ ID NO: 48348 - protein, 202 aa, Zea mays
  Clone ID: LIB4074-002-A10_FLI.pep
KASKPDHQRNEKEEVSVGEKTKERKRDIALRRMALTTDELKAKAEVYYGDEICQLCTQLLLREAGLPNGLLPLKDLIECGYVQETGFVWLKQSKRVDHIFHSLGRLVSYGTEITGYAEKGRIRKVKGIKTRELMLWVPVEEIALDDDPATGKLVCKSIAGITKTFPASAFHIPEKENNVKANCAALKPVVLMERAPRVVKNS

SEQ ID NO: 48349 - protein, 66 aa, Zea mays; identical to SEQ ID NO: 41517
  Clone ID: LIB4074-013-A3_FLI.pep

SEQ ID NO: 48350 - protein, 153 aa, Zea mays
  Clone ID: LIB4074-015-F4_FLI.pep
PLQLLSRILFHLLQPSLDVIPWHVSKHFPNLEAYNVFIGQDEFIPSIIKVLIRLLCELDLFLELVEAVVEATEAVDVLLVLPRHLRLRAVALLHLRFSLGRADRRSESKASSSPDPLFGLGIAAAARFGRSSSTRSERGEGRREKGFEDLGSE

SEQ ID NO: 48351 - protein, 59 aa, Zea mays
  Clone ID: LIB4074-019-A1_FLI.pep
AWRYYFGREFAKWHPFCFSAMCKANCFIEGKSSDGSYAKGYRCDSHGFHSMCICLLCKS

SEQ ID NO: 48352 - protein, 127 aa, Zea mays
  Clone ID: LIB4074-019-A12_FLI.pep
AQVLRPRQLLGQQLSGLNVGDLQNLENKLETSLRNIRLKKDQLIFYQIQELNRKGSLMHQESIELYNKVNLLHQHNTELQRKVYGQGVNNEQTSTTVRHSTRDTENLPINLELSVQRDKSETPSVGL

SEQ ID NO: 48353 - protein, 343 aa, Zea mays
  Clone ID: LIB4074-023-B1_FLI.pep
TLESLELSVPDPLDLDILGRLGPEVGVGRLHALEDADDLAGLRVALGDAQRDVAGGGGGVLDVLLLELLLVTSAPGGERDGVVVAGGAAAALGVEEGGATVAGHEEGPAEALGLAGGDELLDGEEERHALAPRELHGDGGVVDAVLLLELERAVGADLERALDLVQRVREAGHELGLLELGRGVLGDALRLDGEGRRLQAQLLHLVLAGLERERLHAAVDGRALVRRARALHLHVRFALDLVVGQPLGRALRARARDEERRGGEREAGELRGVDAPAGDVLQGARDPGGAGVDAERPAGELRRRAGRQRGKGRPAADLGRLHQGGRGLERGCHRRRGGDAFWL

SEQ ID NO: 48354 - protein, 183 aa, Zea mays; identical to SEQ ID NO: 44872
  Clone ID: LIB4148-006-B1_FLI.pep

SEQ ID NO: 48355 - protein, 130 aa, Zea mays
  Clone ID: LIB4148-009-C5_FLI.pep
APPRPRTSIVQQKQESHPRSPRIRDRQGGNRDPSIRVDGVNGGADKLVGAVLGEGPRARSHHVQVRLDGAQRGGGERGRLQRLLGAAGRQGVHVRQRPRHAGPRHQLLHLQHPRPLPVRHEDRRHRRLTD

SEQ ID NO: 48356 - protein, 274 aa, Zea mays
  Clone ID: LIB4148-010-D2_FLI.pep
RRCPAARRPQPPPLRVLLARPLHPRAGHPHTRLRPLHPPPPHSNLYTRRLQKAVEKEGINVKYFWGSTLYHVEDLPFRLEDMPSNYGGFREAVKGLEVRKVLEAPEEVKCVPMKNVLEPGDIPTLAELGLTAPPAMSQDSKPAVGSTLIGGETEALERLKKFAAECSMQPNKVDKSNTQDSIYGANFSCKISPWLATGCLSPRFMYEELKKHATKAIPFGSTPKNNDGTSDAGTNWLMFELLWRDFFRFITKKYSSVQKTSEVATGCTPAPALA

SEQ ID NO: 48357 - protein, 256 aa, Zea mays; identical to SEQ ID NO: 44857
  Clone ID: LIB3912-029-B9_FLI.pep

SEQ ID NO: 48358 - protein, 242 aa, Zea mays; identical to SEQ ID NO: 48244
  Clone ID: LIB3912-029-H7_FLI.pep

SEQ ID NO: 48359 - protein, 197 aa, Zea mays
  Clone ID: LIB3912-035-E6_FLI.pep
LLEQARPVRLVEPGVTHWLRRGEELRHGSFSWRMGVEQVDVLEPLQLLEPKRRVFLVAGFVVRQLEEVLDGPTGRWQERRGRHLLRQRVLDRPCFGGRPGSWRADDGRGLGASLGRRRREALGAGAADGAEADADAGGEVALVVAGERAGDVDGLVAVAAEERPVLDAEDEGRPVANLADNMIGVVKSSFAISYKFL

SEQ ID NO: 48360 - protein, 303 aa, Zea mays
  Clone ID: LIB3912-036-C10_FLI.pep
GEKATKRRERRASGSKEMERAAPVRSSHTSTADLLAWPQPQGPAPATPSPPRRPGQPSEAIRKVVFGGQVTEEEADSLTKRKPCSAPKWKEMTGSGIFAAGSNGDAGEAAAAAKPARTSSRQASSTVSHISFAEDGTDPPKKPTSVAEVAKQRELSGTLQSEADSKTKKQISNAKSKELSGHDIFADTLDSRSNRARNPSNGSTASHAPAKNTNASTFSFGDANTDSTPKTARKITGKKVNDLTGNDIFKGDAPPASAEKHLSTAKLKEITGSNIFADGKEPIRERVGGNRKPPGGESSIALI

SEQ ID NO: 48361 - protein, 232 aa, Zea mays
  Clone ID: LIB3912-037-C9_FLI.pep
AEEEPSLAEPMGQQSLIYAFVARGTVVLAEYTEFTGNFTTIAAQCLQKLPASNNKFTYNCDGHTFNYLVEDGFTYCVVAVESVGRQIPIAFLDRVKEDFTKKYGGGKAATAAANSLKREFGPKLKEHMQYCVDHPEEVSKLAKVKAQVSEVKGVMMENIEKVLDRGEKIELLVDKTENLRSQAQDFRQQGTNVRRKMWLQNMKIKLIVLGIIIALILIIILSVCHGFKCGSK

SEQ ID NO: 48362 - protein, 244 aa, Zea mays
  Clone ID: LIB3912-042-G12_FLI.pep
GDQIPYKSKSSSISFNPPQSLWFWDQTNMAKKRSNSQHPFQVCRSKNFSIATENAANPTHPKHVALGPPFTAKAPPVTQPATAVLVVSCFARTFSMVHSAAEKIRPMTAKVLALLILLLPICFAVYTICCLAVICSAIIGFSKAPKNSPISTPRPPPMTPLTTLRTAQLFQMSCPLISSTVGIRIGSTAAAWLVDSPPVPASAADGSGEAITLYLVPLHSPLDDRDSSRRQREDGSGSSRGGLG

SEQ ID NO: 48363 - protein, 126 aa, Zea mays
  Clone ID: LIB3912-043-H5_FLI.pep
RARCFMQAQTRNSRVASMAFRLNSRPQMRVKSASMRSRIGHARRTAIASFMVTHHGLAYYCGFVRHYRLGAAKDCFGDLWVCCCVKRSSWLPEDHEGLDLSCNSLLSANYVWTMDMCCAVQLTTNK

SEQ ID NO: 48364 - protein, 194 aa, Zea mays
  Clone ID: LIB3912-046-F1_FLI.pep
QRRRRDLADDLVEGAGVLEPEHDADAEDVADGAAGQRVGEGEPGGVTRLQAGVARLQLQPRRRLAVRGRRQPEPPREQHQRRRRHHDQVGGGADVVAADALRRRPLPAHPHGRQRCHRGPGRGVAPEAVEPGHGGGELGCHVWRLRRRRRTSHLCAAVPSSASAEWCGTGGSGGGAQVRVLKAWTRRGVGWEPS

SEQ ID NO: 48365 - protein, 189 aa, Zea mays
  Clone ID: LIB3912-046-H10_FLI.pep
SRVSKRLTEEAEQYFEDFLSNVEDTDFSSFDGERSDSSSTRKDLLLLHAMTETPVKLPEVALPAEADGVVLPWLQWETTNDLQTSPCKTKAQGESTRGSTSNQTASSRGSWSPGDHATSSVASKDSLLTRFGEVGICRSSLSDYARTLSFHIDDYLHLRQSEDLLLETWMQKQRIDSGGLVLCSKSTIL

SEQ ID NO: 48366 - protein, 296 aa, Zea mays
  Clone ID: LIB3912-046-A8_FLI.pep
KTTARGALLPRCHHHHHLVGPSPRRSAAKQLPPPAPRAAMAMDAAVAVKSGGGGAGSTGVTAAASQSPQAATNGGERRSRFQRICVYCGSAKGRKPSYQDAAVELGKELVERGIDLVYGGGSIGLMGLVSHAVHDGGRHVIGVIPRSLMPREVTGEPVGEVRAVSGMHERKAEMARFADAFIALPGGYGTLEELLEVITWAQLGIHKKPVGLLNVDGFYDPLLSFIDMAVNEGFIKEDARRIVISAPTAKELVLKLEEYVPEYEVGLVWEDQMPPSAAAAHGFAPELVEPGITSSS

SEQ ID NO: 48367 - protein, 203 aa, Zea mays
  Clone ID: LIB3912-047-H5_FLI.pep
FCSTAGRAGSKMGSGSFLKVLANNFDVLAGPLISLAYPLYASVRAIETKNPVDDQQWLTYWVLYSFITLFELTFAPIIEWLPFWSYAKLFFNCWLVLPWFNGAAYVYDHFVRPMFVNRQIVNIWYIPRNEKLGKSDDVLSAAERYIEQNGPEAFEKLISKSTKSSKSRNTKRLNLEDGEAENRAKAERESWGENPFYDKNYRY

SEQ ID NO: 48368 - protein, 258 aa, Zea mays
  Clone ID: LIB3912-048-C2_FLI.pep
KNICICVRTILESNVLSSPYFLRSYPHHIPKPSVDPSSSIYTGDRRRAMGWATRFLAAVCFFAAGVLFVPEALLGSPSGAGAVTAAKLAHVLSFATSWGAALWATFIGGIIMFKNLPRHMFGNLQSKMFPAYFTLISACAAISVAAFSHLHPWKTASTVERYQLGFLLSALGCNLSNLLVFTPMTIEMMKKRHKIERDLSIGEEVGWSKNQQVAKSNPTLAAMNKKFGMIHGLSSLANIMSFGSLAMHSWYLASKLEL

SEQ ID NO: 48369 - protein, 167 aa, Zea mays
  Clone ID: LIB3912-050-F5_FLI.pep
GAKRTTQGCICLCLCMTKPRDEKQAGRGRSGRPPAVASASRARRLPTDVADRSPGLLVVAVVVLRSEVVRGRSLGPQLLGFLVEVPQQDVPRLRCYHLIGWRISPVGRNISGWCDIRGLCGWVGRDELAEVVRVVRRPPAQRTPHLRPTAVFFCSSSARRPQLRRCS

SEQ ID NO: 48370 - protein, 114 aa, Zea mays
  Clone ID: LIB3912-055-H10_FLI.pep
MTSNSIRKLPIHYSASTQPPSLPLRLEQCEDVSLANRSLDVPHDETVLVIQELHSDLGNLTPGAGPSHHLHHNSKLHLGVHTLASRAESRTEDDGLTKETGAAAAMTALEEEGN

SEQ ID NO: 48371 - protein, 387 aa, Zea mays
  Clone ID: LIB3912-056-B4_FLI.pep
GMEFLEPKDIDWSRVVSQYVRDETYEGIEAPHWADLSDPNAGRAAVDDEAWFCRPDCQHPKTAEDFFKLSPSPKGKLLRSVSAMLPFAERDANATNLRDGSSNLKWRGGGAVAASTPPKPKAAPKKRFQEDSENHDPALATPPPRQAPSRPPFGAPRWNKNAKEAIKSSAEKRPDNAEKEALLNKHVPPRQLKSTLSARNLFSGKDILGQISEFYDELKRMVGGGVGRPVTDTQEEHSSDPVNPSYLMEKVAPDETVKEEARQETAKKSPSPMKGKKVGLKVEAGKQRSPSVLKEVRATPPTPQRFLSPSPNRIKNVKPGGMSTAGSPLKKAPKEKGTPSKDLESKKDAVRQPFGVKDMNNTRAACDAEGSSSSMFWFLKPCTFLVE

SEQ ID NO: 48372 - protein, 111 aa, Zea mays
  Clone ID: LIB3911-001-E1_FLI.pep
PWESGAQIGRDGVGRVHERARVLPSGAGVQVARGEMDAFLQRLKRLDAYPKVNEDFYKWTLFGGIVTLVAAVVMLLLFISETRSYFYSATETKLVVDTSRRERLRVNVSTF

SEQ ID NO: 48373 - protein, 317 aa, Zea mays
  Clone ID: LIB3900-007-D8_FLI.pep
GEKLEELERESPIATHKGKRKRKARTMGLLLLLHVLLVAAAATAPAADAWGKEGHYMVCKIAESFLTKEASTAVKELLPGWAGGELAETCSWADTQRFRYRWSSPLHFADTPGDCEFDYARDCHNTKGEKNMCVVGAINNYTAALKDSSSPFDPTESLMFLAHFVGDVHQPLHCGHTDDLGGNTIVVHWYRRKTNLHHVWDVNVIETAMKDFYGNDQSTMIQAIQQNITEEWADEEKKWEACRSRTKTCADKYAAESAKLACTAYEGVDQDSTLEDDYFFAALPVVQKRIAQGGVRLAAILNRIFGGNSRSGFRAVD

SEQ ID NO: 48374 - protein, 50 aa, Zea mays
  Clone ID: LIB3898-014-A11_FLI.pep
VASQRLHYIITTVHSFLSSRHRRQLRCKGRDLAAAAADRTSPSAAALPGP

SEQ ID NO: 48375 - protein, 94 aa, Zea mays
  Clone ID: LIB3898-014-H4_FLI.pep
NLLLDISLLLLPQPVQGAVCVALSTDKPRESKRCEVTIIQAIRIQVANVDLDRGMVLGSDDPVCGRALPGDIEVHSLTLLVLHGDSWGNYHKIN

SEQ ID NO: 48376 - protein, 172 aa, Zea mays
  Clone ID: LIB3898-016-H10_FLI.pep
SAGVDMLVYQDLLSGDELLSDSFTYKELENGVLWEVEGKWVTQGPVDVDIGANPSAEGGEDESVDDTAVKVVDIVDTFRLQEQPPFDKKSFVSYIKKYIKNLTAVLEPEKADEFKKGVEGATKFLLSKLKDLQFFVGESMKDDASVVFAYYKDGATNPTFLYFSHGLKEIKC

SEQ ID NO: 48377 - protein, 113 aa, Zea mays
  Clone ID: LIB3898-024-A6_FLI.pep
IRRTASSAGDMAEEKGALQSAREWVVDHKLRAVGTLWLSGIVGSIAYNWSRPGMKTSVKIIHARLHAQALTLAALAGSALVEYYDHQQGSGSKVHQYAKQFLSSDSNSGHQKE

SEQ ID NO: 48378 - protein, 114 aa, Zea mays
  Clone ID: LIB3898-024-C2_FLI.pep
MTSNSIRKLPRHYSASTQPPSLPLRLEQCEDVSLANRSLDVPHDETVLVIQELHSDLGNLTPGAGPSHHLHHNSKLHLGVHTLASRAESRTEDDGLTKETGAAAAMTALEEEGN

SEQ ID NO: 48379 - protein, 212 aa, Zea mays
  Clone ID: LIB3801-009-H4_FLI.pep
GQHTGLMLRHQQTSLVLVTLVAILALIELSADLLVVLLERRQVLTGLRELTFLHTLTDVPVHEGTLGVHEVELVVDAGEHLHNTGGVGCILLPTDELLRVEELAVGASPHLIDDSGFKVNKNSTGHVLPSTSLTEEGVESIITSPNGLVTGHLTVSLNAMLKAVQLPARVSDLDTGLADVDRNALPHGVVVRDGAAADGGNWEKGERFEPRR

SEQ ID NO: 48380 - protein, 135 aa, Zea mays
  Clone ID: LIB3732-019-F5_FLI.pep
GMASKGVLFLALNLLFFTVANACGSCPTPTPPVVPPPPPPAATPPPSSSSGKCPLNALKFGVCVNVLGLVKGEAGKVPAEPCCNLIKGLADFEAAVCLCTAIKGNVLGVVFDVPIKFNALVNYCGKCVPKGYMCA

SEQ ID NO: 48381 - protein, 196 aa, Zea mays; identical to SEQ ID NO: 41372
  Clone ID: LIB3732-020-H3_FLI.pep

SEQ ID NO: 48382 - protein, 135 aa, Zea mays; identical to SEQ ID NO: 36896
  Clone ID: LIB3732-024-A11_FLI.pep

SEQ ID NO: 48383 - protein, 122 aa, Zea mays
  Clone ID: LIB3732-029-H11_FLI.pep
SVHFSRKGFVLMAPPQPKSGLFVGINKGHVVTKRELPPRPCHRKGKSTKRVSMVRGLIREVAGFAPYEKRITELLKVGKDKRALKLAKRKLGTHKRAKKKREEMAGVLRKMRSAGTHTDKKK

SEQ ID NO: 48384 - protein, 240 aa, Zea mays
  Clone ID: LIB3732-033-H11_FLI.pep
LRAPVMGDSQYSFSLTTFSPSGKLVQIEHALTAVGSGQTSLGIKAANGVVIATEKKLPSILVDETSVQKIQALTPNIGVVYSGMGPDFRVLVRKSRKQAQQYYRLYKEHIPVTQLVRETAAVMQEFTQSGGVRPFGVSLLIAGYDDNGPQLYQVDPSGSYFSWKASAMGKNVSNAKTFLEKRYTEDMELDDAIHTAILTLKEGYEGQISSNNIEIGIIRADREFKVLSPSEIKDFLEEVE

SEQ ID NO: 48385 - protein, 80 aa, Zea mays
  Clone ID: LIB3732-045-H1_FLI.pep
EVLHSSTVASSTVLDETNVLGVAAEALPAAHEPVLPDQTVRVRADPADAGARAVVLRVRVPHVGVAHRVVLLAPPLPSVT

SEQ ID NO: 48386 - protein, 254 aa, Zea mays
  Clone ID: LIB3689-239-G6_FLI.pep
LSSSCRRSFFRNLARPPDLRPSRTLPPRCRPPRPACAACSSLLSPRRPPRSGWIEGQGQEMGQAFRKLFDAFFGNKEMRVVMLGLDAAGKTTILYKLHIGEVLSTVPTIGFNVEKVQYKNVVFTVWDVGGQEKLRPLWRHYFNNTDALIYVVDSLDRERIGRARAEFQAIINDPFMLNSVLLVFANKQDMRGAMTPMEVCEGLGLYDLTNRIWHIQGTCALKGDGLYEGLDWLATTLDEMRASGRLTSASSSAS

SEQ ID NO: 48387 - protein, 124 aa, Zea mays
  Clone ID: LIB3689-243-G11_FLI.pep
AGFAAITPRGATMVATKKTKKSTDNINNKLQLVMKSGKYTLGYKTVLRTLRNSKSKLVIIANNCPPLRKSEIEYYAMLAKVTVHHFHGNNVDLGTACGKYFRVCCLSIIDPGDSDIIKTTPGEQ

SEQ ID NO: 48388 - protein, 85 aa, Zea mays
  Clone ID: LIB3595-041-F7_FLI.pep
RAMELRELGGTGLRVSAVGFGASPLGNVFGDVPRDTARAAVRRALDLGINFFDTSPYYGGTISESVLGDCLRHAAVPRDRVVVAT

SEQ ID NO: 48389 - protein, 129 aa, Zea mays
  Clone ID: LIB3357-001-F9_FLI.pep
VQTLAKLPQSPLHRDPISPFWPRDSRRHGLRRQPQPDRRPQSAASAAYAAAASTGRLTGGAHDPPPPSLPLRLPLQGPLPHAAHPQSRLPDPHGRLVLAPESAHDRHRRLGQAAPAKAPYPTPGTRLYL

SEQ ID NO: 48390 - protein, 143 aa, Zea mays
  Clone ID: LIB3357-037-D1_FLI.pep
PVAVGHTSSLASGQIRLASMAADRGFKIFAAADGFGQPLKDAVVAYLRAHPAVAEVVDLGVDKYYAAAAAVARHVSSPDSEPDAPEVRGVVVCGTGAGVCIFANKYPRVYATHCASPADAVNTRSINACNVLALSGIATQPDA

SEQ ID NO: 48391 - protein, 290 aa, Zea mays
  Clone ID: LIB3587-221-D9_FLI.pep
SRDPVERNRQSNMAPALSFPIIDMGLLAGEERPAAMERLQDACENWGFFEILNHGISTELMDEVEKLTKEHYKRVREQRFLEFASKTLGDGRDIAQGVKAENLDWESTFFVRHLPEPNIAEIPDLDDEYRRVMKRFAGELEALAERLLDLLCENLGLDRGYLARAFRGPSKGAPTFGTKVSSYPPCPRPDLVSGLRAHTDAGGIILLFQDDRVGGLQLLKDGEWVDVPPMRHAVVVNLGDQLEVITNGRYKSVMHRVVAQPSGNRMSIASFYNPGSDAVIFPAPALVKAE

SEQ ID NO: 48392 - protein, 320 aa, Zea mays
  Clone ID: LIB3591-069-A4_FLI.pep
TWLEDTLLKPGTVVSDGLALSFLMASTEGFRLVRCPKCLNILPEPPNVTVYKCGGCGTTLRAKTRASGGQQVAATAKQGRQDSDSYSVATAVSSGVPRQNRDQGSIGAVTESSFDADVASAEHGSNGARSGENGGGMLAGQNVHFEGQDNNTSSRMEGPAGQTRLNANATYLDSGGTENHTVQQTAEKCRVSGHVDDTECHLNTSEDEMFPSETSKAAVGMQDPGQKKEAGGTEHAANKKSHLVRALSRSCDLGSSMNLTDFHSARASLQSKSFRASAPLQSKIMSTVDELKGDLSEMFSKPADCKPRPHPHPPRPSKRD

SEQ ID NO: 48393 - protein, 509 aa, Zea mays
  Clone ID: 700095659_FLI.pep
YKCAGHGLVGVAGVYQSTVNAAEGKVTVSGLMDPDTVIRKLHKAGKPAQLWGATAKPAVATQLEKLQLKDAGGKGQGQPPKNAGGKGQPPKNAAGKGQGQGQKQQQPKGGAGGAGAGAKVVALPHSQPTPQQLMQMQQQMQMNGMKFAHPELMAMGAGRMPMPMPFPAAAQAQAQAAAAKDPKTVKFALPGGEEFGDDGSDLDDEFDELDDVDFEDDGLDDDDDGDLYDGPGMVMKPMGMPPAAAAGGGNGNGGGKKGGGGNEVPVQINGNASNGGGAKQNGGGKSGAKNGKGGGGGGGVVAPGGGNQAGQGKPKGGFPGGAGLGGPMMGGAPPPHAGMMMRPPNMMGGAGGFPGMGQMGGHPHMGGGGMPQAGGGAAHGMPAGGSISMAAGGMPGAGFFPRGVGGGMPAGAEMLGMSQLPPQQQQHMAAVMQQQQQHMAAIMQQQQQQMMMMNGHGHGHGHHGHGGYGYGRPAMPQYPPPPAYYYPMPQRHPHDSMFSDENPNGCSVM

SEQ ID NO: 48394 - protein, 640 aa, Zea mays
  Clone ID: LIB3608-032-G6_FLI.pep
GLYIYRWFEVIGRTTQAKMASVHKATTLVLMFCLLALGRAEYLKYKDPKQPVAVRIKDLLGRMTLAEKIGQMTQIERENATADALAKYFIGSVLSGGGSVPAPQASAQAWAAMVTEMQKGALSTRLGIPIIYGIDAVHGHNNVYKATIFPHNVGLGATRDPDLVKRIGEATALEVRATGIPYAFAPCIAVCRDPRWGRCYESYSEDPKVVQSLTSLISGLQGDAPADSAGRPYVGGSKKVAACAKHYVGDGGTHNGINENNTIIDTHGLLSIHMPPYYNSIIRGVSTVMVSYSSWNGVKMHANHFLVTDFLKNKLKFRGFVISDWEGIDRITTPPHANYSYSIEAGVGAGIDMIMVPFRYTEFIDDLTTQVQNKVIPMSRIDDAVYRILRVKFTMGLFENPYPDSSLAGELGKQEHRELAREAVRKSLVLLKNGKSSYAPLLPLPKKAGKILVAGSHANDLGNQCGGWTITWQGSSGNTTAGTTILSGIEATVDPSTQVVYSESPDSGVLADKYDYAIVVVGEPPYAETFGDNLNLTIPAPGPSVIQSVCGAAKCVVVLISGRPLVVEPYLGDMDALVAAWLPGSEGQGVADVLFGDYGFTGKLPRTWFKSVDQLPMNVGDAHYDPLFPFGFGLTTKGTK

SEQ ID NO: 48395 - protein, 419 aa, Zea mays
  Clone ID: LIB3689-206-A1_FLI.pep
AGRCTRMGCGASSQKDAGAPRRRPVSVGDVVVFLPGLRVPRAVDLAQALGGCLARSAVDRLSALRSRVVDMAMRESAAALKPRRRAAARHGSSTANLLQALEDYLPALLGLVKEGSVLRNKVHFTWSNQEDNAEETAMPDAWYEVLSMLHLMAMVCLLQANALLLPRSYGDGYAPRVSEESRRATVDVFLKAAGYLDCAVRHVLPKMPLELRRQLPVDLAEGNLKALSLQALGQGVDMQLGLAIDSPKATLAVKRRLACEMVKYWQQVQESIPELPISDGWGKKHRLFIKWKYVEAKAAAYYFHGLILDEGNTEKSHGMAIAALQASEEFLKESKRVSEAFHATPPTSRSPNPFGTAKYLFDKIPRDASSKVRINQDLYTQEKVIGAPPPLPDFALALTPEEYDLPPLDPLWNKEDTSH

SEQ ID NO: 48396 - protein, 714 aa, Glycine max
  Clone ID: 700847733_FLI.pep
GAEGQSWSFEMGNGSRSYSANRSDYKLLEEVGYGASATVYRAIYLPYNEEVAVKCLDLDRCNINLDDIRREAQTMSLIEHPNVVRAYCSFVVERSLWVVMAFMAQGSCLHLMKAAYPEGFEEAAIGSILKETLKALEYLHRHGHIHRDVKAGNILLDDNGQVKLADFGVSACMFDTGDRQRSRNTFVGTPCWIAPEVLQPGTGYNFKADIWSFGITALELAHGHAPFSKYPPMKVLLMTIQNAPPGLDYDRDRKFSKSFKEMVAMCLVKDQTKRPSVEKLLKHSFFKQAKPPELSVKKLFADLPPLWNRVKSLQHKDAAQLALKKMPSAEQEAISQSEYHRGVSAWNFDIDDLKAQAALMQDGDDIAEMREEDENKFFSSYKGTADSQFIVDEKNSNNLQQYEFTSQVGSNDIPQCEKRNGSVAEATPSTLENDVGTSKVKTQSVKLGKTQSGPLMPGLVLGHSSSERGRTFERFENENQLAGEKSNRDIRRAPSFSGPLMLPNRASANSLSAPIKSSGGFRDSLDDKSKANLVQIKGRFSVTSENLDLVKDIPVSSVSRRSSQGSPMRKSASVGDWMVDYKQMPIGQSSNDSANINIPASLLVPHLHNLFQQTSIQQDLIMNLLNSLQTAEAIDTSQNGKLPPLPRNSENNGSADTAVSEREQLLLGKISELQSRMINLTDELTYEKLRYVQLQQQLTGLYSQEQNGEREEFA

SEQ ID NO: 48397 - protein, 162 aa, Glycine max
  Clone ID: 700851887_FLI.pep
MMFSLMDISEEKTKWVGASNISGAVQLNFYPSCPEPNRAMGLAPHTDTSLFTILHQSRITGLQIFKEGKEWVPVHPHPNTLVVHTGDLLHIISNARFRSALHRVTVNSTRERYSVAYFYSPPLDYVVSPLVDSVARFRDVTVKEYIGIKAKNFGEALSLIST

SEQ ID NO: 48398 - protein, 201 aa, Glycine max
  Clone ID: 700851941_FLI.pep
SSNSNCFDDVWTLSVVDQLMCRIPGCKFLVVSRPKFQTVLSYEMELLIEEDALSLFCHHAFGQKSIPLAANENSVKQVVTECGRLPLALKVIGASLRDQTEMFWLSVKNRLSQGQSIGESHEINLIDRMAISINYLPEKIKECYLDLCCFPKDKKIPLDVLINMWVEIHGIPETEAYAIVIELSNKKFPHLIERGSCCRHV

SEQ ID NO: 48399 - protein, 241 aa, Glycine max
  Clone ID: 700851947_FLI.pep
YDLAALKYWGPTATTNFPVSNYSKEVEEMKHVTKQEFIASLRRKSSGFSRGASIYRGVTRHHQQGRWQARIGRVAGNKDLYLGTFATEEEAAEAYDIAAIKFRGANAVTNFEMNRYDVEAIMKSSLPVGGAAKRLKLSLESEQKALPVSSSSSSSQQQNPQCGNVSASINFSSIHQPIASIPCGIPFDSTTAYYHHNLFQHFHPTNAGTAASAVTSANANALTALPPTAAAEFFIWPHQSY

SEQ ID NO: 48400 - protein, 309 aa, Glycine max
  Clone ID: 700852282_FLI.pep
TTDANSGKLVMFSGEPDFSSGAHALLNKDCELGRGGFGAVYQTVLRDGHSVAIKKLTVSSLVKSQEDFEREVKKLGKIRHQNLVELEGYYWTTSLQLLIYEYVSGGSLYKHLHEGSGGNFLSWNERFNVILGTAKALAHLHHSNIIHYNIKSTNVLLDSYGEPKVGDFGLARLLPMLDRYVLSSKIQSALGYMAPEFACKTVKITEKCDVYGFGVLVLEIVTGKRPVEYMEDDVVVLCDMVRGALEEGRVEECIDERLQGKFPAEEAIPVMKLGLICTSQVPSNRPDMGEVVNILELIRCPSEGQEELA

SEQ ID NO: 48401 - protein, 354 aa, Glycine max
  Clone ID: 700852922_FLI.pep
PDVIMGQGTIGMEIVRQMQGPIYAIFVPVGGGGLIAGIAAYVKRVNPEVKIFGVEPTDANAMALSLHHDQRVILDQVGGFADGVAVKEVGEETFRICKELIDGIVLVSRDSICASIKDMFEEKRNILEPAGALALAGAEAYCKHHGIQGKNIVAITSGANMNFDKLRVVTELANVGRKQEAVLATVMAEEPGSFKQFCELVGQMNITEFKYRYNSNEKAVVLYSVGVHTISELRAMQERMESSQLKTYNLTESDLVKDHLRYLMGGRSNVQNEVLCRLTFPERPGALMKFLDSFSPRWNISLFHYRGEGETGANVLVGLQVPKSEIDEFHDRANKLGYDYKVVNNDDDFQLLMH

SEQ ID NO: 48402 - protein, 522 aa, Glycine max
  Clone ID: 700853357_FLI.pep
AAKPEEQEKFNFDFVLPKSADIGNTNTPGRQASPLYIQRMSSSQDKSRTSQSGRISFKGLKGRSLSSAEEKSIVEPEVLMTKEIEWSNNLEHSLRERDIRQGIDLATTLERIEKNFVISDPRLPDNPIIFASDSFLELTEYTREEILGRNCRFLQEPETDQATVSRIRDAIREQREITVQLINYTKSGKKFWNLFHLQPMRDQKGELQYFIGVQLDGSDHVEPLKNRLSETTEQQSAKLVKATAENVDEAVRELPDANLRPEDLWAIHSQPVFPRPHKKENPSWIAIQKVAARGEKIGLQHFVPIRPLGCGDTGSVHLVELKGTGELYAMKAMEKSVMLNRNKVHRSCIEREIISLLDHPFLPTLYTSFQTPTHVCLITDFFPGGELFALLDKQPMKIFKEESARFYAAEVVIGLEYLHCLGIIYRDLKPENILLQKDGHVVLADFDLSYMTSCKPQVVKQAIPGKRRSRSEPPPTFVAEPVTQSNSFVGTEEYIAPEIITGAGHTSGIDWWTLGKHFHPFV

SEQ ID NO: 48403 - protein, 519 aa, Glycine max
  Clone ID: 700862952_FLI.pep
SHNMASLACNTFIVSSTLRSVVTRAEPPKPGPLFDLSSFNRHSFPAGFTFGASSSAYQFEGAAKEYGRGPSIWDTFINQHPGKIADGTNGDRALDQYHRYKEDVQIMKGMNLDAYRFSISWSRILPNGKLSGGINREGINYYNNLIHELQTKGLKPFVTLFHWDLPQALENEYKGFLSESIIDDFGDYAKFCFEEFGDRVKHWITFNEPHIFSSHGYAYGTKAPGRKSQGLRPDSGGTEPYRVSHNILLAHAKAVQLYRNSYKESQNGEIGITLDSRWFVPYSDASSDIEATERALDFEIGWFMEPLTSGKYPESMQLYVGRRLPEFSKEEAELVRGSFDFIGLNYYTTNTARVATGYTDSVHHHPDLSTDPNVELGLTRLNGSSPIGPVPGLGWLCVYPKGIRELLLRIKNLYNNPLIYITENGINELDDPTLSPEESLMDFYRIDYHYRHLLNVDYAIRDGVRVKGYFVWSLLDCFEWSNGYIPRFGLIFVDHKNNLNRSPKLSAKWFRKFLQNRLL

SEQ ID NO: 48404 - protein, 233 aa, Glycine max
  Clone ID: 700846427_FLI.pep
VKGEKADPLKVLERIQRKSHRQVELLSPIPKPQEEKKVQEEEKPKPTPEEKKEEAQIVMTVLKVGMHCEACSQEIKRRIQRMKGVESAEPDLKNSQVSVKGVYDPAKLVEYVYKRTGKHAVIMKQEPEKKEKVEEAKEEEMKSDGEGEENKEKKEKEEAKGEEAKAEEPTTPTITEDTNKVVPEVKINEYFYNPPRYGMEVYAYPAHPAHPGYFHSYPPQIFSDENPNACTVM

SEQ ID NO: 48405 - protein, 180 aa, Glycine max
  Clone ID: 700792717_FLI.pep
ANSNILRDDSGHLKVADFGVSKLLAVKEDKPLTCQDTSCRYVAPEVFRQEEYDTKVDVFSFALILQEMIEGCPPFSAKQDDEVPKVYAAKERPPFQAPAKRYSHGIRELIEECWNENPAKRPTFRQIITKLESIYNTIGHKRHWKVRPLKCFQNLEALLKRDHSNGSSRGGSSRSTSSRI

SEQ ID NO: 48406 - protein, 316 aa, Glycine max
  Clone ID: 700838612_FLI.pep
RVKNWMTFNEPRVVAALGYDNGFFAPGRCSKEYGNCTAGNSGTEPYIVAHNLILSHAAAVQRYRAKYQEKQKGRIGILLDFVWYEPLTRSKADNFAAQRARDFHIGWFIHPLVYGEYPKTIQNIVGNRLPKFTSEEVKIVKGSIDFVGINQYTTFFIYDPHQSKPKVPGYQMDWNAGFAYAKNGVPIGPRANSYWLYNVPWGMYKSLIYIKERYGNPTVILSENGMDDPGNVTLPKGLHDTTRINYYKGYLTQLKKAVDDGANVVGYFAWSLLDNFEWRLGYTSRFGIVYVDFKTLKRYPKMSAYWFKQLITKKKY

SEQ ID NO: 48407 - protein, 97 aa, Glycine max
  Clone ID: 700808407_FLI.pep
CTRASFSLLEKWLFGFVVFMLQGASATTRAKVLPWHKVGGRALLFMAVCAAETGLMEKSSFLTNLKLLHERESNLINFTGLAILLFGVFVNFSVGFS

SEQ ID NO: 48408 - protein, 302 aa, Glycine max
  Clone ID: 700872524_FLI.pep
NHSHSSRIIKAINGLDLATSWKMKQATLFFFSLFLLLSSTTMAISPAPAAAPKATAKTPPTPKATAPSPKPLVPTIPQSPDSPDSVPDDITRILKKAKMFSVLIRLLKTTEIMNNINSQLITAKSGGITILAPDDSAFSNLKAGFLNSLNEGQKIELVQFHILPEFVSSSNFDSLSNPVQTVAGKDPARLPLNVNALGNSVNISTGVVNATVLGVVYSDNKLGIYHVDKVLLPLDFFITNKAPASAPSTLAKSPKAAKDNSSEDDQEETNQHQNKSGAVSVVSIGGATLMSLAIALVATMLS

SEQ ID NO: 48409 - protein, 96 aa, Glycine max
  Clone ID: 700846578_FLI.pep
VDGGATVNNLLMQIQADLVGCPVIRPADIETTALGAAYAAGLATGIWKEDFIFNTEEKLKNARVFRPVMTEEVRKKKVDSWCKAVSKTFDLADLAL

SEQ ID NO: 48410 - protein, 198 aa, Glycine max
  Clone ID: 700846795_FLI.pep
KNMRALVGSRLPKFTKWQAKLVNGSFDFIGLNYYSSGYINGVPPSNDKPNFLTDSRTNTSFERNGRPLGLRAASVWIYFYPRGLLDLLLYTKEKYNNPLIYITENGMNEFNDPTLSVEEALMDIYRIDYYYRHFFYLRSAIKAGANVKGFFAWSFLDCNEWFAGFTVRFGLNFVDYKDGLKRYPKLSAQWYKNFLKRN

SEQ ID NO: 48411 - protein, 189 aa, Zea mays
  Clone ID: LIB3078-014-G6_FLI.pep
PKISPLTKQSSHRTQRSLDLDLDLAVAMASKQTRRLLVLAAVAVCLLLPAASVATDVDYCSKKEYPVKVSGVQIVPDPVEPGKPATFKISASTDKTIEKGKLVIDVKYFFFYVHSETRDICGEISCPATGDFVLSHEQTLPGFTPPVRFPRSQRVVHDLHEDGRGRRRGAELHLVRLQHWVRRLQLKPA

SEQ ID NO: 48412 - protein, 305 aa, Zea mays
  Clone ID: LIB3076-027-H9_FLI.pep
LEKVPVKNADLYVVYVKAGTYKEYVTVGRPQTNVAFIGDGAEKTIITGNKNFKMNLTTKDTATMQAIGNGFFMRDIRVENTAGPENHQAVALRVQSDLAVFYQCTFDGYQDTLYTHAQRQFFRDCRVTGTIDFIFGNSQVVLQNCLIQPRKPMANQANIITAQGRRDKRSVGGTVLHNCTIEPHPDFKEEAGGKIRTYLARPWKEYSRTIYIQNDIGGFIDPKGWLEWNGDFGLETLFYAEVDNRGDGADMSKRAKWGGIKTVTYEEAQKEFTVETFIQGQQFIPKFGVPFIPGLLPQEQKGRTH

SEQ ID NO: 48413 - protein, 240 aa, Zea mays
  Clone ID: LIB3075-019-G2_FLI.pep
ISLKLWNSKCEILIAFAPFVVVMAAFVAFIIWNGGIVLGAKEAHVVSPHFAQFLYFGLVSAAALLPWHFTPNRVLDLFHLSGKNKTCGSLAVLMGLGLSFVAVHFFSIAHPYLLADNRHYTFYIWRKVIQVNWMMKYMLIPLYVYSWLSIINILGKSQTRIWVLSFVLSVALVLVPAPLVEFRYYTIPFVILVLHSPSIGNGKLLAMGSLYAAVDLSTLVMFLFRPFRWEHEPGTQRFMW

SEQ ID NO: 48414 - protein, 112 aa, Zea mays
  Clone ID: LIB3078-046-D11_FLI.pep
AMKQLKLELSAHKSHIDMLGSRLEQVTNDVHSQYKNEIQDLRDVVSVEQEEKKDIHRKLQNVENELRITRMKQAEQQRDSVSVQHVETLKQKVMRLRKENESLKRRLASSEV

SEQ ID NO: 48415 - protein, 171 aa, Zea mays
  Clone ID: LIB3075-027-A3_FLI.pep
LYYALLHVGLAGSPRNPFLSHEIGGEDGAGDSDLGFSKWAEKLRGGASGEKDAQHKRKLTSKWKPTTKGTLKRTYRVRSTDEGRRILKEIASVLSQDDHFVDASSHKGCQIRRESAHGESVCCYNVRALFDELPTPHLLLEITPFPAGQLTDNDYRKAERLEMVLRLSTSI

SEQ ID NO: 48416 - protein, 173 aa, Zea mays
  Clone ID: LIB3075-027-E11_FLI.pep
TRLFMICIKTRRQHHKQKKFRCPNCSYISSSALLVKCSNLLGKPQMQKHNFKPRSKSRVSLKHVTHLVRLDILLHYVKALRFFTVVLDDDTGAAYNLPCLALRVNLAKPSPLAKGLSGRNSDQVNIVLRAECLHQLDIIWLVTVLSKHAKLSGVLLDGLGSLTETLHKSIMST

SEQ ID NO: 48417 - protein, 70 aa, Zea mays
  Clone ID: LIB3075-047-E2_FLI.pep
LSSKHHRKCIHTLPSFLVRPTKHTIRIHIGSCLDTITPFCKAATSFGFIEIHQVEQHQNHSRLELKAYKP

SEQ ID NO: 48418 - protein, 528 aa, Zea mays
  Clone ID: 700571529_FLI.pep
VSPHGYFGQANVLGLPDTGGQIVYILDQVRALENEMVLRLKKQGLDVSPKILIVTRLIPDAKGTSCNQRLERISGTQHTYILRVPFRNENGILKKWISRFDVWPYLETFAEDAAGEIAAELQGTPDFIIGNYSDGNLVASLLSYKMGITQCNIAHALEKTKYPDSDIFWKNFDEKYHFSCQFTADIIAMNNADFIITSTYQEIAGSKNTVGQYESHTAFTLPGLYRVVHGIDVFDPKFNIVSPGADMSIYFPHTEKAKRLTSLHGSIENLIYDPEQNDEHIGHLDDRSKPTLFSMARLDRVKNITGLVEAFAKCAKLRELVNLVVVAGYNDVNKSKDREEIAEIEKMHELIKTHNLFGQFRWISAQTNRARNGELYRYIADTHGAFVQPAFYEAFGLTVVEAMTCGLPTFATLHGGPAEIIEHGVSGFHIDPYHPEQAANLMADFFDRCKQDPDHWVKISGAGLQRIYEKYTWKIYSERLMTLAGVYGFWKYVSKLERRETRRYLEMFYILKFRELAKTVPLAIDQPQ

SEQ ID NO: 48419 - protein, 126 aa, Zea mays
  Clone ID: 700573051_FLI.pep
PSRSPPATAAPSPATASLRRAGSSARPSRAPSSSYYYSIDECDCEQERRRNLLRCSKEEAPAIPRLLIISTRLGISFSYYYHRIELFIFCTSDCSNGLSKTKTCKAIYCRAAGEWCRATYCVVTLY

SEQ ID NO: 48420 - protein, 533 aa, Zea mays
  Clone ID: 700573388_FLI.pep
YNWGYNPVVWGVPKGSYASNPDGPSRIIEYRLMVQALNRLGLRVVMDVVYNHLYSSGPFAITSVLDKIVPGYYLRRDSNGQTENSAAVNNTASEHFMVDRLIVDDLLNWAVNYKVDGFRFDLMGHIMKKTMIRAKSALQSLTIDEHGVDGSKIYLYGEGWNFGEVAENQRGINGSQLNMSGTGIGSFNDRIRDAINGGSPFGNPLQQGFSTGLFLEPNGFYQGNETETRLTLATYADHIQIGLAGNLKDYVVISHTGEARKGSEIRTFDGSPVGYASSPIETINYASAHDNETLFDIISLKTPMDLSIDERCRINHLSTSMIALSQGIPFFHAGDEILRSKSLDRDSYDSGDWFNKIDFTYETNNWGVGLPPREKNEGSWPLMKPRLENPSFKPAKHDIIAALDKFIDILKIRYSSPLFRLTTASDIVQRVHFHNTGPSLVPGVIVMSIEDARNDRHDMAQIDETFSCVVTVFNVCPYEVSIEIPDLASLRLQLHPVQVNSSDALARQSAYDTATGRFTVPKRTAAVFVEPRC

SEQ ID NO: 48421 - protein, 459 aa, Glycine max
  Clone ID: 700889087_FLI.pep
LSGLDHCHSRGVLHRDIKGSNLLIDNNGILKIADFGLANFIDPHHKVPLTSRVVTLWYRPPELLLGASNYGVAVDLWSTGCILGELYRSRPILPGKTEVEQLHRIFKLCGSPSEDYWCKLRTPHSTVFRPPHHYRRCVAETFKEYPSAATRLIETLLSLDPTLRGTAAAALKSEFFSSEPLPCDPSSLPKYPPSKEIDTKLWEEATRHGADREKEQKFRPGGRQEKEPQTFILSKDSADSCISMQQGQRLPNSRSRNEFFNPHREPVSGHLVFPQKQSEDHKETLNYFSGPLYQRPLHSGPLVPGYGCEMVGREAGERRPHVSNKVNLPKLSGLVASRTSSLSGDQKENPVPSRPRETIEVQISLESTNGSESRRRHDTKHHSQRIDPRKIENGKVSTETLIQDGHGSMGNNIYHLSGPLLVSSNNIDQMLKERDRKIQEYSRRARMYKSGEIAHAKQN

SEQ ID NO: 48422 - protein, 114 aa, Glycine max
  Clone ID: 700873248_FLI.pep
YISWIYLRYWQRKPETKHRGDLSEDFAFSTFFPEFLRPVIDPIASIFHRMLCGRYDASNDGQGNSLESEPLPGSDSIEASRRRERGARALEERLAAERLAVARRELQREAEENV

SEQ ID NO: 48423 - protein, 329 aa, Glycine max
  Clone ID: 700751793_FLI.pep
GFQLPSNYPCNAVRFPGPTMEPSAMYGPSQPLNIPSRIGAGERDDGSGNEPAVDGHHHHIQYETHALDDGAAGGAVVVEDVTSDAVYVSGGGGPEESSQLTLSFRGQVYVFDAVTPDKVQAVLLLLGGCELSSGGSPCVDPGAQQNQRGSMEFPKCSLPQRAASLDRFRQKRKERCFDKKVRYSVRQEVALRMHRNKGQFTSSKKQDGANSYGTDQDSGQDDSQSETSCKHCGTSSKSTPMMRRGPSGPRSLCNACGLFWANRGALRDLSKRNQEHSLPPVEQVDGGNDPDCRTAAADPAQNNLAAFSEPVNPALVADRKVFQSQKMLE

SEQ ID NO: 48424 - protein, 171 aa, Zea mays
  Clone ID: LIB3068-001-A10_FLI.pep
FEFSTSSCIYKTLERYRSCSFASEASAPLEAELNNYQEYLKLKTRVEFLQTTQRNLLGEDLGPLSVKELEQLENQIEISLKQIRSSKNQQMLDQLFDLKRKEQQLQDANKDLRMKIEETSEENVLRLSSQDIGCSGSSGHGDEANQEHLQLALDPSLHIGYQAYMDHLNND

SEQ ID NO: 48425 - protein, 225 aa, Zea mays
  Clone ID: LIB3067-028-F9_FLI.pep
TLPTLSRCLVELEGLHHLPGEVGVVTAEVAVGGGLDEPVAALLQVEVDADHPGPEVEVLLHDLEDLLVGDRAGAVRVDEHGQGLRHADGVRHLHEAAAGEAAGHDALGGLPGHVGAAAVHLGGVLAGEGATAVGSPAAVRVDDDLAAGEAGVAVGPADDEAPGRVEVEDGLLVEVLLRDHGLDDVLLEVGGDLVVGDGLVVLGGDEHGVHADGHHGAALVHVLHR

SEQ ID NO: 48426 - protein, 312 aa, Glycine max
  Clone ID: 700757460_FLI.pep
VPGGTAVLPSTALMLSVPAQIAGCKTIVLATPPAQDGTICKEVVYCAKKGGVTHILRAGGAQAISAMAWGTETCPKVEKIFGPGNQYVTAAKMILQNSEAMVSIDMPAGPSEVLVIADKHAIPRHVAADLLSQAEHGPDSQVVLVISGEGVDLNVIEEELNKQCQSLPRGEFAAKALSHSFIVYAHDMLESIKFSNLYAPEHLIVNTNDAEKWEGFIENAGSVFLGPWTPESVGDYASGTNHVLPTYGYARMYGGVSLDSFLKFITVQSLTEEGLRKLGPYVVTMAEVEGLDAHKLAVTLRLEDIEVRQVST

SEQ ID NO: 48427 - protein, 36 aa, Zea mays
  Clone ID: LIB3069-006-B3_FLI.pep
LPGVSVTLESCSCYCLCTDCVTPLLCKNQSSKFTSV

SEQ ID NO: 48428 - protein, 416 aa, Zea mays
  Clone ID: LIB3069-037-A12_FLI.pep
SFRQGIYQEAIIFSSTKNAQLPDGQVPVPAQLVPSNPVLNSEVSPATVSQGPPDHPPGARPSPHSGVANGKQTPRNPVATSPSQDDRSGAGKENQSCSNTPSTSSRQSPSQQKTPKSRATPPPDRRRVTPAQTSPAIAPDRKRPADAAAGTGSNSDKVTTSHDDASSSVPNKVSEELLRCLLAIFSQMGGSAAGGGRGLGDEDQQQALSPSVSGSSESSASSEADAYPQDPYGILELGARDIGAYKRFHVVDAASFDGNGDTPLVRRRLKALLRRLSSVDLAGLSHQQKLAFWINVYNSCMMNAFLEHGIPTTPQMLVAMMPKATVSVGGRTHSAMSIEHFILRLPYSAKQVKVSREGAKCDDGDVTAARGAFGLEWPEPLVTFALSCGSWSSPAVRVYTAARVEEELEAAKREYL

SEQ ID NO: 48429 - protein, 191 aa, Zea mays
  Clone ID: LIB3069-049-F2_FLI.pep
NHQTRTGFSSNAQTAQKPRPHLSTGQCSQNKRGTNLMLIYSPPHSNMHFIEHLVHSKTELTERRGGPRLQPPRYPRRRWLREARGGGAGGRRAPRRGRGAARSRRPARGQRPRAAPLRSRRCGGAPRTGAARAPLRRPRRESRRSGGDPVSASARVAGGGRRGGARPWRSGAWPLALAWSPPWPMLLHRLA

SEQ ID NO: 48430 - protein, 341 aa, Zea mays
  Clone ID: LIB3068-021-G2_FLI.pep
RDRERDCQRGEAAGQSSIRARGLRAERQGAMAASVALSSGHRMPAVGLGVWRMEKADIRGLIHTALRVGYRHLDCAADYQNEAEVGDALAEAFQTGLVKREDLFITTKLWNSDHGHVLEACKDSLKKLQLDYLDLYLIHFPVATRHTGVGTTSSALGDDGVLDIDTTISLETTWHAMEELVSMGLVRSIGISNYDIFLTRDCLAYAKIKPAVNQIETHPYFQRDSLVKFCQKHGICVTAHTPLGGSTANAEWFGTVSCLDDPVIKSLAEKYGKTPAQLVLRWGLQRDTVVIPKTSKAERLQENFDVFGFDISGEDMERMKAVDRKYRTNQPAKFWGIDLYA

SEQ ID NO: 48431 - protein, 344 aa, Zea mays
  Clone ID: LIB3068-023-C12_FLI.pep
LVRVMRSCPAGADAVVVGGGYIGMECAAALVANRMKVTVVFPGKHLMANLFTPKIAEFYENYYESKGVTFIKGTAVSSLQISSGKVTAAILRDGRRLPADMVVVGIGARANTELFEGQLAMEKGGIKVDGQMRTSDASVYAVGDVAAFPVKLLGGEVRRLEHVDCARMTARHAVAGALEPLGPITGEINYVPFFYSRVFALSWRFYGDNAGEAVHFGDLDFSASPSPPSAPKFGALWVRAGRVTGAFLEGGSPEEYEALARAVRRRTTVPDVAVLLARWGLAFIVQDQEGRSGATRSGRLCGSGNTSNYAWAWHATVGVAAAVSIAAFAYWYGWKAPYLAKRHF

SEQ ID NO: 48432 - protein, 212 aa, Zea mays
  Clone ID: LIB3068-039-D12_FLI.pep
RHGWFLTQFGNDRICDFLGGAGAAQIFGSVLAFCNDTLNCRLQPVSKRWELQVPQHHGRRQQQCNRVSSLLLHNFLISNISCRSTLLEDSMVLPHITSRHDTSASSNTCSYISHQIAIKIWGDHNIKLFRLCNKLHATVVHNDFIILNSRVLLCNLTARLQEQTISKLHDVGFMHCCHFLSIVKVCILKSILGNSFRAELCYHLANQQSDSK

SEQ ID NO: 48433 - protein, 403 aa, Zea mays
  Clone ID: LIB3068-059-A10_FLI.pep
AGAQRLDDVLHVHLDAVDAAGGEVRVELAVEVPHPARVHQAQPQDGQRVHDDVRLVARHARGLHGVGQRRLVALHRRPRRRRHAAPVPGHGVPHVHLLHAVRVLGLGHQSLQPARRLLAAAVAVSVGLGLELGVLLDPGQPAGELRALLDGDVGVGLVLGGDLLPAVVDDEEPRRRAALGQALKAVLDAVGGDVGVEGVPGAPAEPVEERRQLLLVAVVERLQVLLHRLDGGGDGVEGVVAGVEVHHVRGLVRLHRLVPALDADLQLVAVVPLQRRPKLPLQQRKHHHVRGGVVAAAVTGRDLDEHELGLQRDVAAGDAHPLRHPPQLEPEQAQEPAVPDRAEGEDVVALGLAGVGADEGPVDEPRPGRVRRRHVVRHAGEHRTAAHRQPPVAHRDPWRHRHL

SEQ ID NO: 48434 - protein, 829 aa, Zea mays
  Clone ID: LIB3069-008-C10_FLI.pep
DSDHISKRTRPVGMSEEMNLPVNMLPVTYPQSHNYQQDDFHKAVARTLSQGSAPMSMDFHPLQQTLLLVGTNVGDIGLWDVGTKERLVVRNFKVWDLGKCTMTLQAALVKDPAVSVNRIIWSPDGTLFGVAYSRHIVQIYSYNGGDDIRQHLEIDAHVGGVNDIAFAHPNKQLCIITCGDDKTIKVWEATSGAKQFTFEGHEAPVYSVCPHYKENIQFIFSTALDGKIKAWLYDNLGSRVDYDAPGHWCTTMAYSADGSRLFSCGTSKDGESHLVEWNESEGAVKRTYQGFRKRSMGVVQFDTTRNRFLAAGDEFMIKIWDMDSTGLLTTIDADGGLTASPRIRFNKEGTLLAVSTADNGIKILANADGLRLLRTLENRSFDASRNASEAVTKPLINPLTAAANAAAASSSGAGAPSAITAMNGDSRSLVDVKPRIADESLDKSKVWKLMEITESSQCRSIKLADNMRTSKISRLIYTNSGLAILALTSSAVHLLWKWPRSDWNSGKATASVSPTLWQPPSGILMTNDTTDNNPEEAVHCFALSKNDSYVMSASGGKISLFNMMTFKTMTTFMPAPPAATFLAFHPQDNNIIAIGMDDSTIQIYNVRIDEVKSKLRGHSKRITGLAFSNVLNVLVSSGADAQLCVWNTDGWEKQKNRFLQIPSGRQSNILDTRVQFHQDQMHFLVVHETQIAIYETTKLEPVKQWPVRENSPPITHATFSCDSQLIYASFMDATVGIFNGSSLRLQCRILPASYLPPNISPSVHPVVVAAHPSEASQFALGLTDGGVFVLEPLESERKWGNPPPVENGSASNLSTPPPNGASSSDQPER

SEQ ID NO: 48435 - protein, 313 aa, Zea mays
  Clone ID: LIB3069-028-D8_FLI.pep
GRKEEMTSLSITVMTLNLHEGEQPSESPNSWEKRRDICVSVITSYSPTILCTQQGLRWQLDYLQQCLPGYEQFGISRKGSQDNTDEYCTIFYEKEKVELTEGGTFWLSESPSVPGSISWGANAPCIATWATFQLKRLEPPGFSFQIVNTNLDEVSPRARRRSALLTWQHIASLAPNLPVIYCGGFNTQKESMTGRFLLGRSREHGVVGDMRDAWPNARVRKNVSIIHTYHGFKGEKKGALEFLKLIFRALCLCWDRQTQDLHVDWILFRGRPLVPALCEVINDNIDGVYPSSHFPIFAEFLLPRSVRLAETPS

SEQ ID NO: 48436 - protein, 214 aa, Zea mays
  Clone ID: LIB3069-028-F3_FLI.pep
FFQFQHGGSGDKAADAVGAVRAGPAVLERPGPGSPRRRGQQDGEHPRSSRNPNRFVGDGLHAVVAVELPDAAADGHGLAEHRGRRVRHREDAVHAAAGDHRQHSSTTMHRRLPGVRVRVRGPLRAATAAAGAPAVRTRRRHLPRQPRVPAGRTVQRHQPSNGADVPGVGPGEQSDALRRRCPRRVVPAGMIRRATTTHHGVRATHRRSIHRGSS

SEQ ID NO: 48437 - protein, 57 aa, Glycine max
  Clone ID: 700792528_FLI.pep
SFQVSNQEAVDTARSFLVGNNKSQPLLLACKKLVDLSVSRGSLDDTSVMLIKLEHYI

SEQ ID NO: 48438 - protein, 372 aa, Zea mays
  Clone ID: 700201128_FLI.pep
APLPCLCVRVMSAAGVISGALLYIRDDFVSVDRNTWLQEMIVSMAVAGAIIGAAIGGWTTDRFGRRASILVADSLFFAGAAVMASATRPAQLVVGRVFVGLGVGMASMTSPLYISEASPARIRGALVSTNGFLITGGQFLAYLINLAFTKAPGTWRWMLGVAALPAVVQFGLMLALPESPRWLYRQGRAEEAEAILRRIYSAEEVEREIEELKESVAAERGSSEKLSLVALVRTATVRRGLVAGVGLQVFQQLVGINTVMYYSPTIVQLAGFASNQTALALSLVTSGLNALGSVVSIYFIDRTGRRKLLVISLVGVILSLGVLTAVFHETASHSPAVSATETARFDASLTCPSYRPSSPASGGASWDCTRCL

SEQ ID NO: 48439 - protein, 333 aa, Zea mays
  Clone ID: 700097373_FLI.pep
SRPLLMAVHTQYLSHAFPYDHSTIRPALDNARNASVFISSAVVTRSRPNSVLSDLTGNNNNSNGCFLPRKRARVGDLAGATLNLDMQGQRALLPLVSAPVPLPLPAGDVQNRLLCSASASTSGHPTPSVAPVSQGLLSHLYRHGVEIDALVRIEKERLRAGLQEARRRHFRTVVLAAERAAARRLRAAEAELERAMLRNVALEETLRHTGAEGQAWQDIARRHEGVAAGLRATLDNLTQMQSPCAGAEAAGAAADGDAEDAQSCCFELEQEQGEGAEAYGGRARACRSCGQAEACVLLLPCRHLCLCRGCEAGVWACPVCAVTKNASLHVLLN

SEQ ID NO: 48440 - protein, 76 aa, Zea mays
  Clone ID: 701181696_FLI.pep
GLVFSEDSAMAATIQSVKARQIFDSRGNPTVEVDVFCSDGTFARAAVPSGASTGVYEALELRDGGSDYLGKGVSKA

SEQ ID NO: 48441 - protein, 404 aa, Zea mays
  Clone ID: 701184321_FLI.pep
GVVVVRGATAEDVRHGRRAGAPDEHVEVLALGLPVRRRLPGALGRRGHGRVRRGVVSRRRRRPRPGRRIHHGERVLGLGRVVLVVGRARRGAGADAERVGRAEVGAAADHGVEVVVVEAGAPRGRVARRLQRVDLGVGQVAGARRGAGEAHGAARVDVGARGVGAAHGDVYPAVLLDLGLRLDGVPAAVEGDHVRVDDDGGDGPGVVRELLGDEHPRAAVLEHEEHERVPDDALEHDDLHHEAAGEVAVHALEQGDAHDERVGQRGEGEERDGPLQAAPAAEVAPRGEHGQHHELLQRVGGDEAQVHGVGVVGGDEVEGQQRHREERHEAVDPGALVRREDAPPPHRPVRQDHRHVQRHHGRHDVVEVRPRNHRGALTTLASSLTHQAAPGELNAARYTLRPPR

SEQ ID NO: 48442 - protein, 309 aa, Zea mays
  Clone ID: 700430481_FLI.pep
TNLVSRFIQVYTHRSTTSCRMERTLITSNLSMSAHASRSSRRVHYISPAASAAAHNSSYRKKKKNAPSPPPSAAATDTVVISPPATDNVQSTAPKQAGRQELEELVAAKTNTSRIATARTSASSQSRAKLRRRPAPAITSLPMAFCSALEEAINTFVDPPVLRPSVDPRNVLSTNFAPVDELPPTPCPVVRGAIPRCLAGGAYIRNGPNPQHLPRGPHHLFDGDGMLHSLLLPTAESPSSDPVLCSRYVQTYKYLVERDAGAPVMPNVFSGFHGVAGLARGAVVAARVLTGQMNPAEGVGLANTSLVFF

SEQ ID NO: 48443 - protein, 553 aa, Zea mays
  Clone ID: 700349140_FLI.pep
SAHTRNQISPKSSRRHLRFKMQIFVKTLTGKTITLEVESSDTIDNVKAKIQDKEGIPPDQQRLIFAGKQLEDGRTLADYNIQKESTLHLVLRLRGGMQIFVKTLTGKTITLEVESSDTIDNVKAKIQDKEGIPPDQQRLIFAGKQLEDGRTLADYNIQKESTLHLVLRLRGGMQIFVKTLTGKTITLEVESSDTIDNVKAKIQDKEGIPPDQQRLIFAGKQLEDGRTLADYNIQKESTLHLVLRLRGGMQIFVKTLTGKTITLEVESSDTIDNVKAKIQDKEGIPPDQQRLIFAGKQLEDGRTLADYNIQKESTLHLVLRLRGGMQIFVKTLTGKTITLEVESSDTIDNVKAKIQDKEGIPPDQQRLIFAGKQLEDGRTLADYNIQKESTLHLVLRLRGGMQIFVKTLTGKTITLEVESSDTIDNVKAKIQDKEGIPPDQQRLIFAGKQLEDGRTLADYNIQKESTLHLVLRLRGGMQIFVKTLTGKTITLEVESSDTIDNVKAKIQDKEGIPPDQQRLIFAGKQLEDGRTLADYNIQKESTLHLVLRLRGGQ

SEQ ID NO: 48444 - protein, 282 aa, Zea mays
  Clone ID: 700611374_FLI.pep
SLHNIANMQIILELTRCRGRNSRGGLHKCAPCTAMPNNKIVAANMEEKGAGGKAAVPHDELPRFTIFLIPNRREPPLDLVELVCLHHRISLGNGVPGSSPVVELAVVLVGVAVECAVQVPTPAVESRKSNPLPAGAAPVRPYLPPFGDRRHPLAGSGNISGLLHVHCLQLNLGNSYYRVAASNNRLHDGVAAVHDAVDRGGSQLGLILLRYHLLVALGAHVHGRRAAEEATVIDAEDGSLGGLAPSLLVLHGFLNSDETALFAIPLRRSPRGRRGGEGRGIA

SEQ ID NO: 48445 - protein, 415 aa, Zea mays
  Clone ID: 700342430_FLI.pep
QMQGNLGVRSRASLRVLLPRQLTARARWLQGSGRTGGSEEDEAAVPYVDVPRPGRKWERKPYVTPMKVLIRRAKEERQARRENPCRVLEHPPDNGLVVPHLVDVARRVHAAREGLLGGLTRLVEGAVPVKRCRFCSEVHVGRVGHEIRTCEGRNSGARNSLHVWRPGTVRDVVGFPYCYHLFDRVGKPRVVHKEKYDVPRLPAVLELCIQAGVDVQRYPTKRRTRPVYSIEGRIVDFEPDVDDDEAARTLHEPPACTPSLPPAAVVNGEGEEAEITVPELASRTLQSWLDMKSGAAKLMKKYSVHTCGYCPEVQVGPKGHKVRMCRATKHQQRDGQHAWQEATVDDLVPPNYVWHVADPAGEESPLANELKRYYGKAPAVVELCVQAGAPVPVAYRSMMRLDVVPPARDEYDLVA

SEQ ID NO: 48446 - protein, 106 aa, Zea mays
  Clone ID: 700041743_FLI.pep
GVRSCGPCRSDPGAEGGHPLPWLQEEGPEGAQERRRRAERDGGRLAEQGDCGRHRGRRHAHPEVVQVRQEGRALAVPPAHQEERARAGGPADSAACRWRRQGRRYC

SEQ ID NO: 48447 - protein, 124 aa, Zea mays; identical to SEQ ID NO: 41198
  Clone ID: 700050554_FLI.pep

SEQ ID NO: 48448 - protein, 80 aa, Zea mays
  Clone ID: LIB84-028-G5_FLI.pep
ESDHHTPEARLQAPEPKTHGHGRRHRRSVTARGARAREAPLRRQQRAVAPGRRGRAPSSVGQDQDGRRPGVRAKAALGQG

SEQ ID NO: 48449 - protein, 399 aa, Zea mays
  Clone ID: LIB83-006-E4_FLI.pep
ESVASGVQLTGGCWVSEGASVVVRALHDDYGDGLLPRHDGRGAAVRGDDPGLRVGAVVAHLLAGPVLRDQPLRGALRGAVAVLPLHLHQQPLHHEPALHRRRHAAEAHGAGHAHRVEPPQPPGQPGVDHHALLPLHAAQHARHGHPPAQGHVRRLLRQPHGADRRAPVHHLVHAHALHVRVPRRADAHHRAVPGQRRGHRLHRRRPGRGLPRRPQGRHRDGGRGQGGRQDTRHRAPLQRLALRHLLPPLHGLLQHHAAAQQPDQRRDLLAAVVAQPDPAGLQLQPQRLLLHGRPQLQLRRGRRVRHPHRRHAAPVQLRGRRVQAQVPSPRGECDVRGGGGGGGSLPRAEPGRGRGAQGRQEGGDERAGQGRGPPHVRLELQRVARVGRLRRWRPGLQRR

SEQ ID NO: 48450 - protein, 126 aa, Zea mays
  Clone ID: LIB4148-010-F11_FLI.pep
LMASPPPVATAGPHSVFVYGTLMEEEVVRVLLGRAPPSSSPALLPDHRRFSLRGRVYPAILPARAHAVSGKVIQGLTDRELHVFDMFEDEEYVKTTVEVSLTEWRKVHLKYYLEMTREFMLELGQF

SEQ ID NO: 48451 - protein, 127 aa, Zea mays
  Clone ID: LIB4148-021-G4_FLI.pep
QLRARREGHRLQRARRPQQGGAGRRDRVQDGALVLDEQRAPCDAAGLRRHHQGHQRRPRVQREQPRPDERARRLLQAVLPAAPRRPRAQPHLLGDGVHVVPMAPASASSSTINARRRTLAKSKPRVY

SEQ ID NO: 48452 - protein, 444 aa, Zea mays
  Clone ID: LIB4148-023-D11_FLI.pep
TPPPSSLLPESGELASRVRGRGCVRRRSTSTTLSRRARVSMADGEPSLTRWTFEDFVVHYEARFGLRREADGDGDGDGDDAPPPRGSDHGASRPATARANGGADLAVFEQFERMERKVEISNGAIEDGPLQKSLLPSFESAEMRNLAETLLRDIIRGSPDVKWESIKGLENAKRLLKEAVVMPIKYPKYFTGLLSPWKGILLFGPPGTGKTMLAKAVATECKTTFFNISASSIVSKWRGDSEKLVKVLFELARHHAPSTIFLDEIDAIISQRGEARSEHEASRRLKTELLIQMDGLTKTDELVFVLAATNLPWELDAAMLRRLEKRILVPLPEPDARHAMFEELLPYTPGTMEIPYDVLVEKTEGYSGSDIRLVCKEAAMQPLRRVMAVLEGRKEEVPESELPEVGPVTTEDIELALRNTRPSAHLHAHRYEKFNQDYGSHVHG

SEQ ID NO: 48453 - protein, 481 aa, Zea mays
  Clone ID: LIB4074-005-C5_FLI.pep
GVFVLAYLRDSKLLPFPTAAAAAPPHSVDTMRECISIHIGQAGIQVGNACWELYCLEHGIQADGQMPGDKTIGGGDDAFNTFFSETGAGKHVPRAVFVDLEPTVIDEVRTGTYRQLFHPEQLISGKEDAANNFARGHYTIGKEIVDLCLDRIRKLADNCTGLQGFLVFNAVGGGTGSGLGSLLLERLSVDYGKKSKLGFTVYPSPQVSTSVVEPYNSVLSTHSLLEHTDVAILLDNEAIYDICRRSLDIERPTYTNLNRLVSQVISSLTASLRFDGALNVDVNEFQTNLVPYPRIHFMLSSYAPVISAEKAYHEQLSVAEITNSAFEPSSMMAKCDPRHGKYMACCLMYRGDVVPKDVNAAVATIKTKRTIQFVDWCPTGFKCGINYQPPSVVPGGDLAKVQRAVCMISNSTSVVEVFSRIDHKFDLMYAKRAFVHWYVGEGMEEGEFSEAREDLAALEKDYEEVGAEFDEGEEGDDGDEY

SEQ ID NO: 48454 - protein, 145 aa, Zea mays
  Clone ID: LIB3991-016-G9_FLI.pep
YSEEVSDGMILPVRYQIDGSSTLTPRSNPSHSQRDQRWGVYLLPQTPRLMPHRPTRRGITGEAPLQPYQRPKPHIKWCYTMRTTRRTIYGSDLPEFVARAPWSRWNADCGAEAHHGTVLAPRHDFRRSACWRFPPFFSYRITISE

SEQ ID NO: 48455 - protein, 375 aa, Zea mays; identical to SEQ ID NO: 43407
  Clone ID: LIB3960-012-A6_FLI.pep

SEQ ID NO: 48456 - protein, 416 aa, Zea mays
  Clone ID: LIB3960-017-B4_FLI.pep
TARSWTAATSPSTRPSPAAAPDQPKHVRPSNQAQYKKGHLRPHHHAADKDAAKKHHHLDVNTLRGHTDSVTALAFSNDACNLVTVCADGAIRVFRIDDTSSKSFKILRINLPAGAHPTAVTFSEGSSSVVVAAQALLGSSLYMYADVSAPPTAENKLQGKLSPPEIKWSHPKIHGKESVLNLAAARATHGSGDGSTIIISCSEATDIKVWHGKSGKEFGTVDTNQLKNNMADISPNGRFIAAAAFTADVKVWEIVYSKDGSVKEVNKVMQLKGHKSAVTCLCFAPNSEQIITASKDGSIRVWNINVRYHLDEDPKTLRVMPIPLHDSKGSVCQYDHMTVSPDGKILAVTSGSTLQWLLVETGAVLDTADKAHEGDITGIAWAPRTIPNGGVHVFILATAGVDKKVKLWTAPDVGST

SEQ ID NO: 48457 - protein, 323 aa, Zea mays
  Clone ID: LIB3959-014-E12_FLI.pep
SQEFSLQICVSAMGSGNLIVKKVVKHSSFDLDIQLDKSWMEDVTCPICLDYPHNAVLLRCTSYEKGCRPFVCDTDQTRSNCLERFKSAYELPSNAKVSSFAMPPLDSIIHIVPSNANNRPSCPLCRGDVIGWIVIGEARQHLNQKKRCCEEDCCSFVGNFNELQKHTQQKHPDSRPSEIDPARQVDWENFQQSSDIVDVLSTIHAQVPNGIVLGDYVIEYGDDDNGEDYEVFRGVRTHWWSCIFCKAFSRSSRSRRRARERRGSGRRIGNQANLENFNIEVPAQSVELREIRFDEIDDEYIVTGAIPSMATPGRMASFHYRYA

SEQ ID NO: 48458 - protein, 299 aa, Zea mays
  Clone ID: UC-ZMFLMO17172A01_FLI.pep
REVELVERGEQEIRSARTQAKGKGKMRSPRGGGGLEHVDLIPGIPDDVAVDCLARVPHASHRAMRRVCRGWRSAAAAPAFASARAAAGANEDLVYLMQFGNPSADDGPKDGDDGPGNTPAYGVAVYNVTTGEWRRERGAPPVVPVFAQCAAVGTRLAVLGGWDPLSFEPVADVHVLDAATGRWRRGAPMRSARSFFACAEAGGRIYVAGGHDKHKNALKTAEAYDAEADAWDPLPDMSEERDECDGMATVAGDRFLAVSGYRTARQGGFERDAEWFDPAARAWRRLERVRAPPSAAHVV

SEQ ID NO: 48459 - protein, 452 aa, Zea mays subsp. mexicana; identical to SEQ ID NO: 47541
  Clone ID: UC-ZMFLTEOSINTE073H07_FLI.pep

SEQ ID NO: 48460 - protein, 469 aa, Zea mays subsp. mexicana
  Clone ID: UC-ZMFLTEOSINTE44H11_FLI.pep
LDGIPDSTLIDPMDAQDDDERPLIIHRLPLLQDESTSEFTSDGTVDLRNQPARKQRTGNWRACFFILGAEFAECVAFFAISKNLVTYLTGVLHESNVDAAKTVSTWIGTSFFTPLVGAFLADTFWGRYWTILAFLSVYVTGMTVLTASALLPLLMGASYSRSAHRLSAYLGLYLAALGNGGIKPCVCALGADQFDASDPVERRAKGSFFNWYYFSVNIGSLLSATVVVWVQDNVGWGVGFAIPTLLMLSGLVLFVAGRKVYRYQRVGGSPLTRASQVVVAAVRNYRLVLPDDSSALLHQVPPGTTEGNYSTMQHTSQFRFLDKAAIVAPSSGEKGATASPWRLCTVSQVEELKTVLRMFPVWVSMVLFFAATAQMSSTFIEQGETMDNRVGPFTVPPASLSTFDVISVMVCIPIYDKALVPLARRATGKERGLSQLQRLGVGLALSVAGMVYAALLEARRLSLARAAAD

SEQ ID NO: 48461 - protein, 412 aa, Zea mays
  Clone ID: LIB3066-034-B3_FLI.pep
MVQGKFRHLPVVDNGEVVAMLDIAKCLYDAISRMERASEKGKAAIANVAAGDDKYSIVEALKEQMFRPCLSAIIGEDSTVVMVSPGDSVLAATKRMVEAHATSAVVAVGSKPQGILTSRDILMRLVAKNLSADATPVEKVMTPDPEFATVDMPILDALRTMQERKFLHLPVMDRDGSIISIIDVIDIAHAAISIVESSGGGGDGSAGSDEAASSMFQRFWDSAMALGPLDDETDTQSQMSEASRSQMMMSDVHHHHHHHDSAGGGSEAGFSLSSFSFKLQDRRGRMHRFSCEVQSLTPLVTCILRRLGADIDPDRLPQILYEDEDRDKVVLASDDDLAAAVEHARLAGWKGLKLFLDYSGTTGRRKAVATPRGAMAVGMSSRDAWAAAYSGVAAGAALVTGIGVMAYLRRSA

SEQ ID NO: 48462 - protein, 405 aa, Zea mays
  Clone ID: LIB3060-100-A6_FLI.pep
AGAQRLDDVLHVHLDAVDAAGGEVRVELAVEVPHPARVHQAQPQDGQRVHDDVRLVARHARGLHGVRQRRLVALHRRPRRRRHAAPVPGHGVPHVHLLHAVRVLGLGHQSLQPARRLLAVAVSVGLGLELGVLLDPGQPAGELRALLDGDVGVGLVLGGDLLPAVVDDEEPRRRAALGQALKAVLDAVGGDVGVEGVPGAPAEPVEERRQLLLVAVVERLQVLLHRLDGGGDGVEGVVAGVEVHHVRGLVRLHRLVPALDADLQLVAVVPLQRRPKLPLQQRKHHHVRGGVVAVAVTGRDLDEHELGLQRDVAAGDAHPLRHPPQLEPEQAQEPAVPERAEGEDVVALGLAGVGADEGPVDEPRPGRVRRRHVVRHAGEHRTAAHRQPPVAHRDPWRHRHLPPPR

SEQ ID NO: 48463 - protein, 303 aa, Zea mays
  Clone ID: LIB3061-070-D1_FLI.pep
NRKWENPITAPRLHCYPSLPLCFPLPMESCSFRAATAPSPFPSAPSSSSSPRAPCPILRFPRPRKGRQIGVRRRASGFDAFASFAGKVFVDEAIGAEYGEGFETFRMDGPLKVDVDYLNEKLQECFLQRIRHAMKPDEAFGLIFSWDNVIADTDSLKLNAWRQLALEEGKDIPSGAHVRKSIIHGAADHVLRKVLYWAKEEDKMEKLKARLIELYYENLFKLDTPVEGLREWLDAVQTAGIPCAVASPLDRRCMIEALDRMALSKYFKAIVTDEDDMESIANRFLSAAMKACSCPTSNRCTSC

SEQ ID NO: 48464 - protein, 194 aa, Zea mays
  Clone ID: LIB3061-095-F2_FLI.pep
DETVNIYIRAKETKGTAAGLYCTLYVACNMYTQPQMSGSRITGQGCTGWHGSWQAKPKGQQEEGKASGCRRRPPPQQRRRGSILWWRRSQTSARAPFGEGSRASLSVSARCSISHITCTSSYAHVWTSSWSFTRTPWPPSSFLCRVVSRAAAAIHARFTGTTTAFCHHSIDTAAAVSALCQTDRQREREKRDRR

SEQ ID NO: 48465 - protein, 165 aa, Zea mays
  Clone ID: LIB3066-045-G5_FLI.pep
NELFVQEKAPDGIILSPRVLSISPLFLSLCPTTRPPPPPPRRRRRRRAQVFVGPCPATSTLQMAGRHTIILMQPSQNRASRTFMDYNSINHALDGICGLYERKIRDINPMIPNITYDISDLYNFIDGLADISALVYDHSIQAFLPYDRQWIKQKLFQHLKKLAQR

SEQ ID NO: 48466 - protein, 140 aa, Zea mays
  Clone ID: LIB3069-041-B10_FLI.pep
DKRSRTKQSDTIYRVARTGRTVLVLERRKPLLYKILSIRESTIGEGAGAKKPALVPPGLLLLAAVAVAGHEDGEAVLGVAIRLKLRCLWLEPADGPVGVVRVRAGEAPTAVGRDDDHVVLPVDTGLTAAAAPVPDPPRAR

SEQ ID NO: 48467 - protein, 319 aa, Zea mays
  Clone ID: LIB3069-003-H8_FLI.pep
ARSPPVTADRDEMDAGGGGVLVAVLCMLLVFAIFPLLLWRRRSDAATADNHRVPPQPLQEDQVLHGRAAARRMRRRPGAAGAGSSTASTSRNAVEDDAESDDEEVPEGRNVPRSSKKEKKRQEREMQRQAEEPARDSWRSKQDRYDEMRRKKDEEREAQERQLEEEARARKAKEEAAAALEFEKWKGAFSVDAEGTTESETQDDGQGLLHNFVEYIKKQKCVPLEDLAAEFRMRTQDCINRIVTLESMDRLSGVMDDRGKFIYISTEEMKAVAEYIRKQGRVSISHLANNSNQFIDLEPKAQYEVESLQDDSAEAGTEA

SEQ ID NO: 48468 - protein, 248 aa, Zea mays
  Clone ID: LIB3069-016-F3_FLI.pep
AKPKRLDSHSNCRLDLSNGLEESLPRSTLLKSSMVTEQLCVDTIRNNSTLTLVLQVVGTAELGEAPLSALNNLLAARELELGATQSFTGMCSIVVLASNRKEDLTNVHPSTGALRLAKGTPHSSLEPISPSTRKHLVDTKDMEGVNPDPKVEGILSCRLGHVLVAGNTGSLKSLTGDILLLPRDKVHTVGELINTLSLHANIVDPDLGVRDTTAVPGLGVWLVLDLAIASRRPSPHGDGSREQAAAAN

SEQ ID NO: 48469 - protein, 294 aa, Zea mays
  Clone ID: LIB3069-031-H11_FLI.pep
HFYLQYSLHCTHTVTHTPYSLIACVTSGARRRPRNQAGSWFCPRLSYKYSIASTHGRLLGDGAHDSNHASNTRRRLSVSLTHDTRCKLMECIVVRFGLLPPGRRRSCSDPWLRPRTPRRCRTAAGNPPRRRSYCRACHRRGRGVGRTRSRTLPRRGASAWGSTRGRSRTCRRPRRSSSGRSGTASCRSSRSPAAPAPAACRGGRPCSTTAGGPCRCRFPGTAGRPRGLLRRLPPLPRWRPARRWAADPCRCLRGTSSGRARRRSSSSASRCCGARHGGSSPPGTSPRGGRRART

SEQ ID NO: 48470 - protein, 496 aa, Zea mays
  Clone ID: LIB3069-044-D10_FLI.pep
RCCSSSRMSKEDVLKVQTLMLRVNIHCDGCEKKVKKTLHKIDGVYQSSIDAEQGKVTVSGLLDPDTIIRKLNKAGKPAQLWGSKPGIPQNAYHGGGKAHSKDAGGGKAHSKDSGGGKGHSKDAGGGKAQKGGAGGGGHKGPGGGGGGGGGVGNPKMVMPQPTPQQLQQLQQQLQMKGLKLPPHLLGGNMPAFPAAAPMKDPKSVKFALPEDNFDDYGSEFDDDFDDGFDDDEDDYDDDGLDDDVYGDPKMMMKPMAVPPPAGGGDKKGGGGKKGGGGGNEIPVQIKGNNHGGAGGQPHNAKGGAPGGGAHLGQGKKGGGSGAAVGVGGPMGGMLPQQGMMRPPNILGGAGAGFPSTAQMGGGPMGMPVGHPHMGIMQQGGGGGGGGMPGLGFHPGLGGGGMHSGADMLQAAAASGNPVAQQQYMALMQQQQQQMMMMQQQQQQHGNGGLGYPAAMGYGYGRPPMHYPMGYPVLPPHSHAEPYNIFSDENANSCSLM

SEQ ID NO: 48471 - protein, 265 aa, Zea mays
  Clone ID: LIB3088-030-G3_FLI.pep
PSSSSSSSDGASEAVRDAAVPQRGARGHRAQREGPRLRDRPRRPHHRRPQAARLPHPQPFRPDPGSRRRRRSPLRVPCDQPVHRQQVRVGGHGPAPRDGVGGEAGGVARGGVAPLLPERVAAGVPAAREAAPGRRPRRGGGGQARGAARQGARRVRGAPRPQQVPRRGRVHARRRQPRVLPALPQQDPQGRARRRPPPRQGLVGGHRRPPRVPEDRRRHPLAPAALLLGLTSPCVAPLPGSRMRRSPESNKRGSILSCICCCAMC

SEQ ID NO: 48472 - protein, 323 aa, Zea mays
  Clone ID: LIB3150-008-C5_FLI.pep
ASGVSGEAPPPRIVEDCLGLVQLMSDGTVKRAPACLASADDAAPVGCKDVVYDEARNLSLRMYVPSSSRAGNGGAEKLPVLVYFHGGGFIVGSFASPEFHAACARLAAALPAVVLSADYRLAPEHRLPAALQDADALFSWLGAQEQQADPWLADAADLGRVFVSGDSAGANIAHHAAAAPGRRLAGCVLLWPFFGGERRTRSEAACPGDAFLTLPLYDQMWRLALPAGATRDHPAANPEAGELPPLLVAAGDRDMLIDRIREYVARARARAAAAGNRRVDLVEFPGAGHGFAILEPDGEDAGELVRVVRRFVHGGDAAGPPPL

SEQ ID NO: 48473 - protein, 372 aa, Zea mays
  Clone ID: LIB3150-052-F2_FLI.pep
PPQNTSCDPRSLRRASIMSAYCGKYADELIKNAAYIGTPGKGILAADESTGTIGKRLSSINVENVEENRRALRELLFCCPGALQYISGVILFEETLYQKTKDGKPFVDVLKEGGVLPGIKVDKGTIEVVGTDKETTTQGHDDLGKRCAKYYEAGARFAKWRAVLKIGPNEPSQLAIDLNAQGLARYAIICQENGLVPIVEPEILVDGPHDIDRCAYVTETVLAACYKALNEHHVLLEGTLLKPNMVTPGSDSKKVTPEVIAQYTVRTLQRTVPAAVPAVVFLSGGQSEEEATLNLNAMNKLSTKKPWALSFSFGRALQASTLKAWAGKVENVEKARAAFLARCKANSEATLGTYKGDAAADTESLHVKDYKY

SEQ ID NO: 48474 - protein, 366 aa, Zea mays
  Clone ID: LIB3151-038-F6_FLI.pep
SESEAASGRQGEMGKGAQGSDAAAAGGEVEENMAAWLVAKNTLKIMPFKLPPVGPYDVRVRMKAVGICGSDVHYLREMRIAHFVVKEPMVIGHECAGVVEEVGAGVTHLSVGDRVALEPGVSCWRCRHCKGGRYNLCEDMKFFATPPVHGSLANQVVHPADLCFKLPDGVSLEEGAMCEPLSVGVHACRRAGVGPETGVLVVGAGPIGLVSLLAARAFGAPRVVVVDVDDHRLAVARSLGADAAVRVSPRAEDLADEVERIRAAMGSDIDVSLDCAGFSKTMSTALEATRPGGKVCLVGMGHNEMTLPLTAAAAREVDVVGVFRYKDTWPLCIDFLRSGKVDVKPLITHRFGFSQRDVEEAFEVSA

SEQ ID NO: 48475 - protein, 431 aa, Zea mays
  Clone ID: LIB3356-004-D9_FLI.pep
QKRSLNLFVVLSPSLVRSAREPPMGDAVEDIVIAGAGLAGLATALGLHRKGVRCLVLESSPALRASGFAFTTWTNAFRALDALGVGDKIREHHLLYERMIAFSAATGEAAAEVSLKIQSKSGPHEIRCVKRDFLLRTLADELPEGTIRYSAKVVAMEEDGVGGAKTLQLHLADGSTIKAKVVIGCDGVNSVVAQWLGLPKPILSGRSATRGLAEYPGGHGFGPEILQFIGHGFRSGVLPCSDTSVYWNYTWYPSPADGDAEESVAKMRSHVVAKLRGAKVPAEALEVVERSEMSDVASSPLRFRSPLALVRGSISRGGVCVAGDALHPMTPELGQGGCAALEDGVVLARCLGKAFALLGQERDEGRVVTAALEEYAAARRWRSIQLITAAYVVGFIQQSNNAVVRFVRDRFLSRLLSKTLVAMADYDCGAL

SEQ ID NO: 48476 - protein, 294 aa, Zea mays
  Clone ID: LIB3356-010-F1_FLI.pep
LRCAAHPWVGRLRLLVVGGGELLVGVGDEEQLVDDAGEAAADEGADPVHPLVAPLPADEGGAEGHGGVHGRAVEGAAHQDVGPHDEADGDGGDGAQAALLRVHRRGVHRVHQPEGHHDLQHQRLPHRHARQPEGARGLPARREAEQEARHGGPQQLRHPVQEPPEQGDVAAHEGAEGHGRVHVPARDVRAHRHRHEQRERVRHRRRDQARRGRRAAAGQLAEGHAGALAGEDEDEGGDELSERRLEGARVVHLLVAPQGDPIDRHFHGPLASSRALVTTVIGAGVELSSARGVW

SEQ ID NO: 48477 - protein, 109 aa, Zea mays
  Clone ID: LIB3354-120-C4_FLI.pep
TTRGGDQQERRHRGVGARRPARERAGRGGGEPCWAGGADRPRSAGHGRAHRRWTSLGIRSPGPGLTIQIKQYSTTATTLPALLVSCFQFSFSVSGVGFAKLLCTNYEYQ

SEQ ID NO: 48478 - protein, 293 aa, Zea mays
  Clone ID: LIB3355-009-B10_FLI.pep
LRCAAHPWVGRLRLLVVGGGELLVGVGDEEQLVDDAGEAAADEGADPVHPLVAPLPADEGGAEGHGGVHGRAVEGAAHQDVGPHDEADGDGGDGAQAALLRVHRRGVHRVHQPEGHHDLQHQRLPHRHARQPEGARGLPARREAEQEARHGGPQQLRHPVQEPPEQGDVAAHEGAEGHGRVHVPARDVRAHRHRHEQRERVRHRRRDQARRGRRAAAGQLAEGHAGALAGEDEDEGGDELSERRLEGARVVHLLVAPQGDPIDRHFHGPLASSRALVTTVIGAGVELSSARGV

SEQ ID NO: 48479 - protein, 171 aa, Zea mays
  Clone ID: 700048895_FLI.pep
MDSYYLYWQGKWYWWSGYWNDPNDSRRYPAVNIVILTNASFNYALGMGALAEPPQDSSADGVILIKDMAEWQKHWDQTAPYNKLLVYEFYEKNSSLCKAMDKPFEKLATQYKGRADFCKLDVDNFELLARICGVEGAYPTFVLFKKCAQVGKVVGLKEDDLERIVQRAIIS

SEQ ID NO: 48480 - protein, 278 aa, Zea mays
  Clone ID: 700049189_FLI.pep
LNPETKEPTSTPTSKLKQAATTSSDQRQPWTWAGTSSSSSTRPPRPPPRRRPRPSRTSRSAALVPRSAPRGAPSSGRRGTRCSAACGGGAPRGGGCARCASPGGAARGCGSAPTSAPRRRRARTTPRCSPWAAARPASTSPTPRGCSPCRPRPRSRAAWTAPAGPRSRPSRSSRDAASGRQPPTKRPRARLLPPPPPRRRSRRRRLSACLWRPVRRWRWTAPCSSPTGSGTWTWTCTMPASRKGCSWSRRHRHRPPPGIMVTAATPELTSRSGATSKL

SEQ ID NO: 48481 - protein, 307 aa, Zea mays
  Clone ID: 700381776_FLI.pep
IRKQESSREDGAVRQVAEEADRAEPPGVAGPVPALQGAEAVRQGPLRRLPAVARGGGRVRGRDRRGDREDQRLLPRPGGGVHHPPPGAAEPHRARAGPRQAQAGAGAARGRGRRHPQGDRQLPRRHGAAPQLQQHQLHRPGQDPQEVRQAHRRDAAACRDGVGAAAALLQDGDGVASGAGVRVLDGGRVPGGARSGPGRRRGARRRGGGAGHLPQHRGRAPHHAGRPRGELHQRKPLAAAAQPAGLRLAPVLRPAVSDPDPMTHVGLLLAPSWLAPASSISLPFRLLGPVHAVLALVFHFSRFLSSN

SEQ ID NO: 48482 - protein, 135 aa, Zea mays
  Clone ID: 700449305_FLI.pep
GTRSALWTTATTLAWTQSPRYLGQAMLRSIIPVHLAVSPRARGSRLPTHRRGTSRRAQGSSRTTLPAALYIEEGIQVGHTPVQRNRSLRLRRRTSTSGTPLAAETVWSRHLGSAKCNRLYDFVAIAVAGARAAAV

SEQ ID NO: 48483 - protein, 100 aa, Zea mays
  Clone ID: 700427920_FLI.pep
SLPQRSQRLSAGRAPFSASSPHGARRPSSLLPLSSPCLRAKFLCGRAPICSGFHGAHPWCRRPQARPLRRGHWMARSPLSGALPSEREIISTFPIIIFGV

SEQ ID NO: 48484 - protein, 41 aa, Zea mays
  Clone ID: 700431137_FLI.pep
AAAGGHARGQHEPRGGRRHVGARHGRGLLAAGAQLVCLAWR

SEQ ID NO: 48485 - protein, 95 aa, Zea mays
  Clone ID: 701185832_FLI.pep
GCAVVGRWPVRARLAQKKTKICRPSPFEPCPTTKTGRLSSLFMLFLISVSKFQTAHPRTGRQELGPTELSFSPCSFWPFAPSPSLFLFFLFLSSI

SEQ ID NO: 48486 - protein, 343 aa, Zea mays
  Clone ID: LIB3592-065-G6_FLI.pep
CSFFDAPPGMANRSVAMGVAVAFVAMTALCCAPGAAELPRLDHPARSDGSLKLLVVGDWGRKGTHNQSRVADQMGRVGEKLDIDFVISTGDNFYKNGLKGVRDQAFEESFMDIYTAQSLQKPWYSVLGNHDYRGNALAQLSPVLRKIDDRFICMRSFIVNAELVDFFFVDTTPFQLEYWTHPGKHRYDWRGVAPRGKYIANLLKDLDVAMKKSTARWKIVVGHHTMRSVSEHGDTEELLELLLPVLKDNGVDFYINGHDHCLEHISSRDSPLQYFTSGGGSKAWRGVFHPNKDKLRFFYDGQGFMSLQLHQDQAHFIFYDVFGNILYRWSSRHPQSSMYLDEE

SEQ ID NO: 48487 - protein, 164 aa, Zea mays
  Clone ID: LIB3592-042-A10_FLI.pep
APAATPPYPDPSTTMATVLGSPRAPAFFFSPSSLRAAPAPTAVALPAAKVGIMGRSASSRGRLRAQATYNVKLITPEGEVELQVPDDVYILDQAEEDGIDLPYSCRAGSCSSCAGKVVSGSVDQSDQSYLDDGQIAAGWVLTCHAYPTSDVVIETHKEEELTGA

SEQ ID NO: 48488 - protein, 69 aa, Zea mays
  Clone ID: LIB3732-040-B4_FLI.pep
PAAQAITNSPQENRIMKARHNRIHTTSIKAAPLFGTHITALSQHRTKRCPWPQTKPATEGKMHNRNSQN

SEQ ID NO: 48489 - protein, 385 aa, Zea mays
  Clone ID: LIB3591-067-F10_FLI.pep
VVVDRSIDRPAGQPSSWQALAPIGSSAGQGKAAVRTTMAQGSRSAAVPAAASFFALLAVAPLLLCCAPAAAELARLEHPAKDGGSLSLLVVGDWGRKGAFNQSRVAHQMGRVGEQLSIDFVISTGDNFYENGLTGTDDEAFEQSFTDIYTAKSLQKPWYLVLGNHDYRGDALAQLSPVLRKIDSRFICMKSFVVNAEIVEFFFVDTTPFQLKYWTHPKDDHYDWRGVAPREKYINNLLKDLDGAIKRSTAAWKVAVGHHTMRSVSDHGDTKELLQLLLPVLQANGVDFYINGHDHCLEHISSKDSPIQYFTSGGGSKAWRGVQNPTEDDLKFFYDGQGFMSLQLDRSQAKFTFYDVDGKALYSYTRSSLMETGHHLQASGYVNEE

SEQ ID NO: 48490 - protein, 190 aa, Zea mays
  Clone ID: LIB3078-029-B2_FLI.pep
ARRRSTSRTEESPQRMFHGMFWERDGYRGINMEGIAQALLALDRIEHDVELTYEQLLLLETNLLLSGLDLHDQHEDMRLDIDNMSYEELLALEEHIGSVTTALTEEQFTKCVNQSVYEARNSYRDVSKIAADDVKCSVCQEEYVDGEEIGTMQCEHQYHVRCIHEWLKQKNWCPICKASAIPSEMTKGDA

SEQ ID NO: 48491 - protein, 99 aa, Zea mays
  Clone ID: LIB3115-014-F4_FLI.pep
PSFYRGLTSIGRSTISQHSYIYVTTYGPDLTQGRSLLLTTSLAHESDALLNALAQFLLCRFQTSSLEIIQRAKRQDLLGSTTAKPHFRCKERQFCHLGC

SEQ ID NO: 48492 - protein, 380 aa, Zea mays
  Clone ID: LIB3596-011-G12_FLI.pep
SSASNVRRTNLDLGARRRTTIMKMSSVPAAAAVMVVVVLLSAAAATVTGQALVPGVMIFGDSVVDAGNNNRLATLVRADFPPYGRDFPATHAPTGRFCNGKLATDYTVESLGLSSYPPAYLSEEAQSNNKSLLHGANFASGAAGYLDATAALYGAMSLSRQAGYFREYQSRVGASAGQQRARELTSGSIYVVSAGTSDYVQNYYVNPMLSAAYTPDQFADALMQPFTSFVEGLYSLGARRIGVTSLPPMGCLPASVTLFGGGNAGCVERLNNDSLTFNRKLGVAADAVKRRHPDLKLVVFDIYQPLLDLVQNPTNAGFFESRRACCGTGTIETSVLCHQGAPGTCTNATGYVFWDGFHPTDAANKVLADALLLQGLQLIA

SEQ ID NO: 48493 - protein, 311 aa, Zea mays
  Clone ID: LIB3637-204-G2_FLI.pep
RIAFAKQRRVGGAGAMETRLPRRGWNKRFVLPLALLCLAVLLPGALLPPSASASSSSPAAGGGSRKRRWVGFDYYVLALQWPGTICRETSNCCDTNGCCRSQPLKWFTIHGLWPQYNYGGWPSCCRPTRFNINKILMLMPILEKYWPSLYCGSSSTCFGGRGPFWVHEWETHGTCAYPEIQDEYDYFSTALYLYSKYNVTKALRKARIRPTSGRKYAVGHIVAVIEYAFGAMPSLVCKNGSVQELRLCFHKDYQPRDCTLEAGSAPNGRSYCPRYVTFPSYKPSVVANTTEGINNQSNGEVPSYTRTSDSE

SEQ ID NO: 48494 - protein, 267 aa, Oryza sativa nipponbare
  Clone ID: LIB3479-006-B3_FLI.pep
QEEISLLVETSLESTMEQRKFLLCLILGLLATSGPAKTVNADSPFDFYYLILMWPGAYCTDSEYGCCVPKYGYPSEDFFVKSFMTFDSSENTAVVRCNSDNPFDINKLDSIENNLNHYWSNIKCPRTDGVNSWKSEWNSYGVCSGLKELDYFKAGLQLRKNADVLSALAEQGIKPDYQLYNTAFIKWAVNQKLGVTPGVQCRDGPFGKKQLYEIYLCVDKDAKSFIDCPVLPNLSCPAEVLFHPFHTWMLNTTSAANIVMPTETVLA

SEQ ID NO: 48495 - protein, 235 aa, Oryza sativa nipponbare
  Clone ID: LIB3433-037-H4_FLI.pep
FALALQWPGTICASTRHCCAINGCCRSEPLQTFTIHGLWPDYDDGTWPACCRHTSFDMDKILPLKPTLEKYWPSLYCSSSSTCFSGKGPFWAHEWEKHGTCSSPVVKDELEYFTTALDLYFKYNVTEMLASGGIHVSNGKQYALTDVIDAIKCAFGASPQIVCKKGSVEELRLCFDKDLKPLDCLTTTATNENVSKKKYCPRYITLPTYDPIVHANSTREIITVESEVYGYLYTS

SEQ ID NO: 48496 - protein, 137 aa, Zea mays
  Clone ID: LIB3732-042-A1_FLI.pep
AGGGVLRHHVDVPQGAGVRDAHRRRRHHAGGPQPLEAGAQGAVPGARHQVALQVQDHLPVLPRLPQRRGAVPPPQGRRLPGEGQPRQGGRRPELPQHRQERQPHRRQVHRQGHLRLITLHVRRTPQPGSKLKNFFFY

SEQ ID NO: 48497 - protein, 159 aa, Zea mays
  Clone ID: LIB3732-042-C12_FLI.pep
PMIWSRAPVFLSPSTMPTPRMWPTAPQASVSARVNPAGSPVCRPESRASSFSPAVALRFADGASPNRPREQHQRRRRHHDQVGGGADVVAADALRRRPLPAHPHGRQRCHRGPGRGVAPEAVEPGHGGGELGCHVWRLRRRRRTSHLCAAVPSSASAEW

SEQ ID NO: 48498 - protein, 181 aa, Zea mays
  Clone ID: LIB3354-092-A7_FLI.pep
PTATTRRTSASGSGCCPTGSRRGGRARGSSSGWRSWWRRWPACRRRTRRRRPAPRRWSATWAGWTATTRCCAPATPSWPAACSRWAASSRCSRWPAPPSTSRRWSPTTPCSAPGSRPSPRCSPSGSENLSLSRRERANFCRRAAVYLVLVSIHKSSLSWFALLVSVINLLLVSVINLAIGK

SEQ ID NO: 48499 - protein, 188 aa, Sorghum bicolor
  Clone ID: LIB3480-041-B2_FLI.pep
AAAAEAGSPRTSGSGSGCCRTGSRRVGPARRSSSGWRSWWRRWPVCRRRTRRRSPASRRSSASSPRWTATTPCCAPATGSCPAGSSRSAASWRCFRWPAPPSTSRRWSLKTPCSAPGSRRSPRCSPSGSEPAPEPSQDIGRGLYSVAMVSGHLPLLSTTPTCPQVLVLCRRFSALCSSLGCLSWFASC

SEQ ID NO: 48500 - protein, 300 aa, Oryza sativa nipponbare
  Clone ID: LIB3599-016-A9_FLI.pep
GVLGMGNQCQNGTLGSDYHNRFPREHAVGYVQGDSYLDLKKFDDTWPEVNNFKPTAASILRRGLDPTSINVLGRKTADLREHYIIGRKLGQGQFGTTYLCTEINTGCEYACKTIPKRKLITKEDVEDVRREIQIMHHLSGHKNVVAIKDVYEDGQAVHIVMELCAGGELFDRIQEKGHYSERKAAELIRIIVSIVAMCHSLGVMHRDLKPENFLLLDKDDDLSIKAIDFGLSVFFKPATLQEKTQYSAPYQLMWSLMLTASHGSKPEASRTIGEKSTVPSLLDFNNNTTQDSRMSPKVRL

SEQ ID NO: 48501 - protein, 339 aa, Oryza sativa nipponbare
  Clone ID: LIB3599-009-D7_FLI.pep
RDLKPENFLLLDADDEFSVKAIDFGLSVFFRPGQVFREVVGSPYYIAPEVLEKRYGPEADIWTAGVILYVLLTGVPPFWADTQSGIYEKVLDGRIDFKSNRWPRISDSAKDLIKKMLCPYPSERLKAHEVLKHPWICDNGVATNRALDPSVLPRLKQFSAMNRLKKLSLQIIAERLSEEEIVGLREMFKAMDTKNRSVVTFGELKGLKRYSSVFKDTEINDLMEAADDTTSTINWEEFIAAAVSLNKIEREKHLMAAFTYFDKDGSGFITVDKLQKACMERNMEDTFLEEMILEVDQNNDGQIDYAEFVTMMQSNNFGLGWQTVESSLNVALREAPQVY

SEQ ID NO: 48502 - protein, 190 aa, Oryza sativa nipponbare
  Clone ID: LIB3598-031-D8_FLI.pep
DKESWDLNNTEKIETAGAKKEEGNALFKLGKYVRASKRYEKAAKFIEYDSSFSEDEKKQSKQLKVTCNLNNAACKLKLKDYKQAEKLCTKVLELDSQNVKALYRRAQAYMQLADLELAEVDIKKALEIDPDNRDVKLTYKNLKEKVKEYNKKDAKFYSNMFAKMTKQPAEDGKAGSGAESKQGSEPVTAA

SEQ ID NO: 48503 - protein, 230 aa, Glycine max
  Clone ID: LIB3109-014-H11_FLI.pep
TGMRKSKADEKILSYNDVVLRRSDLHILSGPYFLNDRIIEFYFSYLSSCHPSQDILLVPPSIAFWIIQCPVAEALGDFIEPLHLPDKTLVIFPVNDNDDVDRAEGGSHWSLLAYYRNANLFVHHDSCRSMNAAPAKQLYKGIAGYMGSSGSASEASFLECTNSPMQDNGYDCGLYATAIARVICNWHVNHKNADTNDLWFSAVKEQVSPSAVASMRGEILALIRDLMARH

SEQ ID NO: 48504 - protein, 275 aa, Glycine max
  Clone ID: LIB3109-016-H5_FLI.pep
KGEEESEMGELYALDFDGVICDSCGESSLSALKAAKVRWPGLFDGVDSTTENWIIDQMHTVRPVVETGYENVLLVRLLLESRTPTIRKSSVAEGLTVEGILENWSKLKPIIMEEWDEKRDDLIDLFGKVRDEWLEQDFATWIGANRLYPGVSDALKFASSRVYIVTTKQSRFADALLRELAGVTIPPERIYGLGTGPKVEVLKQLQKKPEHQGLTLHFVEDRLATLKNVIKEPELDQWNLYLGNWGYNTQKEREEAAAIPRIHVLELSDFSKKLK

SEQ ID NO: 48505 - protein, 214 aa, Glycine max
  Clone ID: LIB3109-036-C4_FLI.pep
GVSSFDANSITSLSQYVKPLTNFLEKLLEGEKVILVGHDFGGVCISYAMEMFPLKISKAVFIAAAMLTNGQSTLDIISQQAGSNDLMRQAQTFVYANGNDHPPTSFDLDKSLSRDLLFNQSPTKDIALACVSMRSVPFAPVLEKVSLSDLKYGSVRRFYIETLEDNAIPISLQENMINASPPEKVFRLKGADHSPFFSKPQALHKLLVEVSKIL

SEQ ID NO: 48506 - protein, 426 aa, Glycine max
  Clone ID: LIB3167-026-F9_FLI.pep
SFCPCLHPKPKQMWRTTLDSSTMRALRLRSFLFSSSSSSSSSCCSLINIFCPSSSSSSFTTLTTIISHSFLPFPPTTRVLFTDSRRFGSPVPRRFGSPVPRCVSSLPTLDWNDAVSCSEVEVDANAADGGDDGAVDQDTKPSIAVRAFFFSTSVDLKSLVEQNKANFVPPSSRMTNYVVLKFGDICVSKGPGTFLSGRNGCYMVVFQYGSIVLFNVPEHEVDAYLKIVKKHASGLLPEMRKDEYEVREKPALSTWMQGGLDYIMLQYLNIDGIRTIGSVLGQSIALDYYGRQVDGMVAEFTDINREMEATGKFKMQRKKLFQLVGKANSNLADVILKLGLFERSDIAWKDAKYAQIWEYLRDEFELTQRFASLDFKLKFVEHNIRFLQEILQNRKSDFLEWLIIALIGAEILLSLYDIVHRSAMKF

SEQ ID NO: 48507 - protein, 146 aa, Glycine max
  Clone ID: LIB3139-022-C10_FLI.pep
FFFFLLYLNCLWLLCRLMGRLFVVNLEGKIYSCKHCHTHLALYDDIYSRTFHCRHGKAYLFNKVVNVSIGEMEDRPMMTGLHTVADIFCVGCGSIVGWKYETAYEKNQKYKEGKSVLERYKVSGPDGSNYWISNEAHVGGSDADDA

SEQ ID NO: 48508 - protein, 112 aa, Glycine max
  Clone ID: LIB3139-024-G11_FLI.pep
DTDDSSLIGYAWHLWSEQRVMELVDPSLGDSIPKTKALRFIQIGMLCVQDSASRRPNMSSVLLMLGSESTALPLPKQPLLTTSMRILDDGESYSEGLDVSNDLTVSMVTTGR

SEQ ID NO: 48509 - protein, 221 aa, Glycine max
  Clone ID: LIB3139-069-E11_FLI.pep
LLTMSLMPNSRVPLLLFISSIFFTSFPGLTFGAIVSLRSIEIFKTHEWLKATTTVYFLCKGENETVLPDVKKPHAIYAFNGQESWQPLSSFSSKKCKRCGFYEEDSITSDDAFDEWEFCPSDFAAPNGEYIRFKEKEFNATFLCPECLSLAGVDEHDDGKGMHIAVVVLLSILVSVTLILGVVGAYKFWRKKLREQDQARLLKLFEDDDDIGDELGLGSAI

SEQ ID NO: 48510 - protein, 290 aa, Glycine max
  Clone ID: LIB4202-003-E2_FLI.pep
MLKAAPRAVIYYLSEHPAIVGFRWSHAQSWGATWSFLFSSIASYLFLSVFLYFSLSLLFRRRQIPLGPLPAVHSLSMSLISATIFAGILLSAAAEISDTRWFWRRSKTPLQWLLCFPLGTRPSGRVFFWSYVYYLSRFLHMLRTLLRILRHRRLSFFHLLSNSISALASFLWLEFSQSFQVLAILFATLVYAAVYGYRFWTAIGLRGACFPFVLSCQIVLLACNVACHVAVFFLHFFLKGGCNGIGAWVFNSILNLALLMLSLNFYVRMHVHKRRRKVRDVTVTVATALS

SEQ ID NO: 48511 - protein, 68 aa, Glycine max
  Clone ID: LIB4202-005-E8_FLI.pep
SYYLFPKVKKWSHQSPHKTTNPNANITLQVEVTWEMTNKVLSRFVDITDKCGRCGHKYGRRQLKKTLK

SEQ ID NO: 48512 - protein, 126 aa, Glycine max
  Clone ID: LIB4202-008-H6_FLI.pep
FKGERMDGDKPIFSVRRASIIGRSRASLTVEMYDNPGEEYQIDGCFSQRCCTVFNVTKESVAEIRRKVDPTTSVVLGKEVFSLCVKPGFDAAFAMGFVLVLDQINGEDYVDDRATTEPAVHPATED

SEQ ID NO: 48513 - protein, 121 aa, Zea mays
  Clone ID: LIB148-046-G3_FLI.pep
AATAPVAAACHGAAGPLRPAAGHRKTALRSAWGAHGLFWRPRDEAAAAGGGLQGVRGGGQGEGVPPPGPQVVQAQMLPHLEYLTTVRRRAAAFSHSSWTARPLFYRNNYGMHSAVHCQFMH

SEQ ID NO: 48514 - protein, 91 aa, Zea mays
  Clone ID: LIB148-048-E10_FLI.pep
AAVMDGDHADIRQRGHVERPVQRLGAVLPRGAVLHQRHLAGAVAARRVQHARQRPPLRQGRGAAAAAILRPRALKTTKAPFSPRVLTIQSN

SEQ ID NO: 48515 - protein, 145 aa, Zea mays
  Clone ID: LIB148-061-D7_FLI.pep
SQACPLFIESTRQKITANAYLRDVTLIGLLYMCMKQSTKLYIVGHQIGRYTHACMHQIVIASHACMYDVSVIQCHASRQKTTTGGRALRSGRRRGAGPPAVLAEQRLLLLGAGGVAGLGDLSRLDHVVLVARLLAHLHLRRGDAL

SEQ ID NO: 48516 - protein, 62 aa, Zea mays
  Clone ID: LIB189-021-C12_FLI.pep
SNMKPKTNMSSTKRDLSSGRLLQLGELLPDSTTPLDPCQHDLEPVKVTECSPPLLDNQLLAP

SEQ ID NO: 48517 - protein, 193 aa, Zea mays
  Clone ID: 700075153_FLI.pep
ELWQAFPYRKQALMVTPWPTTDLPKDLRSIKRFQNLQSLIRGIRNVRAEYSVEPAKRISASVVATADVLEYVSREKQVLALLSKLDVQNVHFTESAPGDANQSVHIVADEGLEAYLPLADMVDVSEEVKRLSKRLSKMQSEYDALVARLNSPSFVEKAPEDIVRGVREKASEADEKISLTKNRLTFLQSTITT

SEQ ID NO: 48518 - protein, 109 aa, Zea mays
  Clone ID: 700238343_FLI.pep
ITNCLKLRRSKKEPPYIWLKRSNQPKKSHHTALRNSALTKKKGDHHQLADQRNRTTPANKRTLIKHTSTSTTYVQFARDSWVAAGPVGHRSRSACGCESSFLSRWEKSL

SEQ ID NO: 48519 - protein, 367 aa, Zea mays
  Clone ID: 700238479_FLI.pep
GLGEALGQRARVVGADDVRAHDPQEPGAAGQHAARDLAQLLLGHVRVASEGDVEHGAGRLRAQPPRAVVGLGPHGRGHGAAREARREDGAHGVEGPVGAQRGDGRRLQLLHGVAQDVVGAAGLVERPEDDAVDDGGGVRILKVRHELARLDGRHARDVGDRVLARIFAFEVAVLGEQVHVVVEVEDERGLRPEGHVRDAQLPGQRGRPHEEGVDDEARGGRVHDDAAAEEVLDVGREHVQDALHELVVVQRPVEAQREAVAHQLVPHVQLLRRRPSPPRAHAGEDVAAGADLVVHGLRVDEGDREPALGQPQRQVHRRDHVALQRVRHHHGVRPAAADAGAGAVRCHGLFLTHIRRAFSFSLSSVWW

SEQ ID NO: 48520 - protein, 68 aa, Zea mays
  Clone ID: 700240754_FLI.pep
LLYSYRFNVCCVHTHNLVSVEAKRSISSFWLVASELDALKVHLLVRTSMFFCFGWPLFASSELETCER

SEQ ID NO: 48521 - protein, 79 aa, Zea mays
  Clone ID: 700142463_FLI.pep
AGFLALKICRVLAWPGHVSQSQHHAYLFPYTRVSLCLCVRFKYQVSSQNDGCSHIIQSKTSEIEREGKEVGNMVNVATL

SEQ ID NO: 48522 - protein, 140 aa, Zea mays
  Clone ID: 700157653_FLI.pep
ATMSTMGFFQDTRVVGGGSSRTARFLQYQRLECWEDAGVAPSPRSRWRWPWLPTENGKMAPPCLFNVKRLKWSKITSALILPRKVAELSAKIRHASARTEAAATICPAVVFVSPWGLPVLSRPLLVGHKSRYQYHHGKDT

SEQ ID NO: 48523 - protein, 109 aa, Zea mays
  Clone ID: 700158450_FLI.pep
RKRQFSHVERADPRRAGAMSSPARSTISAAEDVADSIDALYRKDEALAELKSEVMEALQREVRSLDEDNWMFAAPRSRINLVSRPGAYLPKQNGKLSELGQASKKTRNF

SEQ ID NO: 48524 - protein, 60 aa, Zea mays
  Clone ID: 700159743_FLI.pep
ESMLHRHSKLASFGGHAIGVATYEIHAWNTPHQTKNGAHIPCSFRFSRQDACTTLPVILH

SEQ ID NO: 48525 - protein, 162 aa, Zea mays
  Clone ID: 700161746_FLI.pep
LRLRAQEMVPGGKMVFSLLGQRPDDKPENALQLFEFINAVLHEMASKGLIDEERLHSFYIPVYGPSEKELREIVEAEGSFSIDKMAIHEPPPSRNANLTPKARAGGLRAAMEPIIVRHFGASPPAMDEFLRIAEKLIKMSHVEDEYPNKPRAFVAASLTRRA

SEQ ID NO: 48526 - protein, 99 aa, Zea mays
  Clone ID: 700259576_FLI.pep
SFPLELSIILAFVTILSRSCNSLAIASAFIVITLELCLRLEDLLQRGRLPSRTEAPCNSHYYARNKWLVMFLRTLERGRPPTKRFVLYFIKQDISVKIS

SEQ ID NO: 48527 - protein, 171 aa, Zea mays
  Clone ID: 700265563_FLI.pep
EEATSHGLRWPETQTGLHHLVREGRGEGRLLLRRRLRLHRPPPRPVPQVKHARPPDPDARLICRICAPFWVLLCRWAELESGATTIAFTPLHQRETDELSGAVQLPDSSAAGRGSVEVCFAYADVDAAYRRAVDNGAVAVSAPEDKPWGQKSGYVRDMDGNIVRIASYVRE

SEQ ID NO: 48528 - protein, 74 aa, Zea mays
  Clone ID: 700610795_FLI.pep
EVFDSRLDLSSRRVVEEMSLVLKIALFCTNESPFDRPSMREVISMLIDARASSYDSFSSPASEAPIEYDSSPKN

SEQ ID NO: 48529 - protein, 140 aa, Zea mays
  Clone ID: 700381117_FLI.pep
CSSGASPTTAAPAGAVMAAAATAVAAATVVAAAATVVVAAATAVATVAAATATPTGTGGTERWGPRGQVILFATVLFTLVQSVYLRSSRVCCCPSVFLIEGRSVSVVSAVFILGSSRPMHQPAWTADRWVLLPPSGFILS

SEQ ID NO: 48530 - protein, 193 aa, Zea mays
  Clone ID: 700443418_FLI.pep
HRPRIGADAEHAVEGVPGRQHPPAGPHVQRREAVRDPAAGPHQGQRLPRQQRRRAGLRLQDHRQLPRRRLRRLPRRLRHRHRQDRPAVQRGQRAAGEELVQRHRQPGDRLRLRRRARRHPRRDALPAMTRTLQFWFQAARLPFCCWLLRGIRLAPFSNVCRERLLNFHTRILTFLGTWQFHLAVYSTRTFSIC

SEQ ID NO: 48531 - protein, 113 aa, Zea mays
  Clone ID: 700446564_FLI.pep
FDVRTNDNGKRQSRASLSTPSKLLFQSQTVIHPYELDELHATSAHSEIGRGSCTAQTRSKRGQTPWSLTTARRDREERARWSRSRNQGRARSGKREQRMGAPPWERTGVAKQR

SEQ ID NO: 48532 - protein, 87 aa, Zea mays
  Clone ID: 700446955_FLI.pep
NFAHMLSQTERTSSVSRGPPETNQKAELNKEWEREQPALPRFSFHLPISKDSLDLKQHFTSLDGRAFGDRKGQEGCTLHNRQPKAWS

SEQ ID NO: 48533 - protein, 173 aa, Zea mays
  Clone ID: 700799219_FLI.pep
LERGISVSASAAFSAAAMPLLEILELGIVSHSVIIGLSLGVSQNPCTIKPLGAALSFHQFFEGFALGGCISEAQFKSFSALLMAFFFAITTPAGITVGSGIASFYNPNSPRALVVEGILDSISAGILIYMALVDLIAADFLSKRMSCNLRLQVGSYIALFLGAMAMASLAIWA

SEQ ID NO: 48534 - protein, 218 aa, Zea mays
  Clone ID: 700806288_FLI.pep
EEIIGRGEKGMEHDEEEELPSPSSSLGYLMLCRICHEEEDGGRATMESPCGCSGSLKYAHRRCVQRWCDEKGTAICEICLQNFEPGYTMPPKKTPVVETAVTISEHEDMQSLESREGLSGSAGYTRCSYTADQCATWCRSLAITFTIMLLAWHLVAVVTVEAAAHCTFSLLAMYLLRAAGILLPLCVVMRLIRIVQSGQEQQYGLQLLEHQRRNASTI

SEQ ID NO: 48535 - protein, 223 aa, Zea mays
  Clone ID: 700397449_FLI.pep
PLRKWRQSAVCYHTSGNARFGYQKFGREAYHTASILEKSSVTSATSQQWCTSPRASIITPPEVDACWPVRWSSAERQSVVGGGELDLEQLVLGDDADGAVGARVRGAEQRVPPRDDVVAEHAVALVHRPGDQPRRARHAHAELAVVRHVQALVQRAGQDRLVLLHLHHPRLAAVLDRHLVRPRRLRGGDACPRWPARQLGAGEADGEVSGASQGRGREVEKRS

SEQ ID NO: 48536 - protein, 198 aa, Zea mays
  Clone ID: 701175091_FLI.pep
ALPIKGPIKGTIVGLSPIQTLLTGCRGHTQHEELAEGLELTGRPFLWVVRPDFTPGLSKAWLHEFQRRVAGRGMIVSWCSQQQVLAHRAVACFVSHCGWNSTMEGLRNGVPFLCWPYFCDQYLNRSYIVNVWKTGLAVTPDADGIVGREELRSKVEQVVGDADIKDRARVLKDEAHRCVAEGGSSNYNFKKLVNLLSE

SEQ ID NO: 48537 - protein, 127 aa, Zea mays
  Clone ID: 701175420_FLI.pep
KLVPKTKHPIICFSVLRIDQVQLVPYYKDDDRVDISMLWTELPEDHGDGFHQIAALKNTYEALDGLGGNCKEGTIVGIDPTHYSYLGTVNKNQLWKIVDKGTARRLTKELGLGGARLKKLAPISLRN

SEQ ID NO: 48538 - protein, 55 aa, Zea mays
  Clone ID: 701177807_FLI.pep
TRQGPKSKCLKLVGAARTRTPSSTNYDVHSPTWGDGRPACPPSAMWTTDPGHGPS

SEQ ID NO: 48539 - protein, 148 aa, Zea mays
  Clone ID: LIB3059-018-G12_FLI.pep
DGVHFPYKGRTDQSCCTQVHNVQQIIVHPDLICHSLFSLLTVLANQSSAHHLKTHSGSFVFLFRPRMEAFCSLIPPARHFLKPVIDSLADSNTRVSSFVRRGTNLGTVIMEELWDLLRTSLYLLVNAYRKNRPMLLSLTKGTILHPSS

SEQ ID NO: 48540 - protein, 193 aa, Zea mays
  Clone ID: LIB3059-023-A1_FLI.pep
NTNNSEGSLAGAVWDVFRRQDLPKLNEYLAVHREDCAARCQAVSSVKYPIYDQTVYLNDYHKKVLKDQYGIEPFTFHQHIGEAVFIPAGCPFQLKNLQSTVQLALNFLSPESLPESVRLSQEIRCLPNGHLAKLKMLEVKKISLYAASSAVREIQRITLDPKFNLDASFEDQNLTRAVSENLARVNKRKVSCS

SEQ ID NO: 48541 - protein, 245 aa, Zea mays
  Clone ID: LIB3059-060-G3_FLI.pep
VIWYDDPRRHGGGHHHQQQQEVVVAVVLELGAAGSSCRPARGGVRPGGGRGGGVRHEQRAVHVVPARGGQDDGPAGRAVAGVLRRAGGGGPQVPVRLQELAVDGRLQHRPQARHGAAGQVRPRHAARLLAKPSRKAPGIASCTCVCVHLQQGAGARTYVSLSLSSCHLCRVCVFVLIKMFLSSSVHACTMSSCMSILCVSSCRSVRIDARCWFGLVVTYYTYAHVCHSWSCAVYVCACRAKVASS

SEQ ID NO: 48542 - protein, 78 aa, Zea mays
  Clone ID: LIB3060-013-A4_FLI.pep
NCPHLMQKAIFEWRKPMIPHSEDAVQVTQHFANHFISQARKSPNRPPADKVLDNLIYNYSPTFTGKKSKSFEEVYIFS

SEQ ID NO: 48543 - protein, 134 aa, Glycine max
  Clone ID: LIB3106-094-H2_FLI.pep
SKLRRSLMASLATLAAVQPAALNGLAGSSLSGTKLSFKPSRHTVKSKNFRSGAVVAKYGDKSVYFDLEDLDNPLQSKFFETFAAPFTKRGLLLKFLILGGGSTLAYFSATASGDILPIKKGPQLPPKLGPRGKI

SEQ ID NO: 48544 - protein, 195 aa, Glycine max
  Clone ID: LIB3106-104-G8_FLI.pep
KKNKKENQKIMSMEMMATERVCYVHCNFCNTILAVSVPYSSLLTIVTVRCGHCANLLSVNMGASLQAFPPQDPQSQKQHLSFQEPSSKELGSSSKCSKIAPFEAVEHELPRIPPIRPTEKRHRVPSAYNRFIKEEIQRIKASNPDISHREAFSSAAKNWAHFPHIHFGLKNLKLDGNKQEKLDQGEGAEKSNGFY

SEQ ID NO: 48545 - protein, 143 aa, Glycine max
  Clone ID: LIB3167-051-C7_FLI.pep
GARRIAVFSAPPLGCLPSQRTLAGGLERKIVVNINNAVQIYNSKLSKELDSLNHNLQDSRIVYIDVYNPLFDIIVNYNKYGYKVGDKGCCGTGTIEVVLLCNRFTPLCPNDLEYVFWDSFHPTESVYKRLIASLIGKYLDKFL

SEQ ID NO: 48546 - protein, 162 aa, Glycine max; identical to SEQ ID NO: 43957
  Clone ID: LIB4164-004-D6_FLI.pep

SEQ ID NO: 48547 - protein, 239 aa, Zea mays
  Clone ID: LIB148-019-H12_FLI.pep
LSWHTRMKIAVGAARGIEYLHEVANPPVIYRDLKASNILLDASFNAKLSDFGLAKLGPSGDNTHVSTRVMGTYGYCAPEYAMTGKLTKTSDIYSFGVVLLELITGRRAIDTTKPTREQILVHWAAPFFRDKRKFVKMADPLLDMKFPLKGLYQALAISSMCLQEEASSRPLISDVVTALTFLADPNYDPPDDIKDPLPITVPNLDMETTGQNGTEGGKEQLQQNEGESRHSTKNEEEGS

SEQ ID NO: 48548 - protein, 152 aa, Zea mays
  Clone ID: 700093709_FLI.pep
VNDDVCRQCSCSSSSSFPAAARAWWVSVSSSRRPVRGAIIMAAVETVVLKVAMSCEGCAGAVRRVLSKMEGVETFDIDLKEQKVTVKGNVKPEDVFQTVSKSGKRTSYWEGEATAPDAAAASGAEAAPGTAAEAPPAAAPAAPEITPAKADA

SEQ ID NO: 48549 - protein, 346 aa, Zea mays
  Clone ID: 700098028_FLI.pep
QKHSFSNTKSRHTKPQKRKNLNILLKDDDDGQALAGGPALADGETDVHMIGASRSTEERSGECNHSMDKAITVDLLLGTGNSITNSDIGDLYNVNTDDVLIANQAAVEACQQFHEAKHLPSGSPSKDKIISAPAEMKNNSPPVEVKNTCGPVKIESFCSPVEGENTSDPALEQESFLEKSPSRQPVSPGNKQELKPKKRRKKKGSLFTKKQRKVDSRTPDAKEKTEGTPSAAKNQRSTPSDVAEETESPLSGATGPGTMRSCCAGKKRKSGNEPADANKTGKPSSAVKKQKTENPTAAANATKKRATEKKLESASASQKLQVEKAVLVAVNSRRSQRVRKPKVFAD

SEQ ID NO: 48550 - protein, 224 aa, Zea mays
  Clone ID: 700087719_FLI.pep
SKESFVFRSSCCEAAEPAKGADDDDDGRCQRRRDVGTETTPLGSSCHTPLKSASPARHNTPASRSSGPLVPYAGGGGGTDISELAGFRLAKLDLGARFGAHATLVGWSSKEEEEDDEDVSKSLRHFEATVGGIACDRRGGDCRWDDDDRAKSCIRYQREEAKIQAWVNLESAKAEAQSRKLEVKIQKMRCNLEEKLMRRMTTVQRRAGEWRATALAQHLQQLRR

SEQ ID NO: 48551 - protein, 147 aa, Zea mays
  Clone ID: 700090280_FLI.pep
SKAKQENRNKKRLQRIKRNGSDNPHGTRETKLTQTPGARHEPTGELITEILLQSLNGWTNPIKEHSVSMHLEAPIPQNDDIVNPFSLILHCTLVGLPPPVLKRLVGVVILKSYRLKGDEQGTRDPGADGHIPFLHCLGDEASVDRDK

SEQ ID NO: 48552 - protein, 67 aa, Zea mays
  Clone ID: 700193946_FLI.pep
QNRYYCITLITNNQSKKNTRSTSNPISDRDLAAVPAEHPAFEQPVLDIEPRRHHEFHLRRRRRRTIP

SEQ ID NO: 48553 - protein, 119 aa, Zea mays
  Clone ID: 700343572_FLI.pep
SAVVPAGASSMAPSLLPMASSSSHSPPLHVLFPPSSPFLKFGPRHPSFCVPAARRACAAPAVASSIPFGALWVFDGMVVWSFVLCAAPSATPSNPGENPLFFLYLFLASTCTQRRLSRG

SEQ ID NO: 48554 - protein, 98 aa, Zea mays
  Clone ID: 700345711_FLI.pep
RRPVCLCPNCIVHGGQVASRSVAPSTSRRPSFVTLLLLLFFPAPAGTPATTTYPTHVSSSCTVQRRRGVRNSPLLSCATLSAASVSRLPLRPSPRPLR

SEQ ID NO: 48555 - protein, 254 aa, Zea mays
  Clone ID: 700345912_FLI.pep
SQKRTDLRDRVEDSEGESPEDGGGQDSAATGVPSGSGGGGGGGCAFAASVRRAIRGPGGGSVGRPGAGAIQARVVLRPRRRRRRLLRGDVRRVSGPRVWTRPVQRQRRLHQWRPWQQVQTSKRDVVETGHLHRGHPEREARERLRLVRRPRKVRSGEVRGDIRQAREDGPRRPDLGRDRPAAPSEQRARGLQRLGWRGSGVEDPVQSRQGRGRPPPQGRREERLRRDTVPPARAQMEISRQRHGEKLISVVREN

SEQ ID NO: 48556 - protein, 197 aa, Zea mays
  Clone ID: 700573373_FLI.pep
AAQLPRQRGVQGAARPRRGRQAAGHLRHHRRRVVVIQEFQGQEQGDANQRVRSGSGSGVSEQQLLRRRFRLRVRVGRRDVLVLPDAGGGAAGGGHGTAGFQRGSVGRGRELRAPQVPVLRDRLGRAALQLVALRRQMCCCSSVVAVSLAAADEVLGNLQAAGPCVLSRFCSVVGPGLRRRFCDRRPRVHCIGVLVCL

SEQ ID NO: 48557 - protein, 232 aa, Zea mays
  Clone ID: 700578877_FLI.pep
DNSTETATHDDPQTMMMLSKSCSLTDLLDSIDYAALSSQMLLLDAPHPHAADPPPHMVYPPAAAATHQQAIIANNTNSNDDYYDDDNLLPTAADTAVDAAAAAAVLLSSSPADTNGVNKRKRVTAVDYYGAAEPPTFFHHLDDGGNSFFSTKKLKPPPPSDSRHGGHFGTATATSYRDSQQELVHSPSSSNSNSSGGFFHQYGYGYGYSSNNPFLNLNQQQQLLLNSHIGMQ

SEQ ID NO: 48558 - protein, 36 aa, Zea mays
  Clone ID: 700461181_FLI.pep
REVERKLLHTFSLKHSHGTINFFELQDHFFLSIVRS

SEQ ID NO: 48559 - protein, 344 aa, Zea mays
  Clone ID: LIB3062-045-A9_FLI.pep
EGGPEGREGQAMALEAVVFPKEHLAGTAKARSASSLACGFRTEEVEDNGGVVLQGEAGAATTWEYWDAALCPCSTAPAGAVEECWDVRHRLSASPPPPAPSAAVAAPSSGHGKAAAAARRRRRQRPKAVKNTEEVESQRRNHIAVERNRRRQMNEYLSVLRSALPPSYPQRGDQASIVAGAINFVKELEHLLQSLEAQKRRRQGCTEPPAPAPFAGLFTFPQYSTAATGVVAGSGDGAGCGAAGARRGVADIEVAVAESHASVKVVTPRRPRQLLRMVVALQCLGLTVLHLNVTTTADQLVLYSLSLKMEDECRLSSVDDIAAAVNDILAKISDERASRHLVAA

SEQ ID NO: 48560 - protein, 366 aa, Zea mays
  Clone ID: LIB3062-045-F10_FLI.pep
STGGNDELRYCGHGGGGRRRGGGGGDPAAAGRGELGDAGQVAVLRPRRGALLGRVGSAVPGRGGEDAPAGGAAAAGGQGDGRRHPTAGRPAGVLPRARRVAGRHGARARAVHGGARGHQELRRVGRRPAGRVRARRVGRRLRRGGRVRGCRGAGGVDPRGRHQPAADGPDPRVLPLPRRRGRLQEDPRRGRRPRPVPRVRPVHPHLRAVQRGVVVDVRRGAAVPVARRRARALGELRLPDGRAGRERGRGRWRRGAGDHAAGHREDAAAGDGGGRGAAHAREHRARAAQGGRLGGVLPRAGAQVGVHVAVRGHHGDHLRVPQAALRQGRLLGLDPSFAALPITVTIVKRLLPSSKSMVDPRGWVVN

SEQ ID NO: 48561 - protein, 141 aa, Zea mays
  Clone ID: LIB3069-043-G11_FLI.pep
LKVEVDRLAAEQEPELQNRNVGDDGYRLWQQVDWEGFGIGSSMLPSEPSAAAQVPSREAEPEPHLEVEQSVSPAPSAATSYDVAVPHWFQRHADPSELMGFASRGLIKAPFVSAFERLLAAIICPGHPNAQIPCRLRDEAL

SEQ ID NO: 48562 - protein, 356 aa, Zea mays
  Clone ID: LIB3069-047-G1_FLI.pep
DTPSSNGQPKHFFQSQAAASSGVHDMHSSNGQSKHYQSQAAASSGMHAMSSSNGHPKHYFKSQTAPSSGVHDMSSSNGQPKHFFQSQAVASGVHDMASNGQSKPLFQSQEATVLQPKNEATWVYHGRPGDGKVGTSKKSRPSTSIGFITKNQSINAAKFAMNLNGQSIVSDHTKSAGATAMPAQANIPNRGLDAPRNIVSAFPANVRENQSIPSAPVAQSWISFGAATENKPTIVSPAFVDNNCGWKMPFANVQPCDDTKLSVVPQFFRHPVQVVRENSVQNKGLVIFPQLVQPDFARSQGQPQWQGLFPHMQQKPGKDVLRPDLNIGFPSPGSPPARQSSGINLEAQQPDLALQL

SEQ ID NO: 48563 - protein, 148 aa, Zea mays
  Clone ID: LIB3069-051-G4_FLI.pep
QLTQISTQADLLVVLHNLGTQTLQAFWGDLSNGNKRVKLFLGVFLIVPLACDPDTDTPRHTPDTTAPDVLVEFHINPDVSGAHCLLCKLPDFLDSIGGFLLEGASVEALVEVDGVLAGNHLVLPGPSWALLLLRHRAPSLLLPTAADD

SEQ ID NO: 48564 - protein, 241 aa, Zea mays
  Clone ID: LIB3115-016-B4_FLI.pep
RHGGVLGRDGLGRRVRRPRRDLLLLPRREPGQLLVQGGLRHVPLLRGRLGARLARRHAAVRLHRALPLHGGPQAPAVAHLRHAPRAGLLLQRLVRRRRVLRGARGPREPAAPVAEVPRRHRLLRPRTQLRADLPHVPEPVHDQREDPLLRDHERHHLRRRRRRRLPPVQLHHGHPQVEHLPRLRLRLRQAHGVQPLVAAVRVQEEQRQQGLRLLHHRQGLPRRAQMRARQLLPHHASHLVN

SEQ ID NO: 48565 - protein, 418 aa, Zea mays
  Clone ID: LIB3279-006-F6_FLI.pep
VSGHISEKMFMKGYGGNLGKSYLKANMLAAEAVSNIRTVAAFCSEEKVIKLYADELREPSKRSFRRGQGAGLFYGVSQFFLFSSYALALWYGSVLMSKELASFKSVMKSFMVLIVTALAMGETLAMAPDIIKGNQMASSVFEILDRKTDVRIDTGEDIKRVEGLIELRGIEFRYPSRPDVTVFKGLDLLMKAGKSMALVGMSGSGKSTVLSLILRFYDPIAGRVLIDGKDVKKLKLKCLRKHIGLVQQEPALFATTIYDNILYGKDGATEAEVVEAAKLANAHSFISSLPEGYKTKVGERGVQLSGGQKQRIAIARAIVKDPAILLLDEATSALDVESERVVQQALNRVMRNRTTVMVAHRLSTVKNADVISVLQDGKIIEQGAHQHLIEDKNGAYHKLVSLQQQQQMQTQQSSSEDI

SEQ ID NO: 48566 - protein, 365 aa, Zea mays
  Clone ID: LIB3279-020-F11_FLI.pep
KDINYSMESSASDRSSSGPSEKQLYDKQGKGIFHPVCGVKTRKVTADEAAAIVMAATRGLGAANDSLNTMKGTKDNVRTHVSNDPSSSFGSFSSLQDRDALSKHISNSDVDASLTSSGQPQREGFGIIDDDWIANTIAKAAAAAASKDADSSEASMTKEQKLKADRLRRAKMFAAIIKSGDNKMNDLAAASNPTSEAAKAIPDMNASGLDLQSVAKEREGSSSVLFDHEGPNLTKHSKDSDDEQNRVRKYRKKHQESDEEKYESEDSYKHSRKKHRLEHSRGQSKDVHKHKHKSHSNDRESRHHRHHCSSSEDEHEHERWSSKSRHRHRDDHRYSDEEHTDEEHRRSHKHRREHHSTSKRKHEED

SEQ ID NO: 48567 - protein, 243 aa, Zea mays
  Clone ID: LIB3356-018-B1_FLI.pep
PSTLPTPTPAPAPLRTDAMPPVKWLMHWHPSPGATLNSQILAEACGCAESLGGSKDGRWKTSIFFYRAMTRDGAGGPAVQQHPDLPRELLGVALHERPGLYFSIVRAQRLVLQADAAFPQVMEKLQSYRIRVALNFEGFQYQLGDFCLRIGKCVPNNSEALRGIMMEVEYYPLTSIEKSKAVMEDFFDIWQETVAKKSLPGQFIHVDSNFSEYGLSDQYSFQHTAVQYATCLQQLMAAVTVRG

SEQ ID NO: 48568 - protein, 281 aa, Zea mays
  Clone ID: LIB3354-028-C10_FLI.pep
YDGAVAVLREGAHQQGRVDQGGGRAAGGLRPRARRRVLALAAQGGGPAALRQELPPALDQLPPPGPQARQLHRRRGRPHRQAAQPPREQPNQASKQAEERPPVVALPLPAGGRSSPRGSRGGRTTRSRTTGTRTSGASCWAAASTPSRTAASRGAPRPPSRSSPAPTPPSPPPQKQQRRRRSRPRRRRPSRRPGAPTSTWTSASARRASMRTTARRRRRSWTSSSPPSSSGRRCRPATATATASASAAAWADRRERPGAAAATATTSWGSGPACSTSEAWR

SEQ ID NO: 48569 - protein, 116 aa, Zea mays
  Clone ID: LIB3356-058-E6_FLI.pep
SMALLRVVSTAVLPAACCVVLLLLSTTTAPVAMAGSLRDDCRAFCRPRCEGYGADLCHALVNGFPLLQNVLEATCAERFYEVCQPICMNICTANTLTPAAGPGTAPPPPPPCGKQY

SEQ ID NO: 48570 - protein, 273 aa, Zea mays
  Clone ID: LIB3062-054-C4_FLI.pep
ATNPAQDDGPGPAGGWETREFTSRDAETRLRTPVFFASIDQRDGSAGGEGACAALAAVLAAALHAVHPAMPTRPELDALIRDGSSEWRRLCDDEARAARFPNRHLDLDTVLASRAWPIAVRHDRAFVGFFQPESFASLSGAMSFDDIWREIAAGGGRADVYIVSWNDHFFALKVESDCYYVVDTLGERLHEGCDKAYMLRFDGSSEMRAEGTEEVVVAGKECCREFIKRFLAAIPLREELEIEKKGGSGIDGGGAPHRRLQIEFHFTAFTRRQ

SEQ ID NO: 48571 - protein, 108 aa, Zea mays
  Clone ID: LIB3279-173-G8_FLI.pep
PPETSNCITFESQRIGDASATKRSQTRCLVVITVRIPSGSKSNKMFGVDNSTERLMILFESQLSSSFVCRASRTDIFVHHVSSNNHDKISLISSMHNQTHLVLKICII

SEQ ID NO: 48572 - protein, 161 aa, Zea mays
  Clone ID: LIB3594-024-E11_FLI.pep
FHNLEQSRGGGPSMAQYCLGNTLGRPTNRIEIRVRHGVPHSRTASVPHSCLLGRRPLLPVLQPPGLQPLGASDSSRSSRQLRCSADLLVRLTGCLVPPAAGCGLLAAWSRRGADPHGRTAAACRCFLLGRTSACLVVCLADCLMLSASSCLLASCFYASSC

SEQ ID NO: 48573 - protein, 269 aa, Zea mays
  Clone ID: LIB3594-031-H9_FLI.pep
IRHWLCGISRRACLAASADGWRMVESRRPVSPTRSTSAMAPCSQSRPPRIHSFACTGEEPRVVRLHLHGRRQGQLPRATAQAGEAGWPHRLRQHAVERLHRAPGRRAHAQVHPLLPRLRARPQHGARRRRARRDLPAPSFMWCCVSEENATSNFAAIDASLGDATGEGVAARGLATRGARAASSAVALGFSGEAEKPREEGKLMLSSADEGPGDDDAVEEPTPRTVQLRVRGAAPVTVPILGSGTASSPYRRLCLAPRLRPCSSHPFEC

SEQ ID NO: 48574 - protein, 142 aa, Zea mays
  Clone ID: LIB3061-091-E10_FLI.pep
AGAEYERPLGADGALAARGQDEGLLAGRPPDAGAGRPGRAAALAPALRRRAVEEEALPVGVGSGSPWCGGGEEVPRVEAREVGVGDDAGGERAGQRLAAEVVQQQLLVGGAEAEADGQARHGRARPPALHRRPTGSKQDWVS

SEQ ID NO: 48575 - protein, 122 aa, Zea mays
  Clone ID: LIB3354-114-H5_FLI.pep
LHSSSQQTHFTQLHTPSFPVHDMISKKKRHHYYVEILLRNVLQRDLFDGHEIAILQVKPLVYAAVRPLPYFISKHVFVVKRLGFVELRIVLPRRHVAAASVTGPRAPRERLDQQSTAAVQSL

SEQ ID NO: 48576 - protein, 522 aa, Zea mays
  Clone ID: LIB3591-067-E7_FLI.pep
YELVLPTEGYAMAVLTLVNILISFAACAEALRRADFPQGFVFGTASSAYQYEGAVNEGQRGPTIWDTLTRRPGRVIDFSNADVAVDHYHRYKEDVDLIKDIGMDAYRFSISWSRIFPNGTGEPNEEGLNYYNSLINTLLDKGIQPYVTLFHWDLPQALEDRYGGWLNSQIVDDFVHYASTCFKEFGDRVKHWITFNEPHNFAIEGYDLGIQAPGRCSILSHIFCREGKSSTEPYVVAHNILLAHAGAFHTYKQHFKKEQGGIIGIALDSKWYEPLSDVDEDTEAAARAMDFELGWFLDPLMFGHYPPSMQKLVGDRLPQFSARASMLVSGSLDFVGINHYTTLYVRNDRMRIRKLVMNDASTDAAVIPTAYRHGKKIGETAASGWLHIVPWGMFKLMKHIKEKYGNPPVIITENGMDDANNRFSKLEDDLQDDKRIQYHKDYMSNLLDAIRKEGCNVHGYFVWSLLDNWEWNSGYTVRFGLYYIDYNNNLTRIPKASVEWFRQVLAQKTAGLEYSGSTVASS

SEQ ID NO: 48577 - protein, 162 aa, Zea mays
  Clone ID: LIB3591-069-F6_FLI.pep
IDKITRPKPGWAHTSVPPAAAATAAVAATATLAPTAVAATASVAAAATFAPTAVAAATAAVATAATATATGLGLVNGDVTAVELLAVHVLDSVEHGVLGGEGNEAEAAGPPRLPVGDDLGVEDLAVGGEGILQRLVAGGPGKPADEATVLHISRRHRPSTKP

SEQ ID NO: 48578 - protein, 223 aa, Zea mays
  Clone ID: LIB3591-070-F1_FLI.pep
KKGSRAMPTRRGRTRKGERRIDAAIDHFVVMGYDARDISAVVADLLKVYGGPDAWPLLEEGSYEVVQNRLFEIEDEEKQKQDQQLLLEHHDQQLLLEHHDHQLLLEHHDQQQLDCQQVEDERPQHQEPAADEGVEVPMFIEPQDNISISKVPAETKSADDEVEGPMSIEPPVCEAVLPLNVAIRTRPRRPCYGWLSESEDEEEEQPTGQKHEVHVLSRGERAQ

SEQ ID NO: 48579 - protein, 298 aa, Zea mays
  Clone ID: LIB3587-274-D3_FLI.pep
EGRRIFRIQAEQIKIANEMTNLYIPGYTYLPTKPNRRIKANAREVEALLRGIITKRETAMKNGHADDSDLLGKLMQSNVEEAHGGGGSSKPMMTMEDIIGELKLFYFAGMETTSALLAWTLIVLSMHPEWQDRAREEVLEVFGKNEPNINGTNSLKVVTMVLYEVLRLYPPIIDLERQTWKEMELGGVRYPPGVTLLLPILAIHHDPDLWGEDVDQFRPERFADGISKASRDTPAFFPFGWGPRICVGQNFALLEAKVALAMLLQRFSFGLSPSYTHAPFSVSTVQPEHGAQIVVKKI

SEQ ID NO: 48580 - protein, 119 aa, Zea mays
  Clone ID: LIB3279-228-H8_FLI.pep
YKCSVQKRLSHRRCSYTPPRKFCYKCRIWKIPIELYAYQNVCCSVTPTATDGRPPAGLVPKMKENGEDVGSSFFPLPLQCTIVYSTYNATPNLLLTPQKKSHLSLPQETSSCRQQGLPL

SEQ ID NO: 48581 - protein, 273 aa, Zea mays
  Clone ID: LIB3279-230-B12_FLI.pep
LCSMPLYINYRHVKQKSSTNAKVWSASLRSPLSTSEYGVRSLSVALVLKIPPCQQDASQIAQALLSRSHTLPPSLLLRCTGCRAFLSAIPLLSYAEWDILVLDHMHNLSLHCQDKKHNPITEKYWPKDRNVEYREEGHDKGNAKGFCDGIPELELGEATDEGLELVGAAGWEPGPGLELRFDHGGQESDEEVDQVDAQPVGDDVEAPHVVDPQRVHRRGHERARPPPRRVRRRAVQVVLERPRRLRAPPLRRAAGADGGGLHGCRLGGLGFVP

SEQ ID NO: 48582 - protein, 283 aa, Zea mays
  Clone ID: LIB3060-065-B5_FLI.pep
WLERFPEYKSRPFYISGESYAGHYVPELAATILTQNSYNSKTAINLRGILVGNPLLDSYMNLKGAVAYYWSHGLMSDEVFDNITRHCKYDSSDGVACSGALEAVDPGQIDPYNVYAPICVDAANGAYYPTGYLPGYDPCSDYYTYSYLNDPAVQNAFHARMTSWSACANLNWTDAPISMVPTVAGLIEKKLPVWIFSGDFDSVCPLPATRFSIHDLNLHVTTPWRPWTVNMEVGGYVQQYQGGFTFASVRGAGHMVPSSQADRALVLLDSFLKGVLPPYVQEQ

SEQ ID NO: 48583 - protein, 97 aa, Zea mays
  Clone ID: LIB3060-065-G6_FLI.pep
LPLAFLHTKKLVVLVPRKVPLRPRKLLLRHLSSLAVVHQGQWKMHRTAGRGSNEIEFVFFYRLCYILWMHMILPDDSQVSALRGSVCKSLPRACFNA

SEQ ID NO: 48584 - protein, 58 aa, Zea mays
  Clone ID: LIB3068-016-C12_FLI.pep
GWGGFGGGDMAVGMTNPKRMLQAVVSYSFVQMRYIIFPAYLLVGLCKYRCCIYRIRLL

SEQ ID NO: 48585 - protein, 441 aa, Zea mays
  Clone ID: LIB3068-027-E3_FLI.pep
LTVSSQPARSRRCFLAAPPRAVCRPVGLDPRPAEEEDADDEGVGAGAVVGGGGAAAGAGGAGAVGGGGLPPRRRGPQAGVLQEDLPGRRERGQVPRRQGHQGQPRRRRRARPPHLPRLLRQGVRRVGAAGPDAGEPGDGEDGADQHRAGGVRGDRRDQGCAGGAVPGDCVVRGHRGVRGPGRVEPAEQRARPLRGARGAAGRRGVPRRRRAARPAGLHLHRVRADPQLPAQELHGGGAGDPVGRARRRRRPLLLVPRAPVGAAGADRAGVPEPAVGQVRGGGGRRRRPRGGQQRARRGPARRRGGLPVLPREAAQGQGLSGQQLLPQQPGKDRHLQLRLATAHGEGGAGARQGVRRERHPLGRGLLRRAPQAQPAAHAAAQQGRDQEDVPLGQPPLILLKLCTRPDGNIPDGSSRRFVSIFFHFVAVCLFDYYLMICMCFF

SEQ ID NO: 48586 - protein, 341 aa, Zea mays
  Clone ID: LIB3332-021-G7_FLI.pep
ASTAGLVSSGQVKREMASPIPREWVGLQQFPPATQTELHELLGKLKEEDVSTLTILVMGKGGVGKSSTVNSIVGERIATVSAFQSEGLRPMMWSRTRAGFTLNIIDTPGLIEGGYINEQAVDIIKRFLLGKTIDVLLYVDRLDAYRMDTLDGQVIRAITNSFGKDIWRRSLVVLTHAQLSPPDGIEYNDFFTRRSEALLRYIHSGAGIKKREYGDFPLPIALVENSGRCKTNEHGEKILPDGTPWVPKLMKEITVVISNGSKPIHVDQKLIDGPNPNNRWKMFIPIILAVEYFLVVKGIRRAIHADIANGKVDDWEQRYRDLVGSRDPVEQKGSTTRNRKA

SEQ ID NO: 48587 - protein, 147 aa, Zea mays
  Clone ID: LIB3332-035-F1_FLI.pep
HSRLRAHLQTLITIRLQGLEMKSRARSGGGDSRLSVRKTKVEKDPNKPKRPPTAFFVFMEEFRKDYKEKHPNVKQVSVIGKAGGDMWKSLSDAEKAPYVSKAEKLKVEYTKKMDAYNNKQSGGGPTLSGDSDKSKSEVNDGDEEGDE

SEQ ID NO: 48588 - protein, 72 aa, Zea mays
  Clone ID: LIB3114-056-C11_FLI.pep
LSVMACSEVFDSSKGGAEKMCREMGVPFLGKVPMDPQLCKAAEEGRSCFSDQKCGASAPALQSIVKKLIKTG

SEQ ID NO: 48589 - protein, 134 aa, Zea mays
  Clone ID: LIB3355-002-D2_FLI.pep
AAAYVAAQPRRARLGGLQRRSVGEVHGLVARRRLRRGMEGLAEGDRVRGLRDLGVRHGHGELCHHLAACAGGDHASAGGKICLVDVEGAAPLISLFNDLVPLVARLSLDGGRWVDVAGADGLGLVVVHAADLRT

SEQ ID NO: 48590 - protein, 195 aa, Zea mays
  Clone ID: LIB3356-027-A5_FLI.pep
PPLMKLSKSSHSEVTLLMILQNPASAGVPGHALVPLHPPGRRHGVVVAERVHLLVHQRDVAVHLQAEPGGVAGALRAGDAVQVALEVVPGGGARAGPLEVRRLARVQQQLHADILVEGVGQDGGHDVGRVPDPEQPGAGRRVERLLELVVAHAGAAEDDGGDGDRVVVGAPDVEAVGDDVDGGERGERRAQAVAG

SEQ ID NO: 48591 - protein, 172 aa, Zea mays
  Clone ID: LIB3592-003-E5_FLI.pep
GGVVSDDEHRRPGLLGSGRARHRLRRYPPPFPPRRHGLFLLLAVLGGRRVPSAAGLDLDAYGLELVQRQGGDPGAGQAQHPGLAAVLVVVPVTIFPSRAMHEPLLLLLLHLRQPHDHLLLLLLLLLSPLCLLVLAQPRMQAMEMECRVRVCMRVSESFVGAHKERGVLLEAK

SEQ ID NO: 48592 - protein, 128 aa, Zea mays
  Clone ID: LIB3593-006-A3_FLI.pep
SAYWIYALAVFVGLAADTLSRYLSTTSRPQSSLTTGIVAGTSIWNVMAEFAGPVQTENSFLAALMASLIAQCTEEARRSGGSPDALEERTRFWSRALLISSTLNCFGMVSTVGILYVHVPSWMTNPSE

SEQ ID NO: 48593 - protein, 154 aa, Zea mays
  Clone ID: LIB3354-083-D2_FLI.pep
RCIPFRYRDINDGASDDEQKKLVEVLMISSQSGPGLLFPKGGWENDETVEEAAAREAIEEAGVRGDLVQLLGFYDFKSKQPEATCRAAIFALHVKEELASWPEQSTRQRSWLTVPEAAERSRYPWMQEALVTGFSAWLENWRNGGGGCADRTER

SEQ ID NO: 48594 - protein, 252 aa, Zea mays
  Clone ID: LIB3354-087-B10_FLI.pep
SHARSGVMSWIARSIAATLSSPRSSDADDADYDPASAQSGAGPEEEESHGSSPNPGPEAGEPEQPGTPSRGVKDDISELTETLTRRLWGVASFLAPPPTPPEASTPRAATPAQGEDEGIEDGEEAAVLSPRTAGIRSDLAEIGGRMWSGFSMLQNNLAVAEISKIASSLLPFGQGEADEGESVPGITEEVVVFVRHISTRPETWLDFPLFISERYADGIAKALRTCVLYFSIWSLLTWKGSDWRGAWFRTND

SEQ ID NO: 48595 - protein, 292 aa, Zea mays
  Clone ID: LIB3587-203-E8_FLI.pep
KTRRERGRPGAGDSAADDDLVDVLLRLVEEDEDRPETTEASRLTRDGVKAFVQDIVAGGTESSAVTIEWAMSELLRRPDALRAATAELDRVIGHGRWVTERDLPDLPYIDAVVKETMRLHPVGPLLVPHHAREHTVVAGYDVPAGARVLVNVWAIARDPASWPDAPDAFRPERFLNGSSGASVDVRGAHFELLPFGAGRRMCPAHGLAMKLVTAGVANLVHGFAWRLPDGMAPEDVSMEELFGLSTRRKVPLVAVAEPRLPAHLYTNVTPPQQVAGSTIANLSTRPEYKLVF

SEQ ID NO: 48596 - protein, 110 aa, Zea mays
  Clone ID: LIB3587-223-F7_FLI.pep
VVSGGVASNKYVRTRLNHVAGNNGLQLVSPPPSLCTDNGVMIAWTGIEHFVAGRFEDPPAADESDDMQYELRPRWPLGEEYSEGRSVARSLKTARVHPSLTSMIQGSLQK

SEQ ID NO: 48597 - protein, 281 aa, Zea mays
  Clone ID: LIB3587-225-G3_FLI.pep
KRGLVFQVVLTPTHLAIVMEYAAGGELFERICNAGRFSEDEARFFFQQLISGVSYCHSMQICHRDLKLENTLLDDSIAPRLKICDFGYSKSSVLHSQPKSTVGTPAYIAPEVLARKEYDGKVADVWSCGVTLYVMLVGAYPFEDPDEPKNFRKTLTRIISVQYAVPDFVRVSMECRHLLSRIFVAKPEQRITIPEIKNHPWFLKNLPIEMTDEYQMNLQLVDMNVPSQSLEEIMSIILEARKPGDGLKHAGQLPGLGSMELDDIDVDDIDVEDSGDFVCAL

SEQ ID NO: 48598 - protein, 196 aa, Zea mays
  Clone ID: LIB3592-042-D2_FLI.pep
IRTVSTEFSFAVHLIFLQLRGRQKAIKRPHVRHASKARTNNRDNNTVARTLIIYHPPALQLQRGRAQLWQTLAVGMVTQMAAYFFFASGVPFLGPAMAAPAPPMAATAAAAAASMTARRPSAAGLASVAASVAGSWQRSTLADLTTAKVPRREGAATATAAKDAIMVSDAIALRWVRGAAAGWWWWFVSCGRGSLA

SEQ ID NO: 48599 - protein, 110 aa, Zea mays
  Clone ID: LIB3279-176-B5_FLI.pep
QSPNSTCHLIIRRMVLQAPPTFEIFGTSTGKLSISSIQGLFSLAGFTVRSAFQTALLHLNPEPNAICQILSRFLILPFASVYASSYQSELLDVLPNLYRVILDGSMCQSV

SEQ ID NO: 48600 - protein, 174 aa, Zea mays
  Clone ID: LIB3592-071-E8_FLI.pep
ISGPFDNGGTSTTSMGVPPRDDDDDPAGHGRPRPRDDDRPPPACPPPPETTTTSAAGPSALAGDPNVWGPDAGEFRPERFLDGSKRSKVDVRGQDLELLPFGAGRRMCPAHGLGLRMVQLVLANLLHGYVWRLPGGMAPEELSMEEKFGISVSRMHQLKAIPDPRLPHHVYFGP

SEQ ID NO: 48601 - protein, 98 aa, Zea mays
  Clone ID: LIB3592-077-B10_FLI.pep
HAEHLPHGVLLLPPWPSSSPLFSGGRAPPHNSRARRSPSIASRCAPSALAILKETQCQHSSSTNKANQGWRHGGEGIWTRQGSKAQTCAEAQYQDHGP

SEQ ID NO: 48602 - protein, 132 aa, Zea mays
  Clone ID: LIB3060-100-F10_FLI.pep
DNKECMVADPIAVIPCSVMATGHRAPAPGSLPLPWSPALCRTCHVRCRSSIFYSPWSSCRLSLSELAQLTSRRALFARWAVRCRVHLVVSSWTCWRAAVVSESRSPQLGRVVMPSSSSNENCCADTLMPSIA

SEQ ID NO: 48603 - protein, 302 aa, Zea mays
  Clone ID: LIB3060-109-H1_FLI.pep
TTTLLPRLVIRLAVLAVVLPVLLLLMMVMLVPVRVLHLATAAGSGTHLVVELADRLRGEHADVTVLREAELEPRHGRGVSSEHGRKADVAAGGAASRQLQARGDPHPLHDAADTGAVARARGIQEGGRGEAGGRRPHVVRVVVVRPGEPGGRRRERGRDGGERGRRYGARAGGGDDGRLGLLQQPLHSLAVGLVAELPRELEDPRGAERRHPDPAAPAVDLGVAVLVGAPLGGERLLPPIPGLRHHLQQLLLLLHSAAPVLRRRRRLVDLDLQVGVMVVLLLLLVLRRLLLVVLRIQLMMLR

SEQ ID NO: 48604 - protein, 303 aa, Zea mays
  Clone ID: LIB3060-112-D10_FLI.pep
CVKFLRPCRRLHHSGARIDFFLCCAVITELKQFLRASVTIAMEAGRMDQPCMASINSQPFVADIEPVKKASGDMPAAPTGSGCFDCNICLDFAAEPVVTLCGHLYCWPCIYEWLRPGVEESTASDNGSSARRQCPVCKATLSPDTLVPLYGRGGNSKKSLDGMAILRRPMVHREAVEQQNARSNVNDQHYHQSTGDSSQHQPLMQAHHHPVPPGFDFIYPPAPVGRGLIHSTAGGVLGGMAEVVLPWVLRGQLPASLHYTSPYHVAAQNVNPRLRRHQMEIERSLHQIWFFLFVFVLLCLLLF

SEQ ID NO: 48605 - protein, 236 aa, Zea mays
  Clone ID: LIB3066-021-H5_FLI.pep
PLRLLLHRPASSVVGEMGQQRTLVYSFVARGTIVLADHAEVSGNFASVAAQCLQKLPANNNRFNYNCDGHTFNYHIYDGFTYCVVATESAGRQLPVGFIERVKEDFSKKYSGGKAKNASANGLKREYGPKLKEHMRYCDQHPEEIDKLAKVKAQVTEVKGVMMQNIEKVLDRGEKIELLVDKTEDLRSQAQDFRQQGTKIRRKMWWENMKMKLIVFGIVVALILLIVLTVCKDLNC

SEQ ID NO: 48606 - protein, 316 aa, Zea mays
  Clone ID: LIB3066-022-E9_FLI.pep
EGPTFGTRARMETPPAKDGLKMFDGMGSTSAAMERVINSSSVELPLLTKANYHEWALVMQVSLEAMELWDAVEAVCKERPKDRRAMAAILRGVPPEMKAGLAVKKTAKEAWEAVRSMRIGDDRVKAASVQRLWKEYENVGFCDGESVGDFALRINGLVASLREMGETLEDHRVVKKILRVVPKRLKQVAVAIEMLTDLNTTTIEELVGRLRVAEDADADDAKAKEVSTEGVGQLLLTEAQWEARRRERNKQRKPRDGDKRRGNGDRGNNGDDEHSDGDDDASSMASGSSRRGWSRNKGQCFECGGYGHIARFCREK

SEQ ID NO: 48607 - protein, 168 aa, Zea mays
  Clone ID: LIB3067-022-E8_FLI.pep
FALKPDDSTINKKKFRCPNCSYISSSALLVKCSNLLGKPQMQKHNFKPRSKSRVSLKHVTHLVRLDILLHYVKALRFFTVVLDDDTGAAYNLPCLALRVNLAKPGPLAKSLRGRNSDQVNIVLSAECLHQLDVIWLVTVLSKHAKLSGVLLDGLGSLTETLHKSVMST

SEQ ID NO: 48608 - protein, 136 aa, Zea mays
  Clone ID: LIB3078-016-A6_FLI.pep
GALHPDPPPPCLPCCIRRPRSMRSEAHVADESFFFSFSSCCFSKIQVGWPCLSVQELKQVSALLVVMVSIGTRTLRRFIPIFAGEVLCQRCHTRLFCSHILRFPVRTGGACILRWGSWISLWTEAQTASLASPRCW

SEQ ID NO: 48609 - protein, 120 aa, Zea mays
  Clone ID: LIB3079-005-B3_FLI.pep
HKMPFFSLPIRSTPIHRHWKKKRIKNQSASKPFLMCLLQRTPGGFGDRQAGVLWQRDKHSPVELAVVAKHSGFQEMLLQYKCAKWVVRECGNQETKTGKNQNLQRHLSCYEYCVLIGPKN

SEQ ID NO: 48610 - protein, 400 aa, Zea mays
  Clone ID: LIB3180-011-A8_FLI.pep
AIMSRRLYQHAAVMSAWAPAAYTLVLLLYLLAGAVVTAKTNNGVDPGPRQQEPSMPVDSSGDEALSALTCTEPSRARQLAVLSCGPYDVFIYGRRLRLHSPPKEARSPEGMATGSEASKAAEAVVDWHKQDSKRMLHAVYRVGDLDRTIKYYTECFGMKLLRKRDVPDEKYTNAFLGFGPENTNFAVELTYNYGVDKYDIGTGFGHFAIANDDVYKLAENIKSKGGKITREPGPVKGGSTVIAFAQDPDGYMFELIQRADTPEPLCQVMLRVGDLERSIKFYEKALGMKLLRKKDVPDYKYTIAMLGYADEDKTTVLELTYNYGVTEYSKGNAYAQVAIGTNDVYKSAEAVDLATKELGGKILRQPGPLPGINTKIASFVDPDGWKVVLVDNTDFLKELH

SEQ ID NO: 48611 - protein, 63 aa, Zea mays
  Clone ID: LIB3180-046-H8_FLI.pep
VTKHQLKTILKNKNAATHIYTRTVTQFLTLTNKSATALRARSSSAHNTASPDCQRIVNLSIRP

SEQ ID NO: 48612 - protein, 112 aa, Zea mays
  Clone ID: LIB3279-045-E9_FLI.pep
FYYSTFMPFIYYLHFFPEVFSASTLFSVNVFDCCLLLLYVGPFCCVVVHAVVGMAYCGGYEGPMFLCGSDNDTVEPRQCQQADFSDWNLWFFLKIEYVLASYKDLSECKHLF

SEQ ID NO: 48613 - protein, 97 aa, Zea mays
  Clone ID: LIB3279-055-D12_FLI.pep
THDDHLNLNETNQTPYKFYSVQFRVHSAAFLSDTYLTYSLDFSAKQRHNHALHNTPLLRLTPACGRGHGNSRRQRLLPDAEKAAAPAAREKQEDTQV

SEQ ID NO: 48614 - protein, 110 aa, Zea mays
  Clone ID: LIB3332-014-G4_FLI.pep
ATYHSLQQGGRTYPSLHHFFPNLVWLMPLTLSDDFHNVHLFIPASAQETASILLFGSNSSGRPPCATPFPPKRTFSARTSSFSILSNNSALLLLPSLSLPTSSETTFSAT

SEQ ID NO: 48615 - protein, 92 aa, Zea mays
  Clone ID: LIB3332-020-F1_FLI.pep
HHPAGLRRHGPLHQLPDHVPALDLPRRLHALPALADHRLHPRLCLRLVIDLIGSSEHLVFRQPPVFLFDLLVILTICPDFFSCDAVIMFYFL

SEQ ID NO: 48616 - protein, 371 aa, Zea mays
  Clone ID: LIB3357-037-G3_FLI.pep
RHSLRLSKVPAEAVLCVTASAAVEMASSSASSRHQVTITLGRSGQVVKRRAMSDDINDGELPLLGKKRSVRDRLGSNVSDSDFYESQQRNKRRQLESNSSHGDDGSDRLVGKGDLRLKLMRKGLLPRSNGSAEQNDIDLREKLSRNHKLPNYDSRGHAAESRASYDMRDEPPELSSRYSSREDVLGSRHSSVVSRVPYARSVDDLLKLDYSRKSYPSWTDDGLRHRSPERMLKVRSDMYPRIAYDQIRPMPPLRSAGSSRPQSFITRDAPDTSRSQPYAGKSTISIDTVQRTNGITPSTAALPKAPVMDEAPLTVTGLLNSLGLEKYVVLFQAEEVDLSALRQMGESDLKDMGVPMGPRKKILLAVGPQSK

SEQ ID NO: 48617 - protein, 183 aa, Zea mays
  Clone ID: LIB3357-052-A9_FLI.pep
TCPMVAAAPGILPWPHLPLPSSSHPSDASDAAAAATDANTSAYDIQIFEPTSIEERRRLLIQRRRLRLAASHASRLTVASRVSSKLISATASCSSGVASDLPPPLLMARRCLPPLPQPRPCRPWRIPNPTTSSVGPRRRGCAMNFRLMCISDILSSSVRFCIDGNGFQNSTQGNFKTVIQLLK

SEQ ID NO: 48618 - protein, 200 aa, Zea mays
  Clone ID: LIB3279-174-C7_FLI.pep
CLRPSLFGGARPREQVLKERGVDVLASDLERISPVGRSKGEFAKVEQKVEALSINPSLERADGFSAGHRGPRSVDKKDYRRDTEKADAYRPSRREDNRVARDMEKPQEQPRPEPETWRKPVEPPKPEVATPRFGKAATALELAQAFSTSMSDTAPQNRLTSVPSPRVPLSPGARDQSGFSRLTDSRTLRSSPSQRKINGY

SEQ ID NO: 48619 - protein, 335 aa, Zea mays
  Clone ID: LIB3592-001-B7_FLI.pep
VSLYQYRQAQAGMAAAAFLSPDQASAAASRSAQSIYVQNSRYLKAARELLDEVVNVQDAIKRKGDKSQQGKDSGGGGGGGEGKDAETSDEKAGEHEGNSSAPELSPSERQDLQNKVSALMALLDQVDRKYRHYHHQMQMVMSSFDAVAGAGAARPYTALALQTISRHFRSLRDAVGAQVQSLRRSLGEKDGSAQGGGLPRLRYIDQQLRQQRAMQQFGMMQQPQHAWRPQRGLPESAVSVLRAWLFEHFLHPYPKDSEKLMLARQTGLSRGQVSNWFINARVRLWKPMIEEMYREEFGAEMDSHSSSENAAGNKGKDEAISSEDHEEFQSPSSAA

SEQ ID NO: 48620 - protein, 191 aa, Zea mays
  Clone ID: LIB3061-099-H1_FLI.pep
SLSSDPPVVPGPVFPPPPATASRAPRRSPFRPQMEPKKSSAQRQPHAMEPNKSSLCGATAPAATAEAESPLCSLFYPPAPTAANGKDSDLYSILYKGQSGSAQAGVTDGKPQWAPSSRSRAANAKDGKHSPPYDSVDTSCFGSSVDYGGRDYFYGSSTPKKVTESSTDYKGNKKDPAADSHGDWWQGSFYY

SEQ ID NO: 48621 - protein, 107 aa, Zea mays
  Clone ID: LIB3061-101-E10_FLI.pep
NQRFIRVAMAPSASMLFLSYHQLHRPTEVGTPPPPPRREAAAPGGFWRRMSVSSVLSPALLQWRPEGEATLHERDAGEEIKSSAPADADKELESKFEEALRLSCWSS

SEQ ID NO: 48622 - protein, 97 aa, Zea mays
  Clone ID: LIB3354-118-A7_FLI.pep
YIKTLLNTKRRISFRGSKESLCLVKGKAFEQGKKISNLENGLQNPIHLPLTICKRTLKWIYKKNLQKQNMWCNRGPKCYTKKQLQKKTKKLILKNSK

SEQ ID NO: 48623 - protein, 150 aa, Zea mays
  Clone ID: LIB3354-118-C9_FLI.pep
KLTEARLADDSLCLGPLLLRAGSGSLLARLRVGGRQGLDALVALPGQGLPPQRGHVPVVRVLFPLQLAEKLRQPLPVHLPHHLLATCFVSRRGPWNSHKCKHRGLGTGRGAKVGLELLVAGAGELHHAVADYAGDDAAQRREREKEGLRV

SEQ ID NO: 48624 - protein, 69 aa, Zea mays
  Clone ID: LIB3592-035-D3_FLI.pep
CIEEQSFEPWSSLEVLHDWGKKGHGIVAFMSTATSNVHIAWLCNNTVDHHIHQQQAIRLPMRRQPQTST

SEQ ID NO: 48625 - protein, 163 aa, Zea mays
  Clone ID: LIB3592-036-G11_FLI.pep
NPSCFSASIIHQQTIMLLFGHPSKRKVQTLAHLHPNHLKNPLVQHQLHNEGADEADHAGPGVPNLRGLGEPQEGLAQLRLHPGRFNPWRKFRSTRSQSSGSWSWRRWQAWSESLAGFIAAEGSMDRQGWRGKATTPCCHCWRALFAAGEGLGSRHLAAVAYPT

SEQ ID NO: 48626 - protein, 109 aa, Zea mays
  Clone ID: LIB3592-055-A1_FLI.pep
LSHPAAALAPATSRICPVALAVVPPTVTMQNEEGKTVDLYVPRKCSATNRIITAKDHASVQINIGHLDANGLYDGHFTTFALSGFVRAQGDADSSLDRLWQKKKADIKQ

SEQ ID NO: 48627 - protein, 170 aa, Zea mays
  Clone ID: LIB3592-066-C1_FLI.pep
LCAGELLLLVRLDDDVRGGVGVAGEHPAVGDLAVVEVALVGLVHGAGDDLAGAGGAGPRAAGVGQVDAVLLGLVQDVHVVGHLQLHLPLRRDQLHVVGGLRAQPAPAAGATAHDAHLGRRQRHGGRRRRGAEGGRRKEEGRRAGAAQDGGHCCGGSGRGGVAAGAVRELD

SEQ ID NO: 48628 - protein, 250 aa, Zea mays
  Clone ID: LIB3592-068-G2_FLI.pep
HQTYSSQFPLSVSREVVDMALRRREPQRHCRGVARVGNPHVAVHVRPVLGAVHDGHLQPHPRVELDVDAEEPLALLPAEQRRRRAGAGEGGLSTEAGPHLHRAPALLPRPREVHVPEPLAAVERHGVQAPIQHGLLPVRVADADAHGEVVAQLVGLGAAVVEVEAGELRRVDVRLEAAGLVDEPEHQRHDADGDERQRQRAEGVAEERVRRVPARQRADAGGRCFGRDGRAPVVGLVDLVLVTGHGLLQL

SEQ ID NO: 48629 - protein, 381 aa, Zea mays
  Clone ID: LIB3060-075-C3_FLI.pep
PSCGQPLRGMEMESTPLLTPYKMGDFNLAHRVVLAPLTRCRAFGNVPQPEHMALYYRQRATPGGFLIAEACAVSESARGYPDVPGLWTHQQVEAWKPIVDAVHASGAVFFAQLWHTGRASPSEFQPNGQAPISSTDKQIPAQVNHSGDVNTFAVPRRLETEEIPHVVNDFRVAARNAIKAGFDGVEIHAANGYLFDQFMKDSTNDRDDSYGGSLENRCRFTAEVMAAVADEVGANRLGVRLSPFADYMDCHDSNPEALALHVIDETLNPLGVLYCHMVEPRMRVNPDDGIMTLEHMLLPFRRAFRGTFIANGGYDREEGNDAIARGRGYADLIAYGRIFLANPDLPMRFAKNAPLNKYDRSTFYTSDPVVGYTDYPFLDQL

SEQ ID NO: 48630 - protein, 117 aa, Zea mays
  Clone ID: LIB3061-008-B7_FLI.pep
NLLTQSLVVVTCKASNHRPPRVGNLMSRCLIPMSMTMRVVIMPIPRMTQTQERSTILLSPVEDPEPHHSAQALAGDGVPALVVWDGVAFVGGAAMCAAADHRPPTAPLALSVVACPR

SEQ ID NO: 48631 - protein, 148 aa, Zea mays
  Clone ID: LIB3068-047-A11_FLI.pep
RTRTTMASQAIESHRAGAEVVTGGDAICRKKSIELLEELGLPKGFLPLEDIQEFGYNRVTGFMWLVQGKKVEHTFKKIKQTVSYATEVTAFAEKGKLRKITGVKTKELMLWLSVVEVYVPEASPEKVTFKTGTGLSDTFDASAFALGE

SEQ ID NO: 48632 - protein, 88 aa, Zea mays
  Clone ID: LIB3068-054-D12_FLI.pep
KEGEAARTKIYKYITLVKETLSMVTQMFQNQPLPFPKTYNSLAKCFAPPRIHRRICSLMIAIVCVTVFSLCSNIREFLSHQIVQDTRM

SEQ ID NO: 48633 - protein, 379 aa, Zea mays
  Clone ID: LIB3068-062-E10_FLI.pep
RRGKNFTARDQAIDAPVMASVPLSSPSQAGLLGPPFPLLPPPFGACLRYRLPRLPTGLSSSVRKGGLLPLPLLVPPRAAGGKDGRAVTKEELEEEEEEFEVTKEGEEVNQETGGGSGATKEAAARGSGRFAADYVSLGVREPVYEVIEVRSNGRMSTKKISRRQLLKSSGLRLRDTRSVDPSLWLMNSMPSLLVREQAILLNLGSLRAIAMYARVLIFNYNSPGGKAFLGLLLSRLNPRNINGGPAMPFQLEVVEAALLSRIQRLEQRLMKIEPHVATLLEVLPNRLTADVLEQLRLSKQALVELGSRAGDLKQMLIDLLDDPHEIRRICIMGRNCTLDRLSDIVECTVPLEKQIAEGTAKFIIVTLHISGDYDLYLSW

SEQ ID NO: 48634 - protein, 218 aa, Zea mays
  Clone ID: LIB3069-032-G12_FLI.pep
RRSSSSFTFTAPTSLWVLRDHQTKHPNNTADCRAEPFPCTYMMLPSSSLRGDDTAMAGVVAFVLSCLSMPKGSLDDAGGSHCRFFAVQRRRRRRRGRRQQSLGAPAQHLAHAVGDPERGAPPALAAEGHVVPERVLQPRGGGGGASRRRAPGRLVPHRLGAEAAEPPPAEGRAHAQDVVPGAVLHQAAALALGALYHRLHAGRRLAAGPGGAVRAAEL

SEQ ID NO: 48635 - protein, 86 aa, Zea mays
  Clone ID: LIB3069-036-G5_FLI.pep
EKNLKRSITNTLNRLYGHVQVWAASGLVSASHQARSLSSHPSSIQHALTPRTARARGRAVRIPARGTEKDMQSLSIPAGSRSVCLW

SEQ ID NO: 48636 - protein, 384 aa, Zea mays
  Clone ID: LIB3116-002-E8_FLI.pep
PAQKIRSRQPPDPTWPHPRPRCPRREPVRRAAGAAAAVTMTSPAPTSWFSGLSRSSSTMAGGVASAPTPASASASGPASVFLPDAPKSVIGAGSGGGKRNHLCGALFKYGPKSAQVAFRTGDFNHQVIFIGGLTDGLLATDYLEPLSLALEVEKWSLVQPLLSSSYTGYGISSLQQDALELEQLISYLINKENSEGVILLGHSTGCQDIVHYMRTNFACSKAVSGVILQAPVSDREYRATLPETAEMIDLAAKLISEGRGMDLMPRKANSDAPITAYRYHSLCSYMGDDDMFSSDLSEDQLRQRLGHMSITQCQVIFSMGDEYVPEYVDKRALLDRLCRALGGAEKVEIEWGNHALSNRVQEAVVAIVDFVKREGSKGWDDPWS

SEQ ID NO: 48637 - protein, 245 aa, Zea mays
  Clone ID: LIB3075-030-A8_FLI.pep
NLLCQNNRTDACSYISILFFKKKTFMDSYSCALLLLSHCLIMVTVLSCTSLSVVHVDTGRRVVTMLRRRGLPLLLGPAHLLHGHGADVGRGPGDGADGRRHPGGAAGRVGAAGHDLPGRREGPPGALRDLEALVDAARRAAGRGRAEAELVAEAQAAVQRRHPRRGRGQQLLVPAVEGLCAPQRVLAQHEAPGQHGAHHLLRLLHGLPRRRSRTRRPCSCMGVRFRWQFVVFHRCDVHGNIATHA

SEQ ID NO: 48638 - protein, 144 aa, Zea mays
  Clone ID: LIB3075-054-C11_FLI.pep
GTPQFPGRTVTLEHQPGATCWGVAYRIKEEDKEIALEYLEVREKQYDEKVYLDLYTDSSPKVPAVENVMVYFATSNKENNQNYLGPAPLEEMTRQIYLAQGPSGPNKEYVFKLEDALHKLGVVDQHVQELANALREYSDTELSK

SEQ ID NO: 48639 - protein, 115 aa, Zea mays
  Clone ID: LIB3357-025-F1_FLI.pep
RSCQFATTNKPHRISEDHATATSPKLPRPIERRSPRRRQNPSFSYSMATVSLTPQAVFSTESGGALASATILRFPPNFVRQLSTKARRNCSNIGVAQIVAAAWSDCPAARPHLGG

SEQ ID NO: 48640 - protein, 137 aa, Zea mays
  Clone ID: LIB3357-029-E7_FLI.pep
LSRARQFATAFFGLGDAAGFSCTPAGAAALRSGIVGARLPAAAAAAAVLATRCLSSVSKAWFSWLSSRALLRSRSFSFMMKQLCRYSFAFSLSISSFVALVAWLGSRSIAAPVTRGPCFAGGGQQRACDVSLCWILT

SEQ ID NO: 48641 - protein, 172 aa, Zea mays; identical to SEQ ID NO: 41503
  Clone ID: LIB3357-043-D6_FLI.pep

SEQ ID NO: 48642 - protein, 230 aa, Zea mays; identical to SEQ ID NO: 41348
  Clone ID: LIB3596-054-D4_FLI.pep

SEQ ID NO: 48643 - protein, 278 aa, Zea mays
  Clone ID: LIB3608-010-D1_FLI.pep
LSAMYSANHWGGSFEIADGAAEDDHSRNMDLDRGALSARQHHELDETQQSWLLGPPEAKKKDKYVDLGCIVVKRKMLWWALWCVVAAFVLIGLPIIIAKSIPHKKPGPPPPDQYTDALHKALLFFNAQKSGHLPKNNGIKWRGNSGLSDGSDAKDVKGGLVGGYYDAGDNIKFHFPMAFSMTLLSWSVIEYSAKYKAMGEYDHVRELIKWGTDYLLLTFNSSASTIDKLYAQVGTAKINGSRPDDHYCWNRPEDMAYPRPSLSVSSAPDLGGEVAAAL

SEQ ID NO: 48644 - protein, 225 aa, Zea mays
  Clone ID: LIB3608-034-C12_FLI.pep
VSSSTRRQRAAQASRPSRLQSADCRYSPCSDGATGEAERAEAESTAWCLIMEEAGRGCGLLKVVVTHGRNLAVRDFTSSDPYVIVHVADKTTKTKVINSCLNPVWNEEMTFSMKEPVGIIKFEVFDWDRFKYDDKMGQAFLDLQPVAAATKLRRALRLTAGETNLRKVNPDADNCLLSDSFVTYANGEVAIDARLRLREVESGELFVTIKWIEPDSANTGKQADH

SEQ ID NO: 48645 - protein, 239 aa, Zea mays
  Clone ID: LIB3689-002-D7_FLI.pep
AMGRQPCCDKVGLKKGPWSAEEDEKLVTFLLTNGQCCWRAVPKLAGLLRCGKSCRLRWTNYLRPDLKRGLLSSEEETTVIDLHAQLGNRWSKIASHLPGRTDNEIKNHWNTHIKKKLRKMGIDPATHKPLHPQPAAPPPTQQEQDTGGSPEEEGEKADAVMMAAATPIIGHETAPFFTDEEEMLAHLLDDIDDFPPAAYSPDDSSSPSSSSSASRSSHSASVVTAPSSSGAGGSSVADG

SEQ ID NO: 48646 - protein, 122 aa, Zea mays
  Clone ID: LIB3689-257-F6_FLI.pep
LADGYDHETTQIVRCSAARGCWIGSIQFRSIGITYLVFKCKYCKEQWKEGGATRFRQYLTSRGRNVQGCRNVPSDVCNYFRRELDKGQYRRESKNTGGGMKVSIGGFTSMMTMLSCRSHYML

SEQ ID NO: 48647 - protein, 150 aa, Zea mays
  Clone ID: LIB3689-262-D4_FLI.pep
RREERRRASTMASGSMKREISETHDTLRFGLNAGVKADLAPPHPLQSSIQSEAKFWADKKKFGTEAIYGSALNIRKDLDAQILSRFQRPPGALPSSLLGYEALTGSLDDFGFEDYLNMPQDSEGFRQPDMHHGMEVRLGLSKGPICPSLS

SEQ ID NO: 48648 - protein, 129 aa, Zea mays
  Clone ID: LIB3689-262-E3_FLI.pep
LRFNHRPRRTPPPSAPSSSLSTCTSLARPLLAAAMGRGKFKGKPTGRRNFSTLEEIGNDAPAHPMAFPLDVGDLFPTVQANVLSLPAAAPWWLSSSTSRLRSLGHDVVHPANHWCHTSRVMCSPKCLNM

SEQ ID NO: 48649 - protein, 138 aa, Zea mays
  Clone ID: LIB3957-007-E2_FLI.pep
TRAAAAAAAAAAAQSRFNDVTPRGATMVAAKKTKKSTDNINNKLQLVMKSGKYTLGYKTVLRTLRNSKSKLVIIANNCPPLRKSEIEYYAMLAKVTVHHFHGNNVDLGTACGKYFRVCCLSIIDPGDSDIIKTTPGEQ

SEQ ID NO: 48650 - protein, 187 aa, Zea mays
  Clone ID: LIB3912-016-A11_FLI.pep
RVVSERAARGRRVSSTPHGDRARRPPPTDDWGGLHCYFGPFAADENHRVLVGMASTACFVIVSKNDIPIYEAEVGSAPKKEDLSYHHQFILHAALDVVQDLAWTTNAMFLKSVDRFNDLVVSVYVTAGHTRFMLLHDSRSEDGIKSFFQEVHELYIKIFLNPLYLPGSRITSSHFDTKVRALARRYL

SEQ ID NO: 48651 - protein, 66 aa, Zea mays
  Clone ID: LIB3958-010-G6_FLI.pep
SSKSLKLQEKLHVSLLLSIRPDQGVNPNICLLYVSFCALRFSTICCESKHPRLAIFFSSSMHADNL

SEQ ID NO: 48652 - protein, 250 aa, Zea mays
  Clone ID: LIB3959-015-A1_FLI.pep
ANMQIILELTRCRGRNSRGGLHKCAPCTAMPNNKIVAANMEEKGAGGKAAVPHDELPRFTIFLIPNRREPPLDLVELVCLHHRISLGNGVPGSSPVVELAVVLVGVAVECAVQVPTPAVESRKSNPLPAGAAPVRPYLPPFGDRRHPLAGSGNISGLLHVHCLQLNLGNSYYRVAASNNRLHDGVAAVHDAVDRGGSQLGLILLRYHLLVALGAHVHGRRAAEEATVIDAEDGSLGGLAPSLLVLHGFLN

SEQ ID NO: 48653 - protein, 172 aa, Zea mays
  Clone ID: LIB3959-022-F8_FLI.pep
QYPCNFYLQRSTWFFKLSSTLFSPNARTILLFASSLLTGTDSCTMLPIVVTLASRVLLASYTSTSLPVNLFLISSVLSMSFFASSSCLLALSLPIFLLVALSSCRILSSSNCLSRHALSRAMTSSTSSTEANRLRWDSRIRSGLSPLSVRNKLMLSIVACDGDGGGGGGDEG

SEQ ID NO: 48654 - protein, 183 aa, Zea mays
  Clone ID: LIB3960-003-H2_FLI.pep
QGRCSLEAVDMALRDVLLSIAQTPHRLRRRALVTWTPTQELNEVRDRSGARMKRRLEWYDLVGLGVGGMLGAGVFVTTGRVARDTAGPAVFASYVVAGVSALLSSLCYAEFSVRVPVAGGAFSYLRVTFGRLIITTLSFPLAPWFHAATVRLKGRRNHLNQLMKRNGQIYVYRKLKKMCSCPN

SEQ ID NO: 48655 - protein, 155 aa, Zea mays
  Clone ID: LIB4073-004-E6_FLI.pep
RRLTIFLRGRRRGMLLDQGQELVLPGTDDSLHRLAVLDEVEGRHRLDLVLCSNFLQFVHVHLQEDSLSVLLGVLDKQWSDGAARTTPGGGEVNDHQLAGLLGLGHLGVELGLGVARDDDSLLGRHCRLLLPPPRPRWDRIESFCCGLRFLTRAGL

SEQ ID NO: 48656 - protein, 70 aa, Zea mays
  Clone ID: LIB4073-012-D7_FLI.pep
MLIPAKTRLLQPQKQSIVAWQTTPVAISPRIQAIEGETELMHQEDSLTLTASLLGSSGRGKKQTPEAMRT

SEQ ID NO: 48657 - protein, 146 aa, Zea mays
  Clone ID: LIB4074-010-E6_FLI.pep
YTWYKYVIRTLVVLYTPRSASHTTKHHSNLLPITSSRLTCELAARRRAEERRCQAAAGPGCRRRRGRGHRRRRGVPAAAACCRVNDAEERRRTTRLLVVVAVQQAACDGDLVPRLPVLHDGPVHQRNQAFHCSSGDPELATLAPCC

SEQ ID NO: 48658 - protein, 199 aa, Zea mays
  Clone ID: LIB4148-008-F3_FLI.pep
ERESGERMAGMASLQGAMASLSISALGAATASSSSFWGNRLATYSAPQPGVRFMVKICPIEMRLKRWERKKCKPNSLPVLHKMHVRIGDTVQVIAGREKGKVGEVTRLFKHNSTVIVKDLNLKSKHKKGTDDEPGEIVMIEGPIHSSNVMLYSKEKSVVSRVGHKFLEDGTKVRYLVKTGEVIDSVEKWVKVFKEGNSE

SEQ ID NO: 48659 - protein, 421 aa, Zea mays
  Clone ID: LIB3354-064-G9_FLI.pep
SPKFPAPVLASWRRKMSFRSIVRDVRDSIGSLSRRSFEVTAAAAAGGLSGRTAAQHRRGRSQSTVHELRDTGVVVQQDESRWASLPPELLRDVVRRLEASESAWPNRKHVVSCAAVCRAWREMCREIVLSPEVCGKLTFPVSLKQPGPRDGMIQCFIKRDKSKSTYRLYLCLSTAVLMENGKFLLSAKRSRRTTCTQYIISMDADNISRSSSTYIGKLRSNFLGTKFVVSDTQPPPYRYSGAAPPPPRAAGRRASRRFDSRKVSPKVPTPAGAGGGSYSIAQVTYELNVLSTRGPRRMHCVMRSIPASAVEPGGTVPGQPERILPRALLEEQEEEEDSSSFRRTGTGTTSFSKSSASIMDRSVDFGGSSSSSFRDFSSARFSDIVDGGGGGDGEQDRERPLVLRNKAPRWHEQLQCWCLNF

SEQ ID NO: 48660 - protein, 123 aa, Zea mays
  Clone ID: LIB3689-240-C1_FLI.pep
YCKFLWRFEPLPIPFHGLHLLPEQVFVFASIRTSLHYATAKQVIHSGISEFYERTVGAKQSWRTQLATKAQFNLECSYIPLNHCPSLSYPVHASDQAGGLALLCASVAGHRTGGISDGATQKL

SEQ ID NO: 48661 - protein, 446 aa, Zea mays
  Clone ID: LIB3608-010-D5_FLI.pep
LVGAVVLANQPASDLHMEEAAPAAVMERERLTAEMAFRGADGARRDGGDPAPSIVIKIRRRLPDFARNIKLKYVKLGIRHGGSPTSLLPALCVPAVAAAAYSFVRLDVIYYSVDLLTCVAWLGTALLLLTVYYLKRPRPVYLVEFACYKPEERLKISKSAFLEMTESTGSFNEAALDFQTKITSRSALGDETYLPPGVQARPPRLNMAEARMEAEAVMFGCLDALFESTGIDPRRDVRILIVNCSLFNPTPSLASMIINHYRMREDVKSFNLGGMGCSAGLIAVDLAKDMLQANPGSYAVVLSTENITLNWYFGNDRSMLLSNCIFRMGGAAALLSNRRADAGRAKYRLLHTVRTHKGATDECFNCVYQREDEAGKAGVSLARELMAVAGDALKTNITTLGPLVLPLSEQLKFLRSLMMRRVFRVGGVRPYIPDFRRAFEHFCVHA

SEQ ID NO: 48662 - protein, 365 aa, Zea mays
  Clone ID: LIB3606-002-G4_FLI.pep
VTVRYRSKQRMASSLKFTVRRGPAVLVAPASATPRELKRLSDIDDQDGLRLHVPIIQFYRQNALMGGREPAPVIRDAIARALVPYYPFAGRLRELEGRKLAVDCTGEGVLFIEAEADVRLDHFGDELQPPFPCLEELIFDVPGSSEVLGSPLLLFQVTRLACGGFILGVRLHHTMADAQGLVQFLGAVAELARGAAGPTVRPVWGRELLEARDPPRPAFAHREYDEVPDTKGSIIPLDDMVHRSFFFGRHEVAAIRANLPPDLRSRASKFDLLTGLLWKCRTAALALDADEVMRMICVVTAHGGKSGVAIPKGYYGNAFALPAAVATAGDLVAKPLGYAVELVKRAKGEVNVEYMRSVADLMVLR

SEQ ID NO: 48663 - protein, 281 aa, Zea mays
  Clone ID: LIB3606-048-G1_FLI.pep
GRQAERELPGEAERGGELRGQREVGAAERRHPRGARRQALRQERGPAGEEERRRRGERARGRAERGGQRQHVGDDVAAGADLRDRVLGEPPAGVVEAGRARGAGAAGGAGRRPREAAEAGPARHAAVGGGRVPGLAVHPERGSRQVQHGLHRHQWRALPEPRHVLLRGAVLAHRQQHGARFTFASGAGAGRAADRQQAEEEDSSRERVACHAVTVNVWDAIAMWTRISGTQYSAVGNAAGRAAEMDPVGSRISGTHARINLLSEAGSRRRLGRDGWRGASA

SEQ ID NO: 48664 - protein, 144 aa, Zea mays
  Clone ID: LIB3594-014-B3_FLI.pep
RSGADLNQKHWPELNLHVVVLLLDSVDLCTQVLVFLTPQYLPGVGLVLLQDPGQRGPGRAVVVELAAAGEDDDADLGVAEHADLPCLLDQSGPALGEGHLPVGRVLDPLDLDLPAPHTAFSTPKQIQGQQELSSSKNPLLSTSS

SEQ ID NO: 48665 - protein, 325 aa, Zea mays
  Clone ID: LIB3594-030-G8_FLI.pep
SIKESPHAEQAKICAAAKQIKAKQSKAPAGSHGRGPDGVLRPAPRQRPARHPGGGGGGAPQPGAPRVVAVHAGRRAAQGRGSPAAEAAFAAADRRDRRPGRLQVPQGHLHPGPHRPRPLPPRARRRAATGACSGRRRSRSGPRSPRGGSRRRGAAPEPDPGLHQAEPGRVGRRHVRHLHVLLLLGHGRRGQRVQGPQPGVLRQAAAVRAQAEALRRRALRGHHQRQPLPLLQEKEKPREEDHQSAGDQRQDRGHPAGRVLVEEVRPEAHQGIPLPTGLLQVQHRAGVPGEEARGARHRRPGHAGGDVRGRAPPHAGRARARAQPP

SEQ ID NO: 48666 - protein, 457 aa, Zea mays
  Clone ID: LIB3594-048-G5_FLI.pep
APPFRPLSLASSISPPTMGKEKSHINIVVIGHVDSGKSTTTGHLIYKLGGIDKRVIERFEKEAAEMNKRSFKYAWVLDKLKAERERGITIDIALWKFETTKYYCTVIDAPGHRDFIKNMITGTSQADCAVLIIDSTTGGFEAGISKDGQTREHALLAFTLGVKQMICCCNKMDATTPKYSKARYDEIVKEVSSYLKKVGYNPDKIAFVPISGFEGDNMIERSTNLDWYKGPTLLEALDQITEPKRPSDKPLRLPLQDVYKIGGIGTVPVGRVETGVIKPGMVVTFGPTGLTTEVKSVEMHHEALQEALPGDNVGFNVKNVAVKDLKRGFVASNSKDDPAKEAASFTSQVIIMNHPGQIGNGYAPVLDCHTSHIAVKFAELITKIDRRSGKELEKEPKFLKNGDAGMVKMIPTKPMVVETFSAYPPLGRFAVRDMRQTVAVGVIKSVEKKDPTGAKVT

SEQ ID NO: 48667 - protein, 249 aa, Glycine max
  Clone ID: 700789655_FLI.pep
KMVLLGLLMVGFLSLGSFVSASGYGWMDAHATFYGGGDASGTMGGACGYGNLYSQGYGTNTAALSTALFNNGLSCGACFEIKCVNDQRWCLPRSVIVTATNFCPPNNALPNNAGGWCNPPLHHFDLSQPIFQQIAQYKAGIVPVAYRRVPCRKREGIRFTINGHSYFNLVLISNVGGAGDVHAVSIKGSRTNWQPMTRNWGQNWQSNAYLNGQSLSFKVTTSDGHTVVSNNVAPSSWSFGQTFNGHQFI

SEQ ID NO: 48668 - protein, 473 aa, Glycine max
  Clone ID: 700790603_FLI.pep
YHSLHHSSPVPESFTAGNATLLEHLIMTVIIGTPILGASLMGYGSASLIYGYVLIFDFLRCLGHCNVEVVPHQLFEKLPFLRYVIYTPTYHHLHHSDKDTNFCLFMPLFDALGNTLNKKSWQSPKLPSSGSGNGDTVPHFVFLAHMVDVSSSMHVQFVFRSFASLPYTTRFFLLPGLPVTFLVLLAMWAWSKTFLVSFYYLRGRLHHTWVVPRCGFQYFLPFATEGINNQIEQAILRADKIGVKVISLAALNKNESLNGGGKLFVDKHPNLRVRVVHGNTLTAAVILNEIPQDVKEVFLTGATSKLGRAIALYLCQKKVKVLMLTLSTDRFQRIQKEAPPEYQSYLVQVTKYQAAQNCKTWIVGKWITPREQYWAPRGTHFHQFVVPPILPFRKDCTYGDLAAMRLPEDVEGLGCCEYTMDRGVVHACHAGGVVHSLEGWPHHEVGAIDVNRIDLVWEAALKHGLRPVSSFTQ

SEQ ID NO: 48669 - protein, 453 aa, Glycine max
  Clone ID: LIB3051-045-B9_FLI.pep
SHNNNMEGENKKYITSEELKEHNKPGDLWISIQGKVYNVSDWAKDHPGGEVPLLNLAGQDVTDAFVAYHPGSAWKYLDPFFTGYHLRDFKVSEVSKDYRKLVSEFVKMGLFEKKEHVTLYTLSSVAVMFSIVVYGVIGCSSVWAHLGAALLLGLLWMQSTYVGHDSGHYEVMSSPGYNKLAQILCGNCMTGISIAWWKWTHNAHHISCNSLDYDPDLQHIPVFAVSTRFFNSIKSCFYGRKLVFDSLSRFLISYQHFTFYPVLCFARVNLYLQTLLLLFSRRKVPDRAFNIMGILVFWVWFPLLISSLPNWGERVMFVLASFAVCSIQHLQFCLNHFSADVYEGPPNGNDWFEKQTGGTLDISCSSWMDWFFGGLQFQLEHHLFPRLPRAQLRKISPLVIDLCKKHNLPYRSLTFVEANLWTLKTLRTAALQARNLSNPSSQNLLWEAFNTHG

SEQ ID NO: 48670 - protein, 306 aa, Glycine max
  Clone ID: 700873716_FLI.pep
FNSFSRYGNKIVAIKVLHRGSTSEERASLENRFAREVNMMSRVHHDNLVKFIGACKDPLMVIVTELLPGMSLRKYLTSIRPKLLDLDVAINFALDIARAMDWLHANGIIHRDLKPDNLLLTADQKSVKLADFGLAREETVTEMMTAETGTYRWMAPELYSTVTLRQGEKKHYNNKVDVYSFGIVLWELLTNRMPFEGMSNLQAAYAAAFKQERPGIPDDISPELAFVIQSCWVEDPNLRPSFSQIIRMLNAFLFTLSPPSPPLPVPPDNEPEVATTSNGTITEFSARNRGKFGFLRQLFSSKRTKN

SEQ ID NO: 48671 - protein, 169 aa, Glycine max
  Clone ID: 700872483_FLI.pep
KFTEAFLPLPPRVDLIKLVERKDKGAKLATLLLQHVATFSSQFSRVTRTQDPRVSQGLFCGEPSRRVPRDHFSQEILGGGGHSPEDSRREPEVSPNHSLKDLSSRVSVKRGNPRQHYIQNHPTAPHINLLIVLPPQQNLRRHVVRRPHHAAHAPPVAEPLRRTEVGELK

SEQ ID NO: 48672 - protein, 143 aa, Glycine max
  Clone ID: 700872894_FLI.pep
SKPLVAEIEISKLLDPTKGTASISAVAGSFGYIPPEYAYTMQVTAPGNVYSYGVVLLEILTTRLPVDEDFGEGVDLVKWVHSAPVRGDTPEQILDAKLSTVSFGWRKEMLAALKVAMLCTDNTPAKRPKMKNVVEMLREITQN

SEQ ID NO: 48673 - protein, 649 aa, Glycine max
  Clone ID: 700873194_FLI.pep
IPEQLVSGLRNIVQIELYENSLSGALPRAAFTNLANLERFDASTNELTGTIPEELCGLKKLGSLNLYENKLEGSLPETIVKSLNLYELKLFNNSLTGSLPSGLGKNSKLQSLDVSYNRFSGEIPARLCDGGALEELILIYNSFSGRIPETLEECKSLRRVRLGNNNFSGVVPEGLWGLPHLYLLELVYNSLSGSISNSISGAWNLSMLLISGNKFSGSIPEGVGELGNLEKFVANNNSLTGRIPKSVFRLSQLDRLVLGDNQLFGEIPVGVGGCKKLNELDLANNRLGGSIPKELGDLPVLNYLDLSGNQFSGEIPIELQKLKPDLLNLSNNQLSGVIPPLYANENYRKSFLGKVYKVALSNGELVAVKKLWRATKMGNESVDSEKDGFEVEVETLGKIRHKNIVRLWCCCNSKDSKLLVYEYMPNGSLADLLHNSKKSLLDWPTRYKIAIDAAEGLSYLHHDCVPSIVHRDVKSSNILLDDEFGAKVADFGVAKIFKGANQGAESMSVIAGSYGYIAPEYAYTLRVNEKSDIYSFGVVILELVTGKLPLDPEYGENDLVKWVQSTLDQKGLDEVIDPTLDIQFREEISKVLSVGLHCTNSLPITRPSMRGVVKKLKEVTELPKSLSGKLSSPYFQEEASDIDHEGSLV

SEQ ID NO: 48674 - protein, 346 aa, Glycine max; identical to SEQ ID NO: 38635
  Clone ID: 700873651_FLI.pep

SEQ ID NO: 48675 - protein, 209 aa, Glycine max
  Clone ID: 700875709_FLI.pep
LHDHCDPKIIHRDVKAANILLDEEFEAVVGDFGLAKLMDYKDTHVTTAVRGTIGHIAPEYLSTGKSSEKTDVFGYGIMLLELITGQRAFDLARLANDDDVMLLDWVKGLLKEKKLEMLVDPDLQNNYIEAEVEQLIQVALLCTQGSPMDRPKMSEVVRMLEGDGLAERWDEWQKVEVLRQEVELAPHPNSDWIVDSTENLHAVELSGPR

SEQ ID NO: 48676 - protein, 250 aa, Glycine max
  Clone ID: 700839629_FLI.pep
LKMLEQSLRQQRAFHQMGMMEQEAWRPQRGLPERSVNILRAWLFEHFLHPYPSDADKHLLARQTGLSRNQVSNWFINARVRLWKPMVEDMYQQELKEAEGAEEEREGNQSSSNNSGHQLAQTPTPSTTASTATAPPPPTTTPPTGKRSDSESDPSLAPINNTTSTAAMTVTASEVTQLSELPRTMVADESCRHGSLVATEFGTASAASEIGSTLIRFGTTAGDVSLTLGLRHAGNMPEKTPFSVRDFGGI

SEQ ID NO: 48677 - protein, 212 aa, Zea mays
  Clone ID: 700569167_FLI.pep
EDSLLGEGSLGRVYKAGFPNGKVLAVKKVDDSASLLSLYGGGEEDAFLELVSNVSRLRHPNIVPLTGYCVEHGQRLLVYEYVGNRTLHDVLQHLSDDDGASKKLTWNTRVRIALGTARALEYLHEVCLPPVVHSRTFKASNILLDEEYSPHLSDCGLAAALTTAVVSAEAVGSFGYSAPEVAMSGTYTAKSDVYSFGVVMLELLTGRKPLDR

SEQ ID NO: 48678 - protein, 512 aa, Zea mays
  Clone ID: 700570587_FLI.pep
LTKINRQVPAGNLITDWSSQHRACHPLSSSSVVGDVARNLEPLGVERARHVDPLVGVSPEVVPLGLHQVGRQPVPAVGVEVGQASGHSRGADAVVDGEAHHPAPRRLPVHDLLRELGVYEQAGEARVPVVGLLDAVQEDGADDAPALPDPGQLAEVEPPAFLRALGLDDVHALRVAADLGRVQGLPHVLHQLRLVHRRAGGVVVTLEDLGGLHPLVLQPAQEPRVQGRLDRRSGHRQLGGLLHRPLPCPFHPGLVKDLVHQVAIAMLVLDAKDVGRDLDQEAQELALVPLGEHLVQLTVGELTDRLENVVCLGNQLHIAILDSVVNHLDKVARSTFANVRDTRATVRDLSSHLEDNVFDVLVSLERASGHQGRAVAGTLLSSRDTHAKIQEAALLHGLLPPLRVLVPLVPPIDDAVALLQVSCERRDGLVNWRAGLDEHDHHPWLLNGLHKGRGVMEAVDGKVSFCLGTLHGLVHLGGCPVVHRDGEPFLCNVEGKVLPHDRKASKTDSCER

SEQ ID NO: 48679 - protein, 329 aa, Glycine max
  Clone ID: 700852650_FLI.pep
GSGMDLRSKARTLPGPVSDPAKLPKWNYDGSSTDQAPGDDSEVILYPQAIFKDPFRRGNNILVICDVYTPAGEPLPTNKRYGAAKIFSHPDVAAEEPWYGIEQEYTLLQKDVNWPLGWPLGGFPGPQGPYYCGIGADKAYGRDIVDAHYKACIYAGINISGINGEVMPGQWEFQVGPSVGISAGDEVWAARYILERITEIAGAIVSFDPKPIPGDWNGAGAHSNYSTKSMREEGGYEVIKKAIEKLGLRHKEHIAAYGEGNERRLTGRHETADINTFSWGVANRGSSIRVGRDTEKNGKGYFEDRRPASNMDPYVVTSMIAETTILWKP

SEQ ID NO: 48680 - protein, 277 aa, Glycine max
  Clone ID: 700663766_FLI.pep
VIVDRETNLLTRIYRLAEGEERSVNILDLEKPVNSEVVPVIIFFHGGSFAHSSANSAIYDTLCRRLVGICKAVVVSVNYRRAPENRYPCAYDDGWTALKWVSSTSWLQSRKDKKVHIYMAGDSSGGNIVHHVALKAMESGIEVFGNILLNPLFGGQERTESEKRLDGRYFVGVKDRDWYWRAFLPEGEDRDHHACNPFGPKGKSLEGITFPKSLVVVAGLDLVQDWQLGYAKGLEKAGQEVKLLFLEQATVGFYLLPNNEHFSPVMDEIKYFVGSDC

SEQ ID NO: 48681 - protein, 329 aa, Glycine max
  Clone ID: 700790071_FLI.pep
HSFRVFTLQELRDATNGFNRMLKLGEGGFGSVYKGSITQPDGQGGDPIPVAIKRLNTRGFQGHKEWLAEVQFLGIVNHPNLVKLLGYCSVDAERGIQRLLVYEFMPNRSLEDHLFNKNLPTLPWKTRLEIMLGAAQGLAYLHEGLEIQVIYRDFKSSNVLLDADFHPKLSDFGLAREGPQGDQTHVSTAVVGTQGYAAPEYIETGHLKVQSDMWSFGVVLYEILTGRRSLERNRPTAEQKLLDWVKQYPADTSRFVIIMDARLRNQYSLPAARKIAKLADSCLKKNPEDRPSMSQIVESLKQALQYSDTTSQDIAESSSSSRSKLVRKK

SEQ ID NO: 48682 - protein, 157 aa, Glycine max
  Clone ID: 700843802_FLI.pep
NLQYVTSTSFLLLTYAKYLNTNGGNVVRCGTSAVTGENLVTLAKAQVDYILGNNPTKMSYMVGFGERYPKHIHHRGSSLPSIHAHTQHISCNDGFQFFHSASPNPNILVGAIVGGPDNNDNFSDDRHNYQQSEPATYINAPFVGALAYFSANPPTTY

SEQ ID NO: 48683 - protein, 225 aa, Glycine max
  Clone ID: 700747715_FLI.pep
LLRGLKYVHSANVLHRDLKPSNLLLNANCDLKIADFGLARTTSETDFMTEYVVTRWYRAPELLLNCSEYTAAIDIWSVGCILGEIITRQPLFLGKDYVHQLRLITELIGSPDDTSLGFLRSDNARRYVRQLPQYPRQQFAARFPSMSPGAVDLLEKMLVFDPNRRITVEEALCHPYLAPLHDINEEPACVRPFSFDFEQPSFTEEDIKELIWRESVLFNPDPPIY

SEQ ID NO: 48684 - protein, 191 aa, Zea mays
  Clone ID: 700334993_FLI.pep
EGGSSKNFTLIKKMAFSEPAILHNLLQKFTTSMANYIKYQADNGAQAVQIFDSWATELSPADFEEFSLPYLKQIVDSVRETHPNLPLILYASGSGGLLERLPLTGVDVVSLDWTVDMAEGRKRLGSNTAVQGNVDPGVLFGSKEFISRRIYDTVQKAGNVGHVLNLGHGIKVGTPEENVAHFFEVAKGIRY

SEQ ID NO: 48685 - protein, 297 aa, Zea mays
  Clone ID: 700336294_FLI.pep
VKKIDSASLSLYEEDNFLAVVSNVSRLRHPNIVPLAGYCVEHGQRLLAYEYVGNGTLHDMLHFSDDDGMTMPGKTTRLAWNTRARIALGTARALEYLHEVCLPPVVHRAFKSSNILLDDEYSPRLSDCGLAALSPNPETEREAFAGVVGSFGYSAPEFAMSGTYTAKSDVYSFGVVMLELLTGRKPLDSSRERSEQSLVRWATPQLHDIDLLAKMVDPALDGLYPAKSLSRFADIIAICVQSEPEFRPPMSEVVQQLVRLMQRASIVRRQSDDQLGYSYRVPERDGGGTAGGDVVVA

SEQ ID NO: 48686 - protein, 405 aa, Zea mays
  Clone ID: 700333144_FLI.pep
QKQKGSRSRNASAATMTGSGSTGANGKSQSSRAKAMLLALGKSFPDQVLPQEKVVESYLQESSCDDPATRAKLQRLCTTTTVKTRYTVMSKELLDKHPELKMEGTPTLTPRLDICNAAVIDLGAAAARAALDEWGRPAADITHLIYISSSDLRLPGGDLHLAARLGLSPNTVRTSLLFLGCSGGAAALRTAKDIAENNPGSRVLVTAAETTVLGFRPPSYDRPYDLVGAALFGDGASAVIIGAGPMTPAENPFLELEFSTQEFLPGTDKVIDGKISEEGINFKLGRDLPEKIESRIEGFCRTLMNKVGIKDFNDIFWAVHPGGPAILNRLEFCLKLQPEKLKISRKALMNYGNVSSNTIFYVLEYLRDELKKGAISEEWGLILAFGPGITFEGLLVRGVKKTFTS

SEQ ID NO: 48687 - protein, 111 aa, Zea mays
  Clone ID: 700343101_FLI.pep
RHGWFLTQFGNDRICDFLGGAGAAQIFGSVLAFCNDTLNCRLQPVSKRWELQVPQHHGRRQQQCNRVSSLLLHNFLISNISCRSTLLEDSMVLPHITSRHDTSASSNTCSY

SEQ ID NO: 48688 - protein, 349 aa, Glycine max
  Clone ID: 700834281_FLI.pep
VKDRHHEEVYLGNLKRFQFRELQIATNNFSSKNILGKGGFGNVYKGVFPDGTLVAVKRLKDGNAIGGEIQFQTEVEMISLAVHRNLLRLYGFCMTPTERLLVYPYMSNGSVASRLKGKPVLDWGTRKHIALGAGRGLLYLHEQCDPKIIHRDVKAANILLDDYYEAVVGDFGLAKLLDHQDSHVTTAVRGTVGHIAPEYLSTGQSSEKTDVFGFGILLLELITGQRALEFGKSANNKGAMLDWVKKIHQEKKLDMLVDKDLKNNYDRIELEEMVQVALLCTQYLPGHRPKMSEVVRMLEGDGLAEKWEASQRVDSTKCKPQESSSSDRYSDLTDDSLLLVQAMELSGPR

SEQ ID NO: 48689 - protein, 148 aa, Zea mays
  Clone ID: 700350779_FLI.pep
FKKVMWHVGDPMPHEESVASAAVGSAIKVKAAAIVVFTFSGRAARLVAKYRPTMPILAVIFPREGSDPSKWRSYGTTQARQCFAVRGVYPLMGSTDEAETGGLTKEEYGIKLAMSYGRSVGIVKPFDRVIIFEKIGDSSVVKIIECEG

SEQ ID NO: 48690 - protein, 345 aa, Zea mays
  Clone ID: 700352036_FLI.pep
ALYVSSISNELRIPVRYLREDKPHGSAGGLYIFRDYIMEDSPSHIVLLNCDVCSSFPLPDMLEAHKKYGGMGTLLVNKVSAESANQFGELVADPETNELLHYTEKPETFVSDLINCGVYIFTPNIFSAIEDVLKQKKDRANLRRVSSFEALHSATKALPPDFVRLDQDILSPRAGKKELYTYQTLDFWEQIKTPGMSLRCSGLYLSRFRRTSPHLLASGDGKRTATIVGDVYIHPSAKVHPTSKIGPNVSISANARVGAGARLINCIILDGVEIMENAVVIHSIVGWKSSIGKWSRVQGEGDQNAKLGITILGEAVDVEDEVVIVNSIVLPNKTLNVSVQEEIIL

SEQ ID NO: 48691 - protein, 106 aa, Zea mays
  Clone ID: 700352084_FLI.pep
RLTAYSSFFHSSQPTATFFTATAQPNRPYIPMRTKKTEKQGIKRNYNSYRTEGQTWCNDESCLTPCRRFELQSSLLICRGRLALVYPIPRPANMGACDTGSALQQL

SEQ ID NO: 48692 - protein, 205 aa, Zea mays
  Clone ID: 700353723_FLI.pep
HACSFRYGTVRHGGKGKALLPQGTFITWMDCSMSERAITRSPDWIMPLALSREKVRFRLLSMSSEKARRKGIRPHCRFSRLLTDVDVVKAKTGQSGRHRESREAMCPVLVNTKTASTPRPLAILAAELQISSDILSEKEDETLRSSSASCRFSSLHHFSILRLTLLRTLRALSGYLPIADSPESIRASARWRTASETSATSALVG

SEQ ID NO: 48693 - protein, 406 aa, Zea mays
  Clone ID: 700378034_FLI.pep
HQKQKGSRSRNASAATMTGSGSTGANGKSQSSRAKAMLLALGKSFPDQVLPQEKVVESYLQESSCDDPATRAKLQRLCTTTTVKTRYTVMSKELLDKHPELKMEGTPTLTPRLDICNAAVIDLGAAAARAALDEWGRPAADITHLIYISSSDLRLPGGDLHLAARLGLSPNTVRTSLLFLGCSGGAAALRTAKDIAENNPGSRVLVTAAETTVLGFRPPSYDRPYDLVGAALFGDGASAVIIGAGPMTPAENPFLELEFSTQEFLPGTDKVIDGKISEEGINFKLGRDLPEKIESRIEGFCRTLMNKVGIKDFNDIFWAVHPGGPAILNRLEFCLKLQPEKLKISRKALMNYGNVSSNTIFYVLEYLRDELKKGAISEEWGLILAFGPGITFEGLLVRGVKKTFTS

SEQ ID NO: 48694 - protein, 356 aa, Zea mays
  Clone ID: 700456981_FLI.pep
VIGAIAAGNAVVLKPSEIAPATSSLLAKLLPEYVDNSCIKVVEGSVPETTALLEQRWDKIFYTGNGTVGRIVMAAAAKHLTPVALELGGKSPVIVDSNVDLHVAAKRIVVGKWGCNNGQACIAPDYIITTKSFAPELVASFKRVLERFYGEDPLQSADLSRIVNSKQFKRLTNLIEEKRVADKIVYGGKADEKQLKISPTLLLDVPEDSEIMTGEIFGPLLPIVTVEKIEESFDLINAKPKPLAAYLFTKNRKLQEEFVASVPAGGMLVNDTALHLTNPYMPFGGVGDSGMGCYHGKFGFDCFSHKKGVLIRGFGGEANARYPPYTTEKQKILRGLINGSFIALILALLGFPREKR

SEQ ID NO: 48695 - protein, 177 aa, Zea mays
  Clone ID: 700464535_FLI.pep
QSAAPAVPGAGMKYPMPQYKSSPPASTLPQPSSLSGYGGFGSANNIPGNFSQNQGAPAAPTTLGFDEALGTQFKHPNHYAALQQSDNSTMWLHGGAGSRTISAVPPGNFYGFQGQSQHGGFRQAHQPSQYGGLGYPSFYQSQTSLPQEHPQNPTEGSLNNPQGVPSQPSHQLWQHIY

SEQ ID NO: 48696 - protein, 563 aa, Zea mays
  Clone ID: 700467776_FLI.pep
LYVKVELRPFGLHNLGNSCYANAVLQCLMFTRPLTTYLLEGLHSKNCSQNGWCFMCEFEKLIVEGKRRKIALSPTGILSHLNDIGSSFGPGKQEDAHEFLRYAIDAMQSVCTKEARKGGVLRSAEETTLVQLIFGGYLRSKIKCSRCHVSSEQCEPMLDLTVEIDGDISSLDEALVRFTSTEALDGENKYHCSRCKSYERAKKKLTIEEAPNILTIALKRYQSGKFGKISKAIRFPETLNIVCYMNPDTDDISPVYSLYAVVVHHDVMNAAFSGHYVCYVKDTHGKWFKADDSQVKPVSLDNVMSKCAYMLLYARCSPRAPSSVRQAISDPARPKKAKQKVVPGGTTWRGGSFNRHQDGQRHSNHTADDLTHAFDEYRNAPYSPSDSPSPSESSSLFSNSDAGSHSTVSTDSSESTRNSTSTEEYEYVFGAADQMYPGGPMGGAPVESDQMYPGGPMGGAPVESDYSTYSRSRSSLNTSSSGRDAYSAASSADHKHQVVGSGGQVEGDESTSLLYTDRSNQQLSSKLTDQYRQLDGSGHDPGETRGGVLLRRPSRDRTAQTFY

SEQ ID NO: 48697 - protein, 278 aa, Glycine max
  Clone ID: 700562930_FLI.pep
GGELFERICSAGRFSEDEARYFFQQLISGVSYCHSMQICHRDLKLENTLLDGSPAPRLKICDFGYSKSSLLHSRPKSTVGTPAYIAPEVLSRREYDGKLADVWSCGVTLYVMLVGAYPFEDQDDPKNFRKTINRIMAVQYKIPDYVHISQDCRHLLSRIFVANPARRITIKEIKSHPWFLKNLPRELTEVAQAAYYRKENPTFSLQSIEGIMNIVEEAKTPPPASRSIGGFGWGGEEEEDETKEEEDETKEEAVTEAEEDEYEKRVKEAQASGEFHVS

SEQ ID NO: 48698 - protein, 500 aa, Glycine max
  Clone ID: 700563631_FLI.pep
SRFLKMSLSFVLLFLISIPPSFSSPIHPTSNDLRFSSTAEKLIRGLNLFPKDPINTLENDPLFVSGSIVEKSFTFPSLAASSESSVEELGHHAGYYRLPRSKAARMFYFFFESRSSKNDPVVIWLTGGPGCSSELALFYENGPFQLTKNLSLVWNDYGWDKASNIIFVDQPTGTGFSYTSDESDIRHDEEGVSNDLYDFLQAFFKEHPQLTKNDFYITGESYAGHYIPALASRVHQGNKAKEGIHINLKGFAIGNGLTNPEIQYQAYTDYALDRGLIKKADYDSINKLIPPCKQAIEACGTEGGETCVSSLYVCNKIFNRIMTIADDVNYYDIRKKCVGDLCYDFSVMEDFLNKKTVRDALGVGDLDFVSCSSTVYSAMMQDWMRNLEVGIPTLLEEGIKVLVYAGEEDLICNWLGNSRWVNAMEWSGQKQFGASGTVPFLVDGAEAGTLKSHGPLSFLKVYEAGHMVPMDQPKAALEMLRSWMQGKLTMTKSGDNVSPK

SEQ ID NO: 48699 - protein, 275 aa, Glycine max
  Clone ID: 700565907_FLI.pep
AHHDTKRREPWLFGERNTELIKDAIHVRYALLPYFYTLFREANTTGVPVVRPLWMEFPSDEATFSNDETFMVGSSILVQGIYTERAKHASVYLPGKQSWYDLRTGAVYKGGVTHKLEVTEESIPAFQRAGTIIARKDRFRRSSTQMANDPYTLVVALNSSQAAEGELYIDDGSSFNFLQGGYIHRRFIFSNGKLTSIDLAPASSSKGRYPSDAFIERIILLGHAPSSKNALIEPSNQKVDIELGPLWVLRARAPAVTTIRRPNVRVAEDWTITVI

SEQ ID NO: 48700 - protein, 478 aa, Glycine max
  Clone ID: 700566166_FLI.pep
PKQKPTLSPTYIGTVSVSISHSLNSEHRKSAMDFRIYGVTILLFLFPTLTFSISQGQINSNSILVALLDSHYTELAELVEKAMLLQTLENTVMNNSNNITIFAPRNEALERDLDPDFKRFLLEPRNLHSLQTLLLSHIVPKRITKPEFKTGSTRHRTLASHHHLTLQALNLTHWNVESSRVINPNSVTRPDGVIHGIDTLLIPRSVQDEFNRRRNLISIAAVKPEPSPEVDPRTHRLKKPAPASPAGAPPALPIYDAMAPGPSLAPAPAPGPGGSHKHFNGEKQVKDFIETLLHYGGYNEMADILVNLTSLATEMGRLVSEGYVLTVLAPNDEAMAKLATEQLSEPGSPEQIMYYHLIPEYQTEESMYNAVRRFGKVRYDTLRLPHKVTAQEADGSVKFGHGDTSAYLFDPDIYTDGRISVQGIDGVLFPPQEEEAAGPVTRAQPAKVVVKQRRGKLLETACWMLGSFGQNSRFISCQ

SEQ ID NO: 48701 - protein, 520 aa, Glycine max
  Clone ID: 700566676_FLI.pep
EVGVERSKSKALEGGFGLDVVSEAELTVKGFAGLRKTKLVCTVGPACSSMEDLENLALGGMSVARLNMCHGTREWHRDVIRKIKKLNEEKGFCVSVMIDTEGSQIHVVDHGAPSSVKVEEGSNWVFTAEHYEGSRPFTVQTNYRGFSEGTEVGDELVIDGGMACFEVTEKTGNDLHCKCIDAGLFLPGAKFSFWRDGKLVRGNNKLPTLSTKDWADIDFGIAEGVDFFALSFVNHADSVKDLKMYLSTKSTKSIKVLAKIESLESLHKLEEIVQASDGIMVARGDLGVEIPLEQIPTVQEDIIYVCRQLNKPVIVASQLLESMVEYPTPTRAEVADVSEAVRQYADALMLSGESAIGSYGRKALAVLDMASSRMESWSREENRQSLVSHHQLGESLPECITEQICNCAVEMANNLGVDAIFVYTKYGHMASLLSRNRPNPPIFAFTNDDSTRMALTLQWGVVPILVDLSDDAESNISKSVQLMKSRGLISQGDVVLVVSDVAPTRASPMAFQSIQVKTII

SEQ ID NO: 48702 - protein, 287 aa, Glycine max
  Clone ID: 700676165_FLI.pep
DNLIGLGMLGSVYRAELPDGKILAVKKLDKRVSDQQTDDEFLELINSIDRIRHPNIVELIGYCAEHGQRLLIYEYCSNGSLQDALHSDDEFKTRLSWNARIRIALGAARALEYLHEQFQPSVVHRNFKSANILLDDDVSVRVSDCGLAPLITKGSVSQLSGQLLTAYGYGAPEFESGIYTYQSDIYSFGVVMLELLTGRQSYDRTRPRGEQFLVRWAIPQLHDIDALSKMVDPSLKGNYPAKSLSNFADIISRCVQSEPEFRPAMSEVVLYLINMIRKESQQSESNE

SEQ ID NO: 48703 - protein, 297 aa, Glycine max
  Clone ID: 700677130_FLI.pep
ALLYKPQNSLYSKAIPTPHKPHFISRLEIACSLISRMAKAAEQSPDSGNVYTLASVREDLVRQEDTIIYGLIERAKFPSNSHTYDEKYAQIQGFCGSLVEFVVKNTEAIQAKAGRYKNPEENAFFPENLPPSIVPSYSFKQFLHPGAASININKSIWKMYFKELLPLLATSGDDGNYAQTAANDLSLLQSISRRIHYGKFVAEVKFRDAPQDYEPLIRAKDKEGLMKLLTFTSVEETVRKRVEKKAVVFGQEVNLNSDDNDNENRKFDPSVASSLYKNWVIPLTKEVQVEYLLRRLD

SEQ ID NO: 48704 - protein, 125 aa, Glycine max
  Clone ID: 700677445_FLI.pep
EKKIGLTIPRVTISEDDLLAVAAENCIPRSIVASFTHDIFIKGCQVNFNIDGLGDVEISTLYPDEAFRSLEDCFEGFALMIDDKINKGENKITGTKSVVEAVPFTASCGEESPPQKCSNFVVTNY

SEQ ID NO: 48705 - protein, 459 aa, Glycine max
  Clone ID: 700678437_FLI.pep
FADSTIRINCHWFCVETKMSMSGFEGQCSNDEIRERRSDIENSEDERRQSRIGTLKKKAMNASSRFTHSLKKRGKRKIDYRVPSVSIEDVRDAREETAVHELRQKLVERGSLPPRHDDYHTLLRFLKARDFNIEKTIQMWEEMLTWRKEYGTDTILEDFEFGELEEVLQYYPQGYHGVDKEGRPVYIERLGKAHPSRLMHITTIDRYLNYHVQEFERTLQEKFPACSIAAKRQISSTTTILDVQGLGMKNFSRTAANLLSAVTKIDSSYYPETLHQMYIVNAGSGFKKMLWPATQKFLDSKTIAKIQILDSKSLYKLLEVIDSSQLPDFLGGSCTCAAEGGCLRSNKGPWNDPDIMKLVHNEEATFVRQITRMPNGQHTFDSFQMHPLKERCSDTSTTAESGSDMNDYSSPNRHRSCPYPHLAPVHEEVNLEPLNLIYLRSLILVFTSMHITCGCVLRF

SEQ ID NO: 48706 - protein, 184 aa, Glycine max
  Clone ID: 700679268_FLI.pep
ILTERGYSFTTSAEREIVRDVKEKLSYIALDYEQELETARTSSSVEKSYELPDGQVITIGDERFRCPEVLFQPSMIGMEASGIHETTYNSIMKCDVDIRKDLYGNIVLSGGTTMFPGIADRMSKEISALAPSSMKIKVVAPPERKYSVWIGGSILASLSTFQQMWIAKAEYDESGPSIVHRKCF

SEQ ID NO: 48707 - protein, 301 aa, Glycine max
  Clone ID: 700679927_FLI.pep
ELLFTAPDALQYLSGVILFEETLYQKTSDGKPFVEVLQENNVIPGIKVDKGVVELAGTNGETTTQGFDSLGARCQQYYKAGARFAKWRAVLKIGPTEPSELSIQQNAQGLARYAIICQENGLVPIVEPEILTDGAHDIAKCAAVTETVLAAVYKALNEQHVLLEGTLLKPNMVTPGSDSPKVPPEVIAEYTVQALRRTVPAAVPGVVFLSGGQSEEEATLNLNAMNKLEVLKPWTLSFSFGRALQQSTLKTWGGKKENVAKAQEAFLARCKANSDATLGKYVGGSGSGLTSESLYVKNYKY

SEQ ID NO: 48708 - protein, 393 aa, Glycine max
  Clone ID: 700725705_FLI.pep
AEACKVESSTMLVPADYVFFVGPISFSGPYCKPSIVFQLDGTIVAPTSPNAWGKGLLQWLEFSKLVGITIQGNGIIDGRGSVWWQDNPYDDPIDDEEKLIVPLNHTIGSPSPPLPIQSEMGGKMPSVKPTALRFYGSFNPTVTGITIQNSPQCHLKFDSCNGVMVHNVTISSPGDSPNTDGIHLQNSKDVLIYGGTMACGDDCISIQTGCSNVYVHNVNCGPGHGISIGSLGKDNTRACVSNITVRDVNMHNTMNGVRIKTWQGGSGSVQGVLFSNIQVSEVELPIVIDQFYCDKRTCKNQTSAVSLAGINYERIRGTYTVKPVHFACSDSLPCVDVSLTSVELKPIQEKYHLYNPFCWQTYGELKTPTVPPIDCLQIGKPTNNRIQTDHDLC

SEQ ID NO: 48709 - protein, 256 aa, Glycine max
  Clone ID: 700727038_FLI.pep
DLRILNFSYNKFSGNIPNSISSLAPKLTYLELGHNSLSGKIPDFLGKFKALDTLDLSWNKFSGTVPASFKNLTKIFNLNLSNNLLVDPFPEMNVKGIESLDLSNNSFHLGSIPKWVASSPIIFSLKLVNCGIKMRLEDFKPSETYFYDFIDLSGNEISGSAIGLVNSTEYLVGFWASGNKLKFDLGKLRFGERLKFLDLSGNWVFGKVPNSVVGLEKLNVSYNHLCGQLPKNKFPASAFVGNDCLCGSPLPPCNKA

SEQ ID NO: 48710 - protein, 222 aa, Glycine max
  Clone ID: 700727416_FLI.pep
IPSHLIASPITPFPLAKYQFPSPIFGVTLLGRFAFFFVVVFALIAEKDRNMLEEQPVVLFRKSPSRRRLRSAFDTDDRGWTSLHVFARKGELKLVKKLINEGMDVNVSAWGPKSKGVTPLHLAAEGGHIGVMDVLLERGADIDARTKGACGWTPLHIAAKERRRDAVKFLLENGAFMPPDISDSRFNPPLHYCPGLEWAYEEMKRLRQEDLSAGETSYSSES

SEQ ID NO: 48711 - protein, 394 aa, Glycine max
  Clone ID: 700728568_FLI.pep
KWLCLPSLRCNEETFVFLLRRRKMALGDDAQHHSPSFLDALLCEERETFEEDFDENGYERETENNEPSVIKSQSLPLVLHDNDLFWEDEELVSLIAKEGETHLCFHGVVANGALEGPRVEAVNWISKVCGHYGFSALTTVLAVNYFDRFITSLKFQNDKPWMTQLTAVACLSLAVKTEETHVPLLLDLQVEESRFVFEAKTIQRMELLVLSTLKWRMHPVTPISFFEHIVRRLGLKSRLHWEFLWRCERVLLNVIADSRVMSYLPSTLAAATMIRVIKEIESFNATEYIDQLLGLLKISEEQVNQCYKIIQKLLGCYEGIYSLHQKRKRLSEPGSPGAVTDASFSCDSSNDSWTVSSSVSLSLEPLLKRRKSQDQQMRLPSVNCVSIDVLNSPR

SEQ ID NO: 48712 - protein, 407 aa, Glycine max
  Clone ID: 700728683_FLI.pep
FMAREILILRHLDHPNVVKLEGLVTSRMSCSLYLVFEYMDHDLAGLATSPTIKFTESQVKCYMHQLLSGLEHCHNRHVLHRDIKGSNLLIDSEGILRIADFGLASFFDPNHKHPMTSRVVTLWYRPPELLLGATDYGVGVDLWSAGCILAELLAGKPIMPGRTEVEQLHKIFKLCGSPSDEYWKKLKLPHATIFKPRISYKRCIAETFKNFPASSLPLIEILLAIDPAERQTATDALHSEFFTSKPYACEPSSLPKYPPSKEMDTKLRDEEARRLRAAGKANAAGVKKSRPRDRGGRGISVPDSNAELQANIDRWRLVTHANAKSKSEKFPPPHEDGTLGYPLGSSHHMDPIFDPPDVPFSSTNLSYPKANFQTWSGPLVEPSVDAPRRKKNMAGNGHRQSKKDSYR

SEQ ID NO: 48713 - protein, 308 aa, Glycine max
  Clone ID: 700729688_FLI.pep
GKHFSEYAARFYAAEVLLALEYLHMLGVVYRDLKPENVLVRDDGHIMLSDFDLSLRCAVSPTLIRNFDSDPSKRGGGAFCVQPACIEPSSVCIQPSCFMPRLFAQKNKKSRTPKAEPGMPSSTLPELVAEPTTARSMSFVGTHEYLAPEIIKGEGHGSAVDWWTFGIFLHELLYGKTPFKGSGNRATLFNVVGQQLRFPESPATSYASRDLIRGLLVKEPQHRLGVKRGATEIKQHPFFEGVNWALIRCSTPPEVPRPVECDLPAKFEPVDTVGVGNINNSNNSSKRMVGNNNTDMKSGGKYLDFEFF

SEQ ID NO: 48714 - protein, 641 aa, Glycine max
  Clone ID: 700736576_FLI.pep
IEIQYNEFLNYSEEVAGGVPVPADIDIANSVEPVHISQIAKDLNLSPNHYDLYGKYKAKVLLSVLDELQGSEDGYYVVVGGITPTPLGEGKSTTTVGLCQALGAFLDKKVVTCLRQPSQGPTFGIKGGAAGGGYSQVIPMDEFNLHLTGDIHAITAANNLLAAAIDTRIFHESTQSDKALFNRLCPPNKEGKRSFSDVMFRRLTKLGISKTNPDDLTPEEVNKFARLDIDPNSITWRRVMDINDRFLRKIAIGQGPDEKGMVRETGFDISVASEIMAVLALTTSLADMRERLGKMVIGNSKSGDPVTADDLGVGGALTVLMKDAIHPTLMQTLEGTPVLVHAGPFANIAHGNSSIVADKIALKLVGPGGFVVTEAGFGADIGAEKFMNIKCRYSGLTPQCAIIVATIRALKMHGGGPAVVAGRPLDHAYLTENVALVEAGCVNMARHISNTKSYGVNVVVAINKFSTDTEAELNAVRSAALAAGAYDAVICTHHANGGKGAVDLGIAVQKACENVTQPLKFLYLVDLSIKEKIEAIAKSYGASGVEYSEQAEKQIEMYSKQGFSGLPICMAKTQYSFSDNAAAKGAPSGFVLPIRDVRASIGAGFIYPLVGTMSTMPGLPTRPCFYDIDLDTTTGKVIGLS

SEQ ID NO: 48715 - protein, 472 aa, Glycine max
  Clone ID: 700738841_FLI.pep
GNADIIQISGHDGGTGASPISSIKHAGGPWELGLTESHQTLIENGLRERVILRVDGGFRSGVDVMMAAIMGADEYGFGSVAMIATGCVMARICHTNNCPVGVASQREELRARFPGVPGDLVNYFLYVAEEVRGILAQLGYEKLDDVIGRTDLFQPRDISLAKTQHLDLNYILSNVGLPKWSSTEIRNQEPHTNGPVLDDVLLADPEVADAIENEKVVNKTIKIYNIDRAVCGRIAGVIAKKYGDTGFAGQLNITFTGSAGQSFACFLTPGMNIRLVGEANDYVGKGIAGGELVITPVDKTGFEPEDAAIVGNTCLYGATGGQVFVRGRAGERFAVRNSLAEAVVEGAGDHCCEYMTGGCVVVLGKVGRNVAAGMTGGLAYILDEDDTFIPKVNREIVKIQRVSAPVGQMQLKSLIEAHVEKTCSTKGAAILKDWDKYLSLFWQLVPPSEEDTPEANAKYDTTTADQVTYQSA

SEQ ID NO: 48716 - protein, 435 aa, Glycine max
  Clone ID: 700900826_FLI.pep
LTPFLHLANKLAKRGHKISFFIPRRTQAKLEDLNLHPNLITFVPINVPHVDGLPYDAETTSDVPSSLFPLIATAMDLTEKNIELLLLDLKPHIVLFDFSTYWLPNLARRIGIKSLQYWIISPATVGYMASPARQREDDMRKPPSGFPDCSIKLHAHEVRFLAAARKLEFGNGVLFYDRISVGADLSDAIGFKGCREIEGPYVDYLETQFGKPVLLTGPLVPEPSNSTLDAKWGEWLGRFKAGSVIYIAFGSEHSLQQNQLNELLLGLELTGMPFFAALKPPIEFESIEKALPKGFKERVQERGVVYGGWVQQQLILAHPSVGCFITHCGGASLTEALVNRCQLVLLPRLGSDFIINARTMGGKLRVGVEVEKGEEDGLFTKESVCKAVKTVMDDEIDQLGREVRANHNKVRSLLLSNNFETSCVDAFSHRLQDLV

SEQ ID NO: 48717 - protein, 234 aa, Glycine max
  Clone ID: 700900868_FLI.pep
NTRTYSTLKSTPFFAAMSALKYDDVKIAVSETGWPSAGDSNEIGASPDNAASYNGNLVKRVLSGSGTPLKQNESLDVFLFALFNENQKTGPTSERNYGLFYPTEKKVYDIPLTAEEIKEAPPSGVGKSQVPVSGEVSTTTSKGQTWCVASGGSSEKKLQNALNYACGEGGADCTPIQPGATCYNPNTLEAHASYAFNSYYQKKARASGTCDFGGTAYVVTQPPKYGNCEFPTGY

SEQ ID NO: 48718 - protein, 240 aa, Glycine max
  Clone ID: 700901296_FLI.pep
VSFMQTIKSFTPATTVVLQWLVWRKYFDWRIWASLIPIVGGILLTSVTELSFNMFGFCAALFGCLATSTKTILAESLLHGYKFDSINTVYYMAPFATMILALPAMLLEGNGILEWLNTHPYPWSALIIIFSSGVLAFCLNFSIFYVIHSTTAVTFNVAGNLKVAVAVLVSWLIFRNPISYLNSVGCTVTLVGCTFYGYVRHKLSQQPQVPGTPRTPRTPRTPRSKMELLPLVNDKLEDKV

SEQ ID NO: 48719 - protein, 184 aa, Glycine max
  Clone ID: 700903761_FLI.pep
LPGMQKNPSLYAVELLNEPLFPNVTLESLTKYYNDAYNAVRRHSSTAYVVLSNRLDLSSQLEIPNTKELFPLATGLRRCVIDVHYYNLYYDIFEDMNAQENIDFIYKVRSSQLDNITTVDGPLTFVGEWTAEWKVEGATKKDYQRFVKAELDVFGRATFGWCYWTLKNVNNHWSLEWMIKNGYI

SEQ ID NO: 48720 - protein, 511 aa, Glycine max
  Clone ID: 700904492_FLI.pep
LVWKQPNAPRVLDYSFVSSYASRFVGPITPLILQLREELFTQPYEKVNWKKVRHQCAKEDLYYPHSLIQDLVWDSLYMFTEPLLTCWPFNKLIREKALQVTMNHIHYEDENSRYITIGCVEKVLCMLACWVEDPQGDAFKKHLARVSDYLWVSEDGMTMQSFGSQEWDAGFAVQALLATKLIDEIGHSLAKGHDFIKKSQVRDNPSGDFKSMYRHITKGSWTFSDQDHGWQVSDCTAEGLKCCLLLSKLSPEIVGEKVKPERFYDSVNILLSLQSKKGGIAAWEPIGAQEWLELLNPTEFFEDIVIEHEYVECTGSAIQALVLFQKLYPEHRKTEIKNFIVNAVQFLEDTQTTNGSWYGCWGVCYTYGSWFALGGLAAAGKTYTNCNAIRKAVKFLLTTQREDGGWGESYLSSPKKIYIPLEGSRSNVVQTAWALMGLIYAGQSERDLTPLHQAAKLLINSQLEEGDWPQQEITGVFLKNCMMHYPMYRNIFPMWALAEYRRRVPLPSTEG

SEQ ID NO: 48721 - protein, 426 aa, Glycine max
  Clone ID: 700905218_FLI.pep
RWPFNKLVREKALQVTMKHILYEDENSRYITIGCVEKALYMLACWVEDPNGDAFKKHLARVPDYLWVSEDGMAMQSFGSQGWDASLVIQALLATNLMEEIGPTLAKAHDFIKKTQVKDDPLGDFKSMYRHISKGSWTFSDQDQGWQVSDCTAETLNCCLLLSILPSEIVGEKMEPQRLYDSVNILLSLQSRKGGLAAWEPSGTQEWLEILNPTEFLGNIVVEHDYAECTGSAIQALVLFKKLYPRHREKEIKNSIANAVQFLEDTQTANGSWYGSWGVCYIYGTWFALRGLAAAGKTYTNCAAIRKGVKFLLSTQKEDGGWGESYLSCPKQIYVPLEGSRSTVVHTAWALLGLILAGQAERDTTSLHRAAKLLINSQLKEGDWPQQELTGVFNRTCMLHYPMYRNIYPMWALAEYRRLVPLPSTEV

SEQ ID NO: 48722 - protein, 527 aa, Glycine max
  Clone ID: 700905223_FLI.pep
MDSPNALSTAPAAGSRKNATLICVPIMGESVEKMEIDVDKAKAGGADLVEIRLDSLKTFDPYRDLNAFIQHRSLPLLFTYRPKWEGGMYDGDENKRLDALRLAMELGADYIDIELQVAHEFYDSIRGKTFNKTKVIVSSHNYQLTPSIEDLGNLVARIQATGADIVKIATTALDITDVARMFQIMVHSQVPFIGLVMGDRGLISRILSAKFGGYLTFGTLESGVVSAPGQPTLKDLLYLYNLRQLAPDTKVFGIIGKPVGHSKSPILFNEVFKSIGLNGVYLFLLVDDLANFLRTYSSTDFVGFSVTIPHKETALKCCDEVDPVAKSIGAVNCIVRRPTDGKLIGYNTDYVGAITAIENGLRGKHNGSSTTISPLAGKLFVVIGAGGAGKALAYGAKAKGARVVIANRTYDHARKLAYAIGGDALALADLDNYHPEDGMILANTTSIGMQPKVDETPVSKHALKYYSLVFDAVYTPKITRLLKEAEESGATIVTGLEMFMGQAYGQYENFTGLPAPKELFRKIMENY

SEQ ID NO: 48723 - protein, 260 aa, Glycine max
  Clone ID: 700905149_FLI.pep
INGPKEKLDSTVISQPAIYVTSLAAIELLRAREGGQQIIDSVDVTCGLSLGEYTALAFAGAFSFEDGLKLVKLRGEAMQDAADAARSAMVSVIGLDSEKVQQLCDAANQEVPEAEKVQIANYLCPGNYAVSGGLKGVEVLESKAKSFKARMTVRLAVAGAFHTSFMEPAVSRLEAALATTEIRTPRIPVISNVNAQPHTDPNTIKKILARQVTSPVQWETTVKTLLTKGLKKSYELGPGKVIAGIVKRMDKGADIENIGA

SEQ ID NO: 48724 - protein, 181 aa, Glycine max
  Clone ID: 700905635_FLI.pep
RKARYIQELERKVQTLQTEATTLSAQLTLYQRDTSGLSTENTELKLRLQAMEQQAQLRDALNEALKKEVERLKVATGEGMSHTESFNLGMHQMPFSGSNFIPIPPQSGPSGHQNMQMPPFGHSPSTMPTHQLHQTSSHPYSEILQNEQLGRFQGLDISSKGSTLVKSEGPSLSASESSSTF

SEQ ID NO: 48725 - protein, 460 aa, Zea mays
  Clone ID: LIB3596-001-H4_FLI.pep
LPSAPPFRPLSLASSISPPTMGKEKSHINIVVIGHVDSGKSTTTGHLIYKLGGIDKRVIERFEKEAAEMNKRSFKYAWVLDKLKAERERGITIDIALWKFETTKYYCTVIDAPGHRDFIKNMITGTSQADCAVLIIDSTTGGFEAGISKDGQTREHALLAFTLGVKQMICCCNKMDATTPKYSKARYDEIVKEVSSYLKKVGYNPDKIAFVPISGFEGDNMIERSTNLDWYKGPTLLEALDQITEPKRPSDKPLRLPLQDVYKIGGIGTVPVGRVETGVIKPGMVVTFGPTGLTTEVKSVEMHHEALQEALPGDNVGFNVKNVAVKDLKRGFVASNSKDDPAKEAASFTSQVIIMNHPGQIGNGYAPVLDCHTSHIAVKFAELITKIDRRSGKELEKEPKFLKNGDAGMVKMIPTKPMVVETFSAYPPLGRFAVRDMRQTVAVGVIKSVEKKDPTGAKVT

SEQ ID NO: 48726 - protein, 297 aa, Zea mays
  Clone ID: LIB3357-037-C4_FLI.pep
ATNVIFGLALGYKSVIIPIFAIAVSIYVSFSIAAMYGIAVAALGMLSTIATGLAIDAYGPISDNAGGIAEMAGMSHRIRERTDALDAAGNTTAAIGKGFAIGSAALVSLALFGAFVSRAGVKVVDVLSPKVFIGLIVGAMLPYWFSAMTMKSVGSAALKMVEEVRRQFNTIPGLMEGTAKPDYATCVKISTDASIKEMIPPGALVMLTPLIVGTLFGVETLSGVLAGALVSGVQIAISASNTGGAWDNAKKYIEAGASEHARTLGPKGSDCHKAAVIGDTIGDPLRDGPEVSFSLDR

SEQ ID NO: 48727 - protein, 280 aa, Zea mays
  Clone ID: LIB3357-061-A2_FLI.pep
SMASSSPSCRGSGGKSDVDRIKGPWSPEEDEALQRLVARHGARNWSLISRSIPGRSGKSCRLRWCNQLSPQVEHRPFTAEEDDTILRAHARFGNKWATIARLLSGRTDNAIKNHWNSTLKRKYYAASDAVVADADDERPLKRTSSDGHPGLCFSPGSPSGSDLSDSSNHSLPSVMPSAASAAAVTSHQQQQHVYRPVPRAGGVVMLPVAPLVPPPPQPPATSLSLSLSLPGLDGQKPEPSPAVLTPAPAPPQPPLQIQQQQPAPPQMPPPQAQPSLPFQL

SEQ ID NO: 48728 - protein, 391 aa, Zea mays
  Clone ID: LIB3357-061-C4_FLI.pep
IISIAIYIVGSGSQGKNEADGGDEPPPRHPARPRWRRRLPGGPAAVVEPSGRPREAGAAAEPGGGGGGLLGGCGGGVGVRGVPAPARVPGGPVRVRGGRVARGVPRQDDRPLRAVRAVQRREHGVPEADAGAVGARGADSLPGVAHQRARGHVPPHGAGGVPRRHLRRRGRPPPQGARGRRRRRRAHLQLQPAQPHAVLHVAHRQPLRDAARRRQPQPQRNGMQRRHHRHRPRQAPAPGALGHVRAGGEHGEHHSQRLHGQQPPHAGHQHALPRRRRGHPAVQPPRRPPPRQVPAHPHGAHAPRRARPELRLRHAGGGRRGVRRRLPGQGAHGGRRRGPAHQHHHAGPARPAHVRAAPLPGHRRPQPRLPRQSARLPAGLQARLRPLLHPR

SEQ ID NO: 48729 - protein, 248 aa, Zea mays
  Clone ID: LIB3587-284-E5_FLI.pep
LLIHTYHSYPLPFSLVCASLKPTLLYILTKISYVHPLFPYSKKLNFVKHRHSLDKIRTTMLDKEDRTRMVPKSSSQTKTLLAAMEEERASTANRRFLCKDDASSVSNPSFRVYYGVASAGSVPFMWESAPGTPKHAMSSATLPPLTPPPSYYKGAAKTKFAKSQSSKKLLSSKPPSSFVQSILPKLRRSHTMPVPSRSPSAPAPAPPRESAQVQCARSRGNRLLLASPRSSFSSNSRGDDDNDDEDAG

SEQ ID NO: 48730 - protein, 352 aa, Zea mays
  Clone ID: LIB3591-066-B8_FLI.pep
YYCSVIISGKEEDDGDAMDHGERRAADGARPYGAHRRAGQRVGGARGRGGARRRGLRRRPRRRGQEPPRLHLRHAPGLPVPVPVPVRAADLHRERGQGGADGPGRAHGVPPRRRQPLRHRHRRRQGGGEAPADVPPPRQEEAAVVPRLVRLVHLGRLLHRRHRRRRQTRPSEPVQGRRAAAVPHHRRRLAADRLREQARPQRRRPGGRAIRQPADRDQGEHQVPDQARRRRRRRAGAGRAEATGGRDQGRARREAGVRVARHGRVLGRRDADGGDGDGALRAGAGVPRAVPGRDGQPAGHRHGLAVRPGAGPGAPAPGAGLLRRAPRVPRLLRRRRRQGGRAEHHRDAGRRP

SEQ ID NO: 48731 - protein, 281 aa, Zea mays
  Clone ID: LIB3354-108-H3_FLI.pep
APANPPPIRFSFSGPCLTPLLPPLTMAVQAQYPSNLLFHDRGEPDRKKAMDMPKPPQLAGVSPAAVYFSGGGASGNNRRKRAREAMAPPPAVKEDYVNLFALQQQQQQQSMPFANMALFQNQNRVSSSPSPAATALVSTGLRLAFDEQQQHLLQQQEGKQTNALRYSSPPSLFASVSDELAAQAKQHEEEVDRFVREQGEQLRRAVADRLRRHNRAILVKADQSAARRLREKAAEAEREARRGAELEERLARLRGEAAAWQAKALSEQAAAVALHAQLQQA

SEQ ID NO: 48732 - protein, 89 aa, Zea mays
  Clone ID: LIB3355-038-C11_FLI.pep
LPYPDPGHRVETETAMAGRLVPSTKKAMEHREEKPKVPSSDPGSDLDLVQLVAGQQPPNISEMKPLTREAYGGGMYAAEEEGGRRRGPA

SEQ ID NO: 48733 - protein, 133 aa, Zea mays
  Clone ID: LIB3356-037-G7_FLI.pep
DCFVQGCDGSILLDAGGEKTAGPNLNSVRGFEVIDTIKRNVEAACPGVVSCADILALAARDGTNLLGGPTWSVPLGRRDSTTASASLANSNLPPPTASLGTLISLFGRQGLSPRDMTALSGAHTIGQARCTTF

SEQ ID NO: 48734 - protein, 327 aa, Zea mays
  Clone ID: LIB3356-045-C9_FLI.pep
QCEGGAGDNMAAEMVKAATSDKLKEMDWAKNIEICELVAQDPGKAKDVIKSVKKCIGSRSKTTQLFAVMLLEMLLNNCGEPVHRQVIDNGLLPILVKIVKKKTDLPVREKIFLLLDATQTSLGGAKARFPQYYEAYYELVSAGVQFSNRPNVLVTRAEVPVPETRTEPNNESLSTRLTEAQQEVHTQPVPDASIVQKASSVMEVLRDVLNSMDPRHPEGATDEFVLDLVEQCTFQKQRIMHLVMTSRDETLVSQAIELNEELHKVLVRHDALLSVHPTTAVASNIKEEEEEEDAESLYRRLRKGKALSQDYTDDLVPSFRSMPEDKL

SEQ ID NO: 48735 - protein, 112 aa, Zea mays
  Clone ID: LIB3356-046-E11_FLI.pep
RRASAPASAARTAAAARRWCPPWASAGRRATASPRSAPRSAASPAGPASGTPRPSSATSSLPALLLVLQHHHGAPPSSPPRVSAADRAGAPEPVREICVLARVFGLFFPLLA

SEQ ID NO: 48736 - protein, 187 aa, Zea mays
  Clone ID: LIB3356-051-G12_FLI.pep
PSKTLSQIHKAPPPPPRPPFIFAETLTLVAAATLPGDAMSNPKGSKMLQFINYRMRVTIQDGRQLVGKFMAFDRHMNLVLGDCEEFRRLPPSKSSKTTGEREERRTLGLLLLRGEEVVSMTVEGPPPPDESRAKAAAAGGALAGPGIGRAAGRGVPTGPLLQAAPGLAGPVRGVGGPAPGMMQPQIS

SEQ ID NO: 48737 - protein, 366 aa, Zea mays
  Clone ID: LIB3356-051-H9_FLI.pep
PPSLPIYPTAASLLNSALLARRSRHRRRHHQRLAPIEPPADQIGRPNDHAGLAAVPGRHGGAERLRLADDRRGGRGRRPAPRHRHHHGRHVGDRRGDGAGAGRARRAAGAAGAEPQGRRGGPRAGARRVPGRRRRRAAARPQLARLRAPLRRAVPRPRAPPQPPRVRVPVHLSFFMLLLHPSVMSPPAKAAAATTAANLHGLTHGSRACVRTYSNNAGKYADRFAVSEDGVEMTFATNYLGHFLLTRLLLDKMADTARATGVQGRIVNVSSTIHSWFPGDGDALGYLDRVTRRKIPYDPTRAYALSKLANVLHTRALADRLSEMGANVTANCVHPGIVRTRLIRDRDGLITNTVFFLASKLLKTIP

SEQ ID NO: 48738 - protein, 111 aa, Zea mays
  Clone ID: LIB3279-006-A12_FLI.pep
RAGRAGDQESEHGGHAEARNFHHHLKFGSRVMNKLRRFFKPENSGQIADSPNTSESPRGRTKITDFPKRAERETAILDSGDERFRNGIHRCGQNPNPKGCGVRFGAAPRRP

SEQ ID NO: 48739 - protein, 461 aa, Zea mays
  Clone ID: LIB3279-011-F9_FLI.pep
RLPSAPPFRPLSLASSISPPTMGKEKSHINIVVIGHVDSGKSTTTGHLIYKLGGIDKRVIERFEKEAAEMNKRSFKYAWVLDKLKAERERGITIDIALWKFETTKYYCTVIDAPGHRDFIKNMITGTSQADCAVLIIDSTTGGFEAGISKDGQTREHALLAFTLGVKQMICCCNKMDATTPKYSKARYDEIVKEVSSYLKKVGYNPDKIAFVPISGFEGDNMIERSTNLDWYKGPTLLEALDQITEPKRPSDKPLRLPLQDVYKIGGIGTVPVGRVETGVIKPGMVVTFGPTGLTTEVKSVEMHHEALQEALPGDNVGFNVKNVAVKDLKRGFVASNSKDDPAKEAASFTSQVIIMNHPGQIGNGYAPVLDCHTSHIAVKFAELITKIDRRSGKELEKEPKFLKNGDAGMVKMIPTKPMVVETFSAYPPLGRFAVRDMRQTVAVGVIKSVEKKDPTGAKVT

SEQ ID NO: 48740 - protein, 133 aa, Zea mays
  Clone ID: LIB3279-182-E2_FLI.pep
AWCSSGSSRRCPSSPPSARLSATTCARRSVKLRETLWHGMACARLKILEDRRRKKSFSDSHVYDQYSLAPELGVEGHDDGVLLGGEAAVADVRAEVVEPAQPAALAAPLEPCTRRRPATIDPSSVHLCIYGSC

SEQ ID NO: 48741 - protein, 55 aa, Zea mays
  Clone ID: LIB3279-184-F4_FLI.pep
SQMENNEAAETMGKSHTPLSYASIIPTKLHKLSTIKFPLKFTRSTAKFQLCELSH

SEQ ID NO: 48742 - protein, 204 aa, Zea mays
  Clone ID: LIB3279-199-C9_FLI.pep
SIAPHRSTVRPSARSRDLFESWGMEAYVLFAPAKEVIRFEEQEEDIGCPSESSAARSTSSSSSSSDGVDLADDASSSGSSCHFEMASLMTQLPIKYVRRTHVLADGAGIAAALLPDYRDLILAGVLWSDAALLLFGCAGGAYPSSSTASRSRSRRWRRWAASRTCPSRRRSGSRRRGAAASASRTRTAVALPPRPAGSRRPGLG

SEQ ID NO: 48743 - protein, 185 aa, Zea mays
  Clone ID: LIB3279-209-H8_FLI.pep
AAAELEIPGECQYAGDPVLVRPSQPTPRHTLHLSNLDDQRFLRFSIKYLYVFGADAAVPADALRAALGRVLADYYPLAGRLRPSAEEDGKLVVDCNAEGALFAEGRLPGLAAADFLSGSDRPHKSWRKLHYRVEAQSFVAVPPLVVQVTWLACGGMVLCTAINHCLCDGIGTAQFLHAWARAARG

SEQ ID NO: 48744 - protein, 185 aa, Zea mays
  Clone ID: LIB3279-223-B7_FLI.pep
RRRASRFPHRHKNQPPPPPSARASCVRSLPATTLALGVFDDDDDDDDDDDDDDDGRGGERETGGRVIHGDGGGDDAQGEEAVAVAAREPAGGDHQGPVPALLQRDAVDAAQVPGPRRRRRRRPGAAPQLRRAAGPARHHRRVAGLLLLQLQDLQVGQPGHGDHPDPVAGQQRRVAGGPDEGLVVV

SEQ ID NO: 48745 - protein, 462 aa, Zea mays
  Clone ID: LIB3332-001-E7_FLI.pep
RVTDTKQRPSLAPYILPPPARARACTLASCRSPRHHGVRRERQQVGGGGVGEPSPRDPDARVRAAGARGAVVDGVREPAHHGVLRRDVHLRELLRHAQVVARVRPAHAQHRVLLQGPRRQPGRLLGAHQRGDPAVGGAGHGRRHEPVRVPHGVPGRVRAHRAAAAVARVPLLLRGRQLAVVRQHRRARDLRQELPRQPRGGARHPQGLRRPQRRRVHAAVPGPVRRRRRRVADPPRRLAPRGGVRRVRPHHPVHAVPAPPWRRAGDEQLRLRPLLLLPLPLHRAGVLPPRHDRGAEAGALLPRRVRLGRHAAAHPPPHAPRRRRQAGVQDLPGAPARRRRPAAADHRLRVGNGRHQENRAAAGVVVVLWVREDHVPSAGSWGGLHDPAGAGERGHAGAVRGDNLRRGRDADGDRQHGADRRVAGLPRQERQHVRVPDQHLELRGARDGGLRLGGGAGPVPRA

SEQ ID NO: 48746 - protein, 289 aa, Zea mays
  Clone ID: JC-ZMSHLIB3569P007F09_FLI.pep
YAKLSSSDGAASVSGVAREEVATVETLAPPARAPVDGADRADPPPHERQQEAEAGAAKPGASLQQDAPLTEEVVEGGSGGHGGGGSQEQEQDQAQGTCDLYKGRWVYDESRAPLYKESECSFLTEQVTCTRNGRRDDDYQKWRWQPDGCDLPRFEAKLLLEKLRNKRLMFVGDSLNRNQWESMVCLVQSEAPWDKKSLVKNGSLNVFHLQEYNATVEFYWAPFLVESNSDDPDIHSISDRMIKPTSIAKHAANWEGVDYLIFNTYIWWMNTPQMKTARWIFLKETRKVR

SEQ ID NO: 48747 - protein, 445 aa, Zea mays subsp. mexicana
  Clone ID: UC-ZMFLTEOSINTE055G02_FLI.pep
GATVVSVVVDRSRTCVLAMARGDGGQLELSAGVRGAGGSAATADHVAPISLGRLILAGMVAGGVQYGWALQLSLLTPYVQTLGLSHALTSFMWLCGPIAGLVVQPLVGLYSDRCTARWGRRRPFILTGCMLICVAVIVVGFSSDIGAALGDTKEHCSLYHGPRWHAAIVYVLGFWLLDFSNNTVQGPARAMMADLCDHHGPSAANSIFCSWMALGNILGYSSGSTNNWHKWFPFLKTSACCEACANLKGAFLVAVVFLVLCLTVTLIFAKEVPYRANENLPTTKAGGEVQTEPTGPLAVLKGFKDLPPGMPSVLLVTAITWLSWFPFILYDTDWMGREIYHGDPKGSNAQISAFNEGVRVGAFGLLLNSVILGFSSFLIEPMCRKVGPRVVWVTSNFMVCVAMAATALISFWSLRDYHGYVQDAITANASIKAVCLVLFAFLGVP

SEQ ID NO: 48748 - protein, 212 aa, Zea mays
  Clone ID: LIB3116-012-F7_FLI.pep
SAVCITNYSTSRSKLVAKMTSAASFPSSLFPFPTRASTPPLPSSSSRPSHSRPHLRIRSPKPNNPTVAPASSRMEVAQPQASNAQGGAEPAMKLLFVEMGVGYDQHGQDITAAAVRACKDAITSNSIPAFRGGSIPGVNTDQMKLQIKLGVPRSTQHLLDAERVKAVFPYGKIISFEVVDGGMICSSGVCLEAMGDKNDDCYIVNAAVYVGY

SEQ ID NO: 48749 - protein, 100 aa, Zea mays
  Clone ID: LIB3150-043-G12_FLI.pep
QANNTQQPTRRQEFQNNGIAKRSNSVLVVLDVKALGVGGSITLVGAEGSLGVGLAPGEEGRSSLLHVLHLASPGLEGARLEGTAEGEGQGPWLLGAELVH

SEQ ID NO: 48750 - protein, 208 aa, Zea mays
  Clone ID: LIB3227-029-B6_FLI.pep
IENVFHHRKVYVHGYDRDLSLTLARRRANDLIDLRSRQRMDGSVNLDVPLLALLELLLVLHPVNPVLGCKVEHDVVDALLHALEPAHVDVGVVLLQQLPQLLPVLRHARLDVHLLPRRVRLLPAHREVQPEVVRRHLLHLLQLLLVQQAVARRDSQEQPRKAGELVVLVLLQEHLPQEGAERSNTGPRCELHIHTHTSEFSQQRTCMF

SEQ ID NO: 48751 - protein, 152 aa, Zea mays
  Clone ID: LIB3227-031-G4_FLI.pep
QTEQICSQLINQQPKHAELLTLTMYPPKLRGCMRVAAPSFPPISRPGGDHGRRPGVLLVATPDDRRVRVLRPRAAVHRAGRRPVGGADARRGSGGGVGQLRVVDEVAPAAAPAAGAAAVRRHGAVAAAPVAPPDHVDHERDQPFHLSSWIAR

SEQ ID NO: 48752 - protein, 136 aa, Zea mays
  Clone ID: LIB3228-005-G10_FLI.pep
QQHPSRAYINLSDLHPAFCSAPSKWRRRARRWLQASSFCCFSSTQALSCPSIPRTAGPTPASSAPRRTTAGTTLARGAACRTAAATGSSPTWCPSASACAPTATSPGASDWLTSPAMMDGAQLRLPSLLHSLLFKA

SEQ ID NO: 48753 - protein, 273 aa, Zea mays
  Clone ID: LIB3228-008-H2_FLI.pep
EPTEKIDLSCFLSILHRDPEEKSRNCWTVPDSKIFKVRSKNFPQDKSKIPAASYLMELAAIDWFKDTKRMDNVARQKGCVAQVAADRGMHTFVVNIQIPGSTQYSLVMYFVTNTLRKGSLLQRFFDGDDEFRNSRLKLIPSVPKGSWIVRQSVGSTPCLLGKAVDCSYVRGPAYLEVDVDIGSSAVANGVLGIVFGVVTTLVVDMAFLIQANTYEELPEQVIGAARLAHVEPATAVVPDLSNTSNDSSNSNNDNNNNNNNNGSSEDDLSKKTN

SEQ ID NO: 48754 - protein, 108 aa, Zea mays
  Clone ID: LIB3228-010-E5_FLI.pep
HVDWKYYSSSLITGSSDAESGLVGGAGLEIGGDDIIGDTVAARLGSKADAEGVLERGLGVERPSASWALLECKGEIVAAMLLDLHVRDGGNVRGENQVARLGALADLE

SEQ ID NO: 48755 - protein, 73 aa, Zea mays
  Clone ID: LIB3228-018-G12_FLI.pep
PARLRASLYTSTASYSRREIPRGPIKTRLASYATHSQMAGLRMKFVAVAAMAAALVASAAAAEAPAPAPASDA

SEQ ID NO: 48756 - protein, 173 aa, Zea mays
  Clone ID: LIB3355-005-A10_FLI.pep
GRFIILMRADHHYCYVHEVTCHARSSRCPASAALSPLPVSLLRHGEVGVVGAPPPRGHERRQLPVTELEPRRPAVVVVAAIAVGRRGRGDPEPQLPLQLRELLASSHHVVVADVPAPGRAAQLLVHADVRLRHPLHVRSRQQTLDEHGVRSCRRADMPVNSISSSPCPWLSTE

SEQ ID NO: 48757 - protein, 105 aa, Zea mays
  Clone ID: LIB3355-006-D7_FLI.pep
WMKWLLRSIVFQGSIVFQEPHFVLVCVQFKLCKVRSVQFGQKVIPYLNTYGDRTIRYPDPLIKANDTIKIDLETNKIMDFIKLYLLFHRLHQVIYLVRLNVSTNS

SEQ ID NO: 48758 - protein, 141 aa, Zea mays
  Clone ID: LIB3356-007-G9_FLI.pep
GGKVGGGEEVVVGDGGEAVVEAGEYADHVVSGVLGGGEGLDDVLRCGQDLVAAGGGRLQLLLGRWRGHRRRHHRRSAQSRGRVGIFGARGGGDLGVTPLPLPAGCRCLCLTAALGPCGVWGVCARSALRHREVKCVSVPFV

SEQ ID NO: 48759 - protein, 338 aa, Zea mays
  Clone ID: LIB3356-014-C1_FLI.pep
LVFGEGVVNDATSVVLFNALQNFDLNHIDVAVVLNFLGNFCYLFVSSTLLGVFTGLLSAYIIKKLYIGRHSTDREVALMMLMAYLSYMLAELLDLSGILTVFFCGIVMSHYTWHNVTESSRVTTKHAFATLSFIAETFLFLYVGMDALDIEKWEFASDSPGKSIGISSILLGLVLVGRAAFVFPLSFLSNLTKKSPLEKITFRQQIVIWWAGLMRGAVSIALAYNKFTRSGHTELHGNAIMITSTITVVLFSTMVFGMMTKPLIRLLLPACSNTATSEPSSPKSLHSPLLTSMQGSDIETGSAQIVRPSSLRMLLSKPTHTVHYYWRKFDDALMRPMF

SEQ ID NO: 48760 - protein, 211 aa, Zea mays
  Clone ID: LIB3354-051-C6_FLI.pep
NKMRPLCISFAISKIVLRSRSSQQALHFTRFTRQIVASVQSCARGTRYQTSKQILLFLRATDASKQAHATEPPGLGQTTPPVAARRRRLVLDTLVTGETALVGRRARGEPAALAPRMVVGAAGEALVSPSPRWRSAGGGEALVVHSPFRRPPLADRAANERDEPLHAHTAMICTADLSSSSDRDGDFPGVAERTWHDRMRLLCTWVDSIFL

SEQ ID NO: 48761 - protein, 310 aa, Zea mays
  Clone ID: LIB3354-052-C8_FLI.pep
VQNQTPSESPIRSAASRPAMRPPAPKVPSAASSSSHSQREPRPENPLLLLPSSRFTKLSLGCPLLDRLLCGGLPAASVTEIAGESASGKTQLCLQLALLAPLSPLSASSLFLHSDLPFPLHRLRRLAPKSRPDILDHVLVAAAHSPTDLLSLLARAQRLLANPGRSPHRLPIRLILLDSIASLFRGDFDASPADLRRRSALFFQISAKLKELAYRHQCVVVVTNQVVDVVEGDAGNTVAWSSGRRLSPALGIAWANCVNTRLFLTREVEGNGTSGSARRWMKVAFAPHLPEQSCEFVIRRDGVFGVEPER

SEQ ID NO: 48762 - protein, 181 aa, Zea mays
  Clone ID: LIB3356-036-E7_FLI.pep
GLTIYHVKSHLQKYRTARYKPDLSEGTSEKRTATEELVLDLKTSMDLTEALRLQMEVQKRLHEQLEIQRKLQLRIEEQGKYLQMMFEKQSQSSTEKVQDPSSRDTTAKPSSNQSQSTNKDCGATMDPNGTGGIVRTAELGERSSELGVKQKLVEIEESGTEVATGDRSKISQEKRRKLQDS

SEQ ID NO: 48763 - protein, 290 aa, Zea mays
  Clone ID: LIB3356-040-B12_FLI.pep
KKKNRGPPPPAMPPPSASASRLATHWIADALADDESLDFSVLKALFGDSSKSLAGAPEATRERVALRCIQEVSSVIASGGDAAAPAGVPRVDGAWSCEDVLFRLIRDVGSSGELEKDLLPPLSQDIQEYICTKKFTLPETSFQLLGSFGELEDLLPPFSQDIQENICTKKFTLPETSFQLAPPNPLRPAPHPTIPFCRFKEVKNGRHSSVVEMKHYDLCTMNLNEVLSRVEEMSQEEASVCGLMDMDEPSPPSCDDSVEVEDDSCYEGLTDAEWAAENYADWEELYNRSM

SEQ ID NO: 48764 - protein, 241 aa, Zea mays
  Clone ID: LIB3356-040-G7_FLI.pep
APPAEAAAGSGPAGGEGRKGKAPKGGPENGKFRYRGVRQRSWGKWVAEIREPRKRSRKWLGTFATAEDAARAYDRAALLLYGPRAHLNLTSPPPPTLAAPRSHPHSSSATSSAPPALRPLLPRPPLHQLSSDGAPAPDFHYHNQFQRRLLPQPTPTLYYANTATASTVTTSVPTRVAVPQEPAIAPAVGSLTSLQEPQVGTPEEARGEAGWDYNGGEEEDYAAALLWDEPEPFFWFDVFLK

SEQ ID NO: 48765 - protein, 210 aa, Zea mays
  Clone ID: LIB3356-043-C8_FLI.pep
EHVRSEIHKNLKCSRCDKDGDPALDGTGFAATGHKASIPGVQDYADIGGFGEISGCLQKMNSTHQQIGRPTEEDLGSWGHHCDPSTVPDTILQCSAGEEVSFVFTNQVDGKLVPVESMVRSAAHQQNGIAATGEKGVQIPNSPSKPGKQSLNGKNLKMGFHLKNSSLKCSTKSRPSPNCLQGLMKTSPFLDQPQIKKLHVASDISDDDFV

SEQ ID NO: 48766 - protein, 183 aa, Zea mays
  Clone ID: LIB3594-016-D9_FLI.pep
SYLDELPRTHGENNQFAASRVPNDWGIERHGADASSSLRFDMPSHQQTLEELEMEFKKEATQLARARDQEEDEENYRHRESLRVIRENYMERVITMRTVHARKWEEFLDTFKSQQQAQPSYIQTGYLGFEQRTAHISATHQPMDSKSTYPYASDSYSAPKAHAAYGEFQHERHDDLGRAYRRY

SEQ ID NO: 48767 - protein, 316 aa, Zea mays
  Clone ID: LIB3354-098-D7_FLI.pep
RSNTVDGERRPVRSVGERDGGLVHEGLGGVRDALGLPLHLLPARLPRARLRHALDERGEAAPVVGLEQVGPHAQVREGHHAVLGGPVGGRGHHLVVRRVVVARQRVLAGQAHAGLPRRGGHLLHQRLGAALRVLRLLVVAHLHAREVEHGAVARQHARDGRVPVVRPGVVVPRRQLRRVGPGAVVPVDPGHLHRDLHAGGTREHARRRRQDALAVLQEHLRVPAHEELPVLRAPPALAPEEARVLRPVLVAAGVARTRVAPLRLAHGLSSRLQATQHEPVVALELADARERPGAVALRVGRVAQLAGRAHADLDLH

SEQ ID NO: 48768 - protein, 141 aa, Zea mays
  Clone ID: LIB3354-108-F3_FLI.pep
GSVYGDTWPSDDRRQARPIKFGEASQTDKTRPKEICRRSRTDLLRILHQRRPRRTGGAGGPGPLRRRARWPPKTVPSCASPVRCGLGCAHVRTYGYGSGVDIPAGLSGSCSSSSRRPSAYGWHGSTGHVRPIRRKLSISKY

SEQ ID NO: 48769 - protein, 411 aa, Zea mays
  Clone ID: LIB3354-109-H10_FLI.pep
FRCLSYCCNQLSKPGRPVANSAPTAIHTQLQLMSAQQKFGINYGQIANNLPDPTQVATLLRSMNVNKVKLYDADPRVLTAFANTGVEFIIAVGNENLQTMAGSPAAARQWVAANVRPYIPGTRITCVTVGNEVFSGNDTATMASLLPAMKAVHAALADLGLGGQATVSSAHSVNVLAASFPPSSGAFREDLAEYMKPILDFHAQTGSPFLINAYPFFAYKASPGSVSLPYVLFEPNPGVRDPSTGLSYDNMLYAQIDAVYAAMKAMGHTDVGVRISETGWPSRGDEDETGATVQNAAAYNGNLMQRVAMSQGTPLKPNVPVDVYVFALFNENMKPGPTSERNYGLFYPNGSPVYALSAGSGGGSGSGGSLNPYYTSMFSSSSRSAVSATFLTERVMLLLLLQATVILRHYC

SEQ ID NO: 48770 - protein, 305 aa, Zea mays
  Clone ID: LIB3587-227-H4_FLI.pep
AFLLRLCLKVQNATGVPRSELQKELKIWAVSSIPVFQNHRFFGILLNMLLNSPLPVYSLVSADDEILLRDVLYDSLILVDYSFINNGVGVDLLPIYVLRLVITLDAVNDARRKGDQGRAVSFINAFSTSNVPNFLIKWATFQSGSGALSKPITNTPQSIIKWLVDLEVKGLKVFGDYSSCIMERFAYDGVKNGHGNMIHSDADLFFFDKQSGMEFMDTKGSEDEAVEEMETAGNAFMAAAQSMKGVTDGMRKRKSCGYEDAAAVKFVKYKVEDSSLKDYLSAANGISSGSEVENPQSDDEMEESN

SEQ ID NO: 48771 - protein, 134 aa, Zea mays
  Clone ID: LIB3587-229-G9_FLI.pep
LAKGGKMAPLLAAAMNHAAAHPGLRSHLVGPNNESFSRHHLPSSSPQSSKRRCNLSFTTRSARVGSQNGVQMLSPSEIPQRDWFPSDFTFGAATSAYQIEGAWNEDGKGESNWDHFCHNHPERILDGSNWSFQQ

SEQ ID NO: 48772 - protein, 282 aa, Zea mays
  Clone ID: LIB3591-103-G10_FLI.pep
QICNFASLPLSYGLSPPNTAAMAAASTSTSLPLGFSHHRPTPRIRPQPQSQSQPLKAKPPTPLCLSLTLTPATAKPRLAAMPDDVAVANFVEKDWSFLESAGANLQRALASGALTPASRVLALTPTASFVRSLLASSPCELLVAAHESMYVLAGVKEAHDEVRCFHLEGGGGGRGGGVVEAVPERFDDFDVVFVCYFPGMGVSAGALLKSLAKRCSKGARVVMFLDQGRQNFEQQRREHPDVVTSDLPSIAFLEKAASGNKYEITEFVDEPSFYLAVLQFQG

SEQ ID NO: 48773 - protein, 152 aa, Zea mays
  Clone ID: LIB3591-109-G8_FLI.pep
ERKSGMAMERSLSCAERGSQRHQLDLRQPPLRQPEGVRPVLRRDGRHRRRGPGAQEEAAGGGGRRRGAAAAAGRVQDVRRGREGPGVGAPRRQLDQGQVLRRGLRLVVIDRQLHRRAHRPIGVVLLRYGLPYELVHCMPTAAPVPPVTCSWS

SEQ ID NO: 48774 - protein, 183 aa, Zea mays
  Clone ID: LIB3591-112-E8_FLI.pep
LHLIIPITRPLSIKCLDIVGPFKPVQGEFTHLFVAIHKFTEVVSCIKISTKMYNSITDRTYCVLDTSLYFHFLTRSLTKQHIKKHIRLASAGAGDPEIRLPVLRAGAEHRPALARGILDRVLQLPDRQPALVLGRPELRPRSLPSLLVLLPLPLPLGRAATGGRSRRVGGRREGALRLSSLRA

SEQ ID NO: 48775 - protein, 97 aa, Zea mays
  Clone ID: LIB3279-179-H4_FLI.pep
AAQTNTAPPPQLCPTESFYSEDSQDAPDGSPRRLRSALRRGRPRGLRGGAGVHGARVCSGAGTGRWRGLRSGLRCGRGVVRTAVPPYDGPDAVEVSY

SEQ ID NO: 48776 - protein, 135 aa, Zea mays
  Clone ID: LIB3279-196-H7_FLI.pep
FYPHIYMYIIWFLLAWIKVLTPSLLDLSCCNLRLLFALRSSIYLGRVIISNLFLLSIKSYAIRYHGIASTTPNVTLQNTVSLDINLFASSGDMYFVISSITDHKTFKVASTLLHNLVFRSSIAEVVDGASPRRGE

SEQ ID NO: 48777 - protein, 128 aa, Zea mays
  Clone ID: LIB3279-197-G10_FLI.pep
LLPLLSPGPRPAISLKEKSAAMKTTSSGIAAVPALPAGQGSQTQREQQPVLRRREDPVRGGGHQARQAGHVPVPQGGLRSGPRCALRGAGAARRLRPLAVLQHHPRHRLRQDRMKGYCSLTRIHTTGW

SEQ ID NO: 48778 - protein, 78 aa, Zea mays
  Clone ID: LIB3279-212-D8_FLI.pep
LRSLTTTISVALSTLSCRCSSCSPSASKCPWIVVKLPHLHHNQRQHAKQDCFTFQLDITLDDIQRVTQWNLDVNEHSE

SEQ ID NO: 48779 - protein, 209 aa, Zea mays
  Clone ID: LIB3592-094-C6_FLI.pep
LLQGLCMYADAAQSRNGQEGWKVQPTAYGSAPGATNDTHRSAYAASCWICTATSIWAALWWLSISSWPRLSTSSWPRLSASWILPGRCIPSTRSRLPTGWWISSTWSRLPPGSGWCISSAWFLPSTRFLPPSRGLLPSTRFLPPSTGLLPSTRFLFPSTGPLPSTRFISPTPSTRFISPSTGLVPSTRFLPPTGLPWQVKITRQVNQIS

SEQ ID NO: 48780 - protein, 144 aa, Zea mays
  Clone ID: LIB3592-096-A4_FLI.pep
SRVTGSGLHLSTGLPFSLSLATASFMASFLFLLASTLACTPLTFGSFFASAGAGGGGRLFEAAPAMSAPSMVPAAAAAATKPHRSALLLSNLAPKAQLLLLLSGAAGGFGRIFRTVVIVLCDAERGGMGCAIAALVLGISRNRK

SEQ ID NO: 48781 - protein, 75 aa, Zea mays
  Clone ID: LIB4073-015-D11_FLI.pep
RFSSHSLIKNSAHAVPVISLSCRSNFLTLTSPIRTCSPKNAQREYAMVAGPRIELKYNIVARFTKLPAATPYPIV

SEQ ID NO: 48782 - protein, 99 aa, Zea mays
  Clone ID: LIB4073-015-A11_FLI.pep
HSMETLMRSKKLHYISHCHFLAAAGLLLFTFFLVSRGFCSAFLTPPLLAADGFVAVSLSLGAGSLPCAATPAGFEAFREAIVVVVCYLLVALLQLTLLE

SEQ ID NO: 48783 - protein, 180 aa, Zea mays
  Clone ID: LIB4073-022-A1_FLI.pep
GAPLDHPLTMPFILQNKPFFFLSLEGLLTHLVYVRNTYMYTCTVVHAERCLSYHRSNLLPITSRSTNLPTGGGTLSGGAATPGYCWPWTPPATWPGTSTTARRASCRCCCQSRRRRRAPTNHTAGGGGRRRTAGGFRWRPDASPSCTPRWLGTPTGSGLPLQWRPRACYTLLSSSSSSKK

SEQ ID NO: 48784 - protein, 267 aa, Zea mays
  Clone ID: LIB3595-011-H1_FLI.pep
IEKKNIGINKACRRLDDISCRSQQSCSNCSLGCCFLFFPLGLGGGFFFPSSAKKMARHPGVDWSTTALFQQVRVVGVRPGAICICMQLGMASALETLCGQSYGAKQYHMLGIYLQRSWIILSACAVVQLPVYLFTEPLLVALGQDPDISAVAGTVALWYIPVLFSFVWAFPLQMYLQAQIKNMIITYLAMLNLGLHLALSWLAAVHLRLGLAGVMGSMVVAMWIPVFGQLAFVFFGGCPLTWTGFSSAAFADLGAIVRLSLSSGVML

SEQ ID NO: 48785 - protein, 128 aa, Zea mays
  Clone ID: LIB3596-054-E4_FLI.pep
PERKRFNGFGSSLRHLKPFCLQSCTEKYRGIAPNKPLISKDHERAYYDSTDWVDLSMINKHNKKTICTNRFIMLVYTNRFYNVAARKNSRLKERTQQFLPLQQLHSMFSNKDTTPRRTMLVCYDRPPL

SEQ ID NO: 48786 - protein, 187 aa, Zea mays
  Clone ID: LIB3969-004-A7_FLI.pep
MLTPAQQRAELKQQRERDAIAISVVRMHAGREPERRVAGRGEDPGRRHFPSQEERVDRLSGEGHRRPDQHLLRRADGVRGRECHQLRHGGYVGGGRREHGRHRRGARPHHRSRGLVHPHPGEQEPGAAGAGSRLQRPAAQLLRHQVPAGGGCAGADPRGPRPRRGTRRRRRHRRGSGGTGTAAVVVS

SEQ ID NO: 48787 - protein, 215 aa, Zea mays
  Clone ID: LIB3969-004-G11_FLI.pep
MRPLPAAAMATATLPLRLLPSKTLTLSTLPSLRRSLSVAALEPRRWRLRAAAEEAPGAVEVEFVEPETEAEEKPAVPEPIEAQLAAAGAGKDADIFAVVMIGSRQYIVMPGRYIYTQRLKGANVNDQIILNKVLLVSTREKAYIGMPVVTNAAVHAVVEEQGRDDKVIVFKYKKKKKYQRKLGHRQPNTRLRITGISGYEEYPADPILDPAAALN

SEQ ID NO: 48788 - protein, 214 aa, Zea mays
  Clone ID: LIB3969-008-C2_FLI.pep
GTDSSERLKLTAMAILGALRLAPSPPALAGAAPPATSPYTAVRSSVHFRLANAGAAALVAASLLAADPAVTFIGGGPYGKQVTRGQDLTGKDFSGQTLIKQDFKTSILRQANFKGANLLGASFFDADLTSADLSDADLRGADLSLANLTKANLSNANLEGALATGNTSFKDADITGADFTDVPLRDDQREYLCKIADGVNSTTGNPTKETLFCS

SEQ ID NO: 48789 - protein, 261 aa, Zea mays
  Clone ID: LIB3969-008-G6_FLI.pep
ATMWTRALATVLFVAGAALLGVGVGGASAQQGVWSIITRPMFQSMLSHRGDSGCQGAFYTYDAFIEAASKFPGFGTTGDEQTRRRELAAFFGQTSHETTGGWATAPGGPFAWGYCRVKEQNPTDPPYYGRGPIQLTHEYNYRLAGQALNLNLVGNPDLVASDPVVAFKTAIWFWMTPQSPKPSCHAVMTGAWTPSATDRAAGRLPGYGLTSNIINGGLECGKGQSTDGAKDRVGYYRRYCDMLRVGYGDNVPCKDQKPYGG

SEQ ID NO: 48790 - protein, 392 aa, Zea mays
  Clone ID: LIB3607-010-B12_FLI.pep
RQAQGETAVMDTETEGKAAAVEEMREWCVALPKVELHAHLNGSVRNSTLLELAKHLGDKGVIVFEDVKDVIMKSDRSLPECFKLFDLFHILTTDHDTVTRIAKEVVEDFAAENVVYLEIRTTPKNNEAKGMTKRSYMDAVIKGLKAVEDVDVELFGSNFRTNETLSSKLLDGVTKKKKIYVRLLLSIDRRETTSAALDTVNLAVEMMDQGVIGIDLSGNPVVGEWETYLPALQHAKNMGIPVTIHCGEVANRKEIQAVLDFCPQRLGHVCCLNDVEWKKLKSLMIPVEICLTSNVMTGGAPSLELHHFADLYNAKHPLSLCTDDSGLFSTSLSNEYYLVATTFGLSKFELFQLAQDAVQFVFADDVVKKSLKEVFKHAEKRLLMWDELAAPS

SEQ ID NO: 48791 - protein, 155 aa, Zea mays
  Clone ID: LIB3606-035-A10_FLI.pep
SFTAKATVLPATAASTTTNLSSCRTTAPSAWAAPISATDILRTSAATPAPASVHVPTTATMHVPEVVMEIKVDIHGVHVVVPKLLVRGVRVSVTPNKNRASPEIELSSQGSLFKDGTHHLRREALGESSPCMGGVLKEVIISSSCSSSLRTRCSR

SEQ ID NO: 48792 - protein, 216 aa, Zea mays
  Clone ID: LIB3606-035-B8_FLI.pep
QQPHPPRDEQHRHAEAPRGGRADLRLRAVRRGHPAGLHVGEVLGPVRHERRPCLHPAPDGLRRPAGQRHDEPDLLRGAGGRGPQDAAGGAGLGVRPREGGLLRADAGPAVLRPGHRGRARHVRLQRLLPRHGNGLRDVLLQRRRGGHDDRPESRILCLCWEERDVVDERHLPGAVVQLHGGRLRRAPGVRRRLVTRPHRLHRAALQRRPPPVVGSS

SEQ ID NO: 48793 - protein, 151 aa, Zea mays
  Clone ID: LIB3608-032-H11_FLI.pep
CGRVAPHGDFPSSLAPHLARINRLRLPPQIAPPTVSLVRVLPGQTMLRRQRRQSWGRSRAITEILVSSRERSQTDKMVDGMDFEELCSDFECISSPYVESIMRQVARDIFELREDNRAFSCYAVPVKYEVFLCYVKSFTFCTLIGSFRLLV

SEQ ID NO: 48794 - protein, 379 aa, Zea mays
  Clone ID: LIB3600-016-H5_FLI.pep
PQLAETEPSPAMPPPPQANGGKVTPNLAMDAEATRMLNLTVLQRLDPAVEDILITAAHVTLYDFNIDLNQWSRKDVEGSLFVVKRNSQPRFQFIVMNRRNTDNLVEDLLSDFEYELQPPYLLYRNASQEVNGIWFYNQHDCEAVASLFGRILNAYAKVPPKPKVPTTKSEFEELEAVPTSAAIDGPLEPPLSSTAVVSNAPDESLVNYFNGAASIGSVPSAQMAGRAHPSNDTVTPSHVPLIVPSATPTHQMSHPLGGSSAPPLPLHDTNPHASQSANLLTPAFFAPPPPSSTSVTPPASSMMPTAPPLHPTSTAAQHPSYGTPLLQPFPAPSPPPSLTPAHNDGLVISRDKVKDTLQRLVQNDEFIDLIYRELQSVHM

SEQ ID NO: 48795 - protein, 131 aa, Zea mays
  Clone ID: LIB3594-056-B5_FLI.pep
RSVPAPLSLSLSGADLVVVAAEVLLDQLKLPGGHGRGHGHGAAVVTPRGRPRLLLGAGAGAFWPAGLGARVGRRVDVEGGQVLWEHEHALRRAALVTARALRRHRGLRCGRGTHVRCETEVGRLTAACVCV

SEQ ID NO: 48796 - protein, 166 aa, Zea mays
  Clone ID: LIB3594-057-G2_FLI.pep
DHQHLSLYITTSIGCQMAGMTVGNKLALAAVLLCAAAAMATAQQASGVRATYNFYNPQQNNWDLNAVSAYCATWDASKPLSWRMKYGWTAFCGPAGPTGQAACGQCLLVTNTATGASITVRIVDQCSNGGLDLDYDTAFKPIDTNGQGFQAGHLTVNYQFVNCGDN

SEQ ID NO: 48797 - protein, 313 aa, Zea mays
  Clone ID: LIB3689-208-A3_FLI.pep
LPSSSARHPCPSSVHLAMPTTMAAAAAASAPSSLCVDGKRVLLSQPNLLRIHAPVKICGDIHGQFVDLLRLFDLGGYPPASTYVFLGDYVDRGKQSLETICLLLAYKIRYPEKIFLLRGNHEDAKINRVYGFYDECKRRFNVRLWKIFSDCFNCLPIAALIDDKILCMHGGLSPEWTSLDQIKDIERPAEIPDYGLLCDLLWSDPSPDGEGWGESDRGVSCTFGADKLVEFLEKNDLDLICRAHQVVEDGYEFFAQRRLVTIFSAPNYCGEFDNAGALLSIDESLMCSFQILKPTDMGPPHARKQIPNKPARG

SEQ ID NO: 48798 - protein, 331 aa, Zea mays
  Clone ID: LIB3898-006-D12_FLI.pep
FLTSRGSSRPTPAPQSTARTKPQRRKDPMVMAPAAAQQQRRRDAEAELNLPPGFRFHPTDEELVAHYLCARAAGRRPPVSIIAEVDLYRFDPWDLPERALFGRREWYFFTPRDRKYPNGSRPNRAAGSGYWKATGADKPVEHGGRTVGVKKALVFYHGKPPRGVKTEWIMHEYRLADAGARARARKPGTGTLRLDDWVLCRLYNKKNEWEKTQQQQEKKQNQKQMESEASLSHSHSDTRTPESEIDDDPFPELASLPALDDMMGPAAAAPAGAILPKEEVEDLGGLGGDDWLAGINLDDLQIPGEADFYGSMLVSPMAAKMEQDAAGFPFF

SEQ ID NO: 48799 - protein, 195 aa, Zea mays
  Clone ID: LIB3900-004-E1_FLI.pep
YYNNKMGARSSLKQTTWNNSKTQRPGEWGRVHRSNGAGQPEPRHKAHTKSPLSSTSMSSTSMSSSSMLPRPGSCPACFSPSPGFRASSMMDMISSRLCEGTFMSTSCRFIWYSSVISMGRFFKNHGWFLISGMVIRCSGFATKIRDSRCLHSIETRTKSGTAYWTLIIRVSVLRKFIWYSSVISMGRFFKNHGWF

SEQ ID NO: 48800 - protein, 302 aa, Zea mays
  Clone ID: LIB3900-004-F11_FLI.pep
DDTETEEGMGSESEESDEDPAESGDDSQEADKEHTISKSETTSVDDLPYSVKKGKKSKDDRGTAKLEEKNQNEGRLDDQKQGQIKKRRKKLKHTIHVESSDLDFEIHYAFHDEPHILLAQIAKKIARTILVKACNNIDHCKIVKPMHNHTRLETAGVNFEVVWNLSEYISVNDITSNDIHAMLKTYGVEAARGTIIKEVSGVFEPYGINVDMRHLSLIADFMTLDGGYRPMNRLGIGQFSTSPFGKMTFETATKFIVDAATHGEADFLECPSASVCLGKPPKVGTGIFGLLQNLELEQPKNI

SEQ ID NO: 48801 - protein, 72 aa, Zea mays
  Clone ID: LIB3957-008-G5_FLI.pep
DVTSLHELTHRRNVTQLCRHHHPQSPSAYLDLCLIFRRFLFSLLMRFFFHLALIVASLRALLGASPAAASAA

SEQ ID NO: 48802 - protein, 109 aa, Zea mays
  Clone ID: LIB3957-014-C12_FLI.pep
HRLLQMSRCCQARTLSLNLNEPMGERQAFPHTKNNNNQNQSCFPGMIESLPLGLWTALYGTEKNCFRLAQNTPSPPTPGFNPPLAKRVFLTGSNQQKKTVALFVSLVYA

SEQ ID NO: 48803 - protein, 228 aa, Zea mays
  Clone ID: LIB3957-016-A10_FLI.pep
CRSAAPSLPLPVAAAAMDEVVSQILEKQVLSAAKAVEDKLDEEIAALDRLDPDDIEALRERRIQQMRRAAERRAKWRALGHGEYTEVPEKEFFSIAKASERLVCHFYRDNWPCKVVDKHLSALAKQHVETRFVKVHAEKAPFLTEKLRIVVLPTLAIVKNAKVEDYVVGFDELGGKDDFSTEDLEERLARSQVVFLDGEGSAQASKQAAAATKRSVRQSGTGDSSDSE

SEQ ID NO: 48804 - protein, 127 aa, Zea mays
  Clone ID: LIB3957-017-A10_FLI.pep
INSIGTELTRDDRRKLYSNFGLLYPYGHEELAVCEDVDQVRGAMEKYPPYQSIFSRISYGESQMLDKAFYEEEVKRLCLSFEQQFHYAVFFAYIRLREQEIRNLMWISECVAQNQKSRVHDSVVFIF

SEQ ID NO: 48805 - protein, 154 aa, Zea mays
  Clone ID: LIB3957-018-D1_FLI.pep
VTNNYFRLEAKGSEARIDRVEKMVQFGKWLRRQIERSLPEWQDQFLRYKELKRCVKARSGGCPPLPAEEAEFVAEIDAETEKINAFFLDQEEEFIIRHRELQNHIERALGRGRPAPAPALHEAEVAAIRREIVNFHGVMVLLLNYSSINYIGRT

SEQ ID NO: 48806 - protein, 190 aa, Zea mays
  Clone ID: LIB3957-021-B11_FLI.pep
IVSIEMVGGGGHSSMDHPGAKDLERGELRRGAPEFADGDDGDGEESQYFSDAEDRSWPSHSRHDSTAYEDYVSLCVSARASSVDADADADGEAVRQHCRKSSCVSEGSLDDVDLEAGLSEIIKASPEKAEQNCRICHLGLESTAAESGAGITLDCSCKGDLSYAHKQCADTWFKIRGNKCQSVSKFYQTR

SEQ ID NO: 48807 - protein, 279 aa, Zea mays
  Clone ID: LIB3960-020-H4_FLI.pep
LALRQERARALLLLPVPGPIQLHGHGHGGPSAASTGVRCLWVATPTLLDATGAHARASAAAAAGMCAWLGLGGTSKGQPTPSPGVLCWPDQMQLRPVPTASDTVLLQWFPSANRTTCADSTCVRPGGECGSGSRLEREPCAYNNEGVAAEEAVDEPGGAAQEHGQGEQERHELHALRLDHQPHDGERRGVHADGEDGGGEAAEDLAGVAVEGQQRDEHHGGEDGGDDAQEAQHAEPGPPVHREDEEDHHVDGLDHRPRPVDRRHQDVVRGHERQAVPSR

SEQ ID NO: 48808 - protein, 212 aa, Zea mays
  Clone ID: LIB3637-205-G11_FLI.pep
HTKVTTIRNDMQTSDGKQAAEIRRTRRHYFRGPFRRPTPTNRAYRMASGGAFPVQLLHLPGGVGGGGGHWSNLGAAYAAVTFLRPQGKSLVLYAAGPDADGQCQQQHPQGRIVFAYPILPGDAFERLDGATLSWAEPESGAEFALCFVDEAACAAVCGAISASASSRVSPAAGVEGVAERLARLRVAREEAAPALGGADIAARLAQLSIGRP

SEQ ID NO: 48809 - protein, 123 aa, Zea mays
  Clone ID: LIB3637-212-A9_FLI.pep
GGESGSSTRILQLAANPNGTPSGGPSVTTSVGEGSDGGTSSPSTSTSNSSSRCSYFYFVVRVEKLFLSVIYTHHLPVCVDVVWSRFIRSNTHTGPKLLFLIPGTLDNPPGHRRACSVIPISCG

SEQ ID NO: 48810 - protein, 385 aa, Zea mays
  Clone ID: LIB3637-214-C3_FLI.pep
HHHMPQPRWVVIPYPPPHHPMVAAPPPPSLQFVKHFTPPSSVTPPPPTGSGGNGGEDNRTIWVGDLQYWMDENYLHSCFGSSGEVVNIKVIRNRHSGVSEGYGFIEFYTHVSAEKALQNFSGHVMPNTDRAFKLNWASYSMGEKRSEISSDHSIFVGDLAVDVTDAMLLELFSNKYRSVKGAKVIIDANTGRSRGYGFVRFGDDNDKIHAMTEMNGVYCSTRPIRVGPATPRRSQGDSGTSPPRQSHVDSTNRTVYVGGLDPNVSEDELRKAFAKYGDLASVKIPFGKQCGFVQFVNRVDAEEALHGLNGSTIGKQAVRLSWGRSPASKQSRGDSGHRRNGNCNGMYYGTPFYGGYGYASPIPHPNMYAAAYEAYPYYGNQQLVS

SEQ ID NO: 48811 - protein, 162 aa, Zea mays
  Clone ID: LIB3637-214-C4_FLI.pep
PTSSSVFQSLPFWLCKHQKLHITATRNQYQIQLPETATRNHCRFTLHISSSLQVHSYQKLHFTATRYTLQVHYTFLVHCKQETINTHTHYWFRNTHSYTFFFFGVNFFPTALFLCLGGVNCPTSTASAPSNSCCPTTTSSNSCCPATTSSNSCCKTSPACLN

SEQ ID NO: 48812 - protein, 268 aa, Zea mays
  Clone ID: LIB3632-035-A1_FLI.pep
EEEESRRRTTMVGGRPLFVLFGSSIVQYSFSNGGWGAVLADIYARKADILLRGYTGWNTRRAVQVMDKVFPKDSAVQPSLVIVYFGGNDSIAAHSSGLGPHVPLDEYIANMRKIAEHLKSLSEKTRVIFLSCPPLNEEMLRKSTSSSIAILSEIVRTNETCRLYSDACVALCKEMELKVVDLWHAMQKREDWMTACFTDGLHLSEEGSNVVVEEILKVLKEAEWEPCLHWKAMPTEFAEDSPFDLVSSSGDATVNPSEWTVHRRIPWD

SEQ ID NO: 48813 - protein, 108 aa, Zea mays
  Clone ID: LIB3595-020-B9_FLI.pep
TRPRRRPPHRPNRENGSSSDERALFACIWQGEDDAPRRPRWAQSRGRHPVEGQGGLGVHPGRGDGGVGPVRGGGVPPRHGGVLRRHGRHARLLRLDQRFCVLQHVSEQ

SEQ ID NO: 48814 - protein, 150 aa, Zea mays
  Clone ID: LIB3595-025-A11_FLI.pep
LAQRAAALTGQLVVMATEPPPAAEKKKAPLPKVVTLNKALKLAQTWVDKMSASEPDEPNDKDFEGRPPKLGLGAKAAPGVKRVVPTDPVERRLLGKVNAQKRKALEDDDRNAQVANEASDDDEPESRTSAFNKKRPVPSVTSTPLGKKAK

SEQ ID NO: 48815 - protein, 156 aa, Zea mays
  Clone ID: LIB3595-030-E10_FLI.pep
NMQEKIRSMPKDFRPATPKGPDPKWRYMWRVGPRPTNTRFKELNSEPVIPEGLPEWEEMMDSWGSKMISAIEVVAEMAAIGFGLSKDAFTSLMKEGPHLLAPTGSDLQRHGSEGTVFAGYHTIHHTTYRHNYGHYTVWMDWMFGTLREPDDILKKA

SEQ ID NO: 48816 - protein, 83 aa, Zea mays
  Clone ID: LIB3912-028-F5_FLI.pep
FGNQKAGLRMLRRETLVLTRALNTFSPLLSTSAMHRPRLSSRSNAAFRSRSSGSAAASIWAPRQTWRRAASWPIDASHATSTA

SEQ ID NO: 48817 - protein, 144 aa, Zea mays
  Clone ID: LIB3912-029-D4_FLI.pep
TRTLTGSAWWPRRRCGATGSAWWPRLRCGATESAWWLRRRCGVKIGVTSGVQRLGRVAWIQLLGTARGQLSEQKRDIHPCISFVYFQVHFRSGGGRQALGLYISRSGKSGKAAALYWTVNACGCTCKFSEKFCENERTYLSSTC

SEQ ID NO: 48818 - protein, 85 aa, Zea mays
  Clone ID: LIB4073-007-F5_FLI.pep
EQPHHMRHFDFHFQMHNTILYIAESDARGFIYRAVVVSPEQLNLNRGAGTPPRSPQSQLLAQGAPPPVPCVHHPEDDGQHDAGGD

SEQ ID NO: 48819 - protein, 171 aa, Zea mays
  Clone ID: LIB4073-008-E12_FLI.pep
DRLKMYDSRNANKVLHQPMGSFPSNVADEYEEEGYSTLMESLTHPEVTHKVKTLVRVVAFYPFEAYELHLLLRSNYDYSIRLTLEDPTARIDAYVHKQNLVQFFGDSLTEVVVMKKLNKLLGIPESEDGDEVVPMSWNSPWIWCVMSSYYCEKTDPWGSRRYRIVDTTIRD

SEQ ID NO: 48820 - protein, 85 aa, Zea mays
  Clone ID: LIB3601-012-C2_FLI.pep
PVQMTAIYLDAHRRIEIQTKSHAISPDREVHLEFNPTRHDGFHERDTHTSFSSRLRVLARKVVELVSARRGRWRRHFWTVQTQRL

SEQ ID NO: 48821 - protein, 106 aa, Zea mays; identical to SEQ ID NO: 38992
  Clone ID: LIB3634-002-A2_FLI.pep

SEQ ID NO: 48822 - protein, 225 aa, Zea mays
  Clone ID: LIB3634-002-B7_FLI.pep
TPTHKRRSILDSKRIEATKQRSLSSRYSKPKHSRPYGMIIHVRRKGGGSGELVGVRDEVCLHHPDEADVPLREPGLVLGRERRAVEALVVDLDLGDAGALAGGLHPDLGEVRPELRAHRAALQHLRPHHARRGVQRHHAALERLVLTQRWVKLHGGNAAGPAVAVDLDGVHVAGAGLGQERRLGLGEGHLPHALRRDGHGDLLADAAGHHRRARLLLRTVRLLCL

SEQ ID NO: 48823 - protein, 153 aa, Zea mays
  Clone ID: LIB3606-025-C11_FLI.pep
GDDADKLLEDLLKQHGEVVYSSGGPPDPTVEADDDAECLSFAVSLAKAASEIKATDIRVLCVRRLVYWTRFFIILTAFSNAQIDAISSKMRDIGEKQFSKVASGDTKPNSWTLLDFGDVVVHIFLPQQRAFYNLEEFYGNATPIELPFDTQRQ

SEQ ID NO: 48824 - protein, 371 aa, Zea mays
  Clone ID: LIB3689-001-B2_FLI.pep
LDLWWHGERDRNLVGWCLRVRGVRYMARTYSAAAKEITVREALNTALDEEMSADPSVFLMGEEVGEYQGAYKISKGLLDKYGPDRVLDTPITEAGFTGIGVGAAYHGLRPIVEFMTFNFSMQAIDHIINSAAKSNYMSAGQISVPIVFRGPNGAAAGVGAQHSQCYAAWYAHVPGLKVLAPYSAEDARGLLKAAIRDPDPVVFLENELLYGESFPVSAEVLDSSFCLPIGKAKIERQGKDVTITAFSKMVGYALQAADILAKEGISAEVINLRSIRPLDRATINASVRKTNRLVTVEEGFPQHGIGAEICMSVVEDSFEYLDAPVERIAGADVPMPYAANLERMAVPQVDDIVRAAKRACYRAAVPMAATA

SEQ ID NO: 48825 - protein, 219 aa, Zea mays
  Clone ID: LIB3689-002-E10_FLI.pep
VLDSCQQLTVCGNYLRRIREVELKRDWKNKCYRCGESGHIERNCQNSPRNLRRDKSYSRSPSPRGGRGRSRSYSRSRSYSRSRSPSGSPRGGRRERDERRSRSLSYSRSASPRRSVSPAKEKERSRTPNGSRSPRSPSPRAEVSPPLKDNGARNGSDHEGNPGGGENSKRSRSPSDGYRSPVANGRSPSPRDDRSPSPKGNNEDDERRGSPRGSQSPLN

SEQ ID NO: 48826 - protein, 94 aa, Zea mays
  Clone ID: LIB3606-031-G10_FLI.pep
RARRRRIIIIRRPAPPRWTWPPRTGSSTASPAPPRSPGTGRGSRSSSRTSPTAPASSASSPPRTRSAARTTPTSLLPSLISLASRRRRGDHLRR

SEQ ID NO: 48827 - protein, 109 aa, Zea mays
  Clone ID: LIB3608-014-A6_FLI.pep
KSKHGHILTCLSDDVKKRNGKLEFKVHITFLLAADKTIIFTETRWKHHSIFRFRCVTLVIASLVHPYGAPETLPLQQEVKSLVDVLEANFMGYELVKLQLLVHVLVGEN

SEQ ID NO: 48828 - protein, 105 aa, Zea mays
  Clone ID: LIB3608-015-F11_FLI.pep
RPWRTPAEAAVAMATTTSRSWTSCRGRCTPPRRTWPTSLNSTLNLAIAVGEEGEEAVAVAVTVTVTAATEESIGRVDATSAATVSESLQESSNTFHAETTATEAA

SEQ ID NO: 48829 - protein, 427 aa, Zea mays
  Clone ID: LIB3608-017-A6_FLI.pep
SALAVAVHPNQSMAPARLLPRLPLFWAALLLLPFAHPAAAAQVGDACSSSSGGGCGSGLHCSPCGAGGGSICTRASPVDPATHGTGLPFNNYSWLTTHNSYALAGAASATGSALITETNQEDAVTAQLKNGVRGLMLDTYDFDNDVWLCHSFQGKCYNFTAFQPAINVFKEIQTFLDANPSQVVTIFLEDYTAVGSLPRVFNASGLTKYWFPVAKMPKSGGDWPLLKDMISQNQRLLVFTSKRAKEASEGIAYEWNYVVENQYGDEGMVAGKCPNRAESPAMDSKGQSLVLMNFFTTNPSQTGACGNNSAPLDSMLKTCHDASGNRWPNYIAVDFYMRSDGGGAPLATDIANGHMVCGCDNIAYCKANSTFGTCVIPPPPPPSPPKASTPGSRGSTAGGDASAGTMALSSQWSFLLGLASLLLLSRS

SEQ ID NO: 48830 - protein, 132 aa, Zea mays
  Clone ID: LIB3608-020-H5_FLI.pep
RTIQSQRSPRKGLVLLKNFFLRKTASDSLSLPDKDNYPEPDLEEVFEDGCPSLSRRLNSEYPVRDMFKLFACAICQIDLESGQGISIHEGLSRPGKLRPWDGPFLCHSCQEKKEAMEGKRHSRALSHGLPLN

SEQ ID NO: 48831 - protein, 236 aa, Zea mays
  Clone ID: LIB3594-037-G2_FLI.pep
SPTHTTTPRLCLHPSSLGSIADQFCGRRRVLAHDDDMGSAVKIGTWGGDGGSPCDITVAPRRLESITIRWGKVLDWIAFSYRDQSGKLHTAGPWGGNGKGEGTETITLEASEYVTGVAWSVGPFKFKNVERCITSIKVVTNLRSYGPFGHGVDSTHHSLPVIDGSVVGMFARAGDFLDAIGFYVLPDALPALKPTTDPAEQEEKEKDSGHEQNGKAKSNQEENEDSKNEKDKPCLS

SEQ ID NO: 48832 - protein, 156 aa, Zea mays
  Clone ID: LIB3594-039-G10_FLI.pep
SASLRLGLRRAFPAISGDRRHSQWSPWTASSRLSRSPTPTAPPSRAPQLTRRTPTCRRSAASPTTSRRRSAPQTTSPSSPTRASWFPARPTSACTAACSARAAPSCATPLRAAPPAPARRRRTRTVTCARWSSGISSETRSRSGTTRCGWCSTTST

SEQ ID NO: 48833 - protein, 118 aa, Zea mays
  Clone ID: LIB3594-049-F4_FLI.pep
KFRFLFTRSKMRGENNIVLLLLLLFAVISPNQVIGSACTPEQKAAILNQCEEYIKPGYPLILPSYASVCCDKVRDVPNRDMNCIVDLLTPPEKAKHGVDKIKRLKDLCDNSPHHQVVV

SEQ ID NO: 48834 - protein, 36 aa, Zea mays
  Clone ID: LIB3802-001-A6_FLI.pep
YKWLLLVLHRSDLSEGAGAMADQQQPQQQPQEMDVD

SEQ ID NO: 48835 - protein, 160 aa, Zea mays
  Clone ID: LIB3600-043-F1_FLI.pep
LHAFAGAIKDSLLEDYDTAQLLLAIVNSGKEYRKWEKLNKAGDSFSCGNTITPRGHNSKEQYASDHTQDSVVKAVRQVLFETISSFNGDLGQVDELRRLIGHQLVNLQQVFKVLTEPSENICKPIATKLVNLYRTGRLGRYTLEHVPDVRQEVVAELPTA

SEQ ID NO: 48836 - protein, 96 aa, Zea mays
  Clone ID: LIB3600-048-H8_FLI.pep
TWMGWTSRISVAWVVWAAWVAWVIWLVWVVLVAWVVWVVLVAWAVWEWMISKMRVMMKKKCRNLKLRTRLLRLRRRSQRKPRLRRLRAVEDAYDLS

SEQ ID NO: 48837 - protein, 129 aa, Zea mays
  Clone ID: LIB3600-059-E8_FLI.pep
DTLTCSTISPTMAHSRGHHTHIAPSTQRQRERDARVVVGTSAASGSGEALQGHHLHLGEAFRAVGQARGLAPAQAAPHAPRHALVPADKRQLRHQLVRHGPFFLLLNERHETRIAEGRRIHGSMSMSIR

SEQ ID NO: 48838 - protein, 127 aa, Zea mays
  Clone ID: LIB3969-012-G2_FLI.pep
TQMSHASERKKRSHGEVEEDESHRGIMPGCAQTDRSLDHAQERRSGCCCRGRSRAGSGGGAGRVSTAGAGVRPDGIRMLLVMVRLLALELDLVLHFVAVDIFVVVVVVIVLLVVVHVVAVRAVDSVI

SEQ ID NO: 48839 - protein, 283 aa, Zea mays
  Clone ID: LIB3957-003-H6_FLI.pep
SAVVRSLPLSLEAFAGEERPVAHQDEVCCCLSACCPRWEQIRELSRSCSRGGRGSRGEGGDSGSSSSSKWEIKPSSLTDKKPTHSNSHGRHYEITGDECPHLRLLDMDVGLANIARGSMMAPSYNTRANKIAIVLKGQGYFEMACPHVSGGRSSPRRERGHGREEEEEREEEQGGGGGQKARSYRQVKSRIREGSVIVIPAGHPTALVAGEDKNLAVLCFEVNASFDDKVFLAGTNSALQKMDRPAKLLAFGADEEQQVDRVIGAQKDAVFLRGPQSHRVSSV

SEQ ID NO: 48840 - protein, 132 aa, Zea mays
  Clone ID: LIB3960-003-A11_FLI.pep
RHAMAKYNVVQKNKRQCNQDRKRAAHGEPGTGKLKQRTAPVSMSGKRKKKLERRLNRKQKEAAMIKALENNMGDVDMISVEGSSEAAKGKSQVKFSVKKNSRIQIKRLKGKGRKKAKNAKPPAKERVDAMVE

SEQ ID NO: 48841 - protein, 109 aa, Zea mays
  Clone ID: LIB3732-040-C12_FLI.pep
ALNRYDATAYNTILRNARPQGINKNGPPEHKLHGFTYLRVSDELFQEQNYTTFKTFVRRMHANLDYNPNVDPVAPLERSKAEIPIEEILEVAQPKLEPFPFDKDTDLPV

SEQ ID NO: 48842 - protein, 197 aa, Zea mays
  Clone ID: LIB3732-050-G2_FLI.pep
GNRMNVGTARGGAMAFKLDTLLKLADVKGTDGKTTLLHFVVQEMVRSQKPPARAAEGPDIVTGLAAELNNVRKTATVDLDVLTTSVSSLSSGLSRIKALVGTDQLLAGDERGQRFVAFMAPFVSQAEEVIRELEDDERRVLAHVRDITEYYHGDVGKEEASPLRIFVIVRDFLAMLDRVSKEVRGARGCHGSNQTLP

SEQ ID NO: 48843 - protein, 154 aa, Zea mays
  Clone ID: LIB3597-069-E10_FLI.pep
CKPEIFNHHKNSEEKQYNPHQMGLPTHSNANTETLCLNLEYPWSLQHKRSQIFSLFLLRSGRCGDGKRRGGSRTGRTAACSSCKCAASAQPRLHRWPPWPGNGSAWPTEGRRERGEVGPPGAAHEQVAWPCLEASELDTAGSGGGSAARIRLVL

SEQ ID NO: 48844 - protein, 130 aa, Zea mays
  Clone ID: LIB3912-014-A5_FLI.pep
PLLPFNMLNYLLSVTPVGVGEYMLASWLGMMPITLALVYVGTTLKDLSDVTHGWSEISTTRWILIISGFVLSVVLIICVTKIAKSSLEKALAENGELHVGTSQLPGVASPLDLQQPLVIKIDTSNEDHEK

SEQ ID NO: 48845 - protein, 168 aa, Zea mays
  Clone ID: LIB3912-015-G6_FLI.pep
EKYEPHYDYFHDKNNQALGGHRIATVLMYLSNVEKGGETIFPNAEGKLLQPKDDTWSDCARNGYAVKPVKGDALLFFSLHPDSTTDSDSLHGSCPAIEGQKWSATKWIHVRSFDLTVKQPGPSDGCEDDNVLCPQWAAVGECAKNPNYMVGTKEAPGFCRKSCKVCAE

SEQ ID NO: 48846 - protein, 176 aa, Zea mays
  Clone ID: LIB4073-003-E12_FLI.pep
IQHAINPPVCYHTTLFYFSWLASFITCTGMYLRGRFHHLADLVAVGGHADGERHGDAALAGDGGDGAHVDALDAVGEALEAPARRLPVRAAARLPVQAAHAAAARRRQRARPPRRVRDARRQRRPHLTAGDRRRRRRRRRQQQRHHHGHCCHHRRRLPAHHSHRRRQFETCVSVCG

SEQ ID NO: 48847 - protein, 145 aa, Zea mays
  Clone ID: LIB4073-004-A11_FLI.pep
PEIIKGEGHGSAVDWWTFGIFLYELLFGKTPFKGSGNRATLFNVVGQPLRFPESPIVSFSARDLIRGLLVKDPQHRLGYKRGTTEIKQHPFFEGVNWALIRCASPPDVPKPVELDRPPKPAPANDKVAPAANQKGPDNFLEFEFF

SEQ ID NO: 48848 - protein, 67 aa, Zea mays
  Clone ID: LIB4073-005-C2_FLI.pep
CTAYYSAKVAGILFLSDTSRSHLVSILQVASILGNGLPLCHCLFGCNTSILERGSTTRIFPFYLFFS

SEQ ID NO: 48849 - protein, 160 aa, Zea mays
  Clone ID: LIB4073-005-F4_FLI.pep
LALACMQYVLAVEEQHPWRRAMQLASSRQRWLWMTMLAKTEVVGAIGHAVQVGLTGHHAEGVHVRGAAAQRRRGAVPTAGASVVHEPERRVLAHAQLLLQVLVRLVRVLHLFLVSFSLCGDHMVLPMANLLESRINILLKTAQLVELQSVQILAHPLPNL

SEQ ID NO: 48850 - protein, 68 aa, Zea mays
  Clone ID: LIB4073-006-D9_FLI.pep
KKGGGGAYLQGFFFEQLFTRILGSYRTGFSKQGPLAEVDRDPTAVLAEAPSWGPRQGEPAAASSAPAS

SEQ ID NO: 48851 - protein, 174 aa, Zea mays
  Clone ID: LIB3601-002-G5_FLI.pep
NHWTQLNDKVSNRRGESPHVWRRSRFRSLRSLCLFILRLRFFFTLSAHTSAAPGPASSLAPPIGSRHGCAWRPGWKEKSASRRIPDGVWAGVEVGSARAGAGAGARVGPCCRCGARRDRSVLKGSGGGSRRRRNSRRSGAAAEPAAAMGDVGGAEGFLGNGSWLGWADACYIIA

SEQ ID NO: 48852 - protein, 168 aa, Zea mays
  Clone ID: LIB3595-011-A7_FLI.pep
LRVIHEDIPSPVKKQSRATFSKTELLQGKASRFFFFSFPQSCMKQRPVVGANLNFLNWAATDRYASSPGQQPRASHCKNTKRTENTASSGSRGTAQASDVKNPGSCGNTATDDGGGGDQGNGPVETPAGRVGQKGNADGGNVVPSSSATQAAGHSSSTAVVAAAAASR

SEQ ID NO: 48853 - protein, 201 aa, Zea mays
  Clone ID: LIB3607-032-A5_FLI.pep
RVSSGLQGYWSWEHNGVPLEQFPVMDVIEDLDLGLDNLLSLEQVIVKVNCLGATAAQVQELEAVAMGAVENHANRPTIKMDRAYEENILSDEKLEALLQQHIELELEGGVLQLKDKPDAFFISQLRLYRHLQKAVISYDCAGASMCEVLKVEAACRHAAEVHPNHPSIELIRTNTDEMASSSDHPNTEVCPSCLNVQPSRR

SEQ ID NO: 48854 - protein, 107 aa, Zea mays
  Clone ID: LIB3607-033-B9_FLI.pep
NHVSSSHAPWPACYPHRAIGTQKLQVLRQYRRGTTLETYGSTVVTCCHSPSTASFHRVTLLLPSDTASIFPVSDHDSLHTGVLKSYSNRPSHCSPSFAAVQITTVPS

SEQ ID NO: 48855 - protein, 499 aa, Zea mays
  Clone ID: LIB3606-054-E2_FLI.pep
VQGLNLAVMARPHVVVVPYPGSGNINPALQIARLLHRHGVYVTFVNTEHNHRRVQATEGAGAVRGGEGFRFEAIPDGLSEAERGKQDYGRSLAVSTSTRCAAPLRDLIARLNGTPGVPPVTCVLPTMLMSFALGVARELGIPTMSFWTASAASLMTHMRLRELQERGYVPLKDESFLTNGYLETTVIDWIPGVPPIRLGDFSSFLRTTDPDDFGLRFNESEANSCAKAGALILNTFDGLEADVLAALRAEYPRVYTVGPLGLLLRQDDDRDSSASASGSTESTGLSLWKQDAECLAWLDAQERGSVVYVNFGSHTVVTPEQLNEFAWGLAASGHRFLWSMRDNLVRGGGGGGGAGLDAMPSTFKAETAGRCHVTAWCPQEQVLRHPAVGCFLTHSGWNSTCESLAAGVPMVCWPGFSDQYTNCKYSCEVWGVGVRLEATVEREQVAMHVRNVMASEEMRKSAAKWKEEAEAAGGPGGSSRENLLSMVRALSSAPNSPDA

SEQ ID NO: 48856 - protein, 132 aa, Zea mays
  Clone ID: LIB3606-055-G3_FLI.pep
LARCSTEVASRGTDGGNTLSQRVAERQCRSDLANRIGETDMISMQENMSARTLTLSSSAQRTIVRFVKLPLVDKIPPHTAWISLEKLLVFLCSYVLQLANHGHYFVIFMVILRRLDFMRHGLCKYTCVYLLD

SEQ ID NO: 48857 - protein, 150 aa, Zea mays
  Clone ID: LIB3607-057-C12_FLI.pep
VAVLGSSDGVKGTIFFTQVGDGPTTVTGSVSGLKPGLHGFHVHALGDTTNGCMSTGPHYNPASKEHGAPEDENRHAGDLGNVTAGADGNGVANINVTDSQIPLTGPNSIIGRAVVVHADPDDLGKGGHELSKSTGNAGGRVACGIIGLQG

SEQ ID NO: 48858 - protein, 167 aa, Zea mays
  Clone ID: LIB3600-024-F3_FLI.pep
TQVQLVLVTKVDPQAQIEDLGAVKLHLHMELEGMVAVLAIVLGTTLLVVAMLPLVKPLADLRAMEARVLGMVDMEVIHRMVVMGDMELMEREVMVLAILLLVEHLDMVQGMEVGVPTLAIQVLGVILHKVVDLVVQSMEVLKGNQTMALAMAVCSPGLLSKEGILSV

SEQ ID NO: 48859 - protein, 174 aa, Zea mays
  Clone ID: LIB3600-029-H12_FLI.pep
TRQLFLLTDHGKFKEAACGDSRRLCHGTSAACIDQRWSKMMPPCAAKKGAKTSDSTAISLMRMLRDGPEVSLSGSPMVSPITAALCASDPLGPSDLASSDKPASMYFLALSHAPPLLEAEMATWTPETSAPARSPASVSTPKSVPATSGLNMTSAPGAIIFLSEASVEILTQVA

SEQ ID NO: 48860 - protein, 115 aa, Zea mays
  Clone ID: LIB3600-034-F11_FLI.pep
SASSVDSTAAGSGPRASTATRAALGSAGPGPTIGATASALSSSSTTCYTRDEIVPPVPATLTYAVTTATARPTAKATPSRPGAASPAATSTSRRRMATKPNYPRCIGEADAQEDG

SEQ ID NO: 48861 - protein, 57 aa, Zea mays
  Clone ID: LIB3596-016-E5_FLI.pep
CPLNFPVLGKYICRSKKFTLPFINIHNSSLRKTKTNTHTLVSIYIMNLLLIHFEETC

SEQ ID NO: 48862 - protein, 167 aa, Zea mays
  Clone ID: LIB3596-036-F6_FLI.pep
ALESCPQDDDDPPRRLHRPICRRPPAHLLLLPAANSRRSQKQRGGAVRAGAQGGVPVHDTGGGECGDDGRGSGSGGIVRAVRGVRGVPVLRAVVVVVQRQQQLRGHELLLRHRLRPPRQALRHLRLHPANLRLRQQLHPALVLMMTHLSCNLATSSGSSIVLRYVTT

SEQ ID NO: 48863 - protein, 151 aa, Zea mays
  Clone ID: LIB3689-213-E6_FLI.pep
VRGAARGQAPGPRAGQHARHEHRVAGTHVRRARRGGGLRHRRRARVLLRPVAGRDEEPRQRARAALHGGRELFQLACAQHCRGDHGEQRGTRVAPGRPEQGSYGLFLLDDGRSRNAQPAALLALLQQTIQRQQHHHFLTCAVMLCAPCFSK

SEQ ID NO: 48864 - protein, 198 aa, Zea mays
  Clone ID: LIB3689-213-H9_FLI.pep
EMPWRWAAAAATAATRKLTGISQSRVSVAFTGRLLYRSFGSDSSESRKRSLPRGVVSIGAISLAGGLVLSAVNDLAIFNGCTTKAIEHAADNPAVVEAIGVPIVRGPWYDASLEVGHRRRSVSCTFPVSGPHGSGFLQIKATRDGEDGLLSFLRHHDWKILLLEAHLEAPSDDEDQRKLVKVNLASSGRGEDGDPESG

SEQ ID NO: 48865 - protein, 157 aa, Zea mays
  Clone ID: LIB3689-222-B4_FLI.pep
AFYYELSVKYTCIYIILVAADPPYALDRQVSPGLAAEGPERHRLRAHRLDGAVQRPGHQRQQPHGALLLQHRPGAGPLPHAPARHLPVLAVASDVAPGPVHRAHLRPDRIQGQDRGLLREVKRLRSYPSSLVLRCVALRACSPLSNLCCIGFRFRRM

SEQ ID NO: 48866 - protein, 63 aa, Zea mays
  Clone ID: LIB3957-026-G5_FLI.pep
LTLKGIEKHDGTSISYDVTRYQTVQHENIEHKPKADCFNQIISTGRLGAKNTRNLTNLSAPKP

SEQ ID NO: 48867 - protein, 82 aa, Zea mays
  Clone ID: LIB3960-023-G7_FLI.pep
STGISGWHSQIQQRVNKFDCTLLNLHRCTWAMRCSPRTTNLQDNCKVQDLEIMVSMLDIRIQVISFRRKGGRTVFLNPHTGS

SEQ ID NO: 48868 - protein, 300 aa, Zea mays
  Clone ID: LIB3732-005-A7_FLI.pep
QLATSVLLMTLAMSTLACHRPLPSKGWKWKLRTSVATWKHMRPGRRNEAVACAAKNTKRKRRSSPNESKDLLLVSEEAASGSGGSAPGTSLETNGEDAATDDEISGAPRSAVLQACTLTSGLLLAGGLLLREASHLASINGWPIADPTDVSFSFETWHLELVAGLVIVISSTRYILLQTWPDFRDSSESANRQILASLEPLDYIVVACLPGISEELLFRGAMMPTLGLNWISALIIGTVFGVLHLGNGRKYSFAIWATFVGFAYGMGTIASSSIVVPIASHSINNIIGGLLWRLTKNSQK

SEQ ID NO: 48869 - protein, 454 aa, Zea mays
  Clone ID: LIB3732-008-H10_FLI.pep
QERWFMSVRKAKQHKDISYPDVQMPMFTLFYVPSTRLNRTCLESSRLDCCCFLNPSFRREDALPNNLWRVVDHGTGSGEVARPAAPPLPLVVAVERVRGVGDHGVGLEARSAGLYGAAVRAVGTRVVQRCQQPRVAGRRIRHAPAHVRVTGASWFVIHDVGGAVEVARRLGPAVALVVAVERIRGVREPGVGLEARRAGLDGAAVGAVAARVLQRRLQPRVPGGRVRHAPAGHQRAAPEVELVHLRPVRVEQPEVLLDVVRPVALLVLVEEGEDVDVHVGVGVVRGARVTGQHALDQVVVVRLRVGYRSRFTSSLLQLQTPPAAAWAWPRPAAAFGFAAGRPPALRNVRCWRHGFWPPRTGSGRPQLLHREVRGVELGVQEAVVHEPGHGVAHAGGVGVPQGVVEGDLVWLLGVREERVGVHGEVRPGPLQEIDHGLHHRPRDVVPEPARGRRP

SEQ ID NO: 48870 - protein, 92 aa, Zea mays
  Clone ID: LIB3732-012-G5_FLI.pep
KRDACACGRRSHTHTHGKRNTHVQCSQFILFRDIKPNKQLCKATVTEYQSNIGHSKQQRCNKGRSFFPWKKQQAWSTKTSIQPSFINLRIET

SEQ ID NO: 48871 - protein, 162 aa, Zea mays
  Clone ID: LIB3637-226-F6_FLI.pep
LGRFALALMKLQLITWDGNMQLAIGITDGHYGLGLPELCSQSFSYVLIPRPQSSFPPSGAAGQTKGIPSLPLTLPSFQWRVQLHCCLSDSVCRFCNSLSFCNNSRCLAAPANEALTFESSSCNCLFFSISLSYFILHSADSSIASRFACSNCLLSKSPISSR

SEQ ID NO: 48872 - protein, 342 aa, Zea mays
  Clone ID: LIB3637-244-E1_FLI.pep
KGRRSTARAEMSFFFRMASRLRPSTPEEVVRSIKDSFLALHTRTHAKALEEVEKNMSSLRLLIFGDGEVEPNEEQVLQITLEICKEDVISLIVQDLPSLGWGVRKDLAICWCILLRQKVDETYCCVQYLENHLELLDFLVGCYKNLDIALNCGNMLRECIKYPTLAKYILESGSFELFFEYVELPNFDIASDALNTFKDLLTKHEVVVAEFLSSHYEQFFELYSRLLSSTNYVTRRQAIKFLSEFLLETHNSQIMKRYIVEVRFLNIMINLLKDSSKNIRICAFHVFKVFVANPNKPRCIVVALLDNRREVLKLLHNLPSSKGDDELDEEKDLIIQEIQKLA

SEQ ID NO: 48873 - protein, 236 aa, Zea mays
  Clone ID: LIB3637-246-B6_FLI.pep
ETERQRALGLFRRAARLGSAAAMVDAGLMCWEDGRREEAVGYYRSAADLGHPIGMCNLGVSYLEVLLNVSAADPPKAEEAIRWFYPSASAGNARAQYNLGLCLQNGKGVKRNQKEAAKWYLRAAEGGNVRAMYNISLCYSYGEGLAQDPVRAKRWLQLAADCGHKKALYECGIKLCAAGDKVKCLMYLELATRRGEAAAAHMRDVILESLSVVNAQRAMSDADKWKPRTLHPRPRR

SEQ ID NO: 48874 - protein, 184 aa, Zea mays
  Clone ID: LIB3595-031-G4_FLI.pep
QNERWNDKYSRVETMMLFWNRSRPSCRKRHREPPPVQCGHRKKSSHLYFQSWIADMVASPRSTSTHTQHTGTLHRRYVHLDTSCMVWSHTMSPLILLCFTGHPFYLPTGMPSSETPQQINLSLPPLPPTAIREYSHMEENMYKDHLSTNLEKYFFFFVFPTNYFPLLLLCSDASNKLPSRTYHG

SEQ ID NO: 48875 - protein, 206 aa, Zea mays
  Clone ID: LIB3595-042-C3_FLI.pep
AVVSEEKKRLVAYHEAGHALVGALMPEYDPVAKISIIPRGQAGGLTFFAPSEERLESGLYSRSYLENQMAVALGGRVAEEVIFGDENVTTGASNDFMQVSRVARQMVERFGFSKKIGQVAVGGAGGNPFLGQSMSSQKDYSMATADVVDAEVRELVEKAYVRAKEIITTQIDILHKLAQLLIEKETVDGEEFMSLFIDGQAELYVS

SEQ ID NO: 48876 - protein, 118 aa, Zea mays
  Clone ID: LIB3595-043-D3_FLI.pep
PIEPLAPAPSGGMEAGGEEFAIGVVLSAKTTLGEEFEGQIVAFDRPSNLLVIQEGVGRAESGERRNVRVLKANYIREFSVLSKGDDPLDPAGCMLDLNSIYAREDAALRIFSGFLGSH

SEQ ID NO: 48877 - protein, 200 aa, Zea mays
  Clone ID: LIB4073-001-A1_FLI.pep
HNISWTERLETCIGIELSNQIMIWLYLQYNQTPCLVHPAGEPGGEGSPSAVGAEPGAPEVEAAGGGVGGADLGHGEAHGDGEGAGDGPAVHHGHRPAELEARPVQRRHARDHRDDGEAHREVGHHREVSLELLLVSEQPELDVVASKTGAGGADHLRRRRRRLVVVPGERAVAVAVLGFHRSLLAGFSCSASRFLIRMAS

SEQ ID NO: 48878 - protein, 323 aa, Zea mays
  Clone ID: LIB3632-041-A7_FLI.pep
RQGLHGFRLVQRHQDGASHPPQAVHHLRPTPIYSPEPAPARPNDYEDYRKDKLRRAKEAELNKELERRRREEQDREREREQREREAREREEKDYQSRASSLNISGEEAWKRRAAMSGSGSAARTPSSPPHGDGFAIGSSSSAGLGVGAGGQMTAAQRMMAKMGWKEGQGLGKQEQGITAPLVAKKTDRRGGVIVDESSSRPPEKKPRSVNFDGQPTRVLLLRNMVGPGEVDDELEDEVASECAKYGTVSRVLIFEITQADFPADEAVRIFIQFERAEEATKAMIDLQGRFFGGRVVQATFFDEERFGRNELAPMPGEVPGFFD

SEQ ID NO: 48879 - protein, 207 aa, Zea mays
  Clone ID: LIB3245-440-G8_FLI.pep
LLYQMFIKESRIVSASSKHVHHADLQQRRRRHAQRDVRAAAVAPQEVVPDVHRQPLEHRRPGLALHVRVPQDERSAGLPGRRQRLQLIRHLLVLRGLRAHHVAVDEEPHLLRPRRRADLRVPGAQAVGGRGAHLHGGRCRMLHAVLEVVAGAAPQRVARDHGQPPLLLPGIQLQLPLTGLAAAVRGVQRYERGQGLHELRLERVHVL

SEQ ID NO: 48880 - protein, 163 aa, Zea mays
  Clone ID: LIB3969-002-B1_FLI.pep
ETARVYVPPGAAAAMAAAATTSSSSHLLLLSRQQAASLRCRLSFLGQPRRPGRVTAQAPAAKDVRCMAAVDTTAASTAAAETSPKSSSYEIVTLTTWLLQQERTGAIDNEMTIVLASISTACKQIAALVQRAPISNLTGVQGAVNVQGEDQKKLDVVSNEVIN

SEQ ID NO: 48881 - protein, 213 aa, Oryza sativa nipponbare
  Clone ID: LIB3474-004-D12_FLI.pep
LEKAKKREAAFIVTFAKREQEIAELKSAVRDLKTQLRPPSMQTRRLLLDPAIHEEFTRLKNLVEEKEKKIKELQDNVAAVNFTPSSKHGKMLMAKCRTLQEENEEIGAMASEGKIHELGMKIAVLKTRNNELRNQFNELYKHMDGLTNDVERSNEMVAILQDELETKDVELRRLKEMLAQKEATDENKIPQENDVAGDDIVAAAESQPIKVET

SEQ ID NO: 48882 - protein, 236 aa, Oryza sativa nipponbare
  Clone ID: LIB3433-056-G10_FLI.pep
DQIAAAGRAMEPAAEKREAEQEELQQQHDEPAVPSADDDEAEAEENERRNRELKAGFHPLRRRFVLWYTRRTPGARSQSYEDNIKKIVDFSTVESFWVCYCHLTRPVSLPSPTDLHLFKEGIRPLWEDPANRSGGKWIIRFKKTVSGRFWEDLVLVLVGDQLDYSDDVCGVVLSVRFNEDILSVWNRNASDHQAVMTLRDSIKRHLKLPHSYLMEYKPHDASLRDNSSYRNTWLRG

SEQ ID NO: 48883 - protein, 212 aa, Oryza sativa nipponbare
  Clone ID: LIB3431-007-B4_FLI.pep
LVLILRLGCIPHFITSIVLHIRSPQSEIVAKKLHDQGAVLVGFFPKGIQFRNSFIEGLLGERARAVGRVEDLVVEHGEVERKAQSDGVRRRQLLHGYVLRGLVGGEGGVGGVLALGSGLELGEVAVVVALHLEVEDLGVDGGGGGDEALVEEAEYPRADVGELGLDAGAVGARGGGVARGAAAFLLLLDGGHDAPRRPARADDVLVRHGQQV

SEQ ID NO: 48884 - protein, 286 aa, Oryza sativa
  Clone ID: LIB4309-032-H9_FLI.pep
GSWDPPEMDPNPRLLILLVLLAFSATVAVAEDGESTGGSKVSLGRRAGGFLHGLKKEAVVEGDHGVALDEVGPGLFDALFASLSMILVSEIGDETFIIAALMAMRHPKSIVLSGALSALYVMTVLSTGLGRIVPNLISRKHTNSAATVLYLFFGLRLLYIAWKSDPKGSQKKEMEEVEEKLESGQGKSTLRRFFGRFCTPIFLEAFILTFLAEWGDRSQIATIALATHKNAIGVAVGASLGHTVCTSLAVIGGSMLASKISQRTVATIGGVLFLGFSVSSYFYPPL

SEQ ID NO: 48885 - protein, 250 aa, Zea mays
  Clone ID: LIB189-007-F11_FLI.pep
SQGAMATETETFAFQAEINQLLSLIINTFYSNKEIFLRELISNSSDALDKIRFESLTDKSKLDAQPELFIHIVPDKASNTLSIIDSGIGMTKSDLVNNLGTIARSGTKEFMEALAAGADVSMIGQFGVGFYSAYLVAERVVVTTKHNDDEQYVWESQAGGSFTVTRDTSGEQLGRGTKITLFLKEDQLEYLEERRLKDLVKKHSEFISYPISLWTEKTTEKEISDDEDEEEKKDAEEGKVEDVDEEKEEK

SEQ ID NO: 48886 - protein, 115 aa, Zea mays
  Clone ID: LIB3912-045-B5_FLI.pep
RRAERFGMPVLMSEEEKRSSRAERFGTGSSSVKEEEKKKSRAERFGLASPSSSDEEAKKKARLERFGQSANVDKAEEEKRKARAARFAEASGGSAARENGKDSSKPDAAAVTGTA

SEQ ID NO: 48887 - protein, 67 aa, Glycine max
  Clone ID: 700659966_FLI.pep
LGLITMAFRNWYTSNMVGLSFGIAVYQFLKAIGINYNFTIEDEIMLPIDTGDADNLEELIVAREGHN

SEQ ID NO: 48888 - protein, 127 aa, Zea mays
  Clone ID: 700238810_FLI.pep
RRVCLWCCSHLCILQRHFHCAMKVKADRDESLPYAAMLAAQDAAQRCKELGITALNIKLRAIGGNKIKTPGPGAQSALRALARSGMKIGRIENVTPVPTDSIRRKGGRKGKEAVGVFDISWRWPSSS

SEQ ID NO: 48889 - protein, 280 aa, Zea mays
  Clone ID: LIB3151-018-H6_FLI.pep
KTHKGKCTSNFLTTMATKILALLALLSLSVSATTAFIIPQCSLAPNAIIPQFLPSVTSMGIEHPIVQAYRLQQALAASVLQQPFAQLQQQSLAHLTIQTIATQLEQQFVPALSQLAAVNPVSYLQQQLLASNPLALANTAAYQQQLQLQQFLPALSQLAMVNPATYLQQQQLLSSSPLAVGNAATYLQQQLLQQIVPALSQLVVANPTAYLQQLLPFNQLDVANSAAYLQQRQQLLNPLAAANPLVAAFLQQQQFLPYNQISLMNLALSRQQPIVGGAIF

SEQ ID NO: 48890 - protein, 106 aa, Zea mays
  Clone ID: LIB3153-010-E12_FLI.pep
HKDSGNKNISMGIHKGLPQGLPQACSSKLQAASSTSAAGHRIICPRLWQRERLCMGWGSCTTSSITSLVTHISQVSQHRPWSHSVGRKHRFYDRSSPRHRHGFIQT

SEQ ID NO: 48891 - protein, 216 aa, Zea mays
  Clone ID: LIB3227-019-D2_FLI.pep
AYRHQQHRWTCGAANLFRKMAGDIVISKGATVWKKLHLLYSFFFVRRVIAPILTFLFYCVVIPLSVMVPEVSIPAWGMFYIPTAITIMTAIRNPWSIHLVPIWILFENVMSMHRMRAALTGLLETTYVDEWVVTEKVGDHVKDKLEVPLLTPVKPTECVERIYLPELLVAFYLLLCASYDVVLGAGHYYPYIFLQAFAFLVLGFGFAGTVTPCSCS

SEQ ID NO: 48892 - protein, 132 aa, Zea mays
  Clone ID: LIB3227-026-A4_FLI.pep
LKYTVVFQKLWFSKTLFPNRASNSTTYVRTSVLKVSYEVGEVPATSKISLLCASNAMAYGTLVPVWEFYYVLRRGLEHCNYRHEWQRLMKTLRHVETGTLLYMGILHGQPFSPQLSHNGHSEGLRVLQKPCM

SEQ ID NO: 48893 - protein, 222 aa, Zea mays
  Clone ID: LIB3353-001-E11_FLI.pep
PPPTPHTCPPRRRGPPPMAKLPRLRCPFAVLALVCILPLFAPRPALSSRAAPKDGVSFAGAGNTIHQLLKDHGLPGGLLPRGVESYTLDESSGLLQARLSAPCYAKYDNGDLAYFDNVVRGNLSKGALRGVEGLSQEELFVWLPVKGILVQDQEPGVILFDIGFAHKSLSRSLFEDPPDCKPSAASGMSAAAAARWKVRQGVTGLRLRREVAADSDEHQEQR

SEQ ID NO: 48894 - protein, 254 aa, Zea mays
  Clone ID: LIB3356-029-A11_FLI.pep
TVSYTQHCSRPRGLMATPTGHMKMALAFDDPRVSVLVPDGQEQEEEVVDGAEHAHDPVEPLEVVVVQAGTLQPRPVVAAPCRAVDDGHQHRAEVISQRQRRPRQRRRQGSHPRRRLAEEELEQPRQREQVRGTQEQVLERDPEEGDGQRLGGVQHPVVGRHVLALDLDDGGHGHRDDGQHQPGADTLEVCDAHLGPRDAARERDDDVIVDGREDDDERDREDGERRRRHGEAAHARVHGGRLLDREGGQLRQAA

SEQ ID NO: 48895 - protein, 111 aa, Zea mays
  Clone ID: LIB3593-009-H10_FLI.pep
MMLVKEQKQVRGCLIMMLRVTFTGVSSLPEAGEGGTNAAASPAGSLILTAAGRTGCLRRRPSPVSGRGPATVSSHSLSRRPISLRRNHPTATARCQTLDLQSLVLYPQNFR

SEQ ID NO: 48896 - protein, 89 aa, Zea mays
  Clone ID: LIB3075-004-E4_FLI.pep
VGSVNIKCCAAIHATEEVLSTIYIQVMLVIQTKHATVTSSSHQFDAACFYRSNRSAAKVGFDVILTSNLPLVCAMYISKPTSSGLFSFL

SEQ ID NO: 48897 - protein, 103 aa, Zea mays
  Clone ID: LIB3116-014-C11_FLI.pep
YTCTALLSQLVAGDEVRGVCPGVVGDGVGDVVEEVLDGALAGDDGLHEEAEHGEHGKAAVLELLHLELGGGVRVVGEAQRVEGAAGVHLVEPFPERAAADAVA

SEQ ID NO: 48898 - protein, 159 aa, Zea mays
  Clone ID: LIB3594-016-D11_FLI.pep
LPSETPSTSAAAGAAATMAVGKNKRISKGKKGGKKKTVDPFSKKDWYDIKAPSVFSVRNIGKTLVSRTQGTRTDCIARVSPEDGLVVGWIFLHELRRQLWNSGNTNIDVLNGIAWDERRHRLFVTGKLWPKLYEIKLRAVDGPADGSVEKLCPKASFYR

SEQ ID NO: 48899 - protein, 265 aa, Zea mays
  Clone ID: LIB3279-202-E11_FLI.pep
PMSSLIRLLFTLAAAIGAASLLVASLRRRAPPPGLPAKLVPSSHMAGRNRSFVLWLHGLGDSGPANEPIRNLFSAPQFRLAKWSFPSAPRAPVSCNNGFVMPSWFDIHELPMSAGSPQDETGVLKAVEKVHAMIDREVADGIHPENIFVCGFSQGGALTLASVLLYPKKLGGGAVFSGWVPFSSSVTERISPEARKTPFLWSHGMADKVVLFEAGQAGPPFLQSAGVNCEFKAYPDLGHSLSQEELLYLESWIKSRLNASQEKDS

SEQ ID NO: 48900 - protein, 170 aa, Zea mays
  Clone ID: LIB3607-006-G11_FLI.pep
MSRIIRMQNNSIEVNSKDELLLGNNLEDLQLLDPCVERADSVPEAEEAMLLAFVHAVQKLGLHSKHGIDEPPIRDLVKLRGYKVVLPDNLRPDSFLPGHDLFELEPVLLTFVASPFQAEMVGEYRPQLLPLEEIPVAAIEGLVLGERIHGGPDLVLGDKVGVGGVAEALP

SEQ ID NO: 48901 - protein, 297 aa, Zea mays
  Clone ID: LIB3608-033-B5_FLI.pep
AQVVCDLSSVLPEEKNTNGRSCGGGPGLRRQAHRARPRRVPGRLVLVQGGPGAPRGGVPHGHAGPGGVGRGPAGAAGGADVPGLHGAAAGAPGVAAGRGARGARGPQPRRRERRAGRRDVPGQGRRRGVPLRLHARLRGAAVARAGEGRDPHDISASAELHVRGGPGAPATLHQGKVRLGAQGLRRVHGGPRHRGGVPALDGGEQPRGRGEGDRGGPPRDALQAQRPGALPRGHRRQVRLTTLRCSAQFARVLFSFAAFLRFNNISLLFPNRDWPEFSTHGVKSCIIIIMLLLLANI

SEQ ID NO: 48902 - protein, 169 aa, Zea mays
  Clone ID: LIB3912-028-H1_FLI.pep
SARDAPRCCCSLLGDGGRGDRDVARRRGAGLRDGPRRGPGVRVGPVGPRHVVERRVCPRCIRGRRRRGGGARGARRCPPGVGHLRGIHVPRPRPALERPARRFPRGGALRCVASGRRRQLPLAAGPAGRAHSRRLPVNRTPLSRASNEYAVLLLYVRRRVVFYSMSVIY

SEQ ID NO: 48903 - protein, 219 aa, Zea mays
  Clone ID: LIB3607-047-H10_FLI.pep
ARVAVAADGLVVPRRRLLGEREVELGARAAELDGGLVVGPGGLLGGVERAQPLAHRAARVADLRRPLPPRPLPHAAVLVLLLPPPPLPRRQRRRASCRGCLLRAAAQCALPGGEELAAEAPLHPAHLAARRCRRRREDLRRRRGVPGDDVQQGGDNDLVLPLERDHPPCERRLRARRLGARGARRRLVEVAVESDHVGLARCHGGEVGHAGCSDLCVRP

SEQ ID NO: 48904 - protein, 79 aa, Zea mays
  Clone ID: LIB3594-044-G7_FLI.pep
RCARTHTRSHQTDTNAFLTCVHISTAFYSAVGVPHGHISTMMDAHALQAELAAAADGLEAALTGLEAAEAAARSEQACI

SEQ ID NO: 48905 - protein, 166 aa, Zea mays
  Clone ID: LIB3060-105-B12_FLI.pep
HDQHGRLHWRRRRRRGGLVQPVAGAGHDEHRARGRLVEAVAGVGHDQHRARQRRRRRRRPGRRLVQPLPGEGHDEAWALGHPRRRLLGPLHGGAHARRRRWRPLRARRRRPDLQAGHPNQGLRGGTAGTAAGIGGHGGRRRAATVEPEAWGGGNGGWGGEPRMARK

SEQ ID NO: 48906 - protein, 461 aa, Zea mays; identical to SEQ ID NO: 48739
  Clone ID: LIB3059-009-A11_FLI.pep

SEQ ID NO: 48907 - protein, 162 aa, Zea mays
  Clone ID: LIB143-066-A4_FLI.pep
RSPNRRNPRLATAGAMLRSPGNSPRRLSPSPTPAHSTPRPASPPPSTAPSSKRRRSEVLDEDTYVAAIERIIERDYFPDLPRLRDRLDWLQAVRSHDPLILRDAQLKILDRRRRAQRHAAGPVPTPTPATSTALRSPSFLTTPAGSVAGGVGGPDADHDDDV

SEQ ID NO: 48908 - protein, 123 aa, Zea mays
  Clone ID: LIB143-052-G12_FLI.pep
ICKPARPSLATAMFGIVFPDHTFPLDATAFAQVAPNSWVLDLSTLALAAAPRSAVVFLLPAAVTALPPGKAVSVYFQAATNRPFAFLGALGPTRPSASFPLPEAGDEPEPAVGPAKLGVAVED

SEQ ID NO: 48909 - protein, 68 aa, Zea mays
  Clone ID: LIB143-034-B3_FLI.pep
GFDVAITAQDGNDVRTIQDYPINLWNSSLRVDNASDMSPVAAQEYCIYKNLLPFYPTVRPGHNLLRPA

SEQ ID NO: 48910 - protein, 153 aa, Zea mays
  Clone ID: LIB143-014-D10_FLI.pep
KKLEGSSRGRSVPGSSAPSVRPPPRMSDEARRGPAGAAQVVLRASSEDRKPVGSGSPPPAATATAVAHKIQLKSADMKEEMRQEAFEIARIAFEKHSMEKDIAEYIKKEFDKNHGPTWHCIVGRNFGSYVTHETNYFVYFYIDSKAVLLFKSG

SEQ ID NO: 48911 - protein, 156 aa, Zea mays
  Clone ID: LIB3067-019-D11_FLI.pep
LDRQSKAKAARSKAMENPASVLVLPAQFTKLTFRNLYIRRAGPGSREITEEGRCDLDKRYVSDFPVYDGRGPDASLVARVQGITSEIGNAHQLFVVVFDTDRYTARTDCLLACVCGDARVLANCFSSCSSRPAYASLCCQAQGLHARHQWRDNGRV

SEQ ID NO: 48912 - protein, 158 aa, Zea mays
  Clone ID: LIB3067-017-D1_FLI.pep
QQQSPPMGVDYYKVLGVGRGATDDELKKAYRRLAMKYHPDKNPTPQADTLFKQVSEAYDVLSDPQKRAIYDQYGEEGLKAGAPPPAASTHGAGAGVHRFRFNTRSAEEIFSEIFGGGFAGAGPRTPGGGVPSGFPMFGGAAGAGEASSAASQRKAPPI

SEQ ID NO: 48913 - protein, 88 aa, Zea mays
  Clone ID: LIB3070-010-G2_FLI.pep
LKRPNRCLDWSERSDRLVSSREPREPKKQGHGFLARSHGVLPDVLQRHPARASVRRRRGVQGLVRPGLRRARGDLLPRRVRLRRRQAV

SEQ ID NO: 48914 - protein, 337 aa, Zea mays
  Clone ID: LIB3076-053-E1_FLI.pep
LLQRQRGNESNEVFKPKTMEPVRKSVCVTGAGGFVASELVKLLLSRGQYAVRGTVRDPGASKNAHLKVLEGAEERLQLLKADLMDYNSIASAVAGCEGVFHVASPVLSHRPSNPEVEVIAPAVIGTTNVLKACYEAKVRRVVVVSSCGAVYANPIYPKGKVFDEDCWSDEDYCRKKEDWYLVSKTLSEREALAFAAKTGLDVVTVCPSLVFGPLMQPTVNLSREMILKYFKDLETVENVLSNMVDIRDVADALLLTYEKPEASGRYICSSHAIKISDMINILKTMYPSYPYPKNFVEDDVNSVYSSEKLQKLGWTFKPIEESLRDTVESYKAFGILN

SEQ ID NO: 48915 - protein, 248 aa, Zea mays
  Clone ID: LIB3079-029-H5_FLI.pep
QPCPAHHQHLAPSSSAVVTRSIAPPSMAPKNALPAASGMTLEPRYRGVRKRPWGRYAAEIRDPARKARVWLGTFDTAEAAARAYDAAALHFRGPKAKTNFPVAFATATATDTRALPLPLRLPLPPPPPPKKLAVSPSGSTVESSSRDSPAAPAPAPSLDLSLGMPPMVAAQPFLFLDPRLAVTVAVAAPVPRRPTAAAAGAGASKQAAYSCCREDEQSDTGSSSSVVDASPAVGVGFDLNMPPPGEVA

SEQ ID NO: 48916 - protein, 208 aa, Zea mays
  Clone ID: LIB3116-015-H12_FLI.pep
RGEGVRRVVAAREGDAVRRRRGGGARIGRGRGRRGGGRGARAAAVGAGRGRGAARVLGRVGRRGRGRRRRRGGRGRRRRRRRRGALRLAAAAAHGDVAQDAALGPVPAAALAEVARLRQVVVVVVAELGVGRLAPRALHRLGRRGRGTAASRPAGAMLRRLRAPEVAGCRGPAEQPPGQARDGLELLHGVRRWRWRRLQRARMWPRRA

SEQ ID NO: 48917 - protein, 98 aa, Zea mays
  Clone ID: LIB3118-029-G12_FLI.pep
SSGASRGTAAAADDEEGAAAGGWRFLLGTQPPPLPISGLRSGQRAAPIRSNPIQPNHRPRHVPPRSPPHAGNLGIRRGWLLGWTGGVRRQDSREGEEW

SEQ ID NO: 48918 - protein, 294 aa, Zea mays
  Clone ID: LIB3150-039-H8_FLI.pep
GHRGSQTINQEAAGRSNQTSLPSPSSEMARAAAPPLHRLPGLALLCLAVAVCFSGGENAAAAAWTRKIVGVHELRVGDFSVKVTNWGATLMSVILPDSKGNLGDVVLGYDTVAEYVNGTAYFGGLIGRVANRVAGARFTLDGKAYRLYRNDGNNSLHGGHRGFSKVVWTVKEHIGGGDSPYITLYHHSFDGEQGFPGDLDVYVTYRLSRPYVLSVRMNATARSRATPVNLAHHAYWNLGGHGSGPVLGETVQLFASRYTPVDAALVPTGALAPVAGTPYDFRAPAPVGARLADL

SEQ ID NO: 48919 - protein, 105 aa, Zea mays
  Clone ID: LIB3150-069-G3_FLI.pep
EADASGPVADQERRSAVLVCDFRTGTALSIALSGGSYDTTRSRMLSLGHYRLPAQLVRCHASPRDFFASDRQTPLVSKFFAGDTAACHWFVLVLVHIHACSPRSR

SEQ ID NO: 48920 - protein, 233 aa, Zea mays
  Clone ID: LIB3066-013-C5_FLI.pep
AAESAPPHLLLICFPGQGHVNPMLRLAKRIAAKGLLVTFSSISRVGAMLAASVGVSAGGDGVPVGRGRVRFEFMDDEDPGPDLDDLLRHLAKDGPPAFAELLERQADAGRPVACVVVNPFMPWAVDVAADAGIPSAVLWVQSCAVFSLYYHHVHGLVEFPPEDDLDARFTLPGLPEMSVADVPSFLLPSNPYKLLVDAIIAQFHTIDRASWVLVNSFTELEPDVAAALPGVTP

SEQ ID NO: 48921 - protein, 368 aa, Zea mays
  Clone ID: CC-ZMPO148032B07_FLI.pep
GRHHGGCFLLDGRRAHLPGRRPWLRQPGHLVGVDGADPYHRRAAAAVLRVVELGARLPDLAFLPREHLEHAELLHGLGEDRDEVGGLVRHGLHYGLRLLVHPHQAVDGERHLLLQHQAEVAPVQVVGRGGVHGDGARVLAVARVADRLLVLGVDGRRVGLDEEAPADADAVAAAQHRDHLLDVEALLVELVDELGHRDVRARQVVGVLAVGHERVAPPQGHRVLGPARQLHRVAGAHRDDVRARHHVRALLLQLRLDLLDHVVALHGDVGAGLLLGGLVRHRVDQDGRVAAICEAVVEDEAEEAGGGAGVSFEPLLDDVEDDLLGVGARRLVEIRRELRGGQRRGRRGGEEEEEDEAGVHHAEMERGG

SEQ ID NO: 48922 - protein, 234 aa, Zea mays
  Clone ID: LIB3245-440-D9_FLI.pep
QGAKMPAGGFSVSAPSGVEFEAKITPIVIISCIMAATGGLMFGYDVGISGGVTSMDDFLGKFFPAVLRKKLEDKESNYCKYDNQPLQLFTSSLYLAGLTATFFASYTTRRLGRRLTMLVAGVFFIVGVIFNGAAQNLAMLIVGRILLGCGVGFANQAVPLFLSEIAPTRIRGGLNILFQLNVTIGILFANLVNYGTSKIHPWGWRLSLSLAGIPAALLTLGALFVTDTPNSLIE

SEQ ID NO: 48923 - protein, 510 aa, Zea mays
  Clone ID: LIB3632-056-H11_FLI.pep
LRALPRRLELWLPCLAAVESNPAPPPLAPPPPDEASAGSGLDARAGGGGGGGDGGGGTDLGWLRAFPHVFTASMANFLFGYHIGVMNGPIEDIATQLGFQGNPFLQGLVVSIFIVGAFFGSLGSSALVDKFGCKRTLQIDSIPLIIGALLSAQADSLDEMLLGRFLVGIGIGVNTVLVPIYISEVAPTKYRGTLGTLCQIGTCLGIIAALSLGIPSESDPHWWRTMLYAACVPGILIVAGMQFAVESPRWLAKVGRFDDARKVVESLWEPSEVEKSMEEIKAVVLNDDSRGSWSDLLVEPHNRVALIGGSLFFLQQFAGINGVLYFSSLTFRDVGITNGALASLYVGIINFGGALVASNLMDKQGRKKLLIGSYLGMAFAMFLIVYGISFPLDEGVAHSLSIAGTLLYIFTFAIGAGPVTGIIIPELSSARTRSKVMGFSFTVHWICNFLVGLFFLELVNKFGVGAVYAGFGGVSLLTALFAYNFIVETKGRSLEEIEMSLSSATPGKQE

SEQ ID NO: 48924 - protein, 205 aa, Zea mays
  Clone ID: UC-ZMFLB73278C06_FLI.pep
LDPQSKAKAARSKAMENPASVLVLPAQFTKLTFGNLYIRRAGPGSREITEEGRCDLDKRYVSDFPVYDGRGPDASLVARVQGITSEIGNAHQLFVVVFDTDRLKGSTLVTNGVITAGSDEWAIYGGTGVFAMARGVIRRRYLADRAGGNTDELNMDVFCRPFGSQSELQDKVVHHTNNQRRPFCRLELNMFCWIYNILLYESLRI

SEQ ID NO: 48925 - protein, 364 aa, Zea mays
  Clone ID: UC-ZMFLB73365B01_FLI.pep
SRPRSTGPSRRSRPRSTSRRRPRTPRAPNPRRRRTLPPRRPPSRRHPHTLPPLRPTNPLPLLRRTPLPPNLRHLSRPRRRTLQAPSHRLASLPRPSRPRRRTPLLPSLDAQSMEIISRWIPGWGIDAVTLPLAVDLNIATDSATKAARTLARDEDFKFRAAHWGDLHRRLHEELPPAVTVLWGHQFLSFEAPDDTRGVVATARVLRTGGTVEATGDLLIAADGSTSSVRRSFLPDLKLRYSGYCAWRGVFDFSGKESSDTMTSIRRAYPELGNCLYFDLAYKTHAVLYELPRSRLNWLWYINGPEPELAGNSVTMEATDAMVGRMRNEAERVWCPELARLVRETAAPFVNVIYDADPLRRLSWT

SEQ ID NO: 48926 - protein, 165 aa, Zea mays
  Clone ID: LIB3060-061-B9_FLI.pep
LIIVSWPQGIFTGSCGTALDHGVTAVGYGTENGKDYWIVKNSWGSSWGESGYVRMERNIKASSGKCGIAVEPSYPLKEGANPPNPGPSPPSPTPAPAVCDNYYSCPDSTTCCCIYEYGKYCFAWGCCPLEGATCCDDHYSCCPHDYPICNVRQGTCLMVNARPIS

SEQ ID NO: 48927 - protein, 72 aa, Zea mays
  Clone ID: LIB3587-220-C2_FLI.pep
FGSAVSYGVYFYNATRGSLTTLSSLTFLTPMFASVFGYLYLGETFSTVQIGGALLTLVAIYMVNYKSIIGEK

SEQ ID NO: 48928 - protein, 85 aa, Zea mays
  Clone ID: LIB3597-027-B3_FLI.pep
HKPFLSYRRARLPLPHTPQRPRRLAASAKQPQHPLHLQTATAMSALGTLSGGAAGVSGLLRLRRRAAPAPAIAAPSHLPAGTVKC

SEQ ID NO: 48929 - protein, 149 aa, Zea mays
  Clone ID: LIB3245-366-B5_FLI.pep
GGYIASSFSANRARAAVAYTLQLAQLTTIHLKEEVQCRSRQLAVTESEGQGNGVLTAPLPRQAPVLGRGGHPPHERGARRDQLRAELLASEARHGHAEEPHHQHRDGRVRLADAGAVHGGRPRLLLGAQRAVPGGGHRGEHRQGVRPVV

SEQ ID NO: 48930 - protein, 346 aa, Zea mays
  Clone ID: LIB3150-081-A9_FLI.pep
EDYRFYAISAEYPEFSNKDKTLVLQFSVKHEQKLDCGGGYVKLLGGDVDQKKFGGDTSYSIMFGPDICGYSTKKVHTILTKDGKNHLIKKDVPCETDQLTHVYTLIIRPDATYSILIDNEEKQTGSIYEHWDILPPKKIKDPEAKKPEDWDDKEYIPDPEDKKPEGYDDIPKEIPDPDAKKPEDWDDEEDGEWTAPTIPNPEYKGPWKQKKIKNPNYQGKWKAPMIDNPDFKDDPYIYAFDSLKYIGIELWQVKSGTLFDNIIITDDPALAKTFAEETWGKHKEAEKAAFDEAEKKKEEEDAAKGGDDEDDDLEDEEDDEKADEDKADSDAEDSKDSDDEKQHDEL

SEQ ID NO: 48931 - protein, 364 aa, Oryza sativa
  Clone ID: UC-OSROCYP002H08_FLI.pep
PDAVEEEGRHEDEERLGDTDGAGGAEEVFVVGDAGALEHARAVEHDGVDARRLLEEVDADARQQDAPHGRGRGQDELLPHPLLVSAPSLGDGHHVAVELLGDAGGGLDVGQALRGLLRRVGGLLQHHLGVREASLHDQPPRRLRHAEHHEREQHGRRRADAEHDAPPEVQRQAGESIVRDVPEQDAEVDEHLRERRQEATRRRRRHLGGVHRRDHERVAHADAGHEAAEHEHGVVDGEPHEERPREEYDGGEHDGVPPADPVRRPPRREGADERVEVQYAHENLHLPVTDVEVLLDVQRRPAHHPDIVAEEDGGHGGEDGAGEGEPDVALLLRRDGLRQRGGSHLRWCRGGGGSLWAVYSSGGR

SEQ ID NO: 48932 - protein, 117 aa, Zea mays
  Clone ID: LIB3354-020-B12_FLI.pep
QIVIQQVARARMSQEQPRRPSGHEETSGGGEQGAVRYGDVFPAVSGGLAEKPVAPQDAATMQSAENLVFGQTLKGGPAAAMQSAATANERMGAVGHDQATDATAVQGVTVSETRVPG

SEQ ID NO: 48933 - protein, 205 aa, Zea mays
  Clone ID: LIB148-051-D11_FLI.pep
SRSGTMKKDDDLESALLAAKEPAPAPAKGYAYALTCALLASLTSIIYGYNRGVMSGAQKFVQADLGVTDAQLEVLIGATSVYSLVGSLAAGWACDRAGRRRTIALSAALFLAGSAVTAAADGYAALMAGQFVAGVACGFGLVVAPVYIAEISPANARGFLSSIPEIAGNSGILLSYIADFALAGLPTPLNWRLMIGIGAVPPLFL

SEQ ID NO: 48934 - protein, 62 aa, Zea mays
  Clone ID: LIB3060-082-E1_FLI.pep
GQGSPPLPLPSPPLLCSSPPPSRIPIPASLLPPAHAAKSSPSRDELVVDGRDRRGQEAPGRA

SEQ ID NO: 48935 - protein, 217 aa, Zea mays
  Clone ID: LIB4315-004-B5_FLI.pep
VVPASPSRSPCRFSRNQDAARIGPGGRRHRHVRAGGDGWHGALLHVRRVHAAQPGQHVRAMPARARRHHRGRPAPRRRGLLPRLLLLPPAAAVLAPRRTRVARAHADPAPPNQPPARAAPRLPLRRRVRLLRAPLQAPPPQAPPPPRGAPRHRPRADAPSGVRRPRPVVRLLLPRAGQPRPVGCRRPAAPARAPPPHFPLPRAAPPQARPGFPRDPS

SEQ ID NO: 48936 - protein, 380 aa, Zea mays
  Clone ID: LIB3245-008-B10_FLI.pep
RAMVVEANSGSTLAAVGVAGTGSSMAVHSHQLSTVVPSSVTGEEVNYELADADLLHKVHYVRAVHVFRAPTAVAAPPLTIRELKEPMFPWLDMYFPVSGRLRRRQAAEGEEAAAAAVGRPYVRCNDCGVRIVEVDCDATVEQWLEAEAERGGLCKALAYDKVIGPELFFSPLLYVQVTSFKCGGMALGFTWAHLIGDIPSAVASFRKWAQVLGGNKAPAPTLRDPLAVPPSAPPTSVTVPPSVKATAAPVGDHWVVPTTHDMVSFSFHVTEQQLQGLQLSAIKGYHRREVVGPFELVSALMWRALAAIRGPEEEEATRTVTVVKTGAAPTSGGSPRPALTNEHRIGHVVFATGGSSPATADVAKLAALLAGAHLEEASAV

SEQ ID NO: 48937 - protein, 107 aa, Zea mays
  Clone ID: LIB3245-075-G6_FLI.pep
RKCLSFSPSPSAVPAAASSSNSTKPNPRPWPVSRSRITMTERTSPKREKWARSSGSCAPAGIPPTKSFRLSPASSSPPAAAIADEQRETEVESARVLRGAGGGLLAA

SEQ ID NO: 48938 - protein, 136 aa, Zea mays; identical to SEQ ID NO: 42922
  Clone ID: LIB3245-205-C4_FLI.pep

SEQ ID NO: 48939 - protein, 132 aa, Zea mays
  Clone ID: LIB3245-362-H7_FLI.pep
QGRDGMALGAAYHHYLQLAGDHGTATHALLLGVLIFLVIRLVSARRTGTTSANKRKQQQRLPLPPSPPGKLPIIGHLHLIGAETHISIRDLDAKHGRNGLLLLRIGAVPTLFVSSPSAADAVLRTQDHIFAS

SEQ ID NO: 48940 - protein, 131 aa, Zea mays
  Clone ID: LIB3245-382-A10_FLI.pep
SIKLSSTIMAAIMAAGLVVLALLAAVAAPAHATDYVVGDSAGWASGVDYATWASGKTFAAGDNLVFQYSAMHTVAEVSSADYSACSASNSIQSYSDQNTKVALTAPGTRYFICGAPGHCGNGMKLTVTVAA

SEQ ID NO: 48941 - protein, 226 aa, Zea mays
  Clone ID: LIB3279-231-C10_FLI.pep
LRIPRSIRVEKPQPLPTAAPRRNPESIPDGARHRALRSRGRRRRLPLGPRRLDDSSGHAPGCPASAIYLPDRILLRRGALFRPGAGEPGAQSVERAGAAAARQPPHRRCRPPAPPAAPPPRRRAPASWHRRGRGSAPPPRTLAPRARVAPRPARARALLARRAPGLRLLFPARQRSLPRAHSNRRAARPPCAALRAAAEGRWRRGPRRVPARPLATAVRRRRRRAP

SEQ ID NO: 48942 - protein, 205 aa, Zea mays
  Clone ID: LIB3354-027-G7_FLI.pep
RPLCRLHRRSSRRMLVKKNNSTAMAAGVLPLASLNHISIVCRSVEASLRFYADVLGFVPIRRPGSFDFDGAWLFNYGIGVHLLQSEDPGSLPENKGEINPKDNHISFQCESMVAVERRLKEMGIPYVQRCVEEGGINVDQIFFHDPDAFMIEVCNCDNLPVVPLAAAADQRAPAVLGACKRAAAVGVKQQQQQSSAGGVPSSAAP

SEQ ID NO: 48943 - protein, 154 aa, Zea mays
  Clone ID: LIB3587-272-H8_FLI.pep
ARASAMASKVPAALLSCAFLLLLGAACQAAAGHYSPPSPASCGLKVGYYDHKCPPAEAIVKSVVRAAVRRNPGIGAGLIRMLFHDCFVEGCDASVLLDPTPANPQPEKLGPPNNPSLRGFEVIDAAKAAVERACPGVVSCADIVAFAARDASSF

SEQ ID NO: 48944 - protein, 174 aa, Zea mays
  Clone ID: LIB3591-073-G7_FLI.pep
ASPYAVALTALLLVSAALLALIAFGVFSLPVSAPNAAATTTAGGETESADTRPARPRARRDLGEGLGERGAQWTEVISWEPRAFVYHNFLSKEECEYLIGLAKPHMVKSTVVDSTTGKSKDSRVRTSSGMFLQRGRDKVIRVIEKRIADYTFIPVDHGEGLQVLHYEVGQKYEP

SEQ ID NO: 48945 - protein, 138 aa, Zea mays
  Clone ID: LIB3591-083-G7_FLI.pep
KEHTAAFIFLCVPAFLSILSPLSKLSSPLSLLFFLVWRGALPSLSHTLHQKSSHVLGDGVSRSATPQMQPYKSTSKVEFMWCAAMFLSHLFLVFFHLFICLFPFSLISPLYPCAWFFVALHCSCCTIRIQSPPRSYPL

SEQ ID NO: 48946 - protein, 169 aa, Zea mays
  Clone ID: LIB3591-093-C10_FLI.pep
FQSSSPSRESCPNNGHAQQCPSASDGARRSHGRAVSGDQEAHVPRPATAEPPHVPQRRRAERRHPGLHPLVRPLHAGAEGRGLRLPPRPLRRRAAAGLAVRCPVVEQRQPALPLQGGGGGGRQQERRARRRRRQERAGGAVRASLRRGLLPGEEPEAVAASGASGQGTP

SEQ ID NO: 48947 - protein, 71 aa, Zea mays
  Clone ID: LIB3594-004-G2_FLI.pep
ANRRSHRHPRLRLRRPSSCLVCGSIGNRRPDWGFGNGNSIFRSIDRAPQLTERGAHEHALAVILPLTDSVI

SEQ ID NO: 48948 - protein, 176 aa, Zea mays
  Clone ID: LIB3594-029-H4_FLI.pep
TRNNHVIHECIILHRIVSSKHRCMHVIDLSIHASIEMYIYPGSRSHRDHRTRASSLLPMAMTRALAMVAMLATAALFFMSARAQQCGMQAGGALCPDCLCCSQWGYCGSTPDYCTGGCQSQCIGSGCGGGGGGTPATPPSGPVSEIISESLFNEMLLHRNDVACPATGFYTYDAFI

SEQ ID NO: 48949 - protein, 218 aa, Zea mays
  Clone ID: LIB3594-030-D2_FLI.pep
FEKSEQRYTIMEAAGGGQHETRRRAGLALLGVVYSSLLLNAIFVAHHFLSPSRLLLRDDGRGCGLTWSLQAAREAEAVAAVECSGHGQVFVDGVAGEDGRPGCECNSCFGGPDCSLRTPNCTADADSGNPLFLEPYWRRHAAASAVVFSGWHRMSYTTTGGFQSVELERQIRRLHGAVGNAVADDKHLVFASGSLQLINALVHALSPDATAASPPSRV

SEQ ID NO: 48950 - protein, 163 aa, Zea mays
  Clone ID: LIB3595-037-B3_FLI.pep
SLLVLAHSLLLFVALNLLARSLAVAAAAMASGGASSLALAALLLVSCASAAVATKYTVGDASGWTTTGDYATWASGKKFKVGDSLEFKYAGGAHTVDEVSAADYAACSSSNALSTDSAGATTVTLKTAGKHYFICGVAGHCSSGMKLVVDVAKAVAAPAPAPA

SEQ ID NO: 48951 - protein, 87 aa, Zea mays
  Clone ID: LIB3596-010-E10_FLI.pep
PNYPTHRGAHEGNRLPIPPGIGPSDPIRLDPAGAGLRAAYGRRRRARLRPRRRGGGGVPAVAHAAGDAGDAEAEAAGARVAGVEGHL

SEQ ID NO: 48952 - protein, 163 aa, Zea mays
  Clone ID: LIB3596-017-E2_FLI.pep
GSSSFPIYPDPNPPYSLHISSCEENNSFRAASGKVSSCSPPSVAAPCVVAMATDEATKPSPIPPYPEMILAAIEGLDDKSGSNKSAISKYIEGKYGSLPPAHASLLTAHLARMKESGELVFLKNNYFRAGAPDAPPKRGRGRPPKARDPNAPAPAPKSPSSTG

SEQ ID NO: 48953 - protein, 245 aa, Zea mays
  Clone ID: LIB3604-002-H6_FLI.pep
AHHGSHRDLARCLLRPRSGSGHRRGSGSGAERHLGRVRVRGLHAGPGQQQRPGHSGARRPRALRPRLPGRRGHGPLLGRQAHHRLHRRVARHQGPPTGVPRQRPHRGGGVHGGQLRVGRVRPRRPDRADRHGVHVRLADHRLPGPARQDRHAQGRRDRQQVALRGLRRHQRRHHELLRPAGPDHQLPHRRPVQCLPHRQAPGIHPELVQAGSPELHGIRPAAGGVPADHEEPPQSRVGRLRRRPE

SEQ ID NO: 48954 - protein, 207 aa, Zea mays
  Clone ID: LIB3606-030-D7_FLI.pep
VCLCNSAASKLRPRSSSFVRAFLPATNSNESRLTNSQRLRLAAAAMASGGASSLALAALLLVSCASAAVATKYTVGDASGWTTTGDYATWASGKKFKVGDSLEFKYAGGAHTVDEVSAADYAACSSSNALSTDSAGATTVTLKTAGKHYFICGVAGHCSSGMKLAVDVAKAVTAPAPAPAAAPAPAADTAPDAPDTTPSTPTSPSSS

SEQ ID NO: 48955 - protein, 210 aa, Zea mays
  Clone ID: LIB3607-007-G4_FLI.pep
VLVKFAAQRKRAGASVPARRTDGLLGGGLHPDGAAAARRGRGRWRERGAVVVEPRLPQRVRRHPRQRLRPVARPRRLPLRRASSRCGVRVRRARRREQRDLRGGAAAVPRVRVPGVGGRGRDGAEPRRGARADGGAGRRVPRGRLQPGVPQLQPLLRRRVPAPRRARPHPALGQPPRQDRGRLHLRHPGQRPRRAPALRREPEPEPVRAA

SEQ ID NO: 48956 - protein, 359 aa, Zea mays
  Clone ID: LIB3608-044-G9_FLI.pep
KMIGDELDSDVVVRYFRGKSILITGSTGFLGKVLVEKILRVQPDVKKLFLLVRAADDESAKQRVETEVTGKEIFQVLKEKHGNGFEGFVQEKICPLPGDVMHENLGLGPAKLRQVCKEIDIVVNGAATTNFYERYDVAFDTNVMGAKHICEFAKRCSKLKMLLHVSTAYVAGEQEGVVLEKPFRLGETLREGTHLDIESELNLIKETRRELKASRCSEKAERRSMKELGLKRAREFGWPNTYVFTKAMGEMLLGAHLRGDVPVVIVRPSIITSILKEPLPGWMEGIRTIDSFIIGYAKQALSIFLVDLDLIMDVIPGDMVVNAMMVAMAAHSEERGQQTSIYHLTSSVRHPAPYAVLAE

SEQ ID NO: 48957 - protein, 212 aa, Zea mays
  Clone ID: LIB3608-054-C11_FLI.pep
GQDHAPHRARLHARPHHVQSSPDGRLDHFFLGVLRVEVHRSGDQEGVVAAGDGVIEAAVFVQVGAEDLQGPERLQVLEVGVLLHVIRVPDRRLDGVALLQQHLDERRGDIPVSSGHARRPHLPAAGRHRRRSSRRGWEEEDSLARSLSGISTTSEQTKLGELSPQPLSMDHHLFEQYAQHFECPLSKETMDTEYRSCWNGGRPESSKLQGAS

SEQ ID NO: 48958 - protein, 185 aa, Zea mays
  Clone ID: LIB3689-240-A9_FLI.pep
AGGLLPGFDLRGVLGAREALVALVAGIGEEARRVLAVEVDVAEHGGGAVGAHVVDVGGVRAREVLERAAAQRRLVQRALTPARDHRVVGALEAHRAICPRRRKPDMIRRPAVAEVKKKEGKRRLSHLNLSWPAAGSGRWCRARAPAARRLHPRRNGGGVRRRTRKEPETTRSTTACAYQKVTDLR

SEQ ID NO: 48959 - protein, 335 aa, Zea mays
  Clone ID: LIB3732-058-F4_FLI.pep
PDPPPAPKMNVGHAAHLSGQTAHMNQVPGSGVGIGVGGSDGLPQHQPMQEMAALSGMDQQFVMLRTAMRDKISDYIGRKQSPGDWRKRLPELAKRLEEILYRKFPNKHEYYNMMKGPVEPQLQFAIKTLSAQNQHNQQNPQMTRQISSSSSYGAMIPTPGMTQGTSAGSRTPYVTETNALSSSGACMVPQNANMGTSMQGPMSNGYQHLNTNISQNSTTNNVESTMGSVGVQRQLSHMIPTPGFSNQQNVPSNPDYSNGTGYFNGESAVAPHMQHQKQFPSNHNSNQIQHIGGHNNSGIHSSLLDNSSAYGLSDGHMNGGIGVHGSNMQLTNRTT

SEQ ID NO: 48960 - protein, 299 aa, Zea mays
  Clone ID: LIB3912-007-G11_FLI.pep
LDAGMQVHDPCPQLHSKPRAALYCTVLLERERRLRRWNLVMGDAYAKRVLLTAAGDTVSRGIACTLTKHGCRLVLLGDEGALAATEEEARRCGVGGGCVELVGLDFKACGEAAADAAVDRAWRCFAGLDAFVNCYSYEGEVQDCLSISEDEYRKTIKVNVITPWFLMKAIAKRFQDTKSGGSIVFLTQIIGAERGLYPGAAAYGTSLGAIHQLVRLCAMELGKHKIRVNAACRGLHLQDKFPVSVGKEKAEKATAEVMPLRRWLDPEKDLASTVLYLVGDESRYMTGTTIFVDGAQSIV

SEQ ID NO: 48961 - protein, 130 aa, Zea mays
  Clone ID: LIB3957-011-A10_FLI.pep
PRRVAPHLEAGAAAEAVVEERRAQRRRVGAVPLAVEVAVPTRPAHGAGRIAAAVEGGVSRGPRATSERCVAVRPRVRLGAVVAKPQPAREGEREQRGEDHDREDGLARRHWIGAGCVWRCRKAQDNGGSG

SEQ ID NO: 48962 - protein, 94 aa, Zea mays
  Clone ID: LIB3067-046-A12_FLI.pep
CPLGSAAAAVLQEAPHHAVQAQRARLRQLILLPATGRRRREALGRRDPQQLALEEALQPRLGRRRGGRIDLRGPHIRTAQKADQARRLAVADWQ

SEQ ID NO: 48963 - protein, 117 aa, Zea mays
  Clone ID: LIB3118-029-D1_FLI.pep
LPPALGRRGPLVGRLLLPRRWRRVGRSRLGPRPPREPGGRGGGEAGRGDVRRRRAQDGEGQDLVHGLVGHRRRPGGWKSAEVGVPFSCFVWNCWFLLWRALAPAVAVAFGVCARLPL

SEQ ID NO: 48964 - protein, 187 aa, Zea mays
  Clone ID: LIB4570-003-A5_FLI.pep
RARESSSSGTWSVACRAHPLRPGRPDLSSPRRTRTAAVPRGRVVEDAGALRERGGGPDGQHHGDHRGEPPEAEVRAVRRRRRLLHLRAGQEAVRRRREREEVGTPRAGRRQIRRRASVAEQEDLVQRAGRGDAGVGLLRVAGLPLPHHPLLHARARHGRPVRLVHLLVQRAPRAAAGGAVRERRRGP

SEQ ID NO: 48965 - protein, 115 aa, Zea mays
  Clone ID: LIB4570-009-H8_FLI.pep
SRPAGVSSIKYSDNHGAPGAARHGRHRGAACSPPAAVVPCPGLRQVHGAQVRPGPAHPRHHRPLRRERHPGRAARRKRDPGVQPRLPPTGHAHADSHAHLRGQPRRPRQGRRRGP

SEQ ID NO: 48966 - protein, 160 aa, Zea mays
  Clone ID: LIB4717-003-E11_FLI.pep
GADASNWSGWTSRRAVRLLPTRRWIGPGAASPDWMPSSTATPTRAIAKRFQDTKSGGSIVFLTQIIGAERGLYPGAAAYGTSLGAIHQLVRLCAMELGKHKIRVNAACRGLHLQDKFPVSVGKEKAEKATAEVMPCGDGWIRRRTWRRRCCTWSATSPGT

SEQ ID NO: 48967 - protein, 56 aa, Zea mays
  Clone ID: LIB4732-005-D10_FLI.pep
PQPPKLKANHQTPGHGARAHFRCRAQDPVPRGQARARQCRRQARASPRAGRRRRGP

SEQ ID NO: 48968 - protein, 87 aa, Zea mays
  Clone ID: LIB4732-008-F9_FLI.pep
RRESLSTARLLPHLPLPVYLPSPSITPRNAMALATNSAAAAAAAVSGGAASQPHRAATFLPLKRRTISAIHAADPSKNNGPAVPAAL

SEQ ID NO: 48969 - protein, 120 aa, Zea mays
  Clone ID: LIB4740-014-C7_FLI.pep
RSDQSITTWQFLPRHKRMATVGGNRALYAVVALPLLATLLHGPMRLSHAFPYRSLLQTCQPSGSIQGRSGNCNTENGSECCKNGRRYTTYGCSPPVTGSTRAVLTLNSFAEGGDGGGAAL

SEQ ID NO: 48970 - protein, 86 aa, Zea mays
  Clone ID: 700428275_FLI.pep
CVHPHRLAVERGRRPGRLGPVRLGEGHGGAASRGARGDDLHCFQVCGGPGARRRQQGLNLMLLNCPRALPFGGRLVLATSKLARRG

SEQ ID NO: 48971 - protein, 97 aa, Zea mays
  Clone ID: 700429912_FLI.pep
GPPPASRRRTCPGSRTPRRARRRTGPATGSFSSRTTPRRCGGGRWRVGGGGGSCSNAAARGASLAPWPLLSWPWTSTWPASAWRLFSWCCYTIGDCS

SEQ ID NO: 48972 - protein, 153 aa, Zea mays
  Clone ID: 700432746_FLI.pep
PSATPKERPWVARGQADRDAAVGREVVDAEEVAHGVDPADAVAGEGGEREHVPVREAGPVEEQELDAVPDEAERGPGQRHHPEREAQRGHTREPAEELAGVGGEGEEVELHLRDALGLLELRRVDGEVGVGAVDGLEPDAPYQAQPVGRGRRR

SEQ ID NO: 48973 - protein, 110 aa, Zea mays
  Clone ID: 701182855_FLI.pep
RRTCCPSHSRRERGREGEADHSLMYLGLSRGLGGRSRGEAWTRDARAWAWAMEMERGERLGCELGSGLECWRKWERGARRSRSRGDGDEEGSRRLRGQSVTLRGKRSEGC

SEQ ID NO: 48974 - protein, 588 aa, Glycine max
  Clone ID: 700905774_FLI.pep
VRQTEPDPVVEDDYSDEEIDVDELEKRMWRDKMRLKRLKEQTKSKEGTDAAKQRQSQEQARRKKMSRAQDGILKYMLKMMEVCKAQGFVYGIIPEKGKPVTGASDNLREWWKDKVRFDRNGPAAIAKYQADNAIPGKNDGCNSIGPTPHTLQELQDTTLGSLLSALMQHCDPPQRRFPLEKGVPPPWWPTGNEEWWPQIGLPKDQGPPPYKKPHDLKKAWKVGVLTAVIKHMSPDIAKIRKLVRQSKCLQDKMTAKESATWLAIINQEEALARELYPDYCPPFSSAVANGSMVINDCSEYDVDGAEEEPNFDVEDRKPDHLHPSNLGMERMMGRMPIQQPSHPMKGDVVTNLDFIRKRKISSDFNMMMDQKIYTCEHPQCPYSEVRLGFHDRSARDNHQLNCAYRNSSADYGGGPNFHATEVKPVIFPQSFVQPNTTAQSASLVAPSFDLTGLGVPEDGQKMISDLMTIYDTNVVGNKNLSSTNCVTAENHNLSQASLQRQDSFFPGQGMVLEGNLFAREEGQFDRFKATMNMNMNMNTPFDTNHNNNNIHLMFNSPCDLSSFDFKEDIQGVGMDSLQKQQEVSIWYQ

SEQ ID NO: 48975 - protein, 233 aa, Glycine max; identical to SEQ ID NO: 39953
  Clone ID: 700905984_FLI.pep

SEQ ID NO: 48976 - protein, 263 aa, Glycine max
  Clone ID: 700906722_FLI.pep
SSVSVSVLMEITKLGKRFQGKVAIVTASTLGIGFSIAERLGLEGASVVISSRKQQNVDEAAGKLRAKGIEVLAVVCHVSNAQQRKNLIDKTLQKYGKIDVVVSNAAVHPSVDPILQTQESILDKLWEINVKSTILLLKDAAPHLKKGSSVVLIASLVAYNPPPTMAMYGVTKTAVLGLTKAMASEMGPNTRVNCVVPGIVPTHFVALYTSNDATREELERKALLGRLGTTEDMAAATAFLASDDASYITGENLVVSGGMPSRL

SEQ ID NO: 48977 - protein, 225 aa, Glycine max
  Clone ID: 700907157_FLI.pep
NILLDENFTAKVSDFGLSKDAPMGQGHVSTAVKGSFGYLDPEYFRRQQLTEKSDVYSFGVVLLEALCARPAINPQLPREQVNLADWAMQWKRKGLLDKIIDPLLVGCINPESMKKFAEAAEKCLADHGVDRPSMGDVLWNLEYALQLQEAFTQGKAEDETKSSSAVPTAAVPTSPAPPTPPISSDDRPAAPARPEVNNNTSSDVHSIDDHSGTAMFAQFSNLNGR

SEQ ID NO: 48978 - protein, 363 aa, Glycine max
  Clone ID: 700907615_FLI.pep
NMAMKKFLWVVLSLSLVLGVANSFDFHDKDLESEESLWDLYERWRSHHTVSRSLGDKHKRFNVFKANVMHVHNTNKMDKPYKLKLNKFADMTNHEFRSTYAGSKVNHHRMFRDMPRGNGTFMYEKVGSVPASVDWRKKGAVTDVKDQGHCGSCWAFSTVVAVEGINQIKTNKLVSLSEQELVDCDTEENAGCNGGLMESAFQFIKQKGGITTESYYPYTAQDGTCDASKANDLAVSIDGHENVPGNDENALLKAVANQPVSVAIDAGGSDFQFYSEGVFTGDCSTELNHGVAIVGYGATVDGTSYWIVRNSWGPEWGEQGYIRMQRNISKKEGLCGIAMLASYPIKNSSNNPTGPSSSPKDEL

SEQ ID NO: 48979 - protein, 187 aa, Glycine max
  Clone ID: 700908801_FLI.pep
VKYILRGDDNRTTLMIKNIPNKYTSKMLLVAIDEQCRGTYDFLYLPIDFKNKCNVGYAFINMIDPGQIIPFHQAFHGKKWEKFNSEKVAVLAYARIQGKSALIAHFQNSSLMNEDKRCRPILFHTDGPNAGDPEPFPLGNNIRVRPGKIRMNGNEENGSQGNPSSLASGEESGNGTESTSSSSKSSD

SEQ ID NO: 48980 - protein, 182 aa, Glycine max
  Clone ID: 700908741_FLI.pep
QDAADAARSAMVSVIGLDSEKVQQLCDAANQEVPEAEKVQIANYLCPGNYAVSGGLKGVEVLESKAKSFKARMTVRLAVAGAFHTSFMEPAVSRLEAALATTEIRTPRIPVISNVNAQPHTDPNTIKKILARQVTSPVQWETTVKTLLTKGLKKSYELGPGKVIAGIVKRMDKGADIENIGA

SEQ ID NO: 48981 - protein, 366 aa, Glycine max; identical to SEQ ID NO: 37097
  Clone ID: 700908904_FLI.pep

SEQ ID NO: 48982 - protein, 383 aa, Glycine max
  Clone ID: 700909222_FLI.pep
MGVTQCTIAHALEKTKYPDSDLYWKKFEDKYHFSCQFTADLIAMNNADFIITSTYQEIAGTKNTVGQYESHAGFTLPGLYRVVHGIDVFDPKFNIVSPGADMSIYFPYSEKQNRLTALHGSIEQLLFAPEQTDEYIGLLKDKSKPIIFSMARLDRVKNITGLVESFGKNSKLRELVNLVIVAGYIDVKKSSDREEIAEIEKMHELMKKYNLVGDFRWIAAQTNRARNGELYRYIADTQGAFVQPAFYEAFGLTVVEAMNCGLPTFATCHGGPAEIIEHGISGFHIDPYHPDQASQLLVEFFQKSKEDPSHWKKISDGGLQRIYERYTWKIYSERLMTLAGVYSFWKYVSKLERRETRRYLEMFYILKFRDLANSVPLAKDDAS

SEQ ID NO: 48983 - protein, 563 aa, Glycine max
  Clone ID: 700909266_FLI.pep
NNEFDSFEDVRCLFDGGVYLPTDVLSKISPIPVLKEIFRTDGEQALKFPPPHVIKVRESEWMTDEEFGREMLAGVNPGMIQRLQEFPPKSKLDPTEFGDQTSTITKEHLEINLGGLTVEQALKGNKLFILDHHDAFIPFMNLINGLPTAKSYATRTILFLQDDGTLKPLAIELSLPHPRGHEFGADSRVVLPPAAVNSAEGTIWLIAKAYVAVNDTGYHQLISHWLNTHATIEPFVIATNRHLSVLHPIHKLLLPHYRDTMNINALARQSLINADGVIERSFLPGKYSLEMSSAVYKSWVFTDQALPADLIKRGMAIEDPCAPHGLRLVIEDYPYAVDGLEIWDAIQTWVKNYVSLYYPTDDAIKKDSELQAWWKEAVETGHGDLKDKPWWPKLNTPQDLVHICSIIIWIASALHAAVNFGQYPYGGLILNRPTLTRRFLPEPGSKEYEELSTNYQKAYLRTITRKIEALVDLSVIEILSRHASDEIYLGKRDSDDWTDDQKAIQAFEKFGTKLKEIEAKINSRNKDSSLRNRNGPVQMPYTVLLPTSEEGLTFRGIPNSISI

SEQ ID NO: 48984 - protein, 396 aa, Glycine max
  Clone ID: 700909837_FLI.pep
ISNLQGFRKVDPDRWEFANEGFLRGEKQLLKSISRRKSAHVNGSQQASQVHKSAAGACVEVGKFGLEEEVERLKRDKNVLMQELVRLRQKQQGTDNQLQNVGQRVQSMEQRQQQMMSFLAKAMQSPGFLAQFVQQQNESSKHIPGSNKKRRLQRQEEDSLATKDLHSSLDGHIVKYQSSINEAAKALFRQILQINNSTTQSSIKNPDVFLIDDIPSAIASDSSSSSTQVSNVMVPPISELTSMEVGSQFPLSCMPSNISEVQSSPAVLGFCRSQGMETESSLLNHELNVMGADTRNMGEIDMMSTVLDEADEADHFSPDTDGISKLPEISDEFWELFLRPSPLTEDTEETKCSSLGCGLTEDQGLPSEMGNKQENFDTIQHVDCLTQQMGLHALEY

SEQ ID NO: 48985 - protein, 508 aa, Glycine max
  Clone ID: 700909795_FLI.pep
GDKFFWFSDVEFARETLAGVNPYSIQLVKEWPLTSKLDPQIYGPQESTITREVIEPQIITYGTIEEALKEKKLFMLDYHDLFLPYVSKVRKIKGTTLYGSRTLFFLTDQGILKPLAIELTRPPMDGNPQWKQVFQPSCDSTNLWLWRLAKAHVLAHDSGYHELISHWLRTHCVVEPFVIATHRQLSSMHPIYRLLHPHLRYTMQINSLAREALISANGVIEISFLTNKYSMELSSVAYDQLWQFDSQALPNDLISRGMAVADPNAPHGLKLTIEDYPFANDGLLIWDAIKQWVTDYVNHYYPTPSIIESDQELQAWWKEIKTVGHGDKSEEPWWPNLNTSKDLIDIITTIAWVASGHHAAVNFSQYAYGGYFPNRPTIARNKMPTEDPSEEEWGNFLNKPEQTLLECFPSQIQATLVMVVLNLLSDHSLDEQYIGKYMEPSWAENPTIKVAFERFNRRLKEIEGIIDSRNGNSNLKNRHGAGIMPYELLKPFSGPGVTGKGVPYSISI

SEQ ID NO: 48986 - protein, 233 aa, Zea mays
  Clone ID: LIB3069-014-F11_FLI.pep
EEQYSDRTSKILAAHHAKSMGLVAENRNGDRKSRRSGRWGLLGNNFTVALMVQLRDPLRNYEPVGTPMFALIQVERVFVPPKPKIYSTVSDKGNSEQDDEEPKAEEVPDKALVTEEKAEELEDPVPQFKVTEVHVAGFKSEPEKTKPWGNQTQQQSGSRWLLAAGMGKGNKHPLMKSKAVVKPTKEAAGQAGDTLWSISSRVHGAGTRWSELAGNKSHSRNPNIMLQKDKRFR

SEQ ID NO: 48987 - protein, 294 aa, Zea mays
  Clone ID: 700550135_FLI.pep
FSVIVKQVLGLSPEEPVTARILEDFLAFMKGLISFPLYIPGTPYAKAVRARERISSTVKGIIKERRSAGSWNKQGDFLDVLLSSNELSDEEKVSFVLDSLLGGYETTSLLISMVVYFLGQSAQDLDLVKREHDSIRSNKGKEECLTSEDYKKMEYTQQVINEALRCGNIVKFVHRKALKDVKYKEYLIPSGWKVLPVFTAVHLNPSLHGDAQQFQPCRWEGTSQGTSKRFTPFGGGPRLCPGSELAKVEAAFFLHHLVLNYRWRIDGDDIPMAYPYVEFQRGLPIEIEPTSPES

SEQ ID NO: 48988 - protein, 99 aa, Zea mays
  Clone ID: 700550326_FLI.pep
HTKAYRNRALNRLSGLEALGTEQTKHIQHRRKTTATTNSGLLEDIIWLTERTKHPVHPDGVVAIVVAVSRMVDGVIPSAHDWPYLAVNAVVDVCRPHAL

SEQ ID NO: 48989 - protein, 354 aa, Zea mays
  Clone ID: 700552118_FLI.pep
ETMKATDNFSTVIGKGGFGTVFKAQFNDGSIAAVKRMDKVSKQAEEEFCREMELLARLHHRHLVTLKGFCIEKKERFLVYEYMANGSLKDHLHSSGRKPLSWQTRLQIATDVANALEYLHFFCNPPLCHRDIKSSNILLDEHFVAKVADFGLAHASRTGAISFEAVNTDIRGTPGYMDPEYVVTQELTEKSDIYSYGVLLLELVTGRRAIQDRTNLVEWAQSHLSSGAVSPELVDPRIRGAVDVDHLHVVVGIVQWCTHREGRQRPSVRQVLRMLSERLDPGNGSFGEGMEDAEGGFYPRSSRCGGAHHRNELVPYGGGDMRSLHSSSSTTRSSYCSRSMLLESGQTQSPPETQ

SEQ ID NO: 48990 - protein, 233 aa, Zea mays
  Clone ID: 700553168_FLI.pep
VDSAEGIAYLHHSATPHIIHRDVKASNVLLDADFQARVADFGFAKLVPDGATHVTTKVKGTLGYLAPEYAMLGKASESCDVFSFGVTLLELASGRRPVEKLSPTTSAKQTVTEWALPLAAPGGSARSPTPSSRADSSRRSSSGWCSSGSSAPRTGRSFGPRCLRSSSCSRESLLRSSTAWRTTACSSLVVARSRARTASARARGGAPEQMEGYRRQLIRARQFPQQASVWYWQ

SEQ ID NO: 48991 - protein, 260 aa, Glycine max
  Clone ID: 700554237_FLI.pep
QEPEVQVLDPSDGAVGVNDSASDNEVSDADETFASPFLVILQSYREALANNDEVKIAELESSLKSIEDEKIELEGKIASLSEELSIEKDRILRISADFDNFRKRTERDRLSLVTNAQGEVVESLLPVLDNFERAKTQIKVETEGEEKINNSYQSIYKQFNEILTSLGVEPVETVGTPFDPLLHEAIMREDSDEFEDGIIIQEFRKGFKLGDRLLRPSMVKVSAGPGPAKPEQEAPQEEQVNTEISEDSKENEGSTETESS

SEQ ID NO: 48992 - protein, 185 aa, Glycine max
  Clone ID: 700554268_FLI.pep
LTDSLCHRVCEMSDAPASPSHESGGEQSPRGSLSGAAREQDRYLPIANISRIMKKALPPNGKIAKDAKDTMQECVSEFISFITSEASEKCQKEKRKTINGDDLLWAMATLGFEDYIEPLKVYLARYREAEGDTKGSARSGDGSARPDQVGLAGQNAQLVHQGSLNYIGLQVQPQHLVMPSMQGHE

SEQ ID NO: 48993 - protein, 324 aa, Glycine max
  Clone ID: 700683896_FLI.pep
GPPANFPTILGHEAIGVVESVGEDVTEVAKGDMVVPIFIAECGECIDCKSSKSNLCSKFPFKLSPWMPRHATSRFVDLKGEIIHHFLSVSSFSEYTVVDIAHLTKIDPEVPPSKACLLSCGVSTGVGAAWRTAGVEPGSTVAIFGLGSIGLAVAEGARLCGATRIIGVDINSEKYEIGKKFGITDFVHSGECENKSASQVIIEMTDGGADYCFECVGNASLMHEAYASCRKGWGKTIVLGSDKPGSKLSLSCSEILVSGKSLVGCMFGGLKPKSHVPILIKRYLDKELNLDGFVTHEVEFKDINKAFDLMIKGQCLRCVIWMDK

SEQ ID NO: 48994 - protein, 591 aa, Glycine max
  Clone ID: 700726075_FLI.pep
KQNTFTVKRLKAVLHNLIPGLKASLSSSNQDFNEFSDVDGLYSEGLLIKLGWGLQDDVLKKIPFVSKIQESSQGLLKYDTPKIISKDKFAWLRDDEFARQAIAGVNPVNIEKLQVFPPVSKLDPEIYGPQESALKEEHILNQLNGMTVQEAINENKLFMIDYHDIYLPFLEGINALDGRKSYATRTIFFLTPRGTLKPVAIELSLPHAGPNSRSKRVVTPPVDATTNWMWQLAKAHVCSNDAGVHQLVNHWLRTHANLEPFILAAHRQLSAMHPIFKLLDPHMRYTLEINALARQSLINADGIIENCFTPGRYAMEISSAAYKNFWRFDMDSLPADLIRRGMAVPDPTQPHGLKLILEDYPYAADGILIWSAIEDWVRTYVNHYYPHSSLICNDKELQSWYSESINVGHADLRHESWWPTLNNSEDLVSILSTLIWNASAQHAALNFGQYPYGGYVPNRPPLMRRLIPEEGDPEYASFHADPQKYFLNALPSLLQATKFMAVVDTLSTHSPDEEYLGERQQPSIWSGDAEIVEAFYDFSAKVRQIEKVIDSRNLDRTLRNRCGAGVLPYELLAPSSEPGVTCRGVPNSVST

SEQ ID NO: 48995 - protein, 237 aa, Glycine max
  Clone ID: 700830312_FLI.pep
RGSSQSSLLFCDTDPLLGSSSSLWILSLMGSSDRLFNRQRSLHEILGGGQVADLILWRRKNLTVGILLVTLAVWVVFERSGYTLLSLVSNVLLLLIVILFLWAKSAAILNRPAPPLPQLHLSEEMANEVKTFIRTRVNDLLSVSQDIALGKDSRLFLKVAAYLWIISIIGGLTDFLTLAYTSLFIVLTVPAIYERYEDYIDKYILKGYRKLCLLHLKINEQYVNKVHNWILEKKKLS

SEQ ID NO: 48996 - protein, 470 aa, Glycine max
  Clone ID: 700834861_FLI.pep
SNNQEKGGYASATTCSSTFCGVFTPSTSVAIITTTNPLNTTREIAKQIADSKPLLAFTISDLLPKITAAAPSLPIVLMDNDGANNNNNNNNIVATLDEMAKKEPVAQRVKERVEQDDTATLLYSSGTTGPSKGVVSSHRNLIAMVQIVLGRFHMEENETFICTVPMFHIYGLVAFATGLLASGSTIVVLSKFEMHDMLSSIERFRATYLPLVPPILVAMLNNAAAIKGKYDITSLHSVLSGGAPLSKEVIEGFVAKYPNVTILQGYGLTESTGVGASTDSLEESRRYGTAGLLSPATQAMIVDPESGQSLPVNRTGELWLRGPTIMKGYFSNEEATTSTLDSKGWLRTGDICYIDNDGFIFIVDRLKELIKYKGYQVPPAELEALLLTHPAILDAAVIPYPDKEAGQHPMAYVVRKAGSSLSETQVMDFVAGQVAPYKRIRKVAFISSIPKNPSGKILRKDLIKLATSKL

SEQ ID NO: 48997 - protein, 244 aa, Glycine max
  Clone ID: 700875909_FLI.pep
LAEPMDVDDADNRSSWRSPREQLQHWQMNRRKLAFSTVGTPDYIAPEVLLKKGYGMECDWWSLGAIMYEMLVGYPPFYSDDPITTCRKIVHWRNHLRFPDDAQLTLEAKDLIYRLLCDVDHRLGTRGAIEIKAHPWFKGVDWDKLYEMEAAFKPQVNGELDTQNFMKFDEVDPPTAARTGSGSSRKMLTTKDLSFVGYTYKNFDAVKEGLRQSFGDSMQEYASKRAAEETSLQMLASSGDPMVP

SEQ ID NO: 48998 - protein, 196 aa, Glycine max
  Clone ID: 700865146_FLI.pep
CSQLQSYWLQVAVCRQFKPVTLELGGKSPFIVCKDADVDAAVEASHFALFFNQGQCCCAGSRTFVHESIYGEFVEKAKARALKRVVGDPFKNGVEQGPQIDSVQFEKIMKYIRSGVESGAQLESGGQRIGSKGYYIQPTVFSNVQDNMLIAKDEIFGPVQSILKFKDLEEVIRRANATSYGLAAGVLLKIWTLPTP

SEQ ID NO: 48999 - protein, 239 aa, Glycine max
  Clone ID: 700895010_FLI.pep
LFCSITSEDSSLLVYEYLPNGSLWDRLHTSRKMELDWETRYEIAVGAAKGLEYLHHGCEKPVIHRDVKSSNILLDEFLKPRIADFGLAKVIQANVVKDSSTHVIAGTHGYIAPEYGYTYKVNEKSDVYSFGVVLMELVTGKRPTEPEFGENKDIVSWVHNKARSKEGLRSAVDSRIPEMYTEEACKVLRTAVLCTGTLPALRPTMRAVVQKLEDAEPCKLVGIVITKDDSEKKIGVNDK

SEQ ID NO: 49000 - protein, 525 aa, Glycine max
  Clone ID: 700788247_FLI.pep
LSTEKEEEMEAEAEGEEGAKLSIYKAARSIKRRENSLYNALRSIYQDSIFVSEISLLWPQLPLLANLRCGLWYSRPAAFHSTCYFKSTDGHTNNCSFTTARLNLHVALLAGQKGGCIIVDSTRRGKRFPDSMSKTIPIWTSVLNRAIKDFRDSNGCPLEWDCSLHLPLWVSQTERASIERRLDEWTLLLKASGADIASLAACLRKPLRPLWISQKTVIWLNEVPHHESWDFTPIILLSASSSSSVVGASQHRTTSEFSWNYIPGAGDDEESWARGLTPAFFWKHVYDLINSAPEVCNQKVADIVEKSRVSRAYRGESAPQITVKPLKSASLSLHEEPSVACDFSNIKIDSESSEDFGISWLGSTNLAVGTAQAAADAADVDCILNCDQESISVCLPSAESYLHLPMVTSKFDRFSLLNNLPKAVSFAKFNLSLGKRLLVCCNNGEDISVCVCLAILMSLFDEKGMFDGGKSFSAAQVTKWDMRRRLVFVCKFATDARPSRGNLRQVFNFLIGGKFNHPLDTGRDE

SEQ ID NO: 49001 - protein, 275 aa, Glycine max
  Clone ID: 700870762_FLI.pep
KDSAPEDRLFVDKALKAEVETLGSIRHKNIVKLYCCFSSYDCSLLVYEYMPNGNLWDSLHKGWILLDWPTRYRIALGIAQGLAYLHHDLLLPIIHRDIKSTNILLDVDNQPKVADFGIAKVLQARGGKDSTTTVIAGTYGYLAPEFAYSSRATTKCDVYSYGVILMELLTGKKPVEAEFGENRNIVFWVSNKVEGKEGARPSEVLDPKLSCSFKEDMIKVLRIAIRCTYKAPTSRPTMKEVVQLLIEAEPRGSDSCKLSTNDVSNVPVIKKPYEL

SEQ ID NO: 49002 - protein, 304 aa, Glycine max
  Clone ID: 700895705_FLI.pep
INDCNEYDVEGGDDEPNFDVEDRKPENLHAPNLGMDRMMGRLPSFPIKGEAVTNLDFIRKRKISGDFNMIMDQKIYTCEQPQCPYSEIHHGFADRNSRDNHRLSCPYRGSASTDYGGSNFHVNEAKPVIFPQQSFVQPKPTTTPSVVNLVPSVIDLTGLGVPEDGKKMITDLMSIYDTNVQSNKNLSSSNHVSAENPNLPQPGIQQQHDNFFRSQGISMEGNFFEEANMSNNNHHMFAREEGQFDRFKALNAPPFETNHNNNNFHLMFGSPCDLASFDFKEDMQGGVVGMDALQKQPDISIWYQ

SEQ ID NO: 49003 - protein, 338 aa, Glycine max
  Clone ID: 700870650_FLI.pep
SVGDFNLDSKWLVDPKQLFIGPKIGEGAHAKVYEGKYKNQNVAVKIINKGETLEEISRREARFAREVAMLSRVQHKNLVKFIGACKEPVMVIVTELLLGGTLRKYLLNMRPKCLDMTVAIGFALDIARAMECLHSHGIIHRDLKPDNLILTDDHKAVKLADFGLAREESLTEMMTAETGTYRWMAPELYSTVTLRQGEKKHYNHKVDAYSFAIVLWELIHNKLPFEGMSNLQAAYAAAFKNTRPSAEDLPEDLALIVTSCWKEDPNDRPNFSQIIQMLLRYLSTVSPPEPVVPLRITSSENAVLPPESPGTSALMLGRDGSRETTTAKGFFFCFNQCY

SEQ ID NO: 49004 - protein, 287 aa, Glycine max
  Clone ID: 700866786_FLI.pep
FRRFSASLSWSTRMKIAVGAAKGLAFLHEAEKPVIYRDFKASNILLGSDYNAKLSDFGLAKDGPEGDDTHVSTRVMGTHGYAAPEYIMTGHLTAMSDVYSFGVVLLELLTGRRSVDKNRPPREQNLVEWARPMLNDSRKLSRIMDPRLEGQYSEMGTKKAAALAYQCLSHRPRSRPSMSTVVKTLEPLQDFDDIPIGTFVYTAPPDNNEMHSAKDQCETPKRRENNNNNGHLHRNGHRHHPLKSPKTPRPQSQSQSRSNDHKHRNGRGSGSNSPPSHGKIRQGVLAY

SEQ ID NO: 49005 - protein, 124 aa, Glycine max
  Clone ID: 700866962_FLI.pep
LDRDIALAEIEKEKRLSNVKAWEESEKSKAENKAQKQLSAVAAWENSKKAALEAQLRKIEEQLEKKKAEYGEKMKNKIALVHKQAEEKRAMVEAKRGEEILKAEEIAAKHRATGTSPKKAFGCF

SEQ ID NO: 49006 - protein, 212 aa, Glycine max
  Clone ID: 700849791_FLI.pep
STEHKVIYRDFKTSNILLDTNYNAKLSDFGLARDGPTGDKSHVSTRVMGTRGYAAPEYLATGHLTTKSDVYSFGVVLLEMISGRRAIDKNQPTGEHNLVEWAKPYLSNKRRVFRVMDPRLEGQYSQNRAQAAAALAMQCFSVEPKCRPNMDEVVKALEELQESKNMQRKGADHKQHHVRNSGPGRTNGGDGGSDAPRKASAYPRPSASLLRG

SEQ ID NO: 49007 - protein, 434 aa, Glycine max
  Clone ID: 700851195_FLI.pep
PLQQKSPQPPPRTATILGKYQLTRFLGRGSFAKVYQGRSLVDGSAVAVKIIDKSKTVDAGMEPRIIREIDAMRRLHHHPNILKIHEVLATKTKIHLVVELAAGGELFAKISRRGKLPESTARRYFQQLVSALRFCHRNGVAHRDLKPQNLLLDGDGNLKVSDFGLSALPEQLKNGLLHTACGTPAYTAPEILRRSGGYDGSKADAWSCGLILFVFLAGHLPFDDTNIPAMCKKISRRDYQFPEWISKPARFVIHKLLDPNPETRISLESLFGNAWFKKSLNPETAEENALGLSYVKSSYNYEGSKKSSGVTAFDIISMSSGLDLTRLFETTSDLGSKREKRFSSSARVEVVEEKVKEVGGVLGFKIEVGKSNGAIALVKGKVALVFEVLEIVPHELLFVAVKVVEGALEFEEHHWGDWKDALQDLVLSWHNQES

SEQ ID NO: 49008 - protein, 371 aa, Glycine max
  Clone ID: 700852258_FLI.pep
GNGVAKAVKNINDKISEALIGMDPTLQSQIDQAMIDLDKTEKKGELGANAILAVSIAACKAGAAEKEVPLYKHIADLSGKTSPTLPVPAFTVISGGKHAGSNLAIQEIMILPIGASKFEEALRMGTETYHHLKAVITEKYGAHNCNVGEDGGFAPNISSFREALDLVKEAISRAGYDEKIKIALDVAATDFCIGKRYDLDFQSPQKSGQNFKSAEDMIDLYKELCSEYPIVSIEDPFDKEDWEHIKHISSLGICQVVGDDLLMSNAKRIERAITESACNALLLKVNQVGTITEVIEVVKLAKEAHWGVVTSHRCGETIDSFIADLSVGLASGVIKAGAPCRGERLEKYNQLLRIEEELGDQAVYAGEDWRQ

SEQ ID NO: 49009 - protein, 164 aa, Glycine max
  Clone ID: 700868076_FLI.pep
LVEWARSALNDSRKLSRIMDPRLEGQYSEVGARKAAALAYQCLSHRPRSRPLMSTVVNVLEPLQDFDDVPIGPFVYTVPAEQQQYNEVAKESETPKERKRENGHHHNRRHHHHRHNGHRHHPLKSPKTPMPSDQSQNDEHRNGRKSGSNSPDTFNASEAQRSMG

SEQ ID NO: 49010 - protein, 204 aa, Glycine max
  Clone ID: 700867974_FLI.pep
QIIKAKYGQDACNVGDEGGFAPSVQDNREGFVLLVDAIEKAGYTGKIKIGMDVAASEFYTKDGKYDLNFMKQPNDGAHVHSTQSLGQLYKNYVKEFPIVSIKDPFDQDDWGSWASLLASVDIQLVDDLLVTNPKRIAEAIKKKACNGLLLKVNQIGTVTESIQAALDSKAAGWGVVVSHRSGETEDNFIADLSVGLASGQVLYP

SEQ ID NO: 49011 - protein, 216 aa, Glycine max
  Clone ID: 700868620_FLI.pep
IAAVFVEPIQGEGGIYSATKEFLQSLHSACDEAGALLVFDEVQCGLGRSGFLWAHEAFGVFPDMMTLAKPLAGGLPIGAVLVTERVASSINYGDHGSTFAGNPLVCSAALAVFDKISKPDFLSSVSKKGLYFKELLKQKLGGNQHVKEIRGVGLIIGIDLDVPASPFVDACRNSGLLVLTAGKGNVVRLVPPLIITEKELELAADILCKTLPVLDN

SEQ ID NO: 49012 - protein, 179 aa, Glycine max
  Clone ID: 700850020_FLI.pep
IIKSKDGRSKGYAFVTMASGEEAQAAVDKFDSYELSGRIIRVELAKRFKKPPSPPPPPGPRPGETRHVIYASNLAWKARSTHLRQLFAENFKTPSSARVVFDSPSGRSAGYGFVSFLTKEDAEAAISTVDGKELMGRPLRLKFSEKKDKAGREKDEDQDKDAGSEEDEDEGSDARPEES

SEQ ID NO: 49013 - protein, 317 aa, Glycine max
  Clone ID: 700850069_FLI.pep
KYPFFFFYRNLHLVSFVGYCNENNEMILVYDFMARGTLRDHLYNTDNPPLTWKQRLQICIGAARGLHYLHTGAKHTIIHRDVKTTNILLDDKWVAKVSDFGLSRIGPTGNAKAHVSTVVKGSIGYLDPEYYKRQRLTEKSDVYSFGVVLFELLCARPPLIRTAEKKQVSLADWARHCCQNGTIGQIVDPTLKGRMAPECLRKFCEVAVSCLLDDGTLRPSMNDVVWMLEFALQLQESAEQRENTNIVDNEINERREEEASDDLFSTGTSVGQVSDFNKSSGVVSVSTDSEELSSSYKESDKLMSGTVFSEIVDPKPR

SEQ ID NO: 49014 - protein, 481 aa, Glycine max
  Clone ID: 700850388_FLI.pep
KATLESAARRLGGGKEAMKQLLKLILEWVQTSHLQNKRRKENNGSSISSVLQAQFQDPSGQNTQSGSFAPESNTCFNNQTPWLSSQTFATDQAPLMVPPQQFPQPMVGYVGDPYTSGAASNNISATHNHNNSNPYQPGAEQYHMLESAHSWPHSLFNVASNYSQSFGDNNGLNPHGGFGGGGYGNNQYPYQFFHGPGDRLMRLGPSATKEARKKRMARQRRFLSHHRHHSGNHQNQGSDPHARLGGDNCNTALAAPHHANPSANWMYWQAMIGGAAGPLAPVIPAEPPVVQPVVDRSAMQTQNCHQNRVASDRRQGWKPEKNLRFLLQKVLKQSDVGSLGRIVLPKKEAETHLPELEARDGISITMEDIGTSRVWNMRYRYWPNNKSRMYLLENTGDFVRANGLQEGDFIVIYSDVKCGKYMIRGVKVRQQGVKPETKKAGKSQKNQHGTGTNASSTAGTAANNGTSSSPKTKSEKSSKLI

SEQ ID NO: 49015 - protein, 81 aa, Glycine max
  Clone ID: 700684627_FLI.pep
WNKGGQYCRSSEMVHSTFLTYFVVFSAVCEGPWFKTLFLWQGVYVGAKFDWLQLSCNWLLRVAKPILILLPCKLSLSSHSK

SEQ ID NO: 49016 - protein, 189 aa, Zea mays
  Clone ID: LIB3078-016-F12_FLI.pep
YQEYVKGISSTGMQSNCGFEGQVNACWTHKMTTKELDTIRFAGFLVSVIHGRYDIIAQLCHAKRLAERLLPVARMVVPHGAHLVSHERPDEVNNALMDLIKATKSAIKPEEWSAQPENTSETGALISARPITVTVRTDAGVDATAAVYNLLGKLQLSFLYLIGVIVMGFELMRNIVRVMKPVRVAAIES

SEQ ID NO: 49017 - protein, 173 aa, Glycine max
  Clone ID: 700808438_FLI.pep
FDSFSSASAGWLAMSAPMIIDPMMISAPETQSAAASILVAQSEVEFAVCDCCGLTEECTPAYIERIRERYFGKWVCGLCAEAVKDEIVRSERLVCTEEAMAKHMNFCKKFKASGPPPNPTVHLISAMRQILRRTLDSPRVRSTPNSPTKTLTKIHGSVLTRSESCFPTLSEGL

SEQ ID NO: 49018 - protein, 215 aa, Zea mays
  Clone ID: LIB3069-050-E1_FLI.pep
KGQQLKYSREIAYFVSIDLSGNYLTGEIPLGITSLDALMNLNLSSNQLGGKIPNKIGAMMSLASLDLSINKLSGEIPWSLSNLTSLSYMNLSYNNLSGRIPSGRQLDTLNVDNPSLCGPPLQNNCSGNGSFMPGYHRSNRQKFEPASFYFSLVLGLVVGLWMVFCALLFINTWRVAYLGLLDKVYDKIYVFVAVKWASMTMSAAAAEREHTTNTM

SEQ ID NO: 49019 - protein, 690 aa, Glycine max
  Clone ID: 700870615_FLI.pep
NLSGEIPVEIGEFKRLEALSLYRNRLIGPIPQKVGSWAEFAYIDVSENFLTGTIPPDMCKKGAMWALLVLQNKLSGEIPATYGDCLSLKRFRVSNNSLSGAVPASVWGLPNVEIIDIELNQLSGSVSWNIKNAKTLASIFARQNRLSGEIPEEISKATSLVNVDLSENQISGNIPEGIGELKQLGSLHLQSNKLSGSIPESLGSCNSLNDVDLSRNSLSGEIPSSLGSFPALNSLNLSANKLSGEIPKSLAFLRLSLFDLSYNRLTGPIPQALTLEAYNGSLSGNPGLCSVDANNSFPRCPASSGMSKDMRALIICFVVASILLLSCLGVYLQLKRRKEEGEKYGERSLKKETWDVKSFHVLSFSEGEILDSIKQENLIGKGGSGNVYRVTLSNGKELAVKHIWNTDVPARRKSSWSSTPMLGNKFAAGKSKEFDAEVQALSSIRHVNVVKLYCSITSEDSSLLVYEYLPNGSLWDRLHTSRKMELDWETRYEIAVGAAKGLEYLHHGCERPVIHRDVKSSNILLDEFLKPRIADFGLAKLVQANVGKDSSTRVIAGTHGYIAPEYGYTYKVNEKSDVYSFGVVLMELVTGKRPIEPEFGENKDIVSWVHNKARSKEGLRSAVDSRIPEMYTEETCKVLRTAVLCTGTLPALRPTMRAVVQKLEDAEPCKLVGIVISKDGSEKKIGVNDK

SEQ ID NO: 49020 - protein, 152 aa, Glycine max
  Clone ID: 700894831_FLI.pep
IRMNYYPPCPQPERVIGINPHSDSGALTILLQVNEVEGLQIRKDGKWIPVKPLSNAFVINVGDMLEILTNGIYRSIEHRGIVNSEKERISIAMFHRPQMSRVIGPAPSLVTPERPALFKRIGVADYLNGFLKRELKGKSYMDVIRIQNEIGK

SEQ ID NO: 49021 - protein, 246 aa, Glycine max
  Clone ID: 700870186_FLI.pep
LNLGFIILFCSAMYVVFQDSYAIRSFERGISAQNAGHFAWEIVPVEVSTGRGRASTIVDKDEGLGKFDAAKLRKLRPSFKEVGGSVTAGNASSISDGAAALVLVSEEKARELGLHVIAKIKGYGDAAKAPELFTTAPSLAIPKAISNAGLDASQIDYYEINEAFSVVALANQKLLALNPEKVNVYGGAVSLGHPLGCSGARILVTLLGVLRQKRGKYGVAAICNGGGGASALVLELMPVAVGRSLL

SEQ ID NO: 49022 - protein, 155 aa, Glycine max
  Clone ID: 700869580_FLI.pep
SNVCCALCNTITSVPPPGMEMSQLYCGGCRTLLMYTRGATSVRCSCCHTVNLVPPASNQVAHVHCGNCRTTLMYPYGAPSVKCALCHFITNTNNGRLPIPVHRPNGTTNAGTLPTTSTSMPQSQSQTVVVENPMSVDSSGKLVSNVVVGVTTDKK

SEQ ID NO: 49023 - protein, 234 aa, Glycine max
  Clone ID: 700683380_FLI.pep
RTAADEGNRHISTRVMGTFGYVAPEYAMTGHLLVKSDVYSYGVVLLELSTGRKPVDMSQPPGQENLVAWARPLLSSEEGLEAMIDPSLGPDVPSDSVAKVAAIASMCVQPEVSDRPFMGEVVQALKLVCNECDEARETGSSSSSVDLSHSRQLSDNLQGQFSATNYDSGVDIENGLLASELFSSSARYGRRVSGSFRRHSYSGPLNTGRSKRLWQIIRKLSGGSVSEHGTMFKL

SEQ ID NO: 49024 - protein, 283 aa, Glycine max
  Clone ID: 700684642_FLI.pep
ELGKNYQEAIEDITKRMGAGMAKFICKEVETIDDYDEYCHYVAGLVGLGLSKLFHASGSEDLAPDDLSNSMGLFLQKTNIIRDYLEDINEIPKSRMFWPRQIWSKYVNKLEDLKYEENSVKAVQCLNDMVTNALMHAEDCLTYMAALRDPPIFRFCAIPQIMAIGTLALCYNNIEVFRGVVKMRRGLTAKVIDRTTTMADVYGAFFDFASMLESKVDKNDPNATKALSRLEAIQKTCRESGLLSKRKSYIVKDESGYGSTMIIVLVIMVSIIFSYLSASHQNN

SEQ ID NO: 49025 - protein, 418 aa, Glycine max
  Clone ID: 700685876_FLI.pep
LDVSNNHLVGKIPSLIKNLSGLNELCLSNNHFEGSIPLELGELEYLTSLDLSQNNFIGLVPSFTNSSVAFIHLNNNRLSGLSKRMFHGNSSLVMLDLSYNEISNNLKDLIHNLSYKRLNILLLKGNHFMGDIPKQLCQLIDLNMLDLSHNNFSGVIPKCLGKMPFENKNPKDLLARFSIFDPDLHIHAAALSPSNVQEKVNFTTKERTDTYIGRVLVYMSGIDLSHNKLKGNIPFELGYLTKIRALNLSHNDLTGQIPVTFSLLAQIESLDLSFNMLNSQIPPQLSMLTSLEVFSVAHNNLSGPTPDFKGQFSTFDENSYEGNPFLCGLPLPKSCNPPPTIIPNDSNTDGDNDSLLDMYVFCVSFAVSCTSALLVTAAALYINPYWRQAWFYYMELVSMNCYYFIKDNLSKVFKIGNM

SEQ ID NO: 49026 - protein, 159 aa, Glycine max
  Clone ID: 700686385_FLI.pep
NALVRGYTAPEYALHGQLSKKADTYSYGIVVLEIISGQKSTDVRVDDDGEEESLLRQAWKLYERGMHLELVDETLNDNYDAEEVKKIIEIALLCTQASAAMRPAMSEVVVLLSSNALEHMRPSMPIFIESKLKPHRDIFASTSSSTSNATASSSIVPAR

SEQ ID NO: 49027 - protein, 176 aa, Glycine max
  Clone ID: 700849139_FLI.pep
CSSILHRRLRIMGLQNQLNDVSSGSIPLLVLAQIATCVNYLRSMLFALLQTLGLCRFHSDQIVDERFLAAVGSGLAGLIMLSDQLTLSSQFFHHHHAGAGGHDHHPCVVCQATFEDGDQVRMLPCRHVFHRRCFDGWLHHYKFNCPLCRSPLFSDERVAVTERRLGQQLISWFSLH

SEQ ID NO: 49028 - protein, 392 aa, Glycine max
  Clone ID: 700726516_FLI.pep
VGQLDAAQDSLKWITDYLINAHPSENVLYIQVGDPVADHKCWEKPEAITEERPLIQVNASCPGSDVAAETAAAMASASLVFKKTDPTYSSTLLKHAKQLFTFADKNRGSYSENIPEVQTYYNSTGYGDELLWAASWLYHATGDDSYLQFVTGQDGEDYAQWGSPTWFSWDNKLAGTQVLLSRLSFFKAKDISNSYSSGLHSYRKTAEAVMCGLLPDSPTATKSRTDDGLIWVSQWNSLQHPVASAFLAAVYSDYMLTSQTPKLKCGSDSFTPSDLRDFAKSQADYVLGKNPMHMSFLVGYGDKYPQFVHHRGASIPADAKTGCKDGFQWLESSDPNPNVATGALVGGPFLNETFIDSRNNSMQTEPSTYNSAVIVGLLSSLVTTSSAVQSFT

SEQ ID NO: 49029 - protein, 318 aa, Glycine max
  Clone ID: 700852795_FLI.pep
RNMESEREIMMIPCFDFGKALEEGSEEWKEMSKKVREACESHGCFLLVCDEMIPKGVREEFFSNMEALFDLPEERKMKHISPKPYSSYSGKSPVIPLSETFGIDDVPLSASAEAFTNLMWPQGNPPFCETLKIMSSKMLKLSSLILKMIVEDYGIQQHYISDVEKMKSSSNSRLIKYKIPENNNDSNTGLVSHTDKNALTIICQNEVQGLQVLSKTDNWIELEIPQNGFVVIVGDILKAWSNGRLHAATHRVMMSGDKERYSFGLFTMPKEEMDIEVPIELVDEKIHPLRYHSFKYGEYISYFVSNLKENALEVFAGL

SEQ ID NO: 49030 - protein, 221 aa, Glycine max
  Clone ID: 700853090_FLI.pep
FFDTRQAFLSLCQGNHYQYDTLRRAKHSSMMVLYHLHNPTAPAFVTTCNICYLDIETGQGWRCEVCPEYDVCNACYQKDGGIDHPHKLTNHPSMVDRDAQNTEAREVRVVQLRKMLDLLVHASQCRSAHCQYPNCRKVKGLFRHGMHCKTRASGGCVLCKKMWYLLQLHARACKESECHVPRCRDLKEHLRRLQQQSDSRRRAAVMEMMRQRAAEVANNAG

SEQ ID NO: 49031 - protein, 217 aa, Glycine max
  Clone ID: 700854478_FLI.pep
KQQWEFSKVPGEAFHVVAYDFGIKHNILRRLASYGCKITVVPCTWSASETLKMKPDGVLFSNGPGDPSAVPYAVETVKNIIGKVPVFGICMGHQLLGQALGGKTFKMKFGHHGGNHPVRNLRSGHVEISAQNHNYAVDPATLPEGVEVTHINLNDGSCAGLAFPAQQLMSLQYHPEASPGPHDSDYAFREFVELMKQGKNRTKESLHQLSAAQALDA

SEQ ID NO: 49032 - protein, 337 aa, Glycine max
  Clone ID: 700855670_FLI.pep
NTHAVVEPFIIATNRHLSVVHPIYKLLHPHYRDTMNINGLARLSLVNDGGVIEQTFLWGRYSVEMSAVVYKDWVFTDQALPADLIKRGMAIEDPSCPHGIRLVIEDYPYAVDGLEIWDAIKTWVHEYVFLYYKSDDTLREDPELQACWKELVEVGHGDKKNEPWWPKMQTREELVEACAIIIWTASALHAAVNFGQYPYGGLILNRPTLSRRFMPEKGSAEYEELRKNPQKAYLKTITPKFQTLIDLSVIEILSRHASDEVYLGERDNPNWTSDTRALEAFKRFGNKLAQIENKLSERNNDEKLRNRCGPVQMPYTLLLPSSKEGLTFRGIPNSISI

SEQ ID NO: 49033 - protein, 45 aa, Zea mays
  Clone ID: 700580159_FLI.pep
THPIPLNPCGLEANRTRPKCERLFFRTPCIYTRYKRLYELNLGIN

SEQ ID NO: 49034 - protein, 176 aa, Glycine max
  Clone ID: 700870207_FLI.pep
ENLGLTKGYIKKALNGGDGENAFFGTKVSHYPPCPHPELVKGLRAHTDAGGVILLFQDDKVGGLQMLKEGQWIDVQPLPNAIVINTGDQIEVLSNGRYKSCWHRVLATPDGNRRSIASFYNPSFKATICPAPQLVEKEDQQVDETYPKFVFGDYMSVYAEQKFLPKEPRFQAVRAM

SEQ ID NO: 49035 - protein, 438 aa, Glycine max
  Clone ID: 700893829_FLI.pep
VSGHQRRKMGDVADKLAYFQAITGLEDPELCTEILAAHNWDLELAISTFTSSSNPNNPPPPPALAWKLITLPVSVISASLGLVSAAIGLGLWAAGGVLSYSLGLVGLGSPSAPLVSVTAAASEAMDFVAAFERDYGSGGPNFVGEGFMDALQRSRNSFKLLFVYLHSPDHPDTPSFCQRTLCSETIAPFVNENFVCWGGSIRASEGFKMSNSLKASRFPFCALVMAATNQRIALLQQVEGPKSSEELLVTLQRVLEESSPVLAAARLDAEERRNNMRLREEQDAAYRAALEADQARERQRREEEEHLAWEAAEAERKHKEEEAARERAAQEAAEKQAALAKIRQEKAQSLGEEPEKGPNVTQVLVRFPTGERKERRFYSTATIQSLYDYVDSLGCLEAESYSLVSNFPRTVYGQEKLTLSLKEAGLHPQASLFVELSS

SEQ ID NO: 49036 - protein, 259 aa, Glycine max
  Clone ID: 700870555_FLI.pep
SNHETNLLVYEYMPNGSLGEVLHGKKGGHLHWYTRYKIAVEASKGPCYLHHDCSPLIVHRDVKSNNILLDSNFEAHVADFGLAKFLQDSGASECMSAIAGSYGYIAPEYAYTLKVDEKSDVYSFGVVLLELVTGRKPVGEFGDGVDIVQWVRKMTDSNKEGVLKVLDPRLPSVPLHEVMHVFYVAMLCVEEQAVERPTMREVVQILTELPKPPSSKQGDLTITESSLSSSNSLESPTTASKEPKDQHPPQSPPTDLLSI

SEQ ID NO: 49037 - protein, 55 aa, Glycine max
  Clone ID: 700865834_FLI.pep
FRIILALFYSWISSSYTNIISCCGSIIQFADKLLSSTRASTCPSTPVTHRTLTLE

SEQ ID NO: 49038 - protein, 269 aa, Glycine max
  Clone ID: 700847843_FLI.pep
GGCYAKCIDLSREKEPDIWNAIRFGTVLENVVFDEHDREVDYSDKSVTENTRAAYPIEYIPNAKLPCVGPHPKNVILLACDAFGVLPPVSKLNLAQTMYHFISGYTALVAGTEEGIKEPQATFSACFGAAFIMLHPTKYAAMLAEKMQKHGATGWLVNTGWSAGSYGYGSRIKLQYTRKIIDAIHSGSLLNAEYKKTEIFGLEIPTEVEGVPSEILDPVNTWSNKKGYKETLLKLAGLFKNNFETFTNYKIGKGNNNLTEEILAAGPIF

SEQ ID NO: 49039 - protein, 312 aa, Glycine max
  Clone ID: 700875134_FLI.pep
NTAKVGYGWLKKMTPVNSAFAWQSYNEEPASSSQADSIAAYALWEQVNVTRDSSDYLWYMTDVNVNANEGFLKNGQSPLLTVMSAGHVLHVFINGQLAGTVWGGLGNPKLTFSDNVKLRAGNNKLSLLSVAVGLPNVGVHFETWNAGVLGPVTLKGLNEGTRDLSRQKWSYKVGLKGESLSLHTESGSSSVEWIQGSLVAKKQPLTWYKTTFSAPAGNDPLALDLGSMGKGEVWVNGRSIGRHWPGYIAHGSCNACNYAGYYTDTKCRTNCGQPSQRWYHVPRSWLSSGGNSLVVFEEWGGDPNGIALVKRT

SEQ ID NO: 49040 - protein, 294 aa, Glycine max
  Clone ID: 700876189_FLI.pep
VEGRSGRKMSQQQRSMPAPFLTKSYLLVDDPATDDVVSWSEGGNTFVVWKHADFANDLLPKYFKHNNFSSFVRQLNTYGFRKTVPDKWEFANEYFKRGQKDLLAEIKRRKTVSSVSGKSGSGGNISASHSGGDDMGSTSTGSMEAATATVTTTQCADLSGENEKLKKDNEKLSDELARTKKHCDDLVAFLRDSLNVGPDVIDCIIRQGTCGSSNDDAVRFDATENLNNHNHDDDENAVGECEPEQPKGDNGESLKLFGVWLKGQNGKENSIGSCRKRGRQDPIAATAKELKTLV

SEQ ID NO: 49041 - protein, 366 aa, Glycine max
  Clone ID: 700874651_FLI.pep
VIEDRNIAISIQDLRKVTNNFASENELGHGGFGTVYKGELENGKKIAVKRMECGAVSSRALEEFQAEIAVLSKVRHRHLVSLLGYSIEGNERILVYEYMPMGALSRHLFHWKNLKLEPLLLSQRLTIALDVARAMEYLHGLARQTFIHRDLKSSNILLGDDFHAKVSDFGLVKLAPDGQKSVATKLAGTFGYLAPEYAVMGKITTKVDVFSYGVVLMELLTGLMALDESRSEESRYLAEWFWQIKSSKETLMAAIDPALEASEEAFESISIVAELAGHCTSRDASHRPDMSHAVSVLSALVEKWRPVDEEFDYGSGIDFSQPLPQLLKDWKESEGKESSYTSAHSEGSIPARPTGFADSFTSADAR

SEQ ID NO: 49042 - protein, 147 aa, Glycine max
  Clone ID: 700899294_FLI.pep
IMGAIERSRLSIVVFSENYGYSTWCLDELSKIIECVKTRNQMVWPIFYNVEKSDVCNETKSYGDAMTAQEKRFGKDSGKVHKWRSALSEIANLEGEHLRENQYQYEFIERIVEKAINIPSPCSNDSYEEESRVSKCTHWEIGSCVVS

SEQ ID NO: 49043 - protein, 178 aa, Zea mays
  Clone ID: 700583118_FLI.pep
LKGRYPWMRGSSYDPCTERHSTVYYNRPEVQRALHANVTAGAGAMNYTWATCSDTINNNWGDSPKSVLHIYKELIAAGLRIWVFSGDTDAVVPLTATRYSIDALNLPTVVSWYPWYDAKEQKQQQEVGGWSQVYEGLTLVTVRGAGHEVPLHRPRQALILFRHFLRGKPMPPKNGTVV

SEQ ID NO: 49044 - protein, 359 aa, Zea mays
  Clone ID: 700577752_FLI.pep
RCRSSTSSPSWRRAASASPWSRPRQTFSFSPLSSPHTPPPSAPLPSRSPPTHPCPRGSRIPRVAARCSSPPSSTPWPSCVGPSSRGLKRSPIPSVRQNFMWNLHDSWGFVFNSFRALEGRYLEQPLEDLGFKRAWAVGPVAPEADAAVARGGQATVELADLSAWLDAFPEGSVVYVCFGSQAVLSPAVAAALAEALERSAVPFMWAVGDAVVPDGFEARAAASGRGSVVRGWAPQVALLRHPAVGWFVTHCGWNSTLEAVAAGVPMLAWPLTGDQFFDARLLVDEARVAVRACKGGLGFVPDAGELASVLADATGEKGHDVRTRAKALAAEAARAMKPGGTSYADLELLVQEIRNRKLS

SEQ ID NO: 49045 - protein, 364 aa, Zea mays
  Clone ID: LIB3068-009-C10_FLI.pep
AGRFSAAWQLYKAQEELINVAKLYGVKLTMFHGRGGTVGRGGGPTHLAILSQPPETIHGSLRVTVQGEVIEQSFGEEHLCFRTLQRFTAATLEHGMHPPISPKPEWRALMDEMAIVATKEYRSIVFEEPRFVEYFRLATPEMEYGRMNIGSRPSKRKPSAGIESLRAIPWIFAWTQTRFHLPVWLGFGAAFKHVLDKDIRNLQTLQEMYNQWPFFRVTIDLVEMVFAKGDPGIAALYDKLLVSEDLWPLGARLRANYEETKQLLLQVAGHKDLLEGDPYLKQRLRIRDSYTTALNVCQAYTLKRIRDPGFQVKPRPHLSKDIMDMGKPASELVKLNTTSEYAPGLEDTLILTMKGIAAGMQNTG

SEQ ID NO: 49046 - protein, 87 aa, Zea mays
  Clone ID: LIB143-060-H12_FLI.pep
IHHKCHYIENQVASPGNMEPATAIVGQTVCDLASVMRSCQVADDIREDASMVEVRQLHLSVKANDASERFPNLSEIRPGQDVTVTTA

SEQ ID NO: 49047 - protein, 100 aa, Zea mays
  Clone ID: LIB148-042-E3_FLI.pep
PGRHVWPQLVESSSSSSLPDRPSTPWGPGAAAGPLGPSAGASATGASADFASAIGATTMATKRRAAMTKTTLARAMGTVSSFLGLVGSCLGEFNAWCLCA

SEQ ID NO: 49048 - protein, 110 aa, Zea mays
  Clone ID: LIB148-044-A3_FLI.pep
ATYTSNKNVLVMMIFLPSSSFLWSVFCSYYNKSTSDLQQMPEDLATSSLKRTDVFVWQISMYHPIVSTCLSVPNQGEVGHSKTKFHLDCLLLGSCFTIWSLPSFTSALLD

SEQ ID NO: 49049 - protein, 95 aa, Zea mays
  Clone ID: LIB189-009-C11_FLI.pep
IDGALVVNVGDFLEILSNGKFTSVEHRAVVHPTRERMSAALFLYPRQNMRVGPLPEFVNGGKERYGSTDYEEFMKHYFATKLDGRKHLDRLKLEQ

SEQ ID NO: 49050 - protein, 138 aa, Zea mays
  Clone ID: LIB143-048-D3_FLI.pep
TVVSALLETTPTKSHCIPDLGKYRSSNTSRSCELKSKDPGYFLPVFLPPLAQAPPAACAAFLAAFSCSALASRSRRCSGVSPSSRPLAAGRRACALCRSRSLWSPRVIVTTSELRREERLRTREEASGSSGKREADSP

SEQ ID NO: 49051 - protein, 228 aa, Zea mays
  Clone ID: LIB143-066-C8_FLI.pep
DGAELLATYSVSAMSPFGAVITPETLKYMSKYQGREITQVDCAREAMRLIHAEDKNLKAEDSAWELKKKFGNGVSTMVLVYNATGASLSLVDDGKDWMGSVYSSPIPDTFHNGQWIAFLHVKPGSLAQGSQAARVFRGRDVDGRTRDFVVAWYIPWDNIPTRAYTEIGSENYFKTRWSSVKTSLGHSRRVTRAKDENCASTVSIGGYTTAFCIAVLQHQFQPLPEERE

SEQ ID NO: 49052 - protein, 106 aa, Zea mays
  Clone ID: LIB3059-002-G4_FLI.pep
HRKHLDSSIDFVGRLVFGFEKGPSMLEAVRTSGQPLVDDWDCLKRMVRIFESQCGSLTQYGMKYMRAFANICNSGISEMKMRESSISACSSYNSARWSPMARGHSA

SEQ ID NO: 49053 - protein, 165 aa, Zea mays
  Clone ID: LIB3059-041-D3_FLI.pep
SLITLKKARMTFFLERKVQQAAAAAAPDGSYSCGHRIQSSNSGSTLKVMMLVLRSHLSTSMACAALAFAKAESFVFTFFLPTLNWPPLRFFSAPSIFILDFLACSFLACFSLASFSRWRSNSYCFFLLARLFFFDMFPPLLSPPTGTTAAKGRRRREQTLAKHNT

SEQ ID NO: 49054 - protein, 66 aa, Zea mays
  Clone ID: LIB3060-025-G11_FLI.pep
PRRVHPRRHAGLRRRRPHPRRRHRARAQEHRRPRPDHRLDPYVAVVKIRLSSLDRAAGRQVQVVTL

SEQ ID NO: 49055 - protein, 75 aa, Zea mays
  Clone ID: LIB3060-052-C7_FLI.pep
YLQLLLLLPASIIHGGARGGTRTAAANQALALLTFLPAPEAAARAGLGLGCAGAGATFLARFARTLRASLDGAEA

SEQ ID NO: 49056 - protein, 411 aa, Zea mays
  Clone ID: LIB3150-036-B1_FLI.pep
RNSNKRRKKRGGRLAIMAPLGFASLGPKELEAFPVHDGRARLVVLSLGNPHLLEGAERCQDGSSNPDTVLPFWRSNHLDLHAARSQGGDFLAHPVSNAREHSGTTGEDDVAIQILPNIHVALHDGVVGGLVDTSSFHPNEGWLEEDLRAAEALSTNGDDLSVRQLVALLNRRAGLGSLHLLVVVQGNVGELLLHVPDNFPLSSGGEGVAAFSQDLHEVVGEVAASQVETKDGVGEGVSLVDGDSVADTISRVEHDTCGTTTGIQRQDGLDGDVHSGGVEGLEHDLGHLLTVSLWVQGRLSEEDGVFLGSHTELVVEGVMPDLLHVVPVADDSVLDGVLEGQDTPLGLRLVADVGILLPHPHHHTGVARAPNDAGEDGPRGVVAGEPSLDHASSVVADEGLDILSVSHFLPE

SEQ ID NO: 49057 - protein, 269 aa, Zea mays
  Clone ID: LIB3591-119-E1_FLI.pep
AGEGAGGVVVGVAVRPEARGLEQLRVGGGAAGAGAGVGAAAAVLGPAEGVARAAAAGAALGAQLRGAPLAQVRRAPGRGARRRGAAAAAPCGLHHDRQVVAVHEADVVEVVAAGGVQRELGQRRRRRRVPPVALQGPRAAVARGARHLPASGVLRAARARPDPAGPPRRRRHRARRARGQREARRVQPRAPRVRLDARPHRRRAPVHERECRGPPSSGRCADQNRNYEANSCCNSHGHGLEAMQLYVVPGNGDWHGQEGKRCIMSAQYR

SEQ ID NO: 49058 - protein, 408 aa, Zea mays
  Clone ID: LIB3332-043-E6_FLI.pep
SAGRRKMTVTPRITVSDGRLTVRGRTVLTGVPDNVSAAHAAGAGLVDGAFVGAHAGEAKSHHVFTFGTLRDCRFLCLFRFKLWWMTQRMGVSGRDVPLETQFMLVEVPASDGDGDGDDAPAYVVMLPLLEGQFRAALQGNDRDELQICIESGDKEVQTDQAAHMVYLHAGDNPFDTVTAAVKAVEKHLQTFHHRDKKKLPSFLDWFGWCTWDAFYTDVTADGVKHGLQSLSKGGAPPRFLIIDDGWQQIASENKPDPNVAVQEGAQFASRLTGIKENTKFQTKPDGDGDGEQAAGGLKRLVAETKDAHGVKQVYVWHAMAGYWGGVTPTAGTAMERYEPALAYPVQSPGVTGNQPDIVMDSLSVLGLGLVHPRRVRDFYGELHAYLASCGVDGVKVDVQNIIETLGAG

SEQ ID NO: 49059 - protein, 233 aa, Zea mays
  Clone ID: LIB143-022-B1_FLI.pep
PRGRSAPAAGHRCSPARPRGRRCCPARATGGAGAACPRRLPCVARRPPPRPARRSGSGRRPSRARAPPRGSWRRPRRRRRRRRAGRTSAAASGRRTGHAHPRSCCRRRRHCHRRTERSTSSGLDRGRGPSARRRCSSTSISSAGSSPGSSISGTWRRQHRTKNPRPTNYTLFQLGGGVARSGSYQETASLEGCDAMDEAESLSAEREGPIKASEVHSNATASPGEKQNGAGPR

SEQ ID NO: 49060 - protein, 275 aa, Zea mays
  Clone ID: LIB3068-037-D1_FLI.pep
SDPATATTTTTHPFLSRPDGTCRSNPQAAQEGLRRRRRRLLRVEPRRPAHARRRLHRRSQALARRRRARAPQLLRLSQGRLRPPRHGHLRHRPPRGDEGEGGGREGGRRAGAALRRGDVVAQRPRRADPAHGALPRRHLQGPQAGAVHQLPADGRDRHLHGLLHRVRVARVGPAGGGRGGAGVEPAGLGHRPGVLVPAAGAVAAGPRGGGAQLPGGAAGRGHPGRGPRRGAQHGQPAAGQGGRAGRRPGPHRRPLHVLPGFLVRLGVPGHLHRPR

SEQ ID NO: 49061 - protein, 497 aa, Zea mays
  Clone ID: LIB3069-018-B5_FLI.pep
EVAKAVITMGSLPPVDGQRRPPHVVMIPYPAQGHITPMLQFAKLLHTRGFHVTFVNNEFNHRRHLRARGPNALDGTDGFRFAAIDDGLPLFEADATQDIPALCHSTLTTCLPRFKDLIARINAEAEAEGQPTVTCVVGDSTMTFALRAARELGLRCATLWTASACGFIGYFHYRHLVERGMVPLKNEEQLTDGYLDTIVDWIPGAPKDLRLRDFPSFVRTTDPNDVMLNFFIHETEGMSQASAVVINTFDELDATLLAAMAKLLPPIYTVGPLQLTVRNNVQANSPVAAIGSNLWKEQEAPLRWLNGRAPRSVVYVNFGSITVMSNEQLVEFAWGLANTGYYFLWNVRPDLVKSGDSAGLPPEFSAATEGRSMLSTWCPQAAVLEHDAVGVFLTHSGWNSTLESICGGVPMLCWPFFAEQQTNCRYKCTEWGIGKEIGDDVQRGEVESLIREAMEGEKGQEMLRRVTELRDSAVAAAGPDGRSMRNVDRLIEEVLLA

SEQ ID NO: 49062 - protein, 342 aa, Zea mays
  Clone ID: UC-ZMFLB73044B12_FLI.pep
SPFPKGQNRPRSTPPLPAPADLLERRPAMAASNIGMMDGAYFVGRNEILAWINTTLQLGLSKVEEAASGAVACQLMDAAHPGAVPMHKVNFDAKTEYDMIQNYKVLQDVFNKLKITKHIEVNKLIKGRPLDNLEFMQWMKRYCDSVNGGFMSSYNASERRESSKGGKETNRRASVPSHTPAKSASTGHKAQASHGAKRASGQTAGAPQRSAKPSPAASSGGPAYDEQITELKLLVDSLEKERDFYFSKLRDIEILCQNPEVEHVPVHAIQNILYTSEEDPQQQAPALSPIMEASEERPKQEAAHKRKSISDLDEFGMSSSSRQRLSDISDVQLCGSPLTSFS

SEQ ID NO: 49063 - protein, 303 aa, Zea mays
  Clone ID: LIB3150-012-D8_FLI.pep
PCLAPAFTVSARRLPPLALQLKHSAAPYVPATPPFFHSTTRRAPHALPVTPKPNPFRSSILLSRRRRRSAALRDMEKERKQGFFAALKEEVVRGLSPARTRGKSPAPRSASPARMLIPRRRKAPAAPPPPPPPPEKVLQQYLGEQLVARSGSLLRPGGEALAPLIEGPDAERLAAGDPDGEDSGRREGFGHWVRGHLTRAPSMAAAGGPDGSFRRSDLRLLLGVMGAPLAPIPSKPAEPLPLLSIKGTTIESSSAQYILHQYTAASGGYKLLQSVRNAYAMGKVRMVASEFETATRVVKNRGP

SEQ ID NO: 49064 - protein, 40 aa, Zea mays
  Clone ID: LIB3600-041-B3_FLI.pep
EHQKNNCISIIIRQLTRAKTTTLTQKSILTGYKREPSSSS

SEQ ID NO: 49065 - protein, 172 aa, Zea mays
  Clone ID: LIB3960-011-H5_FLI.pep
VQLMVATRENAMPTISSNTVWNPVAPNKMKHSVSTPNLVSGGSSAQVSLSTAYGSNKSQDPPQGNQTLPVPEDFRAANKTLVERMRSALGMDEDRYSAFKEIAGEYRQGIIGTLEYLSYVEQFGLSHLVPEMARLLPDPQKQRELADAYYTNTRFKSLQENGGGTSSQEGNR

SEQ ID NO: 49066 - protein, 155 aa, Zea mays
  Clone ID: LIB3732-046-G10_FLI.pep
PRLALQCLPPNSLHSCTLSGLLIPTSPRPAPHHLAKVEDSNEIWLPISLISISVKCRYNHLPYNYTRCMRGVGAAAAHFPPFNLLAEQDQVALTGSTPLCGMLHSLQRQRGVKGVEITSLENRESRRLSFLVKTDAWLYKMLGGIYYYPILLLSL

SEQ ID NO: 49067 - protein, 129 aa, Zea mays
  Clone ID: LIB4073-006-D5_FLI.pep
GSGLDLGGSGGLTQEGSFFRSAGDMAEEKSALQSAREWVVEHKLRAVGTLWLSGIVGSIAYNWSRPGMKTSVKLIHARLHAQALTLAALAGSGLVEYYDHQQGSGSKVHQYAKQFLSSDADSSSSPQKE

SEQ ID NO: 49068 - protein, 118 aa, Zea mays
  Clone ID: LIB3600-026-D10_FLI.pep
KNCNPGLLNPKADIVWVTRQVRQTLNKINRITSKTTRASAQPPGLPLRLEQGQDVTLTNRALDVPHDETVLVIQELHSDLGHLTPGAGPAHHLYHNSKLHLGVHALASRGDGGRRALA

SEQ ID NO: 49069 - protein, 115 aa, Zea mays
  Clone ID: LIB3608-035-A10_FLI.pep
RRWQWRTSTGRGTTTAPSTTTTRTRRRSTCAPSRPSLRRWCRWTWCWRSGASRARGPGAQATAGRTTSRRSSSSGPKPWPPRRDDNTSPNRTTTTRMPECTVSARAYMLVLKQAF

SEQ ID NO: 49070 - protein, 144 aa, Zea mays
  Clone ID: LIB3596-043-B2_FLI.pep
RLLPFSFFSVVLYVSLYIKVSLLPYVWLSIGGRWSAESVNGGGGAGAVARARDEVVVGEADRLHEGVDDGGADEAEPAPDHVLADALRLGRLRRDLPAVLVARRQRPVVHERPHVPVQRAQVPPHLKHGERTTPSDDFFLYIFF

SEQ ID NO: 49071 - protein, 182 aa, Zea mays; identical to SEQ ID NO: 44899
  Clone ID: LIB3596-048-G5_FLI.pep

SEQ ID NO: 49072 - protein, 264 aa, Glycine max
  Clone ID: 700868378_FLI.pep
ANKIFRSMTTTTMLLRSSSTPILNSRIPHPKDSPHEPEILHRSPRTRSLTLSASSSSLSPVEASPSRMTRALSETDLSARSKTSSFGSALFSFTESDEGDGVGGGGGGDGWDNGDGGGSGFWDSNNGNDSTDLYYRTMIEANPGNPLFLGNYARYLKEVRGDYVKAEEYCGRAILANPNDGKVLSMYADLIWESQKDASRAETYFDQAVKAAPDDCYVLASYAHFLWDAEGEEDVEVQEDSSEISPSFLHGAAPLPPPLAAASS

SEQ ID NO: 49073 - protein, 161 aa, Glycine max
  Clone ID: 700568509_FLI.pep
AYQLFSLSLANMLSWKVLLVSAAVLFAALGLRVSLPVAATNLPLLWSFFLLCFKPPYLFVVLNAIIISIVASSRFHHSSNPQSPEPTPPRVESMPAPTVPEPPLFQVKAVLEVEKKVIEEDVVALKRKDSTEIPSPEEKPLVSARFTHRKFLKSSSEGNNY

SEQ ID NO: 49074 - protein, 300 aa, Glycine max
  Clone ID: 700758807_FLI.pep
QSNSAKMASNKESKFPAQSQKTQPGKEHVMNPLPQATNPDHKAANKLQGKVALVTGGDSGIGRAVCLCFAKEGATVAFTYVKGHEDRDKDDTLKMLLEAKTSGADNPLAIAADIGFDENCKQVIDLVVKEYGRLDVLVNNAAEQHLTNSVEEITQQQLERVFGTNIFSQFFLVKHALKHMKEGSCIINSTSVNAYNGNPEALDYTATKGAIVAFTRGLSQQLASRGIRVNGVAPGPVWTPIQPASKPAEMIQNLGCEVPMNRVAQPCEIAPCYLFLATCQDSSYFTGQVLHPNGGMVVNA

SEQ ID NO: 49075 - protein, 348 aa, Glycine max
  Clone ID: 701004377_FLI.pep
FYIGLRQKRATGQEYSELLQEFMTAVKQNYGEKVLIQFEDFANHNAFELLAKYGTTHLVFNDDIQGTASVVLAGVVAALKLIGGNLADHTFLFLGAGEAGTGIAELIALEMSKQTKTPIEETRKKIWLVDSKGLIVGSRKASLQHFKQPWAHEHEPVGSLLEAVKVIKPTVLIGSSGVGKTFTKEVIEAVTSINEKPLVLALSNPTSQSECTAEEAYEWSEGRAIFASGSPFDPVEYKGKVYYSGQANNAYIFPGFGLGLVISGAIRVHDDMLLAASEALAKLVTEENYEKGLIYPPFSNIRKISANIAASVAAKAYELGLATRLPRPQNLVKYAESCMYTPVYRNYR

SEQ ID NO: 49076 - protein, 206 aa, Glycine max
  Clone ID: 701155547_FLI.pep
HTGMQEIMPVGANFPRIGKMVTVLIGDPINFDDIIEFDKDKGSNVPRRRLYDAVASRIGDRLHEMKVRVDTIAIDQEMQLQDKSSHSTERTSKILQQVDWELFGMDSFMSVEDDSKQRQETVALSNVSVSQHHQQSHSDQSWRAGFSYRMRGYIDQMELVSFAARGIFLNNDTKNSARPSREMGPLKAWKQFLEANLLRQWNYVHY

SEQ ID NO: 49077 - protein, 237 aa, Glycine max
  Clone ID: 701155680_FLI.pep
ITFFSSPFALPLPDKHMALPNQQTVDYPSFKLVIVGDGGTGKTTFVKRHLTGEFEKKYEPTIGVEVHPLDFFTNCGKIRFYCWDTAGQEKFGGLRDGYYIHGQCAIIMFDVTARLTYKNVPTWHRDLCRVCENIPIVLCGNKVDVKNRQVKAKQVTFHRKKNLQYYEISAKSNYNFEKPFLYLARKLAGDTNLHFVESPALAPPEVQIDLAAQQQHEAELLAAASQPLPDDDDDQFE

SEQ ID NO: 49078 - protein, 280 aa, Glycine max
  Clone ID: 700788813_FLI.pep
QCLLCSSLSDMMADPASFIASWLTPSYLFILVNLVIGTIAITSRFSSTPKNQQAHHPQPLSSFNTHHHQPNCTQPQLLPIPSLLQRVTSFNLSLHKHQPTPPETQHLHPEPQPQPEKPPELLRTPSLLERLRSFHNLSLHKHVQPEPEPEPEPEPEKPELVRSPSLLQRIQSINFSHLYRSDFSHRDDEDPDSGSDPGRGSGKAAEMRKSASVRGGLTDSEWEEVEKRRPQTARPVETTTSWREDEEVDAKADDFINRFKKQLRLQRIDSLLRYRGGNSS

SEQ ID NO: 49079 - protein, 129 aa, Glycine max
  Clone ID: 701144909_FLI.pep
RGVNYGGQLPVDAVSRPGPETGSLPPDASSTLYVEGLPSDSTRREVAHIFRPFVGYREVRLVSKESKHRGGDPHYLCFVDFANPACAATAMSALQGYKVDELNPESSHLRLQFSRYPGPRSGPAFRSKR

SEQ ID NO: 49080 - protein, 231 aa, Glycine max
  Clone ID: 701147506_FLI.pep
VVAPSPQLSANMGISRDSMHKRRATGGKKKAWRKKRKYELGRQPANTKLSSNKTVRRIRVRGGNVKWRALRLDTGNYSWGSEAVTRKTRVLDVVYNASNNELVRTQTLVKSAIVQVDAAPFKQWYLQHYGVEIGRKKKTAAKKETAEEGGDAAAAAEEAKKSNHVQRKLEKRQKDRKLDAHIEEQFGGGRLLACISSRPGQCGRADGYILEGKELEFYMKKLQKKKGKGAA

SEQ ID NO: 49081 - protein, 426 aa, Zea mays
  Clone ID: LIB3076-003-B12_FLI.pep
VFDLSKEAPDKVLHRLYANLERLKMEGDILAVQIWRTLRLIVAGGDGTASWLLGVVSDLKLSHPPPVATVPLGTGNNLPFSFGWGKKNPSTDQEAVKSFLGLVKHAKEIKIDSWHIILRMRVPEEGPCDPIAPLDLPHSLHAFHRVSSSDSLNMEGYHTFRGGFWNYFSMGMDAEVSYAFHSERKKNPEKFKNQLTNQGTYAKLGLKQGWFCASLSQPSSRNLAQIAKVKIMKRAGSLWEELRIHHSIRSIVCLNLPSFSGGLNPWGTPGTRRAEDREFTAPFVDDGLLEVVGFRDAWHGLVLLAPNGHGTRIAQAHRIRFEFHKGAADHTFMRVDGEPWKQPLPKDDDTVVVEISHLGQVTMLANEPCRSKSVNDQSSLSPAHDSHGDDKDIVEEDEDEWEDGRRKFGAADTFKIPDEIDIAHFS

SEQ ID NO: 49082 - protein, 430 aa, Zea mays
  Clone ID: LIB3069-001-C8_FLI.pep
GPENMQAIQVEPVASSLNSSYCYILHNGNTVFTWAGNLTTALDQELMERQLDVIKPNTQSRSQKEGSETDQFWSLLGGKSEYSGQKMVRELESDPHLFSCILSKGNLKVKEIHHFTQDDLMTEDVFILDCHTSIFVWVGQQVDVKGRLQAMDAGEKFIVLDFLMENLARETPVFTVMEGNEPPFFTRFFTWDSAKSLMHGNSYQRKLAIVKGGGAPALDKPKRRTTVYSGRSTTQDKSQRSRSMSFSPERVRVRGRSPAFTALAANFESSSNRNLSTPPPVVKKLYPKSVTPDPSNTASKSPAIAALAGSLDHPSQTPALEFMKGGSESEKPKQEGDGKGVDTVAPRVESLTINEDVKENEPEDDEGLPIYLYERLKTTAADPVTEIDITRRETYLSSTEFKEKFGMTKEAFSKLPKWKQNRLKIALQLF

SEQ ID NO: 49083 - protein, 628 aa, Zea mays
  Clone ID: LIB3067-045-E3_FLI.pep
FSGMFTLAVKMGLQFPVGQTNIDGILHLRENELKRHAGEKSTAIEAYCAYVAEGFENLLDWNDVMKFQAKNGSLFNSPSATAAALVANYDDKALQYLNLLVTQFGSAVPTVFPQNIHYQLSMVDTLESVGISRHFSVEKKAVLDMIYSLWLQKEEEIMLDAETCAMAFRILQMNGFDVSTDWLSHIAEASNFHNSLQGYLCDTKTLLEMYKASKVILSERDLTLENIGCWTGSLLREKLCSDGAQRVPILEEVEYALKFPHYAVVDPLNNRRSMEHLDARGSQTLKTKYLPCHVSQDILALAVEDFCFSQSIYQDELQNIISWEKENRMDQLQFVRQRLAYCYLAAATTISPHELSDARVACAKSIMLTVVVDDFFDVGGSKEEQENLIELVENWDEHHKVEFCSEKVEIVFYAVYNTVNQLGSMASAVQKRDVTKHLAETWLKVMLCMLTEADWQRRQFVPTVEEYMANAVSSLALAVIILPAQYFLGETLSDYMVKDHEYSNLSELMFTCSRLLNDIRSVEREFEAGKLNSVSLLALHSGGSMSIEAAKKETHGSLESYRRGLVALVRRQDSVVPRSCKELFWKLCKTIHLFYFQIDGFTSPKEMVGAVNQVINEPLELQSSNTHV

SEQ ID NO: 49084 - protein, 215 aa, Zea mays
  Clone ID: UC-ZMROB73066B08_FLI.pep
GYDPIIRRSTMTDTLTGHVGLLVGGELHGLEVARVRHGRQHGPGVAEVGDDEVLPLLDGAHGGGAAEVAVHVGLELELLVHGLERVGAGLPPLLQQLRRRRRRLPAAVRGRRRRRRRRVAEGRIIVVVVGAHEERVPVAQDHEREVVPHQLADELPAPAVPVEHAAEHAVLHAESLETWSARWASESWSEPNSLITRIQIAWTRATSRQLVMNIK

SEQ ID NO: 49085 - protein, 295 aa, Glycine max
  Clone ID: 700829782_FLI.pep
FTSLVVPHSLSLHTTLRRETVEGRNTQITEPAMATFSKERENFVYVAKLAEQAERYDEMVDAMKKVAKLDVELSVEERNLFSVGYKNVVGSRRASWRILSSIEQKEDSKGNELHVKHIRDYRNKVELELSNICSDIMIILDEHLIPSTNIAESTVFYYKMKGDYYRYLAEFKAGNEKKEVADQSLKAYQTASTTAESELQPTHPIRLGLALNFSVFYYEILNSPERACHLAKQAFDDAVSELDTLNEDSYKDSTLIMQLLRDNLTLWTSDIPEEGEDLKMESAARVDQGEDELGR

SEQ ID NO: 49086 - protein, 141 aa, Zea mays
  Clone ID: 700343407_FLI.pep
MEHISERIVNHLVPQTMRIWLCSDDGRSVEVRLTSGRETPMPHPAVRVHALRCCDDLRDGKVHVVRVADARSDAAETSKCPMDSILSEHGTQNCIRCVGTACTNHVSWIDVFHVSWNTNVLEMHLNLLLHVNTNVTQYHIS

SEQ ID NO: 49087 - protein, 524 aa, Glycine max
  Clone ID: 700685549_FLI.pep
LKQLSTLALQYNKLTGQIPLSLGNLEKLSRLNLSFNNFSGTVPATLAYIEHLEVLDIQNNSLSGIVPSALKRLGEGFQGANNPGLCGVGFSTLRACNKDQDLNVNHIDTSDGDQPKNSNSSKALPEPAYVQLHCGQTHCSKSRRFPQTVITAGVVIVTLTFICAGFLTFFRYRRQKQRISNTLSSSSEGKVSLDQPKEFYTKSPSALVNIDYYSGWDQLSNGQNADAGGLSNEYLNQFRFNVDEVESATHYFSEANLLNRSKFAAGYKGVLRDGSLVAIRSISVTCCKTEEAEFVKGLNLLTSLRHENLVRLRGFCCSRSRGECFLIYDFATMGNLSQYLDIEDGSSHVLEWSKRVSIIKGIANGIGYLHSNEESKPTIVHQNISVENVLLDYQFNPLIRDAGLPMLLADDVVFSALKVSAAMGYLAPEYITTGRFTEKSDIYAFGVIILQVLSGKTTIGSSIRTAVESFRFDDSVDTNLKGIYSKSEAATLSKLAIQCTNELPDERPTMVDVIQELSVLSAHL

SEQ ID NO: 49088 - protein, 350 aa, Glycine max
  Clone ID: 700728945_FLI.pep
GVGILLCRWPPKKHLDEESKSIEKSDQPISMVWGKDGKFTFSDLVKATDDFNDKYCTGKGGFGSVYRAQLLTGQVVAVKRLNISDSDDIPAVNRQSFQNEIKLLTRLRHQNIIKLYGFCSRRGQMFFVYEHVDKGGLGEVLYGEEGKLELSWTARLKIVQGIAHAISYLHTDCSPPIVHRDITLNNILLDSDFEPRLADFGTAKLLSSNTSTWTSVAGSYGYVAPELAQTMRVTDKCDVYSFGVVVLEIFMGKHPGELLTTMSSNKYLTSMEEPQMLLKDVLDQRLPPPTGQLAEAVVLTVTIALACTRAAPESRPMMRAVAQELSATTQATLAEPFGTITISKLTGFQK

SEQ ID NO: 49089 - protein, 135 aa, Zea mays
  Clone ID: LIB3061-052-A12_FLI.pep
RNNVGPVRSIASHRAHCTANCARVVACKPGRCPCAPAPPLRVVNHPSHCIAIRAPTPPYVLASSCTTSWGWGRQLSCTKMKITHLATARATVVLSSAPARRHLCSCYRRHLLLDLRAPCAPLFSRDFNLTAYISS

SEQ ID NO: 49090 - protein, 398 aa, Zea mays
  Clone ID: LIB3137-024-E10_FLI.pep
HSTTHRAASCHRIEQEGRKISGTDNRSTTLARGGKRNKRWPFRSRRTECSVALAPQAGEEDDGGATHRRRRRSGDGPRVGGGGGRGGGVAGAAAAAAAAGGVLRHAVPRGGDHRAGGGEQGGVRQPRRRRGPPAPPLPRLLRQGVRRVGAAGLVGGQPGGEGRGAQRQPARVRGHRQRQDAAGAGLLRRRLLRRRPRLRRPRRPRAGRGRRVPGAGGAEGRQRLLGAGGGREPAAADGEREPADAGVRRQGAEPGRDGGAVGGAHGGRGALQLLRAPPLLVRAQRRGAGPVHGPRVPGGAGAAVPAAGDRRRRPAPAHGPRHAHRLRHQLLRQPGRQARPARLRPGAARRPGHRRAGARLHQQPRHLPDRLRRRHHQDGCHTGAHRHSRHRPDQLQGG

SEQ ID NO: 49091 - protein, 583 aa, Zea mays
  Clone ID: LIB3150-070-G4_FLI.pep
QAKPPHRFALSTDESSPAELIGDWSCAEMLVLFETPAGFALFKVLDEGKLDKVEDLWKEFTTSDSARKVVELKAFNKFENTSDALSAATLIIDSKPSKGLRKFLQKHCEGETLAVADSKLGNAIKEKLKIDCLHNSAVMELMRGLRNQLTELITGLGAQDLGPMSLGLSHSLSRYKLKFSPEKVDTMIIQAIGLLDDLDKELNTYAMRVREWYGWHFPELTKIVTDNIQYAKVVKMMGNRVNAVNLDFSEILSDEELETQLKEAAVISMGTEVSDLDLSNIRELCDQVLALSEYRAQLYDYLRSRMNTIAPNLTALVGELVGARLIAHGGSLLNLAKQPGSTIQILGAEKALFRALKTKHSTPKYGLIYHASLIGKASQKHKGKISRSLAAKTALAIRYDALGDGEDNSIGTESRLKLETRLQVLEGRELGKSAGSTKGKPKIEVYEKDRKKGTGALTTPAKTYNPAADLVLTEETPKKSELASKKRKHNEVETEPLAEPAEEAIQEDGDQEDRKKKKKKNKESKEAPAGEGDGEKKKKKKSKEVEEEPVVAAASEVKKKKKKSDADGEDVAMQTEESGKKEK

SEQ ID NO: 49092 - protein, 328 aa, Zea mays; identical to SEQ ID NO: 47602
  Clone ID: LIB3150-027-D8_FLI.pep

SEQ ID NO: 49093 - protein, 263 aa, Zea mays
  Clone ID: LIB3079-028-G6_FLI.pep
LFRELADDNSKFGKLTLARLLLACAAIKSRGRSLIERKGYCEEALGLFTDLIHLDPSHKQYYEDERSLALMDKLTCDMETFTKHCSVQVQPNSAPLHHVQFRRLSVTRIGFAERLLWVQMLDLSHNSLRSVEGLEALQRLVFLNISNNQISSFTALEPLTKIISLKVLDLSFNEIGAHSIDTARYICPSPFSHKTEASEAFEEYQEVNNINVTEYWDAILFFRSLKLAQLDIRGNAVASKDGFRTLVVTLIPCLKWFDGEGVS

SEQ ID NO: 49094 - protein, 96 aa, Zea mays
  Clone ID: LIB3088-046-F2_FLI.pep
LCCQADELWALVYSSISFLYAAMAGAAFAFQACLSSPLSSFHFTEMSAFRVELLMPGRSSSSCFLASLLKRRKEEAGLLGRLGSAFSCFFLWRFSL

SEQ ID NO: 49095 - protein, 113 aa, Zea mays
  Clone ID: 700051909_FLI.pep
AQRRRVQPWVQEPEHQLEARGRACRRHGAELTDEPTPAACLPVSSTARCKKRILLLLFHNSFVLYCVYHTAAPTPACYLEEKEEGEGEGEGEGGIGGFVEQVDCKETMQGFSL

SEQ ID NO: 49096 - protein, 354 aa, Zea mays
  Clone ID: 700073485_FLI.pep
LLMAQAHHPLLLLILLLFLSSTAIPSSKRTQPKFSAVFYFGDSVLDTGNNNHLPTVAVANHAPYGRDFPGKKPTGRFSDGRLIPDLLNERLQLKEFSPPFLDARLPNSDVATGVNFASAGSGFNDQTSRLSNTLPMSKQVDLFEDYLLRLRGIVGDKEASRIVARSLIFISSGTNDFSHYYRSPKKRKMEIGDYQDIVLQMVQVYVKELYDLGGRQFCLAGLPPFGCTPIQITLSGDPDRACVDEQNWDAHVYNSKLQRLLAKLQGSLHGSRIVYVDAYRALMEILENPAKYGFTETTRGCCGTGLREVALLCNAFTPTCKNISSYVFYDAVHPTERVYMLVNDYIVNDVIPQF

SEQ ID NO: 49097 - protein, 328 aa, Zea mays
  Clone ID: 700072325_FLI.pep
TAHRIFISPHYFFSLLTPSFGPSPSSCPRLSDTSRVVRYITPPRTAAMLTPRVLKASLLRCLRATAELPPLRRPRILPVRVYHSRGYSSGGSSKYDRPMRQFSEQNESTSQPLIYYIAPSALLAFAGIATFVHYNDERRAVPFAKVPGQTNVPKRCTTNRPAIGGPFKLYDTENNEVTESKLRGKWNLMYFGYTSCPDVGPAEVQKIADVVKLLESKYDINITPLFVTIDPQRDSPAQLKAYLTEFDPRIVGLTGPISAVRQIAQEYRVFFKRVEEVGQDYLIESSHNMYLLDPCLETVRCFGSEYEASDLAEAITTEVQKASASSTN

SEQ ID NO: 49098 - protein, 96 aa, Zea mays
  Clone ID: 700075920_FLI.pep
FFLRASILPIRFRHGMLCTNILINNTTHGHTYGIVALFFCCNARVFNQGISDWEWEEDEEMIWCYQGQAPSPRNGSSSFAWATCASGYSSPTENHH

SEQ ID NO: 49099 - protein, 350 aa, Zea mays
  Clone ID: 700047920_FLI.pep
RPSLPASSAQIARRGTRPQGRMQYKNLGRSGLRVSQLSYGAWVTFGNQLDVKEAKVLLQACRDAGVNFFDNAEVYANGRAEEIMGQAIRDLGWRRSDVVISTKLFWGGQGPNDKGLSRKHVVEGLRGSLRRLALDYVDVVYCHRPDASTPVEETVRAMNWVIDQGWAFYWGTSEWSAQQITEAWAVANRLDLVGPIVEQPEYNLFSRHKVESEFLPLYSTYGIGLTTWSPLASGVLSGKYGKGDIPADSRFALDNYKNLANRSLVDDTLRKVNGLKPIAAELGVSLAQLSIAWCASNPNVSSVITGATKESQIVENMKALDVIPLLTPEVVDRIEAVVQSKPKRNVESYR

SEQ ID NO: 49100 - protein, 325 aa, Zea mays
  Clone ID: 700051842_FLI.pep
AVGRRPRGGRRRGVPRAARRGRPEAGLLREHLPQRGGHRARRGAAATAGNNPGRRLHRPPLLPRLLRRGLRRLGADRIHARQPGREGRLRQQVPRVRRLRHRAERQGRRRGRLPGHGLLRRRARHRRSRRHLHEWRAFLPSGAGQAGRSELHRQQRARPAARGQPDHGPAAGSLQGTRAQHVRPRRALRAAAHSVGLAHCSKFASRLYSYQLPGQPTDPTLNPKYARFLESRCPDGGPDNLVLMDQATPAQFDNQYYRNLQDGGGLLGSDQLLYTDNRTRPMVDSLANSTAAFYRALADAVVRLGRVGVKSGRRGNVRKQCDVFN

SEQ ID NO: 49101 - protein, 363 aa, Zea mays
  Clone ID: 700045841_FLI.pep
SPPARYCRGIGFRGSFGGLRFGLAGAGMTIDMSIPGSSGLLNAAGKRDMKFFSNPYVLALTGAAGIGGFLFGYDTGVISGALLYIRDDFPAVKDNYFLQETIVSMALVGAMIGAAGGGWINDAYGRKKSTLLADLMFALGSLVMCAAAGPYILIIGRLLVGLGVGVASVTAPVYIAEAAPSEIRGGLVSTNVLMITGGQFFSYLINLGFTEVPGTWRWMLGVAAVPAIIQFVLMLFLPESPRWLYWKDEKAKAIAVLERIYESDRLEEEVELLATSSMHEFQSNNTGSYLDVFKSKELRLAFFAGAGLQAFQQFTGINTVMYYSPTIVQMAGFSSNRLALLLSLIVAAMNAAGTIVGIYLIDR

SEQ ID NO: 49102 - protein, 323 aa, Zea mays
  Clone ID: LIB3137-005-A5_FLI.pep
SAAMGILALITGKAGASGFGSASTAEQVTDGADASRLTVAITGGASGIGLETSRVFALRGAHVVIAARNTEAASEARKTIMEKNPTARIDVLKLDLSSLKSVRAFVDRFNSMKLPLNILINNAGVMFCPFQLSKDGVEMQFATNHLGHFLLTNLLLDTMKATAKSTGIEGRIVNLSSVAHHHTYPKGIDFDNLNDEKKYNDKMAYGQSKLANLLHAKELSRRLKEEGENITVNSVHPGLIMTNLMRHSFVLMKVLQVATYILWKNVPQGAATTCYVGLSPQLKGVTGKYFADCNVEKTSKMARSEELAKRLWDFSEELIKSAK

SEQ ID NO: 49103 - protein, 331 aa, Glycine max
  Clone ID: 700654386_FLI.pep
YDELRLATEEFSQENLLGVGSFGSVYKGHLSHGATVAVKVLDTLRTGSLKSFFAECEAMKNSRHRNLVKLITSCSSVDFKNNDFLALVYEYLCNGSLEDWIKGRRNHANGNGLNLMERLNIAIDVACALDYLHNDSEIPVVHCDLKPSNILLDEDMTAKVGDFGLARSLIQNSTNQVSISSTHVLRGSIGYIPPEYGWGEKPSAAGDVYSFGIVLLELFSGKSPTDECFTGGLSIRRWVQSAMKNKTVQVIDPQLLSLTFHDDPSEGPNLQLNYLDATVGVGISCTADNPDERIGIRDAVRQLKAARDSLLKLSDESPRRDTERYFHVSIK

SEQ ID NO: 49104 - protein, 117 aa, Zea mays
  Clone ID: LIB3088-049-H6_FLI.pep
PAVAMGCAGSTPKTDDNGKNLKKPKPWKHTQAITPAQLRQMRDEFWDTAPHYGGQKEIWDALRAAADSDLALAQTIVDSAGIIVSNSDMTLCYDERGAKYELPKYVLSEPTNLIRDG

SEQ ID NO: 49105 - protein, 323 aa, Zea mays
  Clone ID: LIB3079-043-A9_FLI.pep
LLVTRTDVVLSARGGALFTAAALRGCVLPCPHHQQAAEWVKGLKKWWVAAALGLGSALAAAPGPARRSQDGHRLSVAAAGICICMYNGGGGAGTTPAAAPACVADDGGACGCGANLSARSSCSSRCSRRFSSVSDSQQRFSSSQSTSVCFSFVLARLFWNHTSTCRGLSFSCFANATFCFGFRVLCSLKRSSRSADCSLVSLSFFRVLPSSSSSSAPAQARGNAAVDDARSPSASSTRSLFTPATDSDDTLCAAPPPPDPVAVASSGKLSVSDGSSGCGDGSRTSLLSRRLIPPWRAAPEAPPLPLPRDRPSARPASSRCTSS

SEQ ID NO: 49106 - protein, 76 aa, Zea mays
  Clone ID: 700197123_FLI.pep
GIRVTPKKSMEPWKAYNTNVATKLRAVQFFWEDNCLAWSGENTVKMYFPQRALHTNVRLEFHLDLAGEWRCSHLCT

SEQ ID NO: 49107 - protein, 104 aa, Zea mays
  Clone ID: 700208852_FLI.pep
MTSNSIRKLARHHSASTQPPSLPLGLEQCEDVSLANRSLDVPHDETVLVIQELHSDLGNLTPGAGPSHHLHHNSKLHLGVHTLASRAESRTEDDGLTKETGVAA

SEQ ID NO: 49108 - protein, 255 aa, Zea mays
  Clone ID: 700048791_FLI.pep
SFSPLPLYPSILADPGPIPLPTYLRFSPSEEPQALAMASRILARSKSLHLVAALTPAAAKAATPIAGARALSSLPRYPSAPSPHGLGKVLGYEPTSHLSGPQVLPRWFSSLASNGSQVQKSQISETYKSGGEMKQSETRKSSEEATPKVVAFSPLEAAIAKPRSSPLTSESSKVRRSEIATQVTFYMIPALLLASKNSISTSLLVGAVFHQVYMFHKEILLDYVHHDITRKWALIYFKLLLLVMAKDTIMYFNLF

SEQ ID NO: 49109 - protein, 213 aa, Zea mays
  Clone ID: 700264066_FLI.pep
PRVWQRACYCTARDTGNSASKRTRVFRELGRRDTQGVCCSKSEHGEMDRTERRGELEGRVATREEAAHGDGSSSATSKGTPSRTRTRREIPAGRHGCRRLRVGKLDGWASKGELRAAMEPSWLSREGGEGAAEQERRTEGLRPGTRREIDAEGKSLGKQVGRCSSRSAVRASTPGRETQRKSSAGSLAGGNSSRAPVNRESRGRGRSWGARRP

SEQ ID NO: 49110 - protein, 438 aa, Zea mays
  Clone ID: 700236446_FLI.pep
LAPGGPTMPKAGGGAADEEEFRAEVEERLINEEYKIWKKNTPFLYDLVITHALEWPSLTVQWLPDRTEPPGKDHSVQKMILGTHTSDNEPNYLMLAQVQLPLDDAEADARHYDDDHADIGGFGAASGKVQIVQQINHDGEVNRARYMPQNSFVIATKTVSAEVYVFDYSKHPSKPPLDGACNPDLRLKGHNSEGYGLSWSIFKEGHLLSGSDDAQICLWDIKANSRNKSLDALQIFKHHDGVVEDVAWHLRHEYLFGSVGDDYHLLIWDLRSPAPTKPVQSVVAHQGEVNCLAFHPFNEWVVATGSTDKTVKLFDLRKIDTSLHTFDCHKEEVFQVGWSPKNETILASCCLGRRLMVWDLSRIGQEQTPEDAEDGPPELMFIHGGHTSKISDFSWNPCEDWVVASVAEDNILQIWQMAENIYHDEDDLPISDEPAKTS

SEQ ID NO: 49111 - protein, 542 aa, Zea mays
  Clone ID: 700336725_FLI.pep
PNFKNDGNPFNTSIAPSTSPSSTPTGSRPTQTPSSSSSPSGSPPPSSAASNSSSGSTARNSNSPSSKKNKSSPLRTVGYVLLAIVLFIVLVLLVIFCLSKYQERQSRRDYSTSQLGRVHQRVEEPKSKQASVQSKHEAKKGSSEVPERKKPREINLAVPVAIEKPPEKRQERVINLERTESEIFAAAPPPPPPPPPLPPTPPPLPPRLPSPPPVEKVTVNPIVLPEKRVSTSPRTGPSTSATSFSVASLQQYTNSFQEQNLIRESRLGKVYLAELPGGKLLEVMKIDNANGRIPVDDFLELVARISDIRHPNILELVGYCAEYEQRLLVYNYFSRKTLHDVLHEGEDLDEPLSWNARLHIALHAAKALEYLHDTCEPPVVHQNFEPANVLLDNRCSVRVAECGLAQLMASGSVTQLSGRMRALLNYEAPEIHESEPFTCQSDVYSLGVVMLELLTGRKPYDSSRPRDEQHLVRWADSQLHDMESLSKMVDPSIRGECSVILLSRFADIISQCIQPGPEFRPAMSQIVQDLARIVGASGVVSK

SEQ ID NO: 49112 - protein, 254 aa, Zea mays
  Clone ID: 700342248_FLI.pep
PDRISRGAVPEMMSSSSDAAAALELQESGWEELRREARKLEGDLDVKLSSYARLAARSSSSASGAASPTADRSSWKSMEFEIQSLLGKLQDVNDAMSRCAASSATTTSVSQKLARHRDILHEFTQEFRRTRGNLSSMREHADLLNSVRDDITESRASGGMSPRVHLLRERASIHGSINQIDEVIGQAQSTRVALNNQRAMFGDIQGKVKQLGEKFPVIRGLLGAIKRKKSKDTIILSAVIAACTIFLIIYWLSK

SEQ ID NO: 49113 - protein, 915 aa, Zea mays
  Clone ID: 700349082_FLI.pep
GFLRSPITAGSQMASSQHVEMEAAKLLHKLIQESKDEPAKLATKLYVICQHMKLSGKEQSLPYQVISRAMETVVNQHGIDMDALRSSRIPFAGGPQAGDSSGVMSKDKEVIGNQSPMVGSDASQSSGQAGLWQLPSGSTDMIRHGASISGRVPTGPNRGDFSAADIHQGSMSQKSGRSSGIESPASLQMEDTRSMNSHDSLKSDEKTSKKTSSKRKRMDSKGAGDLRSEDNSKSDVISTGQNTRKGKQVGKAGRQGQPSMGIEHEQQPHKLQGGTGQVPPIHGGAPFLRTRSEGPSGRTMDKTKPSNPFSMGQIPNFPEGLASTGAPIELQKSIQGGASLFNPGFGWNQNPQVQTLKNSQGSIHNLVRSGVTVEGKVNVGAQGAFNSASAPQMEFPTVPPYNPSSFGASSQFLDKGKELVSSIISTEPHSSKVASQPGISHGSPMQERQGMIRVPQRGEASFQERRPSSLPSRSTGPSPMSHISSNTPFKEQQLKQLRAQCLVFLAFRNNLQPRKVHLEIALGRGPPAESDSAGQRGSEGRVSDALGKENGSSRENSGVFCRQTDISRLPATSAGSIAEDDSLSKDPENATKKIKLAEQEKSLMEVENVQQASVMQGTSSEMRSQETASQNPYRPQQSYYQGDTRRIASDIHRTDAEILNQNLSWGGQGSTALGGTRQLLNQETKESLAPSKSHHMPVDGYNSNIQGIDRTPEIAGAGNDVENCSHVADIVPEQAADEGDEDLSEHEDLLSSPKHTMTEKWILDYQKRIYNEKQKRTLEQHKVHSRMSATYEELKESVNSSEDLSAKTKSVIELKKLQLLPLQRRVRSEFLLDFFKPNTSDLERIKSLKKHRHGRRVKQLEKIEQKMKEERQKRIRERQKEFFADIEAYREKLEDNFKVKRERLKGFNRYIKEFH

SEQ ID NO: 49114 - protein, 154 aa, Zea mays
  Clone ID: 700184945_FLI.pep
VVYTDANWAGCPDTRRSTSGYAVFLGGNLVSWSSKRQPVVSRSSAEAEYRAVANSVAEAAWLRQLLAELHSPLSKSTLVYCDNVSAVYLSTNPLQHQRTKHVEIDLHFVRDYVTAGAVRVLHVLTTSQFADIFTKGLPSSTFAEFRSSLNISSG

SEQ ID NO: 49115 - protein, 332 aa, Zea mays
  Clone ID: 700548667_FLI.pep
LLDQGDFLVHFMDIAREELTKKPEEISAEKLQSLLDIALRSTAAASDPSHEELICCVERSSLLKKLATLKDLDPADKLAAADVDRSMQLSITGLETFCLSNKVQWPLSLVISRKALTKYQLIFRLLFHCKHVSRQLCAAWQIQQAFRSVKILGTPILRSSILCRSMLKFVNSLLHYLTFEVLEPNWHLMHDRLQTARSIDEVIQIHDFFLQKCLKECLLLSPELLVKVEKLKGLCLQYATSIQILMPSIDVANSENTSKSRKSRSRIDKSQDRDQQLKLASENVVMSESILKFEAAFNSELQSLAPTLSNSSQAEPYVTHLAQCILGVRIGQ

SEQ ID NO: 49116 - protein, 156 aa, Glycine max
  Clone ID: 700661032_FLI.pep
KISFSEMASPIQQQQRSTTTSSGSEGGDPHIIDERKRKRMLSNRESARRSRMRKQKQLEDLTDEVSRLQSANKKLAENIEAKEEACVETEAANSILRAQTMELADRLRFLNSILEIAEEVEGLSVEIPEIPDPLLKPWQIPHPIQPIMATANMFLR

SEQ ID NO: 49117 - protein, 405 aa, Glycine max
  Clone ID: 700558855_FLI.pep
LILIINHRSEMVSSSQVVKVKRNTLRPCMTCPLCHKFFKDATTISLCLHTFCRKCIYEKLSDEEMDCCPVCHIDLGCLPVEKLRPDHNLHDIRAKIFPFKRKKIKAQEVLSSISLPAKRKERSLSSLVVSAPKVSMQPGFTGKRTKNSTRKAAALRGCSFLLDESIKKEQTNGDDNMDSPMPEHSKKHKPHEDTENSVQHTEGKVDLWTPLNCLVEAANRTKSSRSNSQATPLAKLESPTTPHGGQDASETTTKTDLPASAQSELNIPKSKNKDTGLKPIFGDDKDANSLPLGPVKRRRLRPAGQKRVAASEMSASSPAPLDATGGKCNRKNSPIWFSLVASEDQKGDFPLPQISACYLRIKDGTVPVSFIQKYLMKKLNLASEAEEVKQHIASLVDIVWGLRLS

SEQ ID NO: 49118 - protein, 294 aa, Glycine max
  Clone ID: 700560825_FLI.pep
ILCCSSIVCREWYSWHFPELLKIINDNYLYAKVAKFIEDKSKLSEDKIAAVTDIVRDEDKAKEIVEAAKASMGQYLSPVDLINVQQFAQRVMDLSKYRRKLYDYLVAKMNDIALNLASLIGEVVGARLISHAERGTTTFGEKLREQVEERLDFYDKGVAPRKNIDVMKLAIESVENKDTAMEIEAPVEVSGKKAKKKHTAVVTDDMAVDKPTETTNGDALEDHKSEKKKRKKEKRKLDTENDQAMDDGANGVESEQDGAVKKKKKKDKKGDNGEVLVAAIETKKKKNKSKNRDT

SEQ ID NO: 49119 - protein, 318 aa, Glycine max
  Clone ID: 700561155_FLI.pep
SSLLNTETNELVAVKKIANAFDNHMDAKRTLREIKLLRHLDHENVIGLRDVIPPPLRREFNDVYIATELMDTDLHHIIRSNQNLSEEHSQYFLYQILRGLKYIHSANVIHRDLKPSNLLLNSNCDLKIIDFGLARPTLESDFMTEYVVTRWYRAPELLLNSSDYTSAIDVWSVGCIFMELMNKKPLFPGKDHVHQMRLLTELLGTPTEADLGLVKNEDARRYIRQLPQYPRQPLAQVFPHVHPAAIDLVDKMLTVDPTKRITVEEALAHPYLEKLHDVADEPICMEPFSFDFEQQQLDEEQIKEMIYREALALNPEYA

SEQ ID NO: 49120 - protein, 380 aa, Glycine max
  Clone ID: 700661307_FLI.pep
QPLKSNLPLFLLPPTSPSSSSIMSHFKGKYHDELIANAAYIGTPGKGILAADESTGTIGKRLASISVENVESNRRALRELLFTAPGALKYLSGVILFEETLYQSTAAGKPFVEVLKEAGVLPGIKVDKGTVELAGTNGETTTQGLDGLGQRCAKYYEAGARFAKWRAVLKIGPNEPSELAIHENAYGLARYAVICQENGLVPIVEPEILVDGSHDIHKCAAVTERVLAACYKALNDHHVLLEGTLLKPNMVTPGSNSAKVSPQVVAEHTVRALQRTVPAAVPAIVFLSGGQSEEEASVNLNAINQVNGKKPWSLSFSFGRALQQSTLKAWSGKEENVKKAQEALLVRAKANSEATLGTYKGNSKLADGASESLHVEDYKY

SEQ ID NO: 49121 - protein, 417 aa, Glycine max
  Clone ID: 700562036_FLI.pep
RTSDIIGRKWTMALAAVVFQMGGLTMTLAPSYAVLMVGRFLAGIGIGFGVMISPIYIAEISPNLNRGSLTAFPEIFINVGIMLGYVSNYAFSGLSAHISWRVMLAVGILPSVFIGFALFVIPESPRWLVMQNRIDEARSVLLKTNEDEKEVEERLAEIQQAAGFANSDKYDDKPVWRELLFPPPPLRRMLITGLGIQCFQQISGIDATVYYSPEIFQAAGIEDNSKLLAATVAVGISKTIFILVAIILIDKLGRKPLLMISTIGMTVCLFCMGATLALLGKGSFAIALSILFVCGNVAFFSVGLGPVCWVLTSEIFPLRVRAQASALGAVANRVCSGLVAMSFLSVSEAISVAGTFFAFSAISALAIAFVVTLVPETKGKSLEQIEMMFQNEYEIQGKETELGDVEQLVQNQTDLTN

SEQ ID NO: 49122 - protein, 565 aa, Glycine max; identical to SEQ ID NO: 43888
  Clone ID: 700645785_FLI.pep

SEQ ID NO: 49123 - protein, 154 aa, Glycine max
  Clone ID: 700680467_FLI.pep
TRIVPPMASKRILKELKDLQKDPPTSCSAGPVAEDMFHWQATIMGPADSPYAGGVFLVTIHFPPDYPFKPPKVAFRTKVFHPNINSNGSICLDILKEQWSPALTISKVLLSICSLLTDPNPDDPLVPEIAHMYKTDRAKYEATARSWTQKYAMG

SEQ ID NO: 49124 - protein, 395 aa, Glycine max
  Clone ID: 700677096_FLI.pep
MAKLVFSLCFLLFSGCCFAFSSREQPQQNECKIYNFREGDLIAVPTGVAWWMYNNEDTPVVAVSIIDTNSLENQLDQMPRRFYLAGNQEQEFLKYQQEQGGHQSQKGKHQQEEENEGGSILSGFTLEFLEHAFSVDKQIAKNLQGENEGEDKGAIVTVKGGLSVIKPPTDEQQQRPQEEEEEEEDEKPQCKGKDKHCQRPRGSQSKSRRNGIDETICTMRLRHNIGQTSSPDIYNPQAGSVTTATSLDFPALSWLRLSAEFGSLRKNAMFVPHYNLNANSIIYALNGRALIQVVNCNGERVFDGELQEGRVLIVPQNFVVAARSQSDNFEYVSFKTNDTPMIGTLAGANSLLNALPEEVIQHTFNLKSQQARQIKNNNPFKFLVPPQESQKRAVA

SEQ ID NO: 49125 - protein, 651 aa, Glycine max
  Clone ID: 700681991_FLI.pep
SRPILEFGKPSADRSLGVPKMKLRRSSLCVFLGFLVLFLSPPPSMAKFVVEKNSLTVTSPDDIKGTHDSAIGNFGIPQYGGSMAGNVLYPKDNKKGCKEFDEYGISFKSKPGALPTIVLLDRGNCFFALKVWNAQKAGASAVLVSDDIEEKLITMDTPEEDGSSAKYIENITIPSALIEKSFGEKLKVAISNGDMVNVNLDWREAVPHPDDRVEYELWTNSNDECGVKCDMLMEFVKDFKGAAQILEKGGYTQFTPHYITWYCPQAFTLSKQCKSQCINHGRYCAPDPEQDFSTGYDGKDVVIENLRQLCVFKVANETKKPWVWWDYVTDFQIRCPMKEKKYNKKCADAVIESLGLDIKKIERCMGDPNADSENPVLKEEQDAQVGKGSRGDVTILPTLVVNNRQYRGKLEKGAVMKAICAGFEETTEPAVCLSSDVETNECLENNGGCWQDKVANITACKDTFRGRVCECPLVDGVQFKGDGYTTCAASGPGHCKINNGGCWHEARNGHAYSACSDDGGVKCKCPAGFKGDGVKNCEDIDECKEKKACQCPECSCKNTWGSYDCTCSGDLLYIRDHDTCISKTASQEGRSAWAAFWVILIGLVVAAAGAYLVYKYRIRSYMDSEIRAIMAQYMPLDSQGEIVNHVSEERA

SEQ ID NO: 49126 - protein, 340 aa, Glycine max
  Clone ID: 700760504_FLI.pep
CCSQLTQCSRANTHQCLSCPAASRPGCHKNTCGLMSTNPITQQTGLGELGQDVLAIHATQGSTQQLGPLVTVPQFLFSCAPSFLLQKGLPRNIQGVAGLGHAPISLPNQLASHFGLQHQFTTCLSRYPTSKGALIFGDAPNNMQQFHNQDIFHDLAFTPLTVTPQGEYNVRVSSIRINQHSVFPPNKISSTIVGSSGGTMISTSTPHMVLQQSLYQAFTQVFAQQLEKQAQVKSVAPFGLCFNSNKINAYPSVDLVMDKPNGPVWRISGEDLMVQAQPGVTCLGVMNGGMQPRAEVTLGTRQLEEKLMVFDLARSRVGFSTSSLHSHGVKCGDLFNFANA

SEQ ID NO: 49127 - protein, 307 aa, Glycine max
  Clone ID: 700829617_FLI.pep
PNKIDMIALSFVRKGSDLVEVRKVLGKHAKNIMLMSKVENQEGVANFDEILANSDAFMVARGDLGMEIPIEKIFLAQKVMIYKCNIQGKPVVTATQMLESMIKSPRPTRAEATDVANAVLDGTDCVMLSGETAAGAYPDLAVQTMAKICIEAESTLDYGDVFKRIMEHSPVPMSPLESLASSAVRTANSARAALILVLTRGGSTAKLVAKYRPGMPILSVVVPELKTDSFDWACSDEAPARHSLIFRGLVPVLSAASARASHAETTEEAIEFAMQHAKSKGLCHNGDSVVALHRVGTASIIKILTVK

SEQ ID NO: 49128 - protein, 395 aa, Glycine max
  Clone ID: 700832383_FLI.pep
GMAQETFLFTSESVNEGHPDKLCDQISDAVLDACLEQDPDSKVACETCTKTNMVMVFGEITTKANVDYEKIVRDTCREIGFISDDVGLDADKCKVLVNIEQQSPDIAQGVHGHFTKRPEEVGAGDQGHMFGYATDETPEYMPLSHVLATKLGARLTEVRKNGTCAWLRPDGKTQVTVEYYNDNGAMVPVRVHTVLISTQHDETVSNDQIAADLKEHVIKPVIPEKYLDEKTIFHLNPSGRFVIGGPHGDAGLTGRKIIIDTYGGWGAHGGGAFSGKDPTKVDRSGAYIVRQAAKSVVANGLARRCIVQVSYAIGVPEPLSVFVDTYGTGKIPDKEILQIVKENFDFRPGMITINLDLKRGGHRFLKTAAYGHFGRDDPDFTWEVVKPLKSEKPQA

SEQ ID NO: 49129 - protein, 724 aa, Glycine max
  Clone ID: 700834464_FLI.pep
PAPNEIPQNDRVRKRDPRLTCSNFLAGRVPCACPELDAILEDEGLPGKKRARTARASASARCQVPACEVDISELKGYHRRHRVCLRCANAATVMLNGEAKRYCQQCGKFHVLSDFDEGKRSCRRKLERHNTRRRRKPTADSGGATHSELLQPVAENEENNYDVEAGKDCSNLSTDINDVGVSLDLEDEPAPIPSSAPEAQNINSDSVVSLAVSGETRVNSGNTSNSPSYCDNKSAYSSMCQTGRISFKLYDWNPAEFPRRLRHQIFQWLASMPVELEGYIRPGCTILTIFIAMPNIMWINLLKDPLEYVHDIVAPGKMLSGRGTALVHLNDMIFRVMKDGTSVTNVKVNMHAPKLHYVHPTYFEAGKPMEFVACGSNLLQPKFRLLVSFSGKYLKCEYCVPSPHSWTEDNISCAFDNQLYKIYVPHTEESLFGPAFIEVENESGLSNFIPVLIGDKKICTEMKTLQQKLDVSLLSKQFRSASGGSICSSCETFALSHTSSSDLLVDIAWLLKDTTSENFDRVMTASQIQRYCHLLDFLICNDSTIILGKILPNLIILTESMKSNVVINRTSDVDIMQLLNHIHNARNAVYQKHPKSESIIVHSEMKGFILAQGCSQDNKLSVAINSQGIQSRADEKWGVLKVKSPTSNEKMERIPLLKRDIIMSMEELPERYGRRCLGRGFLTFRPAIFVLVSVAVCLGVCVAVLHPGRVSELAVSVRRCLFNY

SEQ ID NO: 49130 - protein, 360 aa, Glycine max
  Clone ID: 700808313_FLI.pep
HFLTLERMGMFFLDSSVYTPSAPPLCLPNGIDYSSYKEVLEAEPPEWLPDSSTTVCMQCSAPFTAITRGRHHCRFCGGIFCRTCTKGRCLMPVGFRERNPQRVCDACYDRLDPLQGVLINTISNAVQGAKHDVTDWTCARGWINLPIGLSMEHEIYKASNTLRNYCQVAKSNPEKSIPLTVLKSAKGLAILTVAKAGALVSYKLGTGLVVARRSDGSWSAPSAIFSLGLGWGAQIGGELMDFIVVLRDMKAVKTFCSRMHFSLGAGCSAAAGPVGRVLEADIRAGDRGSGMCYTYSCSKGAFVGVSLEGNIVATRMDANLCFYGDPYLTTSDILLGMVDRPKAAQPLYGSLQELYSCLRF

SEQ ID NO: 49131 - protein, 321 aa, Glycine max
  Clone ID: 700865217_FLI.pep
ARQAPLNHHTSPRSRYPFLLFFYLSSFKSIKMAETFLFTSESVNEGHPDKLCDQISDAVLDACLEQDPDSKVACETCTKTNLVMVFGEITTKANVDYEKIVRDTCRNIGFVSNDVGLDADNCKVLVNIEQQSPDIAQGVHGHLTKKPEEIGAGDQGHMFGYATDETPELMPLSHVLATKLGARLTEVRKNGTCPWLRPDGKTQVTVEYYNDNGARVPIRVHTVLISTQHDETVTNDEIAADLKEHVIKPVIPEKYLDEKTIFHLNPSGRFVIGGPHGDAGLTGRKIIIDTYGGWGAHGGGAFSGKDPTKVDEWCLHCETGC

SEQ ID NO: 49132 - protein, 79 aa, Glycine max
  Clone ID: 700871174_FLI.pep
IKLQCSKPLLIYHVTMNHNNTSTCHLDLRTKEKLLRKLNSQDLRTTVWGSSEKNPKRTLYIYIVKRWNPPDLHSHKGFC

SEQ ID NO: 49133 - protein, 167 aa, Glycine max
  Clone ID: 700896030_FLI.pep
KLENQTKPNQTKLIPTPLIKQKNNPNFQNSQTQEQLEITTNKNKTNWSKTMNLDLVLPDKASLNEEVGDVLTLVALELDDLAKLLVLHHGSVAAELLLEVLEDLLVAELLLQPLHCGQTLLPIPLLNSNMHILLCSGGIRFSRLGKRVEWGGDLDFQINHVLCLLET

SEQ ID NO: 49134 - protein, 366 aa, Glycine max; identical to SEQ ID NO: 37097
  Clone ID: 700846063_FLI.pep

SEQ ID NO: 49135 - protein, 476 aa, Glycine max
  Clone ID: 700567462_FLI.pep
NLGGTSTQSQKPKSALQFVETEEEKSWAPFKIRDFPDKMSQLKQMSHIDSAPPTPGKFKMDKASYFNRVRWHTSLAKLAVWSFVFLGAILIFFLRSPASSPVPADLSRRSLRTYNWGGPVWEKRVRASAQVRSRNGFAVLVTGAAGFVGTHVSAALKRRGDGVLGLDNFNDYYDPSLKRARQGLLERNGVYIVEGDINDEALLRKLFEVVPFTHVMHLAAQAGVRYAMENPGSYVHSNIAGFVNLLEVCKSVNPQPAIVWASSSSVYGLNTKVPFSERDRTDQPASLYAATKKAGEEIAHTYNHIYGLSLTGLRFFTVYGPWGRPDMAYFFFTRDLLKGKPIPIFEAANHGTVARDFTYIDDIVRGCLGALDTAEKSTGSGGKKRGPAQLRVFNLGNTSPVPVSDLVSILERLLKVKAKRNIMKLPRNGDVQFTHANISYAQSELGYKPTTDLQSGLKKFVRWYLNYYSGGKKAVE

SEQ ID NO: 49136 - protein, 761 aa, Zea mays
  Clone ID: 700222159_FLI.pep
LVDGLFMQEVEECLIKVEQSPRESISNALRPATEALVKKELLGHADSNVRLAVASCISEITRITAPDAPYDDDAMKDVFSLIVGAFEHLDDIESPFFGRRTSILDTVAKVRSCVVMLDLECDDLINDMFHHFLRTANSGHSEAIISCMETIMRLVIEESEDVQPQIASCLLQNVRKEEKESSPSFELAEKVIGTCREKLKPVFLQSLKGTSLSEYSQIVASVCEEVSDDREDNNANPSGKDMVDDGKLSERTISDELPQESSKMEQDVSRPEQDGTSMNGDTVTAISSGATPPDTSESDQGPPSTNEKIEQPCYAQNIADAMQLKSDHNEGAESNAAKPNKKATLGSVKNTKLKPSDKCEPTVHSDADTKKQDLVASAEGSNGAADDTSRPADSTPKPKRGRPPGPKSLQKAPGKDQSPGLDLKKVNDDSAGKLAKRSAKDEKPSAKNTGEGEPSKKTQKNNLKQHKGETLSEDDPAKDLSLKEMISLKSSTKGPGRTKGQTTENSTPKLKQEQETDEPPRSRKNKGLDRSLVGARIKVWWPDDKMFYNGIVESFDAVSKRHKVAYDDGDVEVLLLREEKWEFISEEKEASMASETPRGRKRKADALKEENTETPKSDAVDPPKKRGRPKGVGSSNGTPSTSATPSTKGKTAGKVTKETPKTGPNLKKELEKNSKDKANVSTGTKDDKSVSKPKEAIIKGKDSKDEGKSTEGKAKPGRKPKNAGTPAGDSDKEKQEVEVKAAEIEEASGNASTGKKRRRKA

SEQ ID NO: 49137 - protein, 153 aa, Zea mays
  Clone ID: 700578102_FLI.pep
TICYTYVHSVVDRNGWIRVFRRAPAPWRRRPGTAPRRTRRQGHRTPRPGTPSLARRRTGSPCPPRPHSCSPPPPPRRAWPPGTWARCTRRHQAGRRPPSGTPRRLSCSRSARPRSRRRQLHGRSSLWRGHGPPPCSSPPACPWRAARPRTRRQ

SEQ ID NO: 49138 - protein, 463 aa, Glycine max
  Clone ID: 700685101_FLI.pep
QLKLKSCPSLFNSKHKTSSSMAASVSTVGAVNRALLNLNGSGPGVSAPSSSFFGSSLKKVIGSRVPNTKISSGSFKIVAVEEKKEIEETQQTDKDRWKGLAYDISDDQQDITRGKGLVDSLFQAPQDAGTHYAVMSSYEYLSTGLRQYLDNNMDGFYIAPAFMDKLVVHITKNFMTLPNIKVPLILGIWGGKGQGKSFQCELVFAKMGINPIMMSAGELESGNAGEPAKLIRQRYREAADLIKKGKMCALFINDLDAGAGRLGGTTQYTVNNQMVNATLMNIADNPTNVQLPGMYNKEENPRVPIIVTGNDFSTLYAPLIRDGRMEKFYWAPTRDDRIGVCTGIFRTDSIPEQDVVKIVDTFPGQSIDFFGALRARVYDDEVRKWISGVGVDGIGKKLVNSKDGPPTFEQPKMTLEKLLTYGNMLVQEQENVKRVQLADKYLNEAALGNANEDAINRGTFFQS

SEQ ID NO: 49139 - protein, 558 aa, Glycine max
  Clone ID: 700979762_FLI.pep
FDRFDDVRGLFEGGIHLPTDALSKISPLPVLKEIFRTDGEQVLKFPPPHVIKVSKSAWMTDEEFGREMLAGVNPCLIECLQVFPPKSKLDPTVYGDQTSTITKEHLEINLGGLSVEQALSGNRLFILDHHDAFIAYLRKINDLPTAKSYATRTILFLKDDGTLKPLAIELSLPHPRGDEFGAVSRVVLPADQGAESTIWLIAKAYVVVNDSCYHQLMSHWLNTHAVIEPFVIATNRHLSVLHPIYKLLLPHYRDTMNINGLARQSLINAGGIIEQSFLPGPFAVEMSSAVYKGWVFTDQALPADLIKRGMAVEDPSSPYGLRLVIDDYPYAVDGLEIWSAIQTWVKDYVSLYYATDDAVKKDSELQAWWKEAVEKGHGDLKDKPWWPKLNTLQDLIHICCIIIWTASALHAAVNFGQYPYGGFILNRPTLTRRLLPEPGTKEYGELTSNHQKAYLRTITGKTEALVDLTVIEILSRHASDEVYLGQRDNPNWTDDTKAIQAFKKFGNKLKEIEDKISGRNKNSSLRNRNGPAQMPYTVLLPTSGEGLTFRGIPNSISI

SEQ ID NO: 49140 - protein, 932 aa, Glycine max
  Clone ID: 700996273_FLI.pep
VRLDAGTVFTTTTVFKILQEPIRTFPQSMISLSQALVSLGRLDRYMSSRELMDSVEREEGCGGHTAVEVKDGTFSWDDDGQLKDLKNINLKINKGELTAIVGTVGSGKSSLLASILGEMHKISGKVQVCGSTAYVAQTSWIQNGTIEENIIFGLPMNRQKYNEVVRVCSLEKDLEMMEHGDQTEIGERGINLSGGQKQRIQLARAVYQDSDIYLLDDVFSAVDAHTGTEIFKECVRGALKGKTVILVTHQVDFLHNVDLIVVMRDGMIVQSGKYDDLLASGMDFSALVAAHDTSMELVEQGAVMTGENLNKPLKSPKAASNNREANGESNSLDQPKSGKEGSKLIKEEERETGKVSLHIYKLYCTEAFGWWGIIAVISLSVLWQASMMASDYWLAYETSEERAQLFNPSMFISIYAIIAVVSVVLIVLRSYSVTVLGLKTAQIFFSQILHSILHAPMSFFDTTPSGRILSRASTDQTNVDVFIPLFINFVVAMYITVISIFIITCQNSWPTAFLLIPLAWLNIWYRGYFLASSRELTRLDSITKAPVIHHFSESISGVMTIRAFRKQKEFCGENIKRVNANLRMDFHNFSSNAWLGFRLELLGSLVFCLSAMFMIMLPSSIIKPENVGLSLSYGLSLNAVMFWAIYMSCFIENKMVSVERIKQFTNIPSEASWNIKDRLPPANWPGEGHVDIKDLQVRYRPNTPLVLKGITLSINGGEKIGVVGRTGSGKSTLIQVFFRLVEPTGGKIIIDGIDISALGLHDLRSRFGIIPQEPVLFEGTVRSNIDPTGQYTDEEIWKSLERCQLKDAVASKPEKLDTSVVDNGDNWSVGQRQLLCLGRVMLKQSRLLFMDEATASVDSQTDAVIQKIIREDFAARTIISIAHRIPTVMDCDRVLVVDAGRAKEFDSPANLLQRPSLFGALVQEYANRSSGL

SEQ ID NO: 49141 - protein, 204 aa, Glycine max
  Clone ID: 700957246_FLI.pep
FVCKFWFPILKTVIFLSNVGGHINPAVTFGLFLARKVSLIRAIMYMVAQCLGAICGVGLVKAFQKAYYNRYGGGANELSEGYSTGVGLGAEIIGTFVLVYTVFSATDPKRNARDSHVPVLAPLPIGFAVFMVHLATIPVTGTGINPARSLGAAVMYNQQKAWDDHWIFWVGPFIGAAIAAFYHQFILRAGAAKALGSFRSNPTI

SEQ ID NO: 49142 - protein, 219 aa, Glycine max
  Clone ID: 701012504_FLI.pep
ASLSSLVLLLAALILSPQVLANYENPPVYKPPTEKPPVYKPPVEKPPVYKPPVENPPIYKPPVEKPPVYKPPVEKPPVYKPPVEKPPVYKPPVEKPPVYKPPVEKPPVYKPPVEKPPVYKPPVEKPPVYKPPVEKPPVYKPPVEKPPVYKPPVEKPPVYKPPVEKPPVYKPPVEKPPVYKPPVEKPPIYKPPVEKPPVYKPPYGKPPYPKYPPTDDTHF

SEQ ID NO: 49143 - protein, 465 aa, Glycine max
  Clone ID: 701042080_FLI.pep
AIGTGIFDYVWVQFYNNPSCSYSQNNLDNFLKSWREWATSLKVGKLFLGLPADEAAAPAGGYVPADVLMSKILPEINKSTNYGGLMLWSRYYDKISGYSTRIQNPLRNGTANPLCTRKSQACRSHEGGFAELLGYMSTLGIKVYEDDNNGTQCCEIICRNNCSCDAFAPLNHINNTSTGCQIWLKGTKFVRASGNIALPINVSVALLEHKVNSWWIWLIVGVGAAFVIPVIFYLSRAFLRKYKAKVERKKMQKKLLHDIGGNAMLAMVYGKTIKSNNKGKTNNEVELFAFDTIVVATNNFSAANKLGEGGFGPVYKGNLSDQQEVAIKRLSKSSGQGLIEFTNEAKLMAKLQHTNLVKLLGFCIQRDERILVYEYMSNKSLDFYLFDSARKDLLDWEKRLNIIGGIAQGLLYLHKYSRLKVIHRDLKASNILLDHEMNAKISDFGMARIFGVRVSEENTNRVVGT

SEQ ID NO: 49144 - protein, 509 aa, Glycine max
  Clone ID: 701047921_FLI.pep
CLAWKRKMATNGKTPAIGIDLGTTYSCVAVWQRDRVEIIANDQGNRTTPSYVAFNNTQRMIGDAAKNQAATNPTNTVFDAKRLIGRRFSDQEVQSDMELWPFKVIADVNGKPMIAVDYNCEKKQFSAEEISSMVLAKMLDIAESFLGSTVKNAVITVPAYFNDSQRQATKDAGKIAGLNVLRILHEPTAAAIAYRLEMKNCNNDRRNVFVFDLGGGTLDVSLLVFEKDHIRVKATTGDTPLSLGLQEDGGIMKVIIPRNTSIPTKMEDVLTTHFDNQTNILIHVYEGERKRTRDNNLLGKFVLEIPPVPRGVPQISVCFELDYDGILHVSAEEKSRGISKKLAITNDKGRLSKKEIERMISEAEKYKAEDEMYRNKVQSRHALEKYAYNMRDAINIKEISLKLSPEDKKNINDAIDSALEWLEVSMDANPNDFDNMRSTLSSVFNPVIVKMIKDEDNVAPPDTVASSGSNSVKNGLLSILANFALDAVYSAATGDIIGFASVIVDCLSI

SEQ ID NO: 49145 - protein, 934 aa, Glycine max
  Clone ID: 701050680_FLI.pep
PAPGSGCIEISQRLNPMANEGSDIDEVNYALDGVGEEEEDENAAQEEDDNDMEEDEEEYTFRFKTGMNPLDFVDDNDDSGIQPYQRFVRLEREALADKKRKAPEQCHSEEPPSKMAREGDISGAKIAEIMEAMDYYGMRKRSRKPKKRGRRKGSKNRVDPKLTQMQGDATFHYACGDYDRAKAVLCEVIRLAPNLHESYHTLGLVYTSLQDYKRAMALYLIAAHLDPKESPLWKTIFTWSIEQGYVDQAGYCLLKAIKADPKDVTLRFHLARLYAELGHYQKAAVTYEQVHKLCCENIDALKAAAKFYKKCGQVEYSIQILEDYIKSQPVGANVSVVDLLGTVLMETKAHDRALQHIEHAQTVNARKELPLNLKIKAGICHAHLGNMERAQALFNDLKPENASKHIDLVTKVADSLMGLEHYNPALNYYLMLEGNIEKENGLLYLKIARCYMSLKERSQAILFYSKALETLQDDVDARITLASLLLEEAKEDEAISLLSPPKDSDFGEAPSEKSNRWWADIRIKLKLCNIYWNRGTLDDFVDTIFPLVRESLYVATLRQKGKSKKRLSKRDLVERVRVLDGPEKDNVFRGFRPVAAPSDLLKASRAKKLLQKKAMEKEKRKAEALASGIDWLSDDSDDEPQKENREPPLCNLLKDEEHHQLIIDLCKALASLQRYWEALEIINLSLRLAHTSLSTEKKEELRSLGAQMAYNTTDPKHGFDCVKYIVQQHPHGVAAWNCYYKVISRLENRDTRHYKFVRGMQGKFVDCVPPILISGHQFTICSHHQDAARKYLEAYKLLPENPLVNLCVGTALINLALGFRLQNKHQCVVQGLAFLYNNMRICENSQESLYNIARAFHHVGLVTLAAFYYEKVIAICEKDYPIPKLPNENPDSIETHKPGYCDLRREAAYNLHLIYKKSGALDLARQVLKDHCTL

SEQ ID NO: 49146 - protein, 284 aa, Glycine max
  Clone ID: UC-GMFLMINSOY001H05_FLI.pep
FDTCLGKGGYGTVYYGKLQDGREVAIKCFHDESETEETIKQFMKETAILGLLHHENLVSLYGRTSRNCNKHMLVYEYISNGTLTKHLHESSGGKLPWHNRLNIAIETATALVFLHESGIIHRDVKGSNILLDENFTVKVADFGFSRSLPDHATHVSTIPVGTRAYIDPDYYESGRVSDKSDVYSFGVVLFELISSIRPSLMEGTDYVTLAQFAKRKILNKELTAVVDQSFWLGVDKNMMEMITAVAELAFQCVQCPKELRPSMKQVLDTLEGIRKGTWGFNQIT

SEQ ID NO: 49147 - protein, 515 aa, Glycine max
  Clone ID: 700876780_FLI.pep
KSRRRKTAAWLRECVLQLGPTFIKLGQLSSTRSDLFPREFVEELAKLQDRVPAFSPKKARGFIESELGAPINILFKEFEDRPIAAASLGQVHRAILHNGEKVVVKVQRPGLKKLFDIDLQNLKLIAEYFQRSETLGGPTRDWVGIYEECATILYQEIDYINEGKNADRFRRDFRNIKWVRVPLVYWDYTASKVLTLEYAPGIKINEVDMLASRGYDRLRISSHTIEAYLIQILRTGFFHADPHPGNLAVDVDEAIIYYDFGMMGEIKSFTRERLLELFYAVYEKDAKKVMQCLIDLGALQPTGDLSSVRRSIQFFLDNLLSQTPDQQQTLSAIGEDLFAIAQDQPFRFPSTFTFVIRAFSTLEGLGYILNPDFSFVKIAAPYAQELLDIRQKRPTGPQLVEEIRKQADDARTNSISMPYRVQRIEEFVKQLEAGDLKLRVRVLESERAARKATILQMATMYSVLGGTLLNLGVTLSSQGNQAFANGSFIGAGILGALFLRSMQRLKKLDKFENMI

SEQ ID NO: 49148 - protein, 308 aa, Zea mays
  Clone ID: LIB3587-195-A1_FLI.pep
LAALKRAANQHGDAEQRLIAMMVAALSSRIAPAASAPSQLLADLCSVEQRAGSQLLQDLSPCFRVALHAASAAIVEAVGDHRAIHLVDFDVSFPQHAALIQYLADRRVQGRSLKVTAVTDPSSPFTQSLTASLPAIEERLKKLAERAGVEYRFTVVSCRAAELDASRLCCEPGEAVAVNLAFALSHVPDESVSPANPRDELLRRVRALGPQVVTLVEQELNTNTAPLAARFTDACAHYGAILESLDATLAREIAEKARAEAALSKKAANAVPYWCSVPARRGSPPAGPARARGGAARRGGWPERRSRR

SEQ ID NO: 49149 - protein, 516 aa, Glycine max
  Clone ID: 700736495_FLI.pep
GKPFFTLSLSSLCLLLLSSACFAITSSKFNECQLNNLNALEPDHRVESEGGLIETWNSQHPELQCAGVTVSKRTLNRNGLHLPSYSPYPQMIIVVQGKGAIGFAFPGCPETFEKPQQQSSRRGSRSQQQLQDSHQKIRHFNEGDVLVIPPGVPYWTYNTGDEPVVAISLLDTSNFNNQLDQNPRVFYLAGNPDIEHPETMQQQQQQKSHGGRKQGQHQQQEEEGGSVLSGFSKHFLAQSFNTNEDTAEKLRSPDDERKQIVTVEGGLSVISPKWQEQEDEDEDEDEEYEQTPSYPPRRPSHGKHEDDEDEDEEEDQPRPDHPPQRPSRPEQQEPRGRGCQTRNGVEENICTMKLHENIARPSRADFYNPKAGRISTLNSLTLPALRQFGLSAQYVVLYRNGIYSPHWNLNANSVIYVTRGKGRVRVVNCQGNAVFDGELRRGQLLVVPQNFVVAEQGGEQGLEYVVFKTHHNAVSSYIKDVFRAIPSEVLSNSYNLGQSQVRQLKYQGNSGPLVNP

SEQ ID NO: 49150 - protein, 384 aa, Glycine max
  Clone ID: 700753845_FLI.pep
SDLHLHRIQSMKIYILLVITSFTFGFLEKVVSNPSPRPYKAIFNLGDSLSDTGNFLASGAILFPVIGKPPYGQTFFKRATGRCSDGRLMIDFIAEAYELPYLPPYLALTKDKDIQRGVNFAVAGATALDAKFFIEAGLAKYLWTNNSLSIQLGWFKKLKPSLCTTKQDCDSYFKRSLFLVGEIGGNDYNYAAIAGNITQLQATVPPVVEAITAAINELIAEGARELLVPGNFPIGCSALYLTLFRSENKEDYDDSGCLKTFNGFAEYHNKELKLALETLRKKNPHARILYADYYGAAKRFFHAPGHHGFTNGALRACCGGGGPYNFNISARCGHTGSKACADPSTYANWDGIHLTEAAYRYIAKGLIYGPFSYPPLKISPNKIA

SEQ ID NO: 49151 - protein, 550 aa, Glycine max
  Clone ID: 701003234_FLI.pep
RCCLLAGDRSGRNSNATDMGKKGSWFSAIKRVFTHHSKGKDSDNNKGTKEKKKSLGKLKHGEANSFIPLFREPSSIEKIFGDFEREQQLLGLRPATPPERPKTPPYAPPRAPSPRPPSPRVPSPRPPSPRAASPRAASPRVTSPKATSSRIAHHHKEVGHRPEPTLRQQQASATKIQSVYRGYMARRSFRALKGLVRLQGVVKGQNVKRQTVNAMKHMQLLVRVQCQIQSRRIQMLENQARYQADFKNDKDAASILGKLTSEAGNEEWDDSLLTKEEVEARLQRKVEAIIKRERAMAFAYSHQLWKATPKSTHTPVTDTRSGGFPWWWNWLERQTPAATPQERQSLKNFQITPPRPYSEQKTSPRPGSSTQRQPQQQQPHFAFDNMDTPTPKSTKSTIVTSSKPARTPPFRTPQANGSGSGSRYPRPRGVGSNSPFDVPLKDDDSLTSCPPFSVPNYMAPTLSARAKVRASSNPRERLGGTPTSTDSKRRLSFPLSQGIGSFKWSKGFSNKDQRVPDKFQSLESIGNVSVDSTVSLPARVVGRKPFTRFV

SEQ ID NO: 49152 - protein, 133 aa, Glycine max
  Clone ID: 701000729_FLI.pep
DSSSHRRRRHHRHRRYRDKDSLKIRKKSKSQSQSRGERRRRHHRHSSDSDSYSSSSLSDYSRSESSSDSEHETSHRSKRHKKSDRPKKNKEKDRSKSHRHKRQKHKVKEVGHFLMPCLLSSVGLFRIVCYSSY

SEQ ID NO: 49153 - protein, 378 aa, Glycine max
  Clone ID: 701117969_FLI.pep
LKSNLPLFLLPPTSPSSSSIMSHFKGKYHDELIVNAAYIGTPGKGILAADESTGTIGKRLASISVENVESNRRALRELLFTAPGALKYLSGVILFEETLYQSTAAGKPFVEVLKEAGVLPGIKVDKGTVELAGTNGETTTQGLDGLGQRCAKYYEAGARFAKWRAVLKIGPNEPSELAIHENAYGLARYAVICQENGLVPIVEPEILVDGSHDIHKCAAVTERVLAACYKALNDHHVLLEGTLLKPNMVTPGSNSAKVSPQVVAEHTVRALQRTVPAAVPAIVFLSGGQSEEEASVNLNAINQVNGKKPWSLSFSFGRALQQSTLKAWSGKEENVKKAQEALLVRAKANSEATLGTYKGNSKLADGASESLHVEDYKY

SEQ ID NO: 49154 - protein, 495 aa, Glycine max
  Clone ID: 701130310_FLI.pep
GFLGKNIQSQLVPILDDFRGLRNYHTVAYLGVSPTAKPKYWLAFAATVPPIGFSTYYVSYAKKEATISDRDTAYQPGNKSDTITVGLKNLNLVYSVKEGKLIQYINSRSKVNESLEQAYKFYAGYGNDGTETAQASGAYIFRPDGSPSPIKSNGKSPLTVFRGPIVHEVHQKISPWIYQTTRLYKGKEHAEVEFIVGPIPIDDRVGKEIATEIKTNLASNKTFYTDSNGRDFIERVRDYREDWHLEVNQPVAGNYYPINLGIYLKDKSKEFSILVDRAVGGSSIIDGQLELMVHRRLLEDDSRGVAEALNETVCIHDNCTGLTVLGKYYFRIDPVGEGARWRRSFAQEIYSPLLLAFTEGEGHWGDSHVTTFSAIDSSYNLPDNVAIITLQDLGDGRVLLRLAHLYEIDEDKYLSVKATVELKKVFPNKQINKITEVSLSANQERAEMERKRLVWQVKGSPPEPKVWRGGPVDPENLIVELAPMEIRTFIISFRH

SEQ ID NO: 49155 - protein, 317 aa, Glycine max
  Clone ID: 701209941_FLI.pep
MDYTYDTKHRTMEPHGIRGVMDLEHQIHYLETEAYSSILKAFIAQSDLLTWGKEGLMTELRKELNVTDIEHGEILLKINSDQLIKQIREQRKLASQAKDYIKPSAPDCVCASMGNSVIRMKTPSSAAFYTQKKMSHCQASLISTPIPSPMPPKFNDDPLNAEFAHGNVQQSMEMLNCNVQLPPVGGGRGLKGKYPLQKDLHRSHLVKLKKRSDLIQLRATDRVIHDVKKMLFSRGKPDPVDIERAKRTLTEQEIAITEALGKVANVLERGDAPNQMQRYELSKNTPGGQEMMIHANFRELIGNGRLNKHGVHSDLCS

SEQ ID NO: 49156 - protein, 559 aa, Glycine max
  Clone ID: 701213438_FLI.pep
FTLSLSSLCLLLLSSACFAISSSKLNECQLNNLNALEPDHRVESEGGLIQTWNSQHPELKCAGVTVSKLTLNRNGLHLPSYSPYPRMIIIAQGKGALGVAIPGCPETFEEPQEQSNRRGSRSQKQQLQDSHQKIRHFNEGDVLVIPPGVPYWTYNTGDEPVVAISLLDTSNFNNQLDQTPRVFYLAGNPDIEYPETMQQQQQQKSHGGRKQGQHQQEEEEEGGSVLSGFSKHFLAQSFNTNEDIAEKLQSPDDERKQIVTVEGGLSVISPKWQEQQDEDEDEDEDDEDEQIPSHPPRRPSHGKREQDEDEDEDEDKPRPSRPSQGKREQDQDQDEDEDEDEDQPRKSREWRSKKTQPRRPRQEEPRERGCETRNGVEENICTLKLHENIARPSRADFYNPKAGRISTLNSLTLPALRQFQLSAQYVVLYKNGIYSPHWNLNANSVIYVTRGQGKVRVVNCQGNAVFDGELRRGQLLVVPQNFVVAEQAGEQGFEYIVFKTHHNAVTSYLKDVFRAIPSEVLAHSYNLRQSQVSELKYEGNWGPLVNPESQQGSPRVKVA

SEQ ID NO: 49157 - protein, 565 aa, Glycine max; identical to SEQ ID NO: 43888
  Clone ID: 700760632_FLI.pep

SEQ ID NO: 49158 - protein, 425 aa, Zea mays
  Clone ID: LIB3150-014-B11_FLI.pep
AELDRATTSMARKRKASDSAAGIDGVHSLPPPLALASTDACAWASSGGTSMAAVAEAAAAQQQRRGRKRFVGVRQRPSGRWVAEIKDTIQKIRVWLGTFDTAEEAARAYDEAACLLRGANTRTNFWPRPSPASSVAVAAAAHPAPPPPTPPPLPGLMGSPTQPPALPSKVTNLLLLRLRARNNQQQLLLNATPARQQEAAAAALLQGPLCAEPYGGGEECAFQVDDFLSYDCGSDENSSQEIEDEEEEEEEEEEEEEELDFQFMDQQTASPGAGCEGGLCSPFEVVAAELGGAVEAGGGEPATAVQELMMSRMDYERKISASLYALSGVSECIKMRLGAAAGGHAVRDQLSGLREACRKKQREIVQQQHEQEPSMDTAEDVKPPREERSPGDGAPEATSSSSEASHGDSDGDMLLWSSLDLAPIC

SEQ ID NO: 49159 - protein, 581 aa, Zea mays
  Clone ID: LIB3136-056-H11_FLI.pep
TSSFPPSQPRLTDSPIRSLPSPAMHPSSGAGDYAPYYPPYPSPAAPPPAAYPSVSAPASAPPYSSYPADFAPAPSYPAYPPADLPHYAPPPAAPAPPQPYYPYEPAPAPPLPPSPHNPVPSPYPSLDRAGSYGYGSGPGSGYGQELYPPKPAGGWSDDGAYAYNGGDAPEPYGSRGTAPRPGSGSALFDDYGRSIGSAADRGGRGGSAASPKVVRAVPKAETSEDVRGGVQKFRVKLLPEGAGSPMDVLCQVGLDGIRMLDPNTGRTLRIYPLETVTRCDVLDSSIFAFWSKSSVDVEGKRIRLKSNSYTSNTILDTVTAATVQFKEMGESSISRSRAIADASKPAEQQNERKKNFLDWRNLMKPMNEEKDHWVPDEAVSKCTACAADFSAFNRRHHCRNCGDIFCDKCTQGRTPLTTDADAQPVRVCDRCMAEVTQRLNNAREVANRPIVHSHEDLAKKLQEAMDINKRSSSGTRSSDVSGKRMREVACPNLHGPSSGRGSSFWFGDDRVRRMSEPFPRQRPLNRVQRLQAPCGGVFSDSQAKSRSCSIEPGAEFRLSLSVCTLILHGSLSLQVVSKLYG

SEQ ID NO: 49160 - protein, 442 aa, Glycine max
  Clone ID: 700754292_FLI.pep
VVVIHHNTLSLKFRKMASAMFRRNIITHYSKFASSLSSLPRHSSIYNPLSMSVSSFHSESVGGGGGLPSSMRGAVYWEPNKPLTIEEFHMPRPKAGEVLIKTKACGVCHSDLHVMKGEIPFTSPCVVGHEITGEVVEHGALTDSKTIERLPVGSRVVGAFIMPCGNCSYCSKGHDDLCEAFFAYNRAKGTLYDGETRLFFRNSGKPAYMYSMGGLAEYCVVPANGVSVLPDSLPYTESAILGCAVFTAYGAMAHAAQVRPGDSVAVIGTGGVGSSCLQIARAFGASDIIAVDVRDEKLQKAKTFGATHTVNSAKEDPIEKILEITGGKGVDVAVEALGKPQTFAQCTQSVKDGGKAVMIGLAQAGSLGEVDINRLVRRKIQVIGSYGGRARQDLPKLIRLAETGIFNLGHAVSRTYTFEEAGKAFQDLNEGKIVGRAVIEII

SEQ ID NO: 49161 - protein, 611 aa, Glycine max
  Clone ID: 700842749_FLI.pep
KNIALVLSKLPNTSTQHNSNIWRLNNWLAERVKDHAGKAMGDIGGRGKARETHELGAHFESLADKVTDHAAANVVGNKESQREARGGVRDVGKFEMRTEGGEKGNKDRPELKTRTREVIGRTEKERGRESGGQVVAEKGRETETARGRVGAENEGARTTAVITCTLEKGGGTQKPIREEERESESERSAWEQISNYSDQATQGVKEKYERAKQAASETLNTTTQTAQEKSAQAKNLAAQAKDATLEKGQQGYAVTKDTISSAAKTASEKTAPVAEKAKDYTLQAAEKAKSAGGTTASYVGEKAVQAKDVAVESGKSAAGYAAKVAADLRDKATAVGWAAAHFSAEKTVEGTKAAAHVVEGAAGYAGHKAAELASMSAGAVKGLAASAGETAKEYTAKKKEEAQRELEAKKPSQPQEAEERPSEGIGETVRQYAQKPKPSERNPQKEGTGSIVFTAIGETVSSAGEKVKKPFKNTMGGESEGGGGKEEGKSVIGKSLTSIGEKLGDAKQREELLDNVTGNITEGGGEVLGAVGETVAEIGQNMMKPAEIVQERAHVRQAGGVLDAIGETIAEIAETTRVMVSGEDERVLRQSVVLETRVTGRAKHEEGSHGA

SEQ ID NO: 49162 - protein, 196 aa, Zea mays
  Clone ID: LIB189-031-E9_FLI.pep
RYRHTSGDGGGYDLASPAPLLTLGNEAPASPWILRAKAVVTLEPTHPKPCIACKEETSPGSIVKRKLSPPWSLLPHAATGREGSVLSHHSYLLAQAAPSSSGRALLSPEGMRVLRVGVLGWKRGCTLALWASEQAQRFTLTELSSISTARTHANNSANTIDYYAAQIIKHEGYIGKYSRLSKGPAEEDITKHSTIT

SEQ ID NO: 49163 - protein, 448 aa, Glycine max
  Clone ID: 700788389_FLI.pep
LIRLGMEGLGGLGHLFVTMFVTGFGGVIVLPAITDVTMAALCPGQDQCSLAIYLSGFQQAMAGVGSVVMTPLIGNLSDRYGRKALLTLPLTVSVIPQVILAYSRDTQFFYAYYVVKTLAAMAGEGSFHCLALAYVADKVPDGKRTSAFGILAGVGSASFVGGTLAARFLSTALTFQVASVLSMVALVYMRIFLKDSVPGGAIRQPLLKVVEESCAEDDSTPKSAGTFKKLPSLGDFICLLKCSPTFSQAAIVSFFNSLADGGLMAVLLYYLKARFQFNKNQFADLLMITGIGATLAQLFFMPILVPVIGEEKLLSTGLLISCINVFVYSIAWTAWVPYALAGCSVFAVFVRPSLCSIASKQVGPTEQGMVQGCLSAISSFANIIAPLIFSPLTALFLSEEAPFYFPGFSLMCLGLALMVAFFQSLMIRAVPPIAGGKISGNRCTDTLV

SEQ ID NO: 49164 - protein, 530 aa, Zea mays
  Clone ID: 700043404_FLI.pep
ARWACSSTSTCPGTSCRVGSPPPSSRSRRCGTSTSPATGWRASFPPPRLARRRWRSWTSRRTCSLGRAPCMRGNSSARTVLVAGNCFADAKQQRASSYCNPGALAAVLPPPQGNGGGGQGTGKGREIGMVLAIAGSVVGAALLIALAMVVVLRRARRQRPEATILPKSPAATPTNKADGWKAPAKATQKIITTADKRHASQAARVNTLEVPAYRVCTLEELQEATDNFSSSNLIKTSPLAQDYNGQLQDGSRVLVRCLRLKPKYSSQSLVQYMEIISKLRHRHLVSIIGHCIVSDEENPNIASLVYLVSECVTNGSLRSHLTEWRKREMLKWPQRVCAAIGIARGVQFLHNLTAPGIVQNNLNIEHILLDKTLTSKISNFSLPMISTSKNGKILSETPFAVHEDNDIGSAQNAAQGDKEDIYQIGLILLEVITGKPTESQRQLESLKAQLSEALTEDPDRLKDMADPAIHGTFAVDSLSTVAEIALKCTTGDPSDRPSIDDVLWNLQYSMQVQDGWASSESLGLSVKSQA

SEQ ID NO: 49165 - protein, 463 aa, Zea mays
  Clone ID: UC-ZMFLMO17234C12_FLI.pep
TRRLPSAPPFRPLSLASSISPPTMGKEKSHINIVVIGHVDSGKSTTTGHLIYKLGGIDKRVIERFEKEAAEMNKRSFKYAWVLDKLKAERERGITIDIALWKFETTKYYCTVIDAPGHRDFIKNMITGTSQADCAVLIIDSTTGGFEAGISKDGQTREHALLAFTLGVKQMICCCNKMDATTPKYSKARYDEIVKEVSSYLKKVGYNPDKIAFVPISGFEGDNMIERSTNLDWYKGPTLLEALDQITEPKRPSDKPLRLPLQDVYKIGGIGTVPVGRVETGVIKPGMVVTFGPTGLTTEVKSVEMHHEALQEALPGDNVGFNVKNVAVKDLKRGFVASNSKDDPAKEAASFTSQVIIMNHPGQIGNGYAPVLDCHTSHIAVKFAELITKIDRRSGKELEKEPKFLKNGDAGMVKMIPTKPMVVETFSAYPPLGRFAVRDMRQTVAVGVIKSVEKKDPTGAKVT

SEQ ID NO: 49166 - protein, 346 aa, Zea mays
  Clone ID: UC-ZMFLMO17085B01_FLI.pep
AAAVRGSPGFRLVWPSSLGAAMDAYEATKVVFSRIQALDPDHAAKIMGLLLIQDHGEKEMIRLAFGPESLLHAVMAKARKDLGLLLPASPTSVAAAGHAPFLQLPRQNSGRAGAPSPLSVSSPSSWGHAPVFSRSNSTSNGTAEEAAGAGEELPSPVNGGAAPFFPRQAGDALLDDLQLQEQLAFLNEGGGNPAHQLLGFDGGECRSPGPGDADGMFAFGLGWHNGGPAHRRSSSVNELCLGGGGDGFGWKPCLYYARGFCKNGGSCRFVHGGLSDEAAALAGTKMEAAADQQQQCQDFLIRSKGQRLGPAAFPYSPTGSLPGSPSAASKCLSFLLQQQQQQHDRA

SEQ ID NO: 49167 - protein, 118 aa, Zea mays
  Clone ID: UC-ZMFLMO17117G09_FLI.pep
SVLLPLENGDRHLKTRLVAGESLSVPSRSCMHGTHHCVIAAAPTPPPSIHTHTQKKKKQHPCHVQPEPQCVARQQQQKKKSCSHTTKRGSGGGHAILSVGVTFSLSQLIALSASCTDL

SEQ ID NO: 49168 - protein, 276 aa, Zea mays
  Clone ID: UC-ZMFLB73204D05_FLI.pep
GFAAKPQTSRRPFPSAASSSHALRSKMYKLGRGNRDKVQQFMTITGASEKVALQALKASDWHLEGAFDFFYSQPQVSVVNTRHLEDIFNRYKEPDADMIMVEGISQFCNDLQVDPQDIVMLVISWHMKAATMCEFTRQEFIGGLQSIGVDSIEKFRGKLPSLRAELKDDNKFRDIYNFAFTWAREKGQKSLSLETAIGMWQLLFAERNWPLLDHWCQFLQVRHNKAISRDTWSQLLEFVKTTDPQLSNYDDEGAWPYLIDEFVEYLTENGLVQRKR

SEQ ID NO: 49169 - protein, 511 aa, Zea mays subsp. mexicana
  Clone ID: UC-ZMFLTEOSINTE071C04_FLI.pep
VKMGVAGHNDPLLGETTCGSLLQQLQLIWDEVGESDEDRDKMLLQLEQECLDVYRRKVDQASSSRSCLLQQLSNSKSELTRLLSALGESSISGAPDKTSGTIKEQLAAISPSLETLRRKKESRVKEFAHVQLQIQILRDEIAGDLHIGEQLETPHVNADDLSVRRLNEYLSELQALQKEKSTRLSRILESVSSVHDLCSVLGMDFVGTVTKVHPSLDDSVGVQSKSISGETISKLSKMVIVLEEEKSKRFAKIQALASQLSDLWNLMDSPVEEQQPFRHVTCIMSSTLDDVIVPGALALDVIQQAELEVERLDQLKASRMKDIAFKKQTELEDIYARAHVAVDSSAARDRIMSIIESSSFEPSELLADMENQILKANEESLSRKDILERVDRWMSACEEESWLEDYSRDDNRYSATRGAHLNLKRAEKARVLVNKIPAIVDTLLAKTRAWEQEHGVAFTYDGVPLLAMLDEYKILRQEKEDEKRRMRDQKKMNEQLAAEQEKLFGSKPSPA

SEQ ID NO: 49170 - protein, 458 aa, Zea mays
  Clone ID: UC-ZMROB73075G10_FLI.pep
RMDIESRQVSKGDAIAAAVSVDWKGRPCDPLKHGGMKAAVFVLGIQAFEMMAVAAVGNNLITYVFGEMHFPLSQAANIVTNFIGTVFLISLLGGFLSDSYLGSFWTMLIFGFVELSGFILLAVQAHLPQLRPPPCDMMAPGQACEEARGLKAGIFFAALYLVALGSGCLKPNIIAHGADQFRRGSGSDAARRLSSYFNAAYLSFCVGELVALTVLVWVQTRSGMDVGFGVSAAAMAVGLLSLVAGVAFYRNKPPQGSIFTPIAKVFVAAVSKRKQVCPSTASTQAVAGSTVHEMSVNTTDICHINKFRFLDKACMKAQDGPGGSSAGKKSPWIMCTPAEVEQVKLLLCVVPIFACTIIFNTILAQLQTFSVQQGSAMDTRLAASFHVPPASLQAIPYIMLVALVPAYEAAFVPAMRRLTGVPTGITPLQRIGVGLFAVTFSMVAAALVEARRRHAAAT

SEQ ID NO: 49171 - protein, 464 aa, Zea mays subsp. mexicana
  Clone ID: UC-ZMFLTEOSINTE102D03_FLI.pep
RRLPSAPPFRPLSLASSISPPTMGKEKSHINIVVIGHVDSGKSTTTGHLIYKLGGIDKRVIERFEKEAAEMNKRSFKYAWVLDKLKAERERGITIDIALWKFETTKYYCTVIDAPGHRDFIKNMITGTSQADCAVLIIDSTTGGFEAGISKDGQTREHALLAFTLGVKQMICCCNKMDATTPKYSKARYDEIVKEVSSYLKKVGYNPDKIAFVPISGFEGDNMIERSTNLDWYKGPTLLEALDQITEPKRPSDKPLRLPLQDVYKIGGIGTVPVGRVETGVIKPGMVVTFGPTGLTTEVKSVEMHHEALQEALPGDNVGFNVKNVAVKDLKRGFVASNSKDDPAKEAASFTSQVIIMNHPGQIGNGYAPVLDCHTSHIAVKFAELITKIDRRSGKELEKEPKFLKNGDAGMVKMIPTKPMVVETFSAYPPLGRFAVRDMRQTVAVGVIKSVEKKDPTGAKVTKA

SEQ ID NO: 49172 - protein, 462 aa, Zea mays
  Clone ID: LIB3152-027-D10_FLI.pep
RRLPSAPPFRPLSLASSISPPTMGKEKSHINIVVIGHVDSGKSTTTGHLIYKLGGIDKRVIERFEKEAAEMNKRSFKYAWVLDKLKAERERGITIDIALWKFETTKYYCTVIDAPGHRDFIKNMITGTSQADCAVLIIDSTTGGFEAGISKDGQTREHALLAFTLGVKQMICCCNKMDATTPKYSKARYDEIVKEVSSYLKKVGYNPDKIAFVPISGFEGDNMIERSTNLDWYKGPTLLEALDQITEPKRPSDKPLRLPLQDVYKIGGIGTVPVGRVETGVIKPGMVVTFGPTGLTTEVKSVEMHHEALQEALPGDNVGFNVKNVAVKDLKRGFVASNSKDDPAKEAASFTSQVIIMNHPGQIGNGYAPVLDCHTSHIAVKFAELITKIDRRSGKELEKEPKFLKNGDAGMVKMIPTKPMVVETFSAYPPLGRFAVRDMRQTVAVGVIKSVEKKDPTGAKVT

SEQ ID NO: 49173 - protein, 347 aa, Zea mays
  Clone ID: LIB3060-077-C2_FLI.pep
EKAGRGKEMELNSIPYIASWSSSSSCFYYSYSRCACRGTRDGKLVTKASAAGRKRAADSVCSQLSEQGTEDSISGPRSSWRIRRRDLASAILLPFLIPRVNISIAAEIYDASIIRSGVRSVLTKGKAAGVLRLVFHDAGTFEIGDGSGGMNGSIIYEVDRPENIGLNRSIKILRKAKEGIDNVQKVSWADLIAVAGAEAVALCGGPEIPVRLGRVDSSSADPSGKLPEETLDAASLKTLFSKKGFSAQELVVLSGAHTIGGKGFGSPVVFDNTYFKVLLDNRPPQTSSKAGNGMAAMVGLRTDWALTEDDECLRWIRIYAEDQARFFDDFRDTYIKLVDSGASWRTA

SEQ ID NO: 49174 - protein, 718 aa, Oryza sativa
  Clone ID: UC-OSFLM202110H05_FLI.pep
SRNWRASADREMAGNEWINGYLEAILDSGGAAGGGGGGGGGGGGGGGGGGGGGGGGVDPRSPAAGAASPRGPHMNFNPTHYFVEEVVKGVDESDLHRTWIKVVATRNARERSTRLENMCWRIWHLARKKKQLELEGILRISARRKEQEQVRRETSEDLAEDLFEGEKADTVGELAQQDTPMKKKFQRNFSELTVSWSDENKEKKLYIVLISLHGLVRGDNMELGRDSDTGGQVKYVVELARALAMMPGVYRVDLFTRQVSSPEVDWSYGEPTEMLTSGSTDGEGSGESAGAYIVRIPCGPRDKYLRKEALWPYLQEFVDGALAHILNMSKALGEQVSNGKLVLPYVIHGHYADAGDVAALLSGALNVPMVLTGHSLGRNKLEQIMKQGRMSKEEIDSTYKIMRRIEGEELALDAAELVITSTRQEIDEQWGLYDGFDVKLEKVLRARARRGVSCHGRFMPRMVVIPPGMDFSSVVVPEDTSDGDDGKDFEIASPRSLPPIWAEVMRFLTNPHKPMILALSRPDPKKNITTLVKAFGECRPLRELANLILIMGNRDDIDEMSAGNASVLTTVLKLIDKYDLYGSVAFPKHHKQSDVPEIYRLTGKMKGVFINPALVEPFGLTLIEAAAHGLPIVATKNGGPVDIKNALNNGLLVDPHDQHAIADALLKLVADKNLWQECRKNGLRNIQLYSWPEHCRTYLTRIAGCRIRNPRWLMDTPS

SEQ ID NO: 49175 - protein, 453 aa, Zea mays
  Clone ID: LIB3060-010-B8_FLI.pep
GKKITPKLRPSIFPGRPYPVSACTSPVSQSPPVHAMASRATLLPLFLFLLVAPAPALATSGTIVFTTLGRSRYAFDVFALPIAPLSAASAELRLTDGASVNYNGNFAPSSSGPPSLLFVSERNGSLNLYLTPVPTSASARRRDALEEEEEDESAPPTPLLPWDPIALKDRPSLTPDGAHLVYVSTAEPAGAPRRSWAAVYSTSLAPGGATRRLTPRGVADFSPAVSPSGVWTAAASPGPRGWAGEVEDLRTDIYVFRTSDGSRRALAVPDGGWPTWADDTTVFFHRRDADGWYGVYRARLTFTDDDVASVVDRITPPGFHAFTPAASPGAPGLVAVATRRPGSDYRHIEVIDLSGGGGANNRSAYYEVTRPVAPRAHHFNPFISPDGERVGYHRCRGSGNGDSPLLLESIKSPAPDTFSLFRIDGSFPSFSHDGKRIAFVGLPGLYVVNSDGS

SEQ ID NO: 49176 - protein, 308 aa, Zea mays
  Clone ID: LIB3060-059-H2_FLI.pep
SMPLSTTSMALTNLCSCPSSRAHQLQLLCFCLALSLHVPYHANSLSFSYSFFNPDDFRPEDDAQVVDGRIELLGDEFRGRARGRVWHKQPVQLWDGTTGEAASFTANFSFSIESVAGKGAASAGHGMTFFLAPYTPNLPQESYDGCLGLFDESQALNYSKFNASGDSRFVAVEFDIRKDIWDPSSQHIGIDINSMDSRGDYTVLPDGSLVDAGVISATVVYDNRTRSLRVTLMVGSVTYTSVATVDLRSLLPEKVAVGFSAATGDEYNANHTVLSFSFASTLATKNGTSMPVTVTSSTKKATLQLGAG

SEQ ID NO: 49177 - protein, 212 aa, Zea mays
  Clone ID: LIB4738-054-H9_FLI.pep
EGRRRRRDRSGRSRHHAALLLLLDGTDRRRSPPAGGRRALLVAGERDDGEVVAVADLDHEAVGVVEEDLVHVDAALLHAALHVRDADLLQPPLHRYHALALEGDMVVLGVDLSLLRREAAGVLRLQQVDADPVVEQPGAAEVERAGAADGDEAEHVRVEAQRRLHRPAHDADVVQRRQRQHAAAAARRPHRRRALHHPPAAVNSAPLLLTYS

SEQ ID NO: 49178 - protein, 385 aa, Zea mays
  Clone ID: LIB4738-062-D4_FLI.pep
PGGTKIPQPPQRTARPSQASAEMTQQDVEMAARHGTGADGAGFYPQPRNGGGGETLDDDGKKKRTGTVWTASAHIITAVIGSGVLSLAWSTAQLGWVVGPLTLMIFALITYYTSSLLADCYRSGDQLTGKRNYTYMDAVAAYLGRWQVLSCGVFQYVNLVGTAVGYTITASISAAAVHKANCFHNKGHAADCSTYDTMYMVVFGIVQIFFSQLPNFSDLSWLSIVAAIMSFSYSSIAVGLSLARTISGRSGTTTLTGTEIGVDVDSAQKVWLALQALGNIAFAYSYSMILIEIQDTVKSPPAENKTMKKATLMGVTTTTAFYMLAGCLGYSAFGNAAPGNILTGFGFYEPYWLIDFANVCIVVHLVGAYQVFSQPIFAALETAAL

SEQ ID NO: 49179 - protein, 246 aa, Zea mays
  Clone ID: LIB3245-243-F11_FLI.pep
FGRSSFCARPLCPSSLPPLFVRGGNVRQPRGRMTKQVVVVDTALVAPSEETPRQPLWLSNLDLAVPRTHTPLVYYYPAPGTGSFAPDRLRAALGAALVPFYPLAGRLGVGPDGRLQIECNSKGALFVVANADLTGADVFDDYEPSSEIRNTFVPLGESGEANNSPISMFQVTFLKCGGVVLGTAIHHAAMDGVGAFQFMQTWSGVARGLDVAEACGPQPFHDRTLLHARRPPCPTSDHFVYSPAFL

SEQ ID NO: 49180 - protein, 579 aa, Zea mays
  Clone ID: LIB3245-244-G7_FLI.pep
SLNNHHHLHPRSLRAMAAVLAVLVSAVAATSITAAALNTDGLALLALKFAVSDDPGGALSTWRDADADPCAWFGVTCSTAAGRVSAVELANASLAGYLPSELSLLSELQALSLPYNRLSGQIPAAVAALQRLATLDLAHNLLSGPVPPGVARLVSLQRLDLSSNQLNGTIPAALAALPRLAGVLNLSYNHFTGAVPPELGAIPVAVSLDLRGNDLEGEIPQVGSLVNQGPTAFDGNPRLCGFPLKVQCAGAAGADDDPRIPNSNGATDPGAAAEVGRRGGPRQPRRRRSSPAVPVLAAVIVVALVAGVVLQWQCRRRCAAAAGDEGKESGKEKGGGAVTLAGSEDRRSGGEEGEVFVAVDDGFGMELEELLRASAYVVGKSRGGIVYRVVPGRGPAVAVRRLSEPDDGDSDGSGSGSGWRRRRAFEAEAAAIGRARHPNVARLRAYYYAPDEKLLIYDYLPSGSLHSALHGGPTASPTPLPWSVRLSIVQGAARGLAYLHECSPRRYVHGCIKSSKILLDDELRAHVSGFGLARLVAGAHKAAGGGHSKKLGSAACALRGGGAASYVAPELRAPGGAPA

SEQ ID NO: 49181 - protein, 140 aa, Zea mays
  Clone ID: LIB3591-083-A9_FLI.pep
ILPFCSSALCGRMTGFCTTMPPSAGHVDGGFRRTCLGYAFMISPASTGPPLISSTRPLECTIRTTSSAPHGRMHAMQHLMVSIDPFWPSDYRPVGSCWLLRVLAVHIWRQRHQGERSIEEDEEGANALVHEAQLSWLDFV

SEQ ID NO: 49182 - protein, 171 aa, Zea mays
  Clone ID: LIB3594-002-B10_FLI.pep
QQLTNETPMAVASNRPATTLLPLAALVAVAGSLFLAGPAAATGKTGQVTVFWGRNKAEGTLREACDTGTYTIVVISFLNVSAGPGNSPPSLDLSGHPVAGIGADIKHCQSKSIMVFLSLGGGQHSLPSAEAAADLADYLWYAYFPAPAPRAGVRRPFGDAYVDGLDFFLDR

SEQ ID NO: 49183 - protein, 231 aa, Zea mays
  Clone ID: LIB36-003-B6_FLI.pep
IKSLRSQIDNMESSFSSSLGNNSSRILVIGGTGMMGQHLVKASLAAGHPTAVLVRPASSSKLELLETIKGDIYDHESLVAAFHQVDVVISAVGHHGPHDLEDGQLRIVAAIKEAGGSVKRFVPSEYGCDVEQAARSAAVLEPARSIVLAKVRVRQAIRAAGIPHTFVCSYWAHGFVLPRLGDPHADGLPATRATVFGDDATRAIFVHEADMAAVTVRAVDDPRALDKTLYL

SEQ ID NO: 49184 - protein, 247 aa, Zea mays
  Clone ID: LIB3608-051-H5_FLI.pep
LARQLVVGIPELRLEPVDEFLLHLERLGQDVVRDGWLGAEDGAGDGDDARVLAAERRERRGGLVVVEVHLEVDHSLGEDEDVALLDHLGEEAVGVGRDEAEVEGALEHGEQLGGARMDVRRVHPERRVVDARQRDAQRVQPREALHVHVGDVGPHLVVRVPPLVDDHRRVEEVVRGDRHRVLAREPVDANRRVLVCDTKVLERARIVGDGLLPRRGQRKQGRCDEDQGGSHLCQLVCRPFGVFAVDG

SEQ ID NO: 49185 - protein, 216 aa, Zea mays
  Clone ID: LIB3689-229-C8_FLI.pep
EAARRRPTRRRVPTSPRRRRRSPRRSFTSRLFKSGDPRLVTVCLLALQLNDGLFFLFFQETVTLKIRLHCDGCIERIKRRISKIKGEVFLGIRRSFIRIPRESSKGFESLFRGDLKIGPDNFVRPFHSIPGVKDVAFDAAKDLVKVTGTMDGAALPAYLREKLSRDVEVVAPGKKDGSGGGGDKKDKGAGDGGEKKKDGGGGGGGGAEEKKDKAGA

SEQ ID NO: 49186 - protein, 326 aa, Zea mays
  Clone ID: LIB3689-238-F1_FLI.pep
QDTRTGGEAAGGRRAAGGESNPAPPRPNGDASGGSATPPPAAAAEGGQPGAYLHQAAPPQARRGRGAGRRARGARFCGSGRRVGGGADGASARHPVPQQAQAVGEPRRRLLVRRLLPQRRREEGGGGGRGSGPAGCGCGGGDAGGRGGCAAGQPLRGGLGGEGGVRAAAARAVPLRRGGDPVRGRRRGRRAHEALRHQAEVPEGPRRRGPGRGGGGPHRARGARRGAAPPPQDVPDHGAQAGVGPPGQGRRGRARQELPHRRAPRRARPGGAAPPGADPGVAGRAPPLRPEPDPLPDRAAAHGEVDPVLLQVDAELDAVRRVGSGR

SEQ ID NO: 49187 - protein, 164 aa, Zea mays
  Clone ID: LIB3732-012-H3_FLI.pep
AHTNTRTRARAPPAVPQNKGNEGEEAMAPRTSEKTMAPAAAAATGLALSVGGGGGAGGPHYRGVRKRPWGRYAAEIRDPAKKSRVWLGTYDTAEDAARAYDAAAREYRGAKAKTNFPYPSCVPLSAAGCRSSNSSTVESFSSDAQAPMQAMPLPPSLELDLFHR

SEQ ID NO: 49188 - protein, 468 aa, Zea mays
  Clone ID: LIB3912-023-H6_FLI.pep
QRQRQPEMGERAKEWLLAAGAGAAVGALSAAAVMDLLSRSKRRERYARDLLESNAMTTGTRAGNTRSSKHLGSVASSALLSDEVVSEQLTRNIQFFGMDSQKKVTESYVVVIGLGGVGSHAASMLLRSGVGRLLLVDFDQVSLSSLNRHAVATRDDVGTSKALCLKKHFSMIYPECQIDAKVQLYDASSEEEILSGQPDFVLDCIDNIDTKVSLLAACVRRGLKVLSAMGAGARADPTRIRVAYLRESSNDPLSRSVRYRLKKEHGIEGGIPVVFSLEKPKAKLLPFQASKEEETPSDYQIVPGFRVRIIPVLGTIPAIFGQVMASYVVTQLAGLDFQTEPVVNLDLDHYRILHQRLIEHEELMYGTAEQVLVDAEEVMYIVKELWRGRSARDQSQDTGRKMWRSVNELMLVRWDKSKAAGISNLILVKFSEADAHESTTLDRIKEQEPEFYSMVSRVLKRAEMEFAL

SEQ ID NO: 49189 - protein, 306 aa, Zea mays
  Clone ID: LIB4073-022-G6_FLI.pep
KATVTSVDMNWCCLPSRRAKKEENPYSNSIGGIYSEKNIRLFSYAELRSATDNFNRTNKVGRGGFGTVYKGTIRNGREVAVKVLSAESRQGIREFLTEIDVITNVKHPNLVELIGCCVEGNNRILVYEYLKNSSLDRALLGSNSEPADFTWSIRSAICLGVARGLAYLHEEIASPIVHRDIKASNILLDRNYVPKIGDFGLAKLFPDNVTHISTRVAGTTGYLAPEYAWHGQLTKKADIYSFGILVLEIVSGTSSSRSILMDDKVLLEKTWELYEAKSLKELVDPTLVDYPEEEVIRYIKVALFCL

SEQ ID NO: 49190 - protein, 374 aa, Zea mays
  Clone ID: LIB3060-114-C2_FLI.pep
MSRDAHLGVGVGVEGDAAKEKNGAADEEVGSRSGGGGGGHKLSLVPLIFLIFFEVAGGPYGAEPAVQAAGPLYALLGFLIFPFIWAIPEALVTAELSTPMPGNGGFVLWADRAFGPFSGSLMGTWKYVSSAINGAAFPALCADYLARVAPAVSGGGARVATIVAFNVALTFVNYTGLTVVGWSAVGLGVASLSPFLVMSGAALPKIRPRRWRVVAAERDWKLFFNTLFWNLNYWDSVSTMAGEVERPGKTLPKALVSAVSMTSLGYLLPLMAATGAIDVAPDSWGNGFFADAAGMIGGRWLKYWIEVGAVLSSIGLYSATLSSAAFQLLGMADLGLLPRAFAARAPVFRTPWVSIVATSAIILGMSFLSFNSIV

SEQ ID NO: 49191 - protein, 388 aa, Zea mays
  Clone ID: LIB3075-030-E5_FLI.pep
GSPMAEKSPSSAPQGGSGGNESFDNLVIQAPQLMREDYIQNAVKFLSHPKVKGSPVFHRRSFLEKKGLTSEEIDEAFCRVPDPKPNGTDAVAAGRQQANNPSQSVVLQPYTEVQPQAATASATAGPIVPHTKAQLSWVNTLLGAGLFLGLGASAAITLKKLVIPSLKSWTRRVVAEGDENAKSEHTSKLCEEIREAIKVSASAFSDIAKINQEVLASKDEDRKVLMKLTEAFESQENVFKSLSETLNRIRENQLSQHSLLEEHVQPSSWNGPIDYQGRAFQQTNMYATPPNNSFDTGRNSFMPLAAESSYGPFPGSYSERVQRPGGYGFQQQTSSDRLNVVGPRSSYQGGSSNHHAGSNAMDDPAAVAAELQRRWVPPQPPGVIMPEA

SEQ ID NO: 49192 - protein, 305 aa, Zea mays
  Clone ID: LIB4074-014-F5_FLI.pep
ERFATKKERTAMKTRRGACHAAAAATAPGEGPEAQRRKRRRTAAAEGSPAAAGTPGVRPVGRDMFEELPDDLVVSILRDVAASASSPADLAGAMLTCKRFRELGQSKVVLARASPRCLAVRAKAWSEEAHRFLQRCADAGSLEACYLLGMIRFYCLGIRGSGAALMAAAAVGGHREALYSLAVVQFNGSGGGKDDRDLRAGAALCARAASLGHVGALRELGHCLQDGYGVRRSVLDGRRLLIQANARELAAVAAASPLQPPPQPLGKAAPHPTRRHSCLLSDFGCRAAAGEPHAANRFLADWFAS

SEQ ID NO: 49193 - protein, 348 aa, Zea mays
  Clone ID: LIB4172-028-B4_FLI.pep
SFEFELPFPPFSAPATRPSLYKYNRRLPPPNHPSQTTTPTTDYGGPPPPTQKPTRSPQKPPHAIHANSSHRDAGSRPAHLCFHTPAPAGPVQGPGLQFRQVLAARRQLRAARRVPPSAVPQARRRPAGAVQEARRHCRPRALRGAEESGRRQEAAQLVPARRGGRARRVRGRVRGQRPGAAPRAAQHGRPGRADRRQLRARRGEAARARAPRLRPHPALHRRGLRAQRRQPLLRPRRRAPPLRRRRHGARAADTQRRRRVLRLPLHGDRAPAPGARDRPPRLPQGHWRAARALRDRAPRPVLRARRVRPRGPLGRHRRGQRRPRLLQRPPARHVRGRPPLPRPRGGRR

SEQ ID NO: 49194 - protein, 194 aa, Zea mays
  Clone ID: LIB4570-004-E8_FLI.pep
TKLDPCRTETSTFLLRPAWRRMNADGAWCVCRPDVSDAALQKTLDYACGHGADCAAVLPTGPCYSPTTVRAHCSYAANSYFQQNSQANGGATCDFGGTANLTDTDPSSGTCKYPATPSEAGTSGNATGTGTAPPGSTSNPATTPSMGGSVTTTPVGAFGPAPSTFSAATATAAAFGGRRALLLAVVSVLSFLAR

SEQ ID NO: 49195 - protein, 177 aa, Zea mays
  Clone ID: LIB3059-006-G5_FLI.pep
AIKVCCLPLLFQQSPALSLVQSLVQTIRAQQLQQLVLPLINQVALANLSPYSQQQQFLPFNQLSTLNPAAYLQQQLLPFSQLATAYSQQQQLLPFNQLAALNPAAYLQQQILLPFSQLAAANRASFLTQQQLLPFYQQFAANPATLLQLQQLLPFVQLALTDPAASYQQHIIGGALF

SEQ ID NO: 49196 - protein, 189 aa, Zea mays
  Clone ID: LIB3059-010-E1_FLI.pep
QCVERIVEQNSMKMVIVLVVCLALSAASASAMQMPCPCAGLQGLYGAGAGLTTMMGAGGLYPYAEYLRQPQCSPLAAAPYYAGCGQPSAMFQPLRQQCCQQQMRMMDVQSVAQQLQMMMQLERAAAASSSLYEPALMQQQQQLLAAQGLNPMAMMMAQNMPAMGGLYQYQLPSYRTNPCGVSAAIPPYY

SEQ ID NO: 49197 - protein, 176 aa, Zea mays
  Clone ID: LIB3059-010-G12_FLI.pep
EEEATSHGLRWPETQTSLHHLVREGRGEGRLLLRRRLRLHRPPPRPVPQVGGAGERGDDHRVHAAAPAGDGRAVGGGAAAGLVGRRPGLRRGLLRLRGRRRGVQARRGQRGRGRERAGGQALGPEVRLRAGHGRQHRAHRELRARVVAFRCITIGRSISLSHACLVYYTSTRVPKK

SEQ ID NO: 49198 - protein, 219 aa, Zea mays
  Clone ID: LIB3060-047-F3_FLI.pep
GLLYLHEQCDPKIIHRDVKAANILLDDCCEAIVGDFGLAKLLDHRDSHVTTAVRGTVGHIAPEYLSTGQSSEKTDVFGFGILLLELVTGQTALEFGKTANQKGAMLDWVKKTHQEKKLDVLVDQGLRGGYDKMELEEMVRVALLCTQYLPGHRPKMSEVVRMLEAGEGLAERWEASHSQSQSADSHEFKVPDFTFSRCYSDLTDDSSLLVQAVELSGPR

SEQ ID NO: 49199 - protein, 198 aa, Zea mays
  Clone ID: LIB189-032-D4_FLI.pep
IAPMDTAASCRLLSPASSSPPPCPKQLPKRRPTFAASPQQSSPSSSAKFRLLCLLHDKSAAPTSSVQMQSSHLQRLATVLQCGAVWAAVEAPAALAVTGEEDIDLLGILPPLAVFAFFYFLVAPPVIMNWMRLRWYKREFVETYLQFMFTYLFYPAMMFWAPFVNFRKFPRDPTMKYPWSKPKEGTPLFKDRYPPIDS

SEQ ID NO: 49200 - protein, 52 aa, Zea mays
  Clone ID: LIB189-033-A2_FLI.pep
SLISRPSLHRATTTAANAILSSLSESEHIHTPLPNYISLGIFNMNPSSVFSN

SEQ ID NO: 49201 - protein, 154 aa, Zea mays
  Clone ID: LIB3060-027-C8_FLI.pep
LLLPDHTSSSSVSHRGSKNNLDDQEEAEEHDLLPPPGGDDVVDAHDDECKDIGVVPDDEAKKSSSVAPSAAGGDPTIASSEGAEEAKEPFQSPADAKATADDGGKFAAQVEQEDEAEDVMKEKDDKAARAPQCVVFSVGKLKVNGIGALCSFGV

SEQ ID NO: 49202 - protein, 126 aa, Zea mays
  Clone ID: LIB3061-029-A10_FLI.pep
IFSFDDELPPSLALVVHPSAHPKVGIDWDALQIVESQDEEGMIEIVADDRMYELIGLRAEDEAAEKAGEAFKMQEGDVNRSYSENEIIDAAIPVDDEIPDERVMLHDPTSLVWILEQCTPACVTSG

SEQ ID NO: 49203 - protein, 112 aa, Zea mays
  Clone ID: LIB189-029-F11_FLI.pep
RNPDVWDDPLRFDPERHIPLSPEMEVSLVERDLRFISFSTGRRGCIAAALGTDMTIMLFARLLQGFSWSKMTGVAAIDLSESRHNTFMARPLVLQAKPRLPAHLYPGILLCK

SEQ ID NO: 49204 - protein, 94 aa, Zea mays
  Clone ID: LIB3061-057-H5_FLI.pep
ISSELKRNRPPMPAVVIRAGAILSTAESRCQTVVASGTKKRHAERGPNAHAPPARSSVGYVRSSASRSRIPICLISHPKNHYISSKLATSSLTS

SEQ ID NO: 49205 - protein, 112 aa, Zea mays
  Clone ID: LIB3062-022-D10_FLI.pep
QGNQDSSQEFQPRRISLLAPFSSLGWRDKNKGKQNGSDESTNGKLNNSTDQGVETPKKDDSPKEGEQIVRTPERDNELRLGTPKMDSEVPSVEMAANSTNGLEDQLEEIKLD

SEQ ID NO: 49206 - protein, 235 aa, Zea mays
  Clone ID: LIB3066-043-D3_FLI.pep
CSPSVKTTEKSVNQVGHRMFPERSTRPWMGPEPWKKNGRALPLQEPWKLWLMRLLLLLLLQLRWLLLLLLLLRLLLLLLLLLPVHQAALLPYLALALADEHVKHPDLLHRLGKLLLPQWLVPGEVLHHRPRLRVLDEGVVRGEQAAAGEQLGVVRDVEPLPRLRVELHLGRLLGVVAGLPRRAHLAQPLGVLRVQRGVDVGVLGEVVDAVGEHEAVRAADGVRAGEQDEVLLGEP

SEQ ID NO: 49207 - protein, 53 aa, Zea mays
  Clone ID: LIB3066-045-D11_FLI.pep
RSWSARGAPRWDAHEQSASREASSSHATTMPRTSRRRTRRRRRAPPTELMISS

SEQ ID NO: 49208 - protein, 119 aa, Zea mays
  Clone ID: LIB3066-020-F11_FLI.pep
HRPTCRYDTAPLEGGFAAMDRVGGGEKQLEDCTVANALGTWFFSVAGALVAIPVGIKKKSLAPLVFFGTTGTMLDIIMGITQCEREHAEREMKILEAQKFSVDASAQNESSDSFGSADK

SEQ ID NO: 49209 - protein, 141 aa, Zea mays
  Clone ID: LIB3066-049-F3_FLI.pep
QIHMKWLIKTSISLKPLLAQLHHCGHDLTPDEWRIIYNRHDRDLVSSSAQDDIDDEWDFENAHEIVLEAPNNVNDWYPIDFLVFHPYKEIVFFSLSWKTISYNLNTTKVRQLGCAAHIPVGIKTCFPYTPCYLTMEKLTNS

SEQ ID NO: 49210 - protein, 103 aa, Zea mays
  Clone ID: LIB3079-023-E12_FLI.pep
QYPRPMKLPSKWTFSSYTILKTAEQAPRTPSFADQLIEADNGLGEVMKPPEKSFWAKYWMYIIPLGLIVMNAVTAAANIPEEAAGQGQPGAQRAPAAVAGRRR

SEQ ID NO: 49211 - protein, 90 aa, Zea mays
  Clone ID: LIB3079-034-E8_FLI.pep
YKPGDGRVFYFRLYLALLLKEFLDFLGANLLFFFEERPCFHSLISFWNRSRISSCLFGAFSECCLSFFSFFPFLAPGARLLAAFNDFAFR

SEQ ID NO: 49212 - protein, 55 aa, Zea mays
  Clone ID: LIB3115-032-D8_FLI.pep
EKDYRCSLLTSLLKIGHLSIRANVKLTQLCYSCISVLPKVFTSNLAWAEARNCSS

SEQ ID NO: 49213 - protein, 111 aa, Zea mays
  Clone ID: LIB3079-017-A5_FLI.pep
KMAKYSSCEWLAVMAFLLFVASWILLRLVMFPFWILRSTSYEVLLTLDREKHRFYGPIYYYVFNCLLFSLLVLHIYWWVLIWRMLVKQIQSKGRVGDDVRSDSEGEDEHED

SEQ ID NO: 49214 - protein, 82 aa, Zea mays
  Clone ID: LIB3079-019-F3_FLI.pep
TSTRRVELSTQTILSLYCLSWGLEHKALGGLCQQVGVLLERGHGELGLAPEFRSEEAVGLHQAVEGCLDEVAKGLSGATGRG

SEQ ID NO: 49215 - protein, 41 aa, Zea mays
  Clone ID: LIB3079-028-C4_FLI.pep
SRKTHISAIRKSITAQILLMYRKAQSCIFSYYTSAVLQHKY

SEQ ID NO: 49216 - protein, 88 aa, Zea mays
  Clone ID: LIB3079-040-F6_FLI.pep
EQPPPLAAISHHKFIITLINLSMVMRPVRSSWYRSITHCTVETFTAVLLFLSHMQQPHHTGKTWLVCCICRRENTTSHDLYVVRAGPW

SEQ ID NO: 49217 - protein, 165 aa, Zea mays
  Clone ID: LIB3088-013-F4_FLI.pep
CWSYKESSTGWSRSEVPVLLVESDSVIGGARQTVVSVDTKSSTRWTLGINKDGIDDFTVQVDSEKIVLPGDKSEIDGWHTIQFAGGKNSPTKFQLTLYWSSSKPSEREAKQAADAPLLVKLRTDVNRVTPQVARVVEKLPRWCTPFGKSTSPYTLAFLTALRVDI

SEQ ID NO: 49218 - protein, 144 aa, Zea mays
  Clone ID: LIB3088-035-A10_FLI.pep
YLEDKYPEPPLLPQDLQKKALNHQIASIVASGIQPLHNLTVLRFIDQKVGAGESVLWTQQQIERGFTAIENLIQLKGCAGKYATGDEVQLADVFLAPQIYAAIERTKIDMSNYPTLARLHSEYMSHPAFEAALPGKQPDAPSSS

SEQ ID NO: 49219 - protein, 50 aa, Zea mays
  Clone ID: LIB3088-035-D12_FLI.pep
RFRCKNFLRQKCTVLLTDLGHVWSIYFFRNWFMKTEMVSNISDYIPVYRN

SEQ ID NO: 49220 - protein, 97 aa, Zea mays
  Clone ID: LIB3136-007-B11_FLI.pep
LRGPAGLAVPARWGQGGGPAGEDAGADVVAVHAGGRRQPADVQAGQGAAQPDPPPLRDGRPAAGVGGARRACRSRAIAADSGAVSTVNRCRSLRCAI

SEQ ID NO: 49221 - protein, 106 aa, Zea mays
  Clone ID: LIB3115-025-A7_FLI.pep
PGHAAQARRARRRVRVRALQRGLEARAHVGAELRPALPRRLAGVRARRRRSGPGRLAQPVLHVHVLLLLLVRIGGGRNLFDGESGTITAAASNCNTPTITFVLLDC

SEQ ID NO: 49222 - protein, 111 aa, Zea mays
  Clone ID: LIB3088-040-H12_FLI.pep
HNGLKTTVIWIALGRPSETARWEPLNETHRGTLICRVATAATVVADHESTSHAVTTRMANLVAGPADHVTEATTEGNANTTEGSANTMEGRRPTPLAQCIRLGALTGQVAS

SEQ ID NO: 49223 - protein, 69 aa, Zea mays
  Clone ID: LIB3115-028-E5_FLI.pep
NYEYDPENKCQLLPENIYKVRRPLLHFSCHGYPADRMNSVMVSKIISALSIQINEWAKGPPTRFLCMSC

SEQ ID NO: 49224 - protein, 109 aa, Zea mays
  Clone ID: LIB3115-017-C3_FLI.pep
PVCFWFLPHKGIDVVLFAPDDAKATQTADPNRKKIKLHAGHHPRPRRPPDDSKAGSPCSRAGHHPQEEDQAPASTSFHLLSLPLPYLSKGTNLSASSVDSDFSLLLVLQ

SEQ ID NO: 49225 - protein, 144 aa, Zea mays
  Clone ID: LIB3059-005-H4_FLI.pep
RQRVQPRERSAMGSFFSTLVTPPPAADDPNCAVVAAHSKATYDEQWAAHKSSSKLMVIDFSASWCGPCRFIEPAFKELASRFTDAIFVKVDVDELAEVARTWKVEAMPTFVLVKDGKEVGRVIGAKKDELERKIRMFVTSSSSS

SEQ ID NO: 49226 - protein, 133 aa, Glycine max
  Clone ID: 700873242_FLI.pep
PHSIIKFYTYESLKQVMPSSIQPNSFKTVVCGGLAGSTAALFTTPFDVIKTRLQTQIPGSANQYDSVLHALYKISKSEGLKGLYRGLIPRLIMYMSQGSLFFASYEFFKRTFSLEAPYPTDLCIQDNDGNAEE

SEQ ID NO: 49227 - protein, 118 aa, Glycine max
  Clone ID: 700853285_FLI.pep
QITSVNTCLWRAREKSEMSSNPNDPRQPSAARPYVAPQISPQDLPIDYAGFIAVIFGVAGVMFRYKLSSWLALIFCAQSVANMRNVENDLKQVMMAMMFSLMGLITNYFGPPRPGKQS

SEQ ID NO: 49228 - protein, 241 aa, Glycine max
  Clone ID: 700873239_FLI.pep
TSLFSFGDSLTDTGNLYFISPRQSPDCLLPPYGQTHFHRPNGRCSDGRLILDFLAESLGLPYVKPYLGFKNGAVKRGNIEQGVNFAVAGATALDRGFFEEKGFAVDVTANFSLGVQLDWFKELLPSLCNSSSSCKKVIGSSLFIVGEIGGNDYGYPLSETTAFGDLVTYIPQVISVITSAIRELIDLGAVTFMVPGSLPLGCNPAYLTIFATIDKEEYDQAGCLKWLNTFYEYHNELLRLK

SEQ ID NO: 49229 - protein, 63 aa, Zea mays
  Clone ID: LIB3136-049-A5_FLI.pep
QEKRANQQLLQGQGGDVSQEKDKDATNGKPGSQKQATSKEGTPAEVAADASKPVAESGISNDN

SEQ ID NO: 49230 - protein, 129 aa, Zea mays
  Clone ID: LIB3137-005-C2_FLI.pep
SSSASDDGRKHPNITQGGQDTNKGFSTPQPGSTAKQIHASRSVFLLLVTVITAALCGDLLVVLLQGGQVLACLGELPLLHALADVPVQERALGVHEVELAVDAGEHLDDAGGVGDHAHGTLHLGEVGTR

SEQ ID NO: 49231 - protein, 126 aa, Zea mays
  Clone ID: LIB3150-049-B6_FLI.pep
RTRKHIMAIGNGTSTNSLFQLRIQVPQIKCSATLNISGYNNMEVSNCAAMMLQGENIIKLKLHLEPSSPSKTATASTPWTSTTPPWWSSSTAERTTTTASPKTPSSTTPTTSRCSLRLSLWLWQEA

SEQ ID NO: 49232 - protein, 86 aa, Zea mays
  Clone ID: LIB3136-037-E1_FLI.pep
LASMECGSKKAAGGVLALLLLQLVLAPTTATARLLQADTSTVVGLDIIAREFGHPVRGILCGETCVFLPCYTAAMGCQCIGQICMM

SEQ ID NO: 49233 - protein, 92 aa, Zea mays
  Clone ID: LIB148-006-D4_FLI.pep
RLQGGRQRRRLQEHPRHLQHAGGHHAQLRQQPAMPGRAARQRRHQVQWIRQQDHGRLQECHRQVHRLGKGAGVHLNQLTNMHILCTRFVPVR

SEQ ID NO: 49234 - protein, 97 aa, Zea mays
  Clone ID: LIB143-060-E7_FLI.pep
LLLFVWEVAKFHPISQRRGLPDMDGGRDKLEQGGYGHCFMFVTLKDLYPSLFPYYHGIIAFNIILYINYSYRGGVDSEGCPVICRCRCSLSSSLLDS

SEQ ID NO: 49235 - protein, 116 aa, Zea mays
  Clone ID: LIB148-042-A11_FLI.pep
ERRLRPRDALLRGGGQPRRRRRHEQARQVGRHQDRHLRGGAEGVHRGDLHPGAAVHPQVRGAVHPGIAAAGAKRQDTLIIFQPASLTHYYHLTSVGLDLHFSESPPAQPTNMSTVL

SEQ ID NO: 49236 - protein, 77 aa, Zea mays
  Clone ID: LIB189-008-B6_FLI.pep
RSFKTLVRPTSVKDPRLEPNRRLLLLPRALARAVASFAGEPWEGRRRRLLVQIQNHYWPVLVSEERESVAWSGGLGR

SEQ ID NO: 49237 - protein, 139 aa, Zea mays
  Clone ID: LIB189-014-C5_FLI.pep
NDGTIYVAIYCIFTYGHIPYIRLPSYSNPSYLILQSLISTLDYSGLKTNHYLHDKDFTFISADRREHCMHACFKSNHQHHRRVVLEDGKPLLLVVRVHDADHPHGVQADLRDVRGEGPPAEALPVELHPLPHDQAAHVR

SEQ ID NO: 49238 - protein, 91 aa, Zea mays
  Clone ID: LIB3066-025-G10_FLI.pep
AQSYVFIIHHLQLRARVVILYCFHFDNMNYLYNCSIIITVLARRWGTGTTIGRSLGRLIARIPATQLARTVMMILYCFHFDNMNYLYNCSI

SEQ ID NO: 49239 - protein, 462 aa, Glycine max
  Clone ID: 700871178_FLI.pep
SIIGSEFNGEISRSLQVLSRRCYASASDLPPHQEIGMPSLSPTMTEGNIARWLKKEGDRISPGEVLCEVETDKATVEMECMEEGFLAKIIRGDGAKEIKVGEVIAVTVEDEGDIAKFKDYQPSASEPSEPPAKETSAPPPPKKEEVVEEPAREPEPKVSKPSAPPSSGDRTFASPLARKLAEEKNVPLSSIKGTGPEGLIVKADIDDYLASGAKEVSASSKAKVAADAALDYTDIPVSQIRKVTASRLLLSKQTIPHYYLTVDTCVDKLMSLRTQLNSLQEASGGSRISVNDLVIKAAALALRKVPQCNSSWANDYIRQYHNVNINVAVQTDNGLFVPVVRDADKKGLSKIGEEVKQLAKKAKENSLKPQEYEGGTFTVTNLGGPFGVKQFCAIINPPQAGILAVGSAERRVVPGSGAEEFKFASFMSVTLSCDHRVIDGAIGAEWLKAFKGYIENPETMLL

SEQ ID NO: 49240 - protein, 129 aa, Zea mays
  Clone ID: LIB3075-015-A11_FLI.pep
SHFSSCPYPHSNNCYNNNNLHTKEEVIRQRSVKAQTLVFGRNYKAQQPTPSRPRASGYHLPRIGPRRPRAPRRRRPPRPALARPRRAPRRPPAAGPRWRPPSPPPSPPPSRPPRPPPRPPPPPAPPRPP

SEQ ID NO: 49241 - protein, 393 aa, Glycine max
  Clone ID: 700876112_FLI.pep
AEMGTMFPENSGYVVWVSSALGPFWGFQQGWMKWLSGVIDNALYPVLFLDYLKSGIPALGGGFPRVVATWGLTIVLTYLNYRGMTIVGWVAVCLGVFSLLPFVVMGFLAIPDLKPSRWTVTNPNDINWNLYLNTLFWNLNYWDSISTLAGEVENPKKTLPKALFYAVILVVLGYFFPLLIGTGAVPVNRELWTDGYFSDIALIIGGAWLRWWLQAAAAMSNMGMFVAEMSSDAFQLLGMAERGMLPEFFSKRSRYGTPLIGILFSASGVILLSWLSFQEIVAAENFLYCFGMILEFIAFILLRIKHPDASRPYKIPGGTAGAIIMCIPPTILIGVVLFFSTLKVMVVSLIAMAIGLLMQPCLKFVEKKRWMKFSHSSELPDFGNQEDTRTLVH

SEQ ID NO: 49242 - protein, 134 aa, Zea mays
  Clone ID: 700337336_FLI.pep
NGTMVTVEDLHQELKCSINIKHRDEFDEEKEPDRMVLVGWSGPVDKQTTSNGETKSVPSSSNTEDVDGTAEDISATSGMKRKLNEILETKENFDALENLSGVDSSSAQVVEDDNDDGLLMFDEDPRQSKKKRLQ

SEQ ID NO: 49243 - protein, 438 aa, Glycine max
  Clone ID: 700760426_FLI.pep
GARVYRGFRSFLSATTMAKPGRGRRSPSGSVSGSSSRSSSPSDSRSSSRSRSLSRSRSPSRSRSSSPSSSSSSRSSRSRSPPPQRRRSPADATRRGRSPPPQSKRASPPPRKPSPVRESLVLHVEKLSRNVNEGHLKEIFSNFGEVISVELAMDRTVNLPKGYGYVQFKTRGDAEKALLYMDGAQIDGNVIKARFTLPPRQKVSPPPKASAVAPKRDTPRADNASADVDKDGPKRQRESSPRRKPPPSPRRRSPVPRRAGSPRRPDSPRRRADSPVRRRLDSPYRRGGDTPPRRRPVSPGRGRSPSPPRRLRSPARLSPRRIRGSPGRRRSPPPPPRRRSPPRRPRSPPRRSPIGRRRTRSPIRRSARSRSRSFSPRRGRPPVRRGRSSSYSDSPSPRKVSRRSKSRSPRRPLRGRGSSNSSSSSSPPPPPPPPTRKP

SEQ ID NO: 49244 - protein, 899 aa, Glycine max
  Clone ID: 700760534_FLI.pep
AMAEEEEDDESFGDFTFASFPSQPTSNDTNPVDDDDDWGDFMNHSNQINGKPFDAFGVPTDPTNKHVNDNNGVAVQAEAAKKPKGAIPLSIFGEEEEEEEEQQEKPASANVFSNGGAVKRGSDSNGSVGISDLISSLYNQQRPQVDSHNNGSVSVSNVDAPNSTNSNGSKLNSDEVDEDDDGWEFKSAEWETGTKSQDVKAETPKHDSGALDVGTVLDSSNGISDKAGGWHMEFEFSPRFASQDHINPQPSPKNESNDIGTGFAMFNQNFGEFSSGSGPGPNQNLEAPKKAGICATNMELLKFNGATPHGTIDSSLTSESHQSDEWNFGFNFNSSYVGEDNHSSDSYFKTKNNQDDNNRNNASPTNIDVDSHVNFFDSESDVTQHEKPLTSPENRREALPLSIFGDETPDTDEHPVSQDLSPYTPSSPIRNSFTSPGSNFSINDIWNLYNQAENQSSSNVTPKASENQIHAPPEVSGSSLVTGNDDLDDDFWDYKDAATETRFTNESAQKTSSPQVNENGLQSSPTFLNSDLTNGDDDFEDDSWEFKEATSGTINQDHTSTLDHRGLPQLSTKLEQVDYAEFYSKVKDELCNYVLFHLQNLKKTQNVAALSGEDAKAKALQEEISEFSKILHQDTMSIPNEYLSEDYCPRNVRFNELLEVLKEPKFQPVESEYQLASRLSMAEKDIKYGMELLKDTVSTLRILKLGSREEQSSYLTIWSKIAFVCSQELKHGAYVWKQAVLQNVHDQILSSQKGVQYILALGEIYRVAEIIEASAKLHKPWMLSGAIDHKSLCALLNECYSIWLASGLEEALLSIANQNNFELDGISRELVESIKYIHELDEHALQSFVISGEQTTCQLSALPAGFIPGLNLVKWNGKHYIVKLANLWINLISSDPPKK

SEQ ID NO: 49245 - protein, 292 aa, Glycine max
  Clone ID: 700762491_FLI.pep
FGLARIYQAPLKPLSDNGVVVTIWYRAPELLLGAKHYTSAVDMWAVGCIFAELLTLKPLFQGAEVKATSNPFQLDQLDKIFKVLGHPTLEKWPSLASLPHWQQDVQHIQGHKYDNAGLYNVVHLSPKSPAYDLLSKMLEYDPRKRLTAAQALEHEYFKIEPLPGRNALVPCQLGEKIVNYPTRPVDTTTDLEGTTNLPPSQTVNAVSGSMPGPHGSNRSVPRPVNVVGMQRMPPQAMAAYNLSSQAAMGDGMNPGGISKQRGVPQAHQPQQLRRKEQMGMPGYPAQQKSRRI

SEQ ID NO: 49246 - protein, 319 aa, Glycine max
  Clone ID: 700786711_FLI.pep
FWMQNLICAKNLVIDKSIQTAYIQAIRSAQHFIYIENQYFIGSSYAWPAYKDAGADNLIPMELALKIASKIRAKERFAVYIVLPMWPEGDPKTGAMQEILFWQGQTMQMMYDAVARELKSMQLTDVHPQDYLNFYCLGNREHFNEDSSSTNGAQVSTAYKYRRFMIYVHAKGMIVDDEYVIIGSANINQRSMAGTKDTEIAMGAYQPHYTWSAKKRHPHGQIYGYRMSLWGEHLGMLDETFEEPERLECVHKVNKIADNNWKLFASEDFSLLQGHLLKYPVQVDSDGKIRSLPDCENFPDAGGKILGAHSTTIPDILTT

SEQ ID NO: 49247 - protein, 163 aa, Glycine max
  Clone ID: 700663631_FLI.pep
KCAEVTERVLAACYKALNDHHVLLEGTLLKPNMVTPGSESKKVTPEVIAQYTVTALQRTVPAAVPAIVFLSGGQSEEEATLNLNAMNKSQGKKPWSLSFSFGRALQQSTLKAWGGKDENIKKAQDALFARCNANSHATLGTYKGDATLAEGASESLHVKDYKY

SEQ ID NO: 49248 - protein, 286 aa, Glycine max
  Clone ID: 700663543_FLI.pep
DGELRYPSHHWLPSNGKTQGAGEFQCYDQNMLSFLKQHAEASGNPLWGLGGPHDAPIYDQPPYNGFFNDGASWESTYGDFFLSWYSNQLIAHGDCLLSLASSTFGDSGVAIYGKIPLMHSWYGTRSHPSELTAGFYNTVNRDGYGPVAQMFARNSCKIILPGMDLSDANQPKENHSSPELLLAQIMEACKKHEVQVSGQNSSESGVPGGFEQIKKNLSGDNVLDLFTYHRMGASFFSPEHFPLFTEFVRSLKQPELHSDDLPAEEEVGAESAVVMSRDSTVSMQAA

SEQ ID NO: 49249 - protein, 192 aa, Glycine max
  Clone ID: 700670135_FLI.pep
LCWSRDPAQLRRMANRKEEIYQALLGGIYSFLSGSKEFVSVLMHYKIPMALVSTRPRKALESAMGEIGIEDTFSVIVAAEDVHRGKPDPEMFVYAAQLLNFIPERVIVFGNSNLTVEAAHEARMKCVAVASRHPVYELGAADLVVRRLDELSVVDLKNLADIEMTEFGSVEPEMELEVEKDHDTSSLDDNFW

SEQ ID NO: 49250 - protein, 174 aa, Glycine max
  Clone ID: 700675070_FLI.pep
YLLEHLLAIYAAMIMGVRVLGYLFWTISDNWEWADGYGPKFGLVAVDRANNLARTPRPSYHLFSKIVNTGKVTHEDRERAWDELQRVAKEKKTRPFYRAVDKHRLMYAGGLDKPEQRPYIERDWRFGHYQMDGLQDPLSRFSRSIFRPFSLFSLKRKPKSQKKNAKLILQPLET

SEQ ID NO: 49251 - protein, 586 aa, Glycine max
  Clone ID: 700664692_FLI.pep
LGKLVAICMGGSFPVEQGDLHKRWKLVSKRLRNFHQCVVLPVGSLSSGLCRHRAILFKRLADYIGLPCRIARGCRYCVSDHRSSCLVKIKDDRQLSREYVVDLVGEPGNIHGPDSSINGAYVSSIPSPFQISHLKESQSPYVDVAACSQSLGCVQEDQQAEETDLQKNNNGSIYPAIDQTRGGAEPPLIPFGLKGNHKECAILGLLNFPPVYEGVSEDLHPATEASLHEYPRLSKDSVVVLEASNKEIEIIVKGSSGVKSNYKQSTVSLSSESKQEQEHVKNKVENQGAGNIPRYLNLEPSLAMDWLEIPWDDLRIKERVGAGSFGTVYRAEWHGSDVAVKVLTVQDFQDDQLKEFLREVAIMKRVRHPNVVLFMGAVTKRPHLSIVTEYLPRGSLFRLIHKPASGEILDPRRRLRMALDVAKGINYLHCLKPPIVHWDLKTPNLLVDRNWTVKVCDFGLSRFKANTFLSSKSVAGTPEWMAPEFLRGEPSNEKSDVYSFGVILWELVTLQQPWNGLSHAQVVGAVAFQNRRLAIPPNISPALASLMESCWADNPADRPSFGSIVESLKKLLKSPADAIKMGGAIT

SEQ ID NO: 49252 - protein, 322 aa, Glycine max
  Clone ID: 700665347_FLI.pep
RQKVLEAANSFFFFWFNLSESERFVIVTMDSSCVPNGDVSGFKDKEPMVDPFLVEALQNPRHRVTILRMELDIQRFLNNADQQHFEFQHFPSSYLRLAAHRVAQHYGMQTMVQDNGFNGQGTRIMVRKIAESRYPVVCLSEIPAKQLEDDKPEQIKIAIRPRQNKNSLNEAGRKSNPLRSVEERKEEYDRARARIFSSSRSCDSDDTLSQTFTDEKNSLIIKDENETSKTPVVDSEQCTVGRDISSTRVAILRDREKDRSDPDYDRNYGRYARSIPISSLNLMPFNLQQVQPPFVQYDNALIRSVRYHKIKLHLAMDLLQAL

SEQ ID NO: 49253 - protein, 383 aa, Glycine max
  Clone ID: 700666279_FLI.pep
GLQGLQGKRPFILSRSTYVGSGKYAAHWTGDNQGTWENLRYSISTMLNFGIFGVPMVGSDICGFYPQPTEELCNRWIEVGAFYPFSRDHANYYSPRQELYQWQSVAESARNALGIRYKLLPFLYTLNYEAHVSGAPIARPLFFSFPTYTECYGLSTQFLLGGSLMVSPVLEQGKTQVKSLFPPGSWYSLLDWTHTITSKDGVYVTLDAPLHVVNVHLYQNAILPMQQGGMVSKEARMTPFTLIVTFPSGATQGEAKGNIFVDDDELPDMNLGNGYSTYVDLHATVDQGAVKVWSEVQEGKFALDKGWIIDSISVLGLEGSGAVSSLEIDGKPLMGGGSNVNVTTSAHEHLNNEGEGEKKTVMVALRGLNIVVGKNFAMTWKMG

SEQ ID NO: 49254 - protein, 244 aa, Glycine max
  Clone ID: 700667851_FLI.pep
KLNQLTPDQIVQIQAQIHIQQQQQHVAQTQTHLGPKRVPMKHAGTAAKPTKLYRGVRQRHWGKWVAEIRLPKNRTRLWLGTFDTAEEAALAYDNAAFKLRGEFARLNFPHLRHHGAFVFGEFGDYKPLPSSVDSKLQAICESLAKQEEKPCCSVEDVKPVIHAAELAEVESDVAKSNAEYVYPEFEDFKVEHENPMFSGESSSPESSVTFLDFSDFSDSNNQWDEMENFGLEKFPSVEIDWEAI

SEQ ID NO: 49255 - protein, 91 aa, Zea mays
  Clone ID: 700573083_FLI.pep
NKMVLLEFGYHVLCVLRSFLVQIPRKGKIYSVNEGNAKNWDGPTAKYDELGGSFLSKNYYCDFVTSQAEFYAVSDSWRNASILRMVHRLDP

SEQ ID NO: 49256 - protein, 219 aa, Zea mays
  Clone ID: 700574888_FLI.pep
KTDPLGTISAAPWGSALILPISYTYIAMMGSQGLTDASKIAILNANYMAKRLEKHYPVLFRGVNGTVAHEFIIDLRAFKTTAGIEPEDVAKRLMDYGFHAPTMSWPVPGTLMIEPTESESKAELDRFCDALISIREEIAEIESGKADVLNNVLKGAPHPPQLLMGDTWSKPYSREYAAFPAAWLRGAKFWPTTGRVDNVYGDRNLICTLQQATQVAEEA

SEQ ID NO: 49257 - protein, 208 aa, Glycine max
  Clone ID: 700836619_FLI.pep
VHLSTLIPSRSDDAISLVTSLCSWDPCKRPTAAEVLQHPFFQSCFYIPPSLRTRAVTRTPPSAGTRGSLDRLGLKRYSGALPNTKITNNFTSPKVQASIASGVQRKLDMANEDGIKSKKSLKTTQQSKYRLPGKGSPTSINKGRTARGVSETAEKLVNMSIGTRRLSLGQTRPPPMKAGVNWISESGNLLRSGQQIPTERTLTRKVAG

SEQ ID NO: 49258 - protein, 223 aa, Glycine max
  Clone ID: LIB3028-006-H7_FLI.pep
NDGVLLRNHIPRILKKHFRGKPYYVDLLDLFNEVEFQTASGQMIDLITTLEGEKDLSKYTLTLHRRIVQYKTAYYSFYLPVACALLMAGEDLDNHVDVKNILVEMGTYFQVQDDYLDCFGDPQTIGKIGTDIEDFKCSWLVVKALELSNEQQKKVLHENYGKADPENVAKVKALYNELNLQAVFEEYENGSYAKLVSSIEAHPSKAVQAVLKSFLAKIYKRQK

SEQ ID NO: 49259 - protein, 209 aa, Glycine max
  Clone ID: 700978484_FLI.pep
QKYSKDESVTFAMYGDGAANQGQLFEALNIAALWDLPAILVCENNHYGMGTAEWRAAKSPAYYKRGDYVPGLKVDGMDVLAVKQACKFAKEHALKNGPLILEMDTYRYHGHSMSDPGSTYRTRDEISGVRQERDPIERVRKLVLSHDIAAEKELKDIEKEVRKEVDEAIAKAKESPMPDPSDLFTNVYVKGYGVETFGADRKEVRATLP

SEQ ID NO: 49260 - protein, 176 aa, Glycine max
  Clone ID: LIB3028-011-B7_FLI.pep
SWREILSQLLVYFLVEDYTNYWIHRFLHNDWGYEKIHRVHHEYHAPIGFAAPYAHWAEILILGIPSFLGPAMVPGHIITFWLWIALRQIEAIDTHSGYDFPRSITKYIPFYGGAEYHDYHHYVGRQSQSNFASVFTYCDYIYGTDKGYRYQKKILQKLKEELANGVEQNGGLYKTD

SEQ ID NO: 49261 - protein, 318 aa, Glycine max
  Clone ID: LIB3056-007-B12_FLI.pep
NFQGTPIGVSMDNTRLAIASIGKLMFAQFSELVNDFYNNGLPSNLTASRNPSLDYGFKGAEIAMASYCSELQYLANPVTNHVQSAEQHNQDVNSLGLVSSRKTAEAIDILKLMSSTFLVALCQAIDLRHLEENLKNTVRNTVSQVAKRVLTVGINGELHPSRFCEKDLLKIVDREYVYAYIDDPCSATYPLMQKLRLVLVDHALQNGDKEVNSSTSIFQKIGAFEEELNALLPKEVESSRIEVENGNPAIPNRIKECRSYPLYKFVRENLGTTLLTGEKVKSPGEEFDKVFTALCEGKLIDPLLDCLKEWKGAPLPIC

SEQ ID NO: 49262 - protein, 316 aa, Glycine max; identical to SEQ ID NO: 43905
  Clone ID: LIB3027-005-A1_FLI.pep

SEQ ID NO: 49263 - protein, 511 aa, Zea mays
  Clone ID: LIB4570-009-B10_FLI.pep
LFSNSGPYASSVATPTQPDLSANKPAGVKTLPADSNNVASAAGITKGSNGSAPVKPTNQATLNTSSNLYGMGAPGGGLAAGYQDPRYAYEGYYAPVPWHDGSKYSDVQRPVSGSGVASSYSKSSTVPSSRNQNYRSNSHYTSVHQPSSVTGYGTAQGYYNRMYQNKLYGQYGSTGRSALGYGSSGYDSRTNGRGWAATDNKYRSWGRGNSYYYGNENNVDGLNELNRGPRAKGTKNQKGNLDDSLEVKEQTGESNVTEVGEADNICVVPDREQYNKEDFPVDYANAMFFIIKSYSEDDVHKSIKYNVWASTPNGNKKLAAAYQEAQQKAGGCPIFLFFSVNASGQFVGLAEMTGPVDFNTNVEYWQQDKWTGSFPLKWHIVKDVPNSLLKHITLENNENKPVTNSRDTQEVKLEQGLKIVKIFKEHSSKTCILDDFSFYEVRQKTILEKKAKQTQKQVSEEKVTDEKKESATAESASKESPAAVQTSSDVKVAENGSVAKPVTGDVVANGC

SEQ ID NO: 49264 - protein, 530 aa, Zea mays
  Clone ID: LIB4701-005-H3_FLI.pep
QGSSPSRCVYQQAMVDTVAGATDYRGQPASRAATGGWKPSVFVMAMEIAERFAYKGVAANLITYLTGPLGQPMARAAASIDAWKGVSQMLPLPLACVADAWLGRYRAIVLASLIFAVSMGALSLSSALPALRGGHVAIFYVALYLVALGEGAHKPCAQAFAADQFDEKDPRESVARSSFFNWWYFGMCAGTAVTTMVSSYVQDNVGWGLGFGIPCIVIVASLVLFLLGTRSYRFYTTAAASPFSRVGKALLALVQSWAPKHRTRKLGDSDGDAVAVEEVKSVLRLLPIWASCIIYAIIFSQTSTFFTKQAATLDRRIGARFKVPAAALQTFISVSIVVFIPVYDRLFVPLARRYTGRPTGITMLQRVGAGLALALVAVALSALVEMKRLRVAAEAGLVNTPKAQLPMALWWMVPQYVLIGVADVFAMIGLQEFFYDQVPNAVRSLGLALFLSIFGIGHLLSSFLISVIDKTTAKSGTSWFSNNLNRAHLDYFYWLLTGLCAVELVAFVIFSRVYVYKRKVGNDGGNGDFV

SEQ ID NO: 49265 - protein, 412 aa, Zea mays
  Clone ID: LIB4702-002-D9_FLI.pep
HPHQPLQRPAPKLQLRSVTQTNDTLGLEPTVPPARPRDPAAMSIPRLLLLAVLAAAAACAPAHAAGAGACAAEKFSGNRAFAACADLARLGASLHWSYDAAAASLSVAFLAAPPSAGGWVAWGLNPRAQSMDGTQALVAVPSSGGGGAYEVQTYSISGTSLGAPGPLSAYRTSGLAAEVGGDGRVRVFATLVLPNGTGAEVNHVWQVGPYSGGIQIHDTKGDNMNAKGTLNLLTGATAAASGGGSIIRKKNTHGILNAVSWGLLLPMGAIFARYLKTFRSADPAWFYLHVACQLLGYGVGVSGWATGIHLGNLSKGITYSLHRNIGVTVFALGTLQIFALFLRPKKDHKYRVYWNAYHHSVGYTVIVLGVVNIFKGMAILDVEQRWKTGYIAAISVLGAVAVPWRPSRGASF

SEQ ID NO: 49266 - protein, 294 aa, Zea mays
  Clone ID: LIB4729-004-G3_FLI.pep
RGRPDDSHLSLTPRRSTPLQPGASTHPPMASEAAPRVVVDECRGVLSVYSDGTVVRRAQPGFATPVRDDGTVDWKDVTFDEARGLALRLYLPRDRGAAAGRRLPVFFYYHGGGFCIGSRAWPNCQNYCLRLASDLGALVVAPDYRLAPEHRLPAAIDDGAAAVLWLARQGGGDPWVAEAADLGRVFVSGDSAGGTIVHHLAVRFGGSPADHLAPVAVRGYVQLMPFFGGVERTRSEAECPADAFLDRPLNDRYWRLSLPEGATPDHPVANPFGPGAPPLDAVEFAPTLVVVGGP

SEQ ID NO: 49267 - protein, 288 aa, Zea mays
  Clone ID: LIB4730-012-B6_FLI.pep
PGPRCVPHLTPPRIHHGRRLWPRPARGSAAPAADPPSAAGRAPQRAAPPAAARRRRVPPRLAPLPRDPLAAAPRAAPQPAPPPPPPPASRRRRLPPRLRPRAPHLAPPPLRPLPPLPLLLPRRLIHVPPLPLGRDLLLHLAPGTPPVHLLRVFRLARAPAQIARRLQPLRRHVPPLAPARIRLGAPRHRPRRPRRHGARPHRARRAILHPLRIRQVDEASPLSAVQAAEPHTGLRRRLRALRRRHAVAQPVEALLLPACHAHGGLGARGASGVGRRLRGPQASPAPGW

SEQ ID NO: 49268 - protein, 222 aa, Zea mays
  Clone ID: LIB4730-015-G8_FLI.pep
RAARVGCSLRRRLADASSPSTTVVRDEGLEDDEDCVGMRSTPSTVVAIAGTVPVPVAAMMAGSDCCSSHRMVSPSDLCPSSRVSWKILAAHAAGMRIRRPRPSTLVCRSRFRGGGLLRTTAIPPKNSTGSGFGTMNPCMGIAPIAIPVAATPPATCCRAPSPSSALLSCACASMARVETSVGERLDFLVTALGDGGSLVPLLPRASAEVGLASDGFTPGRPR

SEQ ID NO: 49269 - protein, 404 aa, Zea mays
  Clone ID: LIB4730-019-C11_FLI.pep
LEAGRDPTPKGVAELAIAASRLATRESQAQPSVPWGRGYIAMWWRAVRRRWVATARPASSAAAGAEKSCRAVVVPRFGGPEVLEVRQGMPVPDLKPQEVLVRARAVSINPLDLRMRCGYGRSIFEPLLPLIIGRDISGEVAATGTLASSFSIGQEVFGSLHPTALRGTYADYAILSLDELTLKPSTLSHVEASAIPFAALTAWRALHGTARISEGQRVLVIGGGGAVGLAAVQLAVAAGCVVSATCGTQSIERVMGVGAEQAIDYTAEDTEAAIKGKFDAVLDTIGVPETERIGINVLRRGGHYMTLQGEAAALADRYGLAVGLPAATAVLLKKQMQYRYSHGIEYWWTYMRADAEGLHEIQRLSGAGKLQIPVEKTFPISHVREAHAAKEKKLAPGKVVLEFD

SEQ ID NO: 49270 - protein, 206 aa, Zea mays
  Clone ID: LIB4738-018-F2_FLI.pep
AMASAFSSRACALVALLMGLCTAGAAAGRIDDGLEVTWGDGRGSVSSDGQVLTLSLDRTSGSGFRSKDTYLFARADVQIKLVPDNSAGTVTTFYFISEGPWDVHDEVDLEFLGNASGQPYTLHTNVYASGNGSREQQFHLWFDPTADFHTYSIQWTQQHILVLVDGTPIREFKNHADRGVPHPSSQRMRLYGSLWDAEDWATQGGP

SEQ ID NO: 49271 - protein, 673 aa, Zea mays
  Clone ID: 700195210_FLI.pep
KGVPFVWSGDCEISYQSLKSKLVDAPILALPESGKRFTVYTDASRIGLGCVLMQEGRVIAYGSRQLRKHEGNYPTHDLELAAVVFALKSWRHYLYGEACDIFTDHKSLKYIFTQKELNLRQRRWLELIKDYEVSIHYHPGKANVVADALSRSGVPKVAVPLIADLDRLGIALCYVGTASVETQMLIQSPLMERVRAAQQQDRLLQEARRRVGDGKPREFTIDENDLVRFRGRLCVPQKSEVKLDILREAHKTPYTVHPGETKMYRDLKQNFWWKRMKVDISKYVAACEVCQRVKAEHKRPAGLLKPLEIPEWKWEHITMDFVVGLPRSPRGRDAIWVVVDRLTKSVHFIPMKTTNSASDLVPLYMKEVVRLHGVPKSIVSDRDSKFVSKFWESLHSALGTKLSLSVAFHPQTDGQSERTIQTLEDMLRACVLSWKGSWEDHLALAEFAYNNSYQASIKMAPFEALYGRRCISPLCWETLGERSLVGPDWVQQTSEKVREIRQNILVAQSRQKSYADVRRRDLEFAVGDQVLLRVSPTKGVVRFGVSGKLSPRYIGPFTILARVGSLAYRLLLPDSMAGVHPVFHVSMLRKFLRDPDHQIEMEPIAVQQDLTLECRPVRILEFSERVLRKRSIKYVKVLWSNQSEREATWELEELMRQKYPELFVVGGGLPDRS

SEQ ID NO: 49272 - protein, 285 aa, Zea mays
  Clone ID: 700223348_FLI.pep
GGKHHRSSLRDGRRLLFVVSFRRRRSPLSPLLADCVEHQRRPAGRRSSLPKQRGVGYQCVRSWRRAWKSRAGGKQGFGRMVSLSTWFRYAAHKFDYCISLSLKKYNVGQISSTQLTDVIFKNFFHGKLTYVCQTKGEEAMAPIVSPTGGAVLVRKLANLSPTEVFVGDVVLLKDPEKSGNFVIRRLAALEGYEMVSNDEKDEPFVLEKDQCWVLADNLVLKPKEARDSRLFGPVPMTDILGRVIYSLRTAVDHGLVENSGMATKLDGPVLAVELDVEELAKNNKA

SEQ ID NO: 49273 - protein, 293 aa, Zea mays
  Clone ID: 700210885_FLI.pep
SFIYIGHQPDDACVVALLKMLIISSTPHLGVKAWKMVAWPGSARWAKRLSMGPVPVYSAWNQAPMTASMARRPFLISLVRSSLIFSGEPLPQPSGSNQRPPGYPTSVPVSLLLGKMGSVLTLPGLMMSAQRRPSAQPMRMSSMMKRVVVSVKYCCSPAVYQKGVLRTPILVRNSGMKMPAAPSIAHRQCTSSACTFHRRLSGSDPRPQGSKPKSPGRLPSSHGGGVLPGNQIGLLGSAAARTANDGRAASACLSSVLPPRKEDDARCPFLGSAVTAVVEDEEAETSAIAGASC

SEQ ID NO: 49274 - protein, 355 aa, Zea mays
  Clone ID: 700206722_FLI.pep
KVYVIHWVNVDRHASVEEAYQDGRSRLNMLLSKVHNSNVPTLSPGFVKLHTRKFGTPLNKSTMTSDEYKNAVLQAKEHIMAGDIFQIVLSQRFERRTYANPFEVYRALRIVNPSPYMAYVQARGCVLVASSPEILTRVSKGKIINRPLAGTVRRGKTEKEDQMQEQQLLSDEKQCAEHIMLVDLGRNDVGKVSKPGSVKVEKLMNIERYSHVMHISSTVSGQLDDHLQSWDALRAALPVGTVSGAPKVKAMELIDKLEVTRRGPYSGGLGGISFDGDMQIALSLRTIVFSTAPSHNTMYSYKDADRRREWVAHLQAGAGIVADSSPDDEQRECENKAAALARAIDLAESAFVDKE

SEQ ID NO: 49275 - protein, 381 aa, Zea mays
  Clone ID: 700211860_FLI.pep
VLGVGFQLSGGDSQMNELIWYSWLGGVIIGTMIGANSVLEEHCKAGPRNVVITGSTRGLGKALAREFLLSGDRVVITSRSPESVLQTIKELEENIQEGLSVAKKKQRNILSHAKVVGTDCDVCKPEDVKELVNFAINELGSVDIWINNAGTNKGFRPLVTFSDDDITQIVSTNLVGSLLCTREAMNVMQYQEKGGHIFNMDGAGSGGSSTPLTAVYGSTKCGLKQFQGSLLNESRRSKVGVHTASPGMVLTDLLLSGSSLRNKQMFNLICELPETVARTLVPRMRVVKGSGKAINYLTPPRILLALVTAWVRRGRWFDDEGRAVYAAEADRIRNWAESRARFSFTDAMEMYTENTWVSVFSLSVVCAFIILSSSGGPLPGT

SEQ ID NO: 49276 - protein, 416 aa, Zea mays
  Clone ID: 700438624_FLI.pep
LVRGQASSMLSATTVPLQQGGGLSEFSGLRSSASLPMRRNATSDDFMSAVSFRTHAVGTSGGSRRAPTEAKLKVAINGFGRIGRNFLRCWHGRGDASPLDVIAINDTGGVKQASHLLKYDSTLGIFDADVKPVGDNAISVDGKVIKVVSDRNPSNLPWGELGIDLVIEGTGVFVDREGAGKHIQAGAKKVLITAPGKGDIPTYVVGVNADQYNPDEPIISNASCTTNCLAPFVKVLDQKFGIIKGTMTTTHSYTGDQRLLDASHRDLRRARAAALNIVPTSTGAAKAVSLVLPNLKGKLNGIALRVPTPNVSVVDLVVQVSKKTLAEEVNQAFRDAAANELTGILEVATCRSCPSTSGAPTSPPPSTPPSPWSWATTWSRSSPGTTTSGATRRGSSTSLTSAPTSGSEALHCNSTL

SEQ ID NO: 49277 - protein, 150 aa, Zea mays
  Clone ID: 700438813_FLI.pep
SLLIGVVFGHGRGFDLFGVSRIEYYSSCNVLKVENLDAIECGMVGVFIAPTTKNGRWKCAVAWRTGQSGAPATSASRWGSTVGDLTCGPSGLSGGAPDRSCRLSGAPTTRPLTSAHAGAQLMRCSRPLLREVAVALLAHRTLRCAPDTVR

SEQ ID NO: 49278 - protein, 469 aa, Zea mays
  Clone ID: 700438828_FLI.pep
VDFADEEDYRKGGGGELLYVQMQSTKPMESQSKIASKLSPISDENTVLDLVIIGCGPAGLSLASESAKKGLTVGLIGPDLPFTNNYGVWEDEFKDLGLESCIEHVWKDTIVYLDNNKPILIGRSYGRVHRDLLHEELLRRCYESGVTYLNSKVDKIIESPDGHRVVCCDKGREIICRLAIVASGAASGRLLEYEVGGPRVCVQTAYGVEVEVENNPYDPSLMVFMDYRDCFKEEFSHIEQENPTFLYAMPMSSTRVFFEETCLASKDAMSFDLLKKRLMYRLNAMGIRILKVYEEEWSYIPVGGSLPNTDQKNLAFGAAASMVHPATGYSVVRSLSEAPRYASVISDILGNRVPAEYMLGNSQNYSPSMLAWRTLWPQERKRQRSFFLFGLALIIQLNNEGIQTFFEAFFRVPRWMWRGFLGSTLSSVDLILFSFYMFAIAPNQLRMNLVRHLLSDPTGSSMIKTYLTL

SEQ ID NO: 49279 - protein, 349 aa, Zea mays
  Clone ID: 700380989_FLI.pep
ALVTDPCSFFDAPPGMANRSVAMGVAVAFVAMTALCCAPGAAELPRLDHPARSDGSLKLLVVGDWGRKGTHNQSRVADQMGRVGEKLDIDFVISTGDNFYKNGLKGVRDQAFEESFMDIYTAQSLQKPWYSVLGNHDYRGNALAQLSPVLRKIDDRFICMRSFIVNAELVDFFFVDTTPFQLEYWTHPGKHRYDWRGVAPRGKYIANLLKDLDVAMKKSTARWKIVVGHHTMRSVSEHGDTEELLELLLPVLKDNGVDFYINGHDHCLEHISSRDSPLQYFTSGGGSKAWRGVFHPNKDKLRFFYDGQGFMSLQLHQDQAHFIFYDVFGNILYRWSSRHPQSSMYLDEE

SEQ ID NO: 49280 - protein, 361 aa, Zea mays
  Clone ID: 700346018_FLI.pep
ALILSGGCRGVQRDQAKAILSTQAVRIATKAEQHERFIFKVTHLLGVLGFGGFCYLLGARPQDVPYVYCLFYVIFVPLRWIYYRYKKWHYYLLDFCYYANTFLLVMILFYPEDEKLFMVCFSFAEGPLAWALIVWRCSLVFSSFDKLVSVLIHLLPGIVLFTIRWWNPQTFAAMHPEGRDARVTWPYVEDKSYLWTWLFFVPLAAYTLWQLMYFLIVNVLRRQRLLRDPEVMTSYRELSKKAQKANNIWWRLSGLLGDRNRQVMYILLQALFTVATMALTVPIFLSYRMHVVFLILKVCASTWNGGSFILEVMPRQVVQKQLKKLDMKPMEQGSSTQGAPGGDGGTLGNHHQHTSEEHIQE

SEQ ID NO: 49281 - protein, 769 aa, Zea mays
  Clone ID: 700469003_FLI.pep
RLASLPPSAAAGSSSSSLLTPSFKLVLPAYLSVGRERERGEGSVGRSGALGSRRCLPVSSLGSRSLRAMAAVATPPAPAPAAPAPAPAPAAAPAPVTVAPAADQTTDLLQKLSLDSQPKAAGATEPAAAAAKEGAVTSQPLSVAIPPERSITPVLQDFMDPNLFYLPAYYYGGYDSSMSEWDDYPRYLNSDGVEIAPAVYGDIYGYGYAPYGAYSPATSPVPTVDGQMFGAQHYQYPTTYFQPPTPIPSTTQSNLQSSNNPEKPAAKADPAKATANGVPNGTGHTHSYSGTVPSQQSSALTPDGTYRAPLLGGVPSAGYLDTTYYGYDSTGAQFAWYDGSAYANGQQRTTTTNRFPSSSFSGNGSSAIYQNKSSTTQQMGMQNRRPTTTSAAPTYPNRMYPSPRPYTQYGNSVKTGLPYGSNGYDSRIYGRCGLGNGMDNRYRPRACSGYYGYGNESQDGTIELNRGPRSGRFKNQKLYGHTVTIAVKGQSLPSSESKNDSAVPDRAKYNRDDFPVQYDAAKFFVIKSYSEDDIHKSVKYNVWASTTNGNKKLDAAYQEAQSKGSACPIFLFFSVNTSGQFVGVAEMTGAVDFEKTLEYWQQDKWNGSFSVKWHIVKDVPNNILKHIILENNENKPVTNSRDTQEIRLEQGLQMLKIFKDHVSKTSILDDFAFYESRQKLMQDKRSKQQQLQKQVWDTRTPVSVTGERPQEPADGKPNPSVPDGVTAEVKAVKAPSENGITAPVVSYAAKVAQTAPEKPVLSNGVAKTG

SEQ ID NO: 49282 - protein, 533 aa, Zea mays
  Clone ID: 700087981_FLI.pep
HTNTSRRRQRASLLSHASRQGRERDRRSPSRRRWCGCPPSSSEICLVTDLSDKMVKICCIGAGYVGGPTMAVIALKCPDIEVVVVDISKPRIEAWNSDTLPIYEPGLDDVVKQCRGRNLFFSTDVEKHVAEADIIFVSVNTPTKTRGLGAGKAADLTYWESAARMIADVSKSDKIVVEKSTVPVKTAEAIEKILTHNSKGINYQILSNPEFLAEGTAIEDLFKPDRVLIGGRETPEGRKAVQALKDVYAHWVPEDRILTTNLWSAELSKLAANAFLAQRISSVNAISALCEATGANVTEVAYAVGKDTRIGPKFLNASVGFGGSCFQKDILNLVYICECNGLPEVANYWKQVIKINDYQKSRFVNRVVSSMFNTVAGKKIAVLGFAFKKDTGDTRETPAIDVCKGLLGDKAQISIYDPQVTEDQIQRDLAMNKFDWDHPMHLQPTSPTAVKQVSCVWDAYEATKGAHGLCILTEWDEFKTLDYQKIFDNMQKPAFVFDGRNIVDSEKLREIGFIVYSIGKPLDAWLKDMPAVA

SEQ ID NO: 49283 - protein, 716 aa, Glycine max
  Clone ID: 701129039_FLI.pep
QMADAGIKYIPSNTFSHYDQVLDATATLGAVPPRYGWTGGEIGFDTYFSMARGNATVPAMEMTKWFDTNYHFIVPELGPDVNFTYASHKAVDEYKEAKALGVDTVPVLVGPVTYLLLSKPAKGVEKSFSLLSLLPKVLAVYKEVIADLKAAGASWIQFDEPTLVLDLESHKLQAFTDAYAELAPALSGLNVLVETYFADIPAEAYKTLTSLNGVTAYGFDLVRGTNTLDLIKGGFPSGKYLFAGVVDGRNIWANDLAASLTTLQGLEGIVGKDKLVVSTSSSLLHTAVDLVNETKLDDEIKSWLAFAAQKIVEVNALAKALSGHKDEAFFSGNAAALASRKSSPRVTNEAVQKAAAALKGSDHRRATNVSARLDSQQKKLNLPILPTTTIGSFPQTVELRRVRREFKANKISEEEYVKSIKEEIRKVVELQEELDIDVLVHGEPERNDMVEYFGEQLSGFAFTVNGWVQSYGSRCVKPPIIYGDVSRPKPMTVFWSSLAQSFTKRPMKGMLTGPVTILNWSFVRNDQPRSETTYQIALSIKDEVEDLEKAGITVIQIDEAALREGLPLRKSEQAHYLDWAVHAFRITNVGVQDTTQIHTHMCYSNFNDIIHSIIDMDADVITIENSRSDEKLLSVFREGVKYGAGIGPGVYDIHSPRIPPTEEIADRINKMLAVLEKNILWVNPDCGLKTRKYTEVKPALTNMVAAAKLIRNELAK

SEQ ID NO: 49284 - protein, 523 aa, Zea mays
  Clone ID: 700475895_FLI.pep
KFESKSTMLNITNWSKSQPCYVNREIISLLSTLGIKDEVFESMQQDDMHESDGMLTNKEAALSVLGKIGGGDTKTAADMLLQGYEPSSEPYLLMILKAHRANRLTDIRTRCKIHVQKGRVLIGCLDETCKLEYGQVYIRITKNHKEQKYSEQPFFCNDDGKTAVIVGKVAITKNPCLHPGDVRVLEAVYDPGLDARGLIDCVVFPQRGERPHPNECSGGDLDGDLFFITWDDKLIPEKVDAPMDYTATRPRIMDHAVTLEEIQKHFVSYMINDTLGAISTAHLIHADRDPLKARSPECVQLAALHSMAVDFAKTGAPAEMPLALRPREFPDFMERWERPMYVSNGVLGKLYRAALRHEEDAEALLPAGPPSCVYDPDLEVAGFDEFLDAAEERYEAYAERLGALMTYYSAEREDEILTGNIRNKLVYLRRDNKRYFEMKDRIIAAVDALHAEVRGWLRACKEDDASRVASAWYHVTYHPDRRGEKRFWSFPWIICDTLLAIKAARRCRKRVEDAAVPMDCDGS

SEQ ID NO: 49285 - protein, 105 aa, Zea mays; identical to SEQ ID NO: 36830
  Clone ID: 700573216_FLI.pep

SEQ ID NO: 49286 - protein, 586 aa, Zea mays
  Clone ID: 700622955_FLI.pep
KFYLHKFPLLSKCARFQKLIPTTGDENIEIHIHDIPGGAKAFEICAKFCYGMIVTLNAYNVIAARCAAEYLEMNETVDKGNLIYKIDIFLSSSIHRSWKDSIIVLGTTKAHLPWAEDLKLVSHCIDSVASKASIDVSKVEWSYTYNRKKLTVENGHDSPWNGVKQQQFVPKDWWVEDLTDLDIDAYKQVITAVKTKGTVPKDVIGEAIKAYTYKKLPSLSKVSMIHGDAKVRAMLVTITCLLPSEKGSVSCSFLLKLLKATNLLKCGEMCRKELMKRIARQLEEASVLDLLIPTVDGDTTVYDIDLILSIVEEFVRQDSKNAQRHNGGEVNDHVSAPSASMVAVAKTVDGYLTEVARDPNIPVYKFFSLAETVSTGSRPVHDGLYRAIDMYLKEHPSLGKSDKKRLCALMDCKKLSPDACAHAVQNERLPLRIVVQVLYHEQTRACAAATAIRADSIGIGSYESSRSGATTNTEDEWDGVMAVEDLSLSKTTKLVDKCDTAASTVVVGKDKDHGGNKGATGRVAKGGAGAATPKKALGKTVSGKGQTGERSSSDSSDSAVAVAVLTSQEHPKRTTRARNAAKSAAA

SEQ ID NO: 49287 - protein, 346 aa, Zea mays
  Clone ID: 700578643_FLI.pep
PIQTRQARNPPMAHRVLLLLSLASAAAVAAAVDAEDPLIRQVVPGGYDNDLELNAESHFLSFVQRFGKSYKDADEHGVTKFSDLGLRKSRRALLRELGESAHEAPVLPTDGLPDDFDWRDHGAVGPVKNQGSCGSCWSFSASGALEGAHYLATGKLEVLSEQQFVDCDHECDSSEPDSCDSGCNGGLMTTAFSYLQKAGGLESEKDYPYTGSDGKCKFDKSKIVASVQNFSVVSVDEAQISANLIKHGPLAIGINAAYMQTYIGGVSCPYICGRHLDHGVLLVGYGASGFAPIRLKDKPYWIIKNSWGENWGENGYYKICRGSNVRNKCGVDSMVSTVSAVHASKE

SEQ ID NO: 49288 - protein, 404 aa, Zea mays
  Clone ID: UC-ZMFLB73306C05_FLI.pep
SVTITEFGAVGDGVTLNTVSFQNAVFYLRSFADKGGAQLYIPRGRWLTGSFNLTSHLTLFLESGAVIVGTQDVSQWPVVEPLPSYGRGMDLPGSRHRSLINGQNLVDVVITGNNGTIDGQGSTWWNWFRSNKLNYSRPHLVEFVDSEQIVISNITFLNSPAWSIHPVYCSNVVVHSVTIQTSLDAPLNHGIVPDSCSNMCIEDSSISVSHDAISLKSGWDKQGIAFGRPTSDIHISRLDLQSSLGAALAFGSEMSGGISDIHADRLLIHSSSRGVFFKTAPGRGGYIRDTVISDVQMEDVDVAIAFTGDWPSHPDDQFDPAALPVVSHITLKNMTGTRISVAGVLSGIAGDPFTDICLSNINFSLADSASPTSHWSCSNVSGYSELVFPEPCLDLQTQSSDASV

SEQ ID NO: 49289 - protein, 167 aa, Glycine max
  Clone ID: 701119253_FLI.pep
PAEVSEKEGINFLGVKGKCLWPIRIGCLNPKDQIPKWSMKTIQCITDEDYYFVCVEIFEGLKRIGKPSILLSIREGAEAVHIIMGMLQACYIRRALLMNNTRWEIIIEESHASDSTMEDWFVIVEDAKKSAERDTSNLIEQMVGKGWMAKNILLSTQEQTRYSFICD

SEQ ID NO: 49290 - protein, 771 aa, Zea mays
  Clone ID: 700332725_FLI.pep
DDPHLKVEVEGSSLSTISVRSHRPAAAMAFLARALRQSNWRLSSRCPAVAASCRWISPTAAAGSPEAGAAVASADPELPPPREPVGGARVELPHNPEDALEVFVDGHAVRIPKGFTVLQACEVAGVDIPRFCYHSRLSIAGNCRMCLVEVEKSPKPVASCAMPALPGMKIKTNTPVAKKAREGVMEFLLMNHPLDCPICDQGGECDLQDQSMAFGADRGRFTEMKRSVVDKNLGPLVKTVMTRCIQCTRCVRFATEVAGVQDLGMLGRGSGEEIGTYVEKLMTSELSGNVIDICPVGALTSKPFAFKARNWELKGTETIDVTDAVGSNIRIDSRGPEVMRVVPRLNEDINEEWISDKTRFCYDGLKRQRLNDPMIRGPDGRFKAVTWRDALAVVAEVLHQVKPEEITGVAGKLSDAESMMALKDFVNRMGSDKVLCEGNGPNPPADLRSNYLMNTSIAGLEKADVFLLVGTQPRVEAAMVNARIRKTVKATQAKVGYIGPPADFNYDHEHLGTGPQTLVEIAEGSHPFCSVLQSAKNPVIIAGAGLFEREDQVALFSTIETVAKKFNVMRPDWNGLNVLLLHAAQAAALDLGLVANPAESIKSAKFLYLMGADDISLEKLPDDAFVVYQGHHGDKGVYRANVILPSSAFSEKEGTYENTEGCTQWTIPAVPTVGDARDDWKIIRALSEVAGAQLPYDSLSAVRDRISTVAPNLVHVDERETPTISAEVKPPVKQQVSSTPFKAVVENFYMTDAITRASKIMAQCSATLLKK

SEQ ID NO: 49291 - protein, 307 aa, Zea mays
  Clone ID: LIB3594-060-H3_FLI.pep
SFLVSSSRPVSNMAANLKWAPVLALVVVVAAMVGTTSAGNIAVYWGQNGNEGSLADACNSGLYAYVNIAFLTTFGNGQTPVLNLAGHCDPGSGSCTGQSSDIQTCQSLGIKVLLSIGGASGSYGLSSTDDANSVADYLWDNFLGGSGSSRPLGAAVLDDIDFDIENGQSAHYDDLANALKGKGSVLLTAAPQCPYPDASLGPALQTGQFDNVWIQFYNNPGCAYANGDDTNLVNAWNTWTSSITAGSFYLGVPASPQAAGSGYIDPGTLTGTVIPAIRGIGNYGGIMVWDRFNDVQNNYSSQVKGSV

SEQ ID NO: 49292 - protein, 365 aa, Zea mays
  Clone ID: UC-ZMFLMO17227F02_FLI.pep
VGLTLMFLGLAIWVKLTPIFRITEFVSDTLGFLTNLLPNYVSGPLILALGLFFVFWGQSRTVGSISEVLQPDNDQELVDVLLAHRRLNKGAKIVVVGGGTGLSTLLRGLKHYSANITAIVTVADDGGSSGRLRREMGMLPPGDIRNCIGALADEEKLLTELFQYRFKAGDGLSGHSFGNLFLTAMAEITGDLEMAAIACSKVLAVRGKVLPATLDDVKLWAEMEDGRYVEGESNIPEAQGRIRRIGCLPESPKALPAVLKAIKAADYIIIGPGSLYTSILPNLLIPEIQTAIAKAKVPRIYICNVMTQPGETDNYTVSDHLTAIAKLPITNNRWGKSRRKLARVNSSFCTFNRKNPSITPKPCPS

SEQ ID NO: 49293 - protein, 245 aa, Zea mays
  Clone ID: LIB4742-010-C3_FLI.pep
VRPMRALVVVSFASACLLLLLQLAGASHVVYNYKDLEAEAAAATDQVPPSIVNPLLRTGYHFQPPKNWINDPNAPMYYKGWYHFFYQYNPKGAVWGNIVWAHSVSRDLINWVALEPALRPSIPGDRYGCWSGSATVLPDGGGPVIMYTGVDHPDINYQVQNVAYPKNVSDPLLREWVKPSHNPVIVPEGGINATQFRDPTTAWRGPGPEQWRLLVGSAAGSSPRGVAYVYRSRDFRRWRRVRRPS

SEQ ID NO: 49294 - protein, 378 aa, Zea mays
  Clone ID: LIB4743-007-E2_FLI.pep
PRGRPGNKLPLLRRSRTRLRSHHDGPSSTSTPAAAIIGYSMVAATLALLLVTLAALHGAAPVLAVAGDPPFSCGPSSAEASEGLAFCDVTLAPAQRAADLVSRLTVAEKIAQLGDQAPGVPRLGVPGYKWWNEALHGLATSGKGLHFDAAVRAATSFPQVLLTAAAFDDDLWFRIGQAIGREARALFNVGQAEGLTIWSPNVNIFRDPRWGRGQETPGEDPAVASRYAVAFVRGIQGNSSSSLLQTSACCKHATAYDLEDWNGVARYSFVARVTEQDLEDTFNPPFRSCVVEAKASCVMCAYTAINGVPACANSDLLTGTVRGDWGLDGYVASDCDAVAIMRDAQRYAPTPEDAVAVSLKAGLDIDCGSYVQQHAAAL

SEQ ID NO: 49295 - protein, 369 aa, Zea mays
  Clone ID: LIB4759-013-F8_FLI.pep
RTRQSRAATAKILRGLLFPARHCAARALHSRSAQPIIHPSIHHHHPAAAMCGGAILSGFIPPSGVAAAAAAAKKKQQQRCRVTADLLWPGPGSKEAPQDQEEDFEADFREFERGLGEDDVDSAGEGGDPEVQELPPPEPTRFAFATAAKAAVDGVMTTTPKDVKGDRPVKRGRKNQYRGIRQRPWGKWAAEIRDPNKGVRVWLGTYNTAEEAARAYDAEARKIRGKKAKVNFPDDDAPGTGHRPANAAPRLVAPPPPPKACADEIFNNLKNDDDDDNNNNNDDLFAMFAFGDNKKKVPAAKPAAAEGGSGSGSFLVPAPAVAVVPGNKRRSSATNTMLSVSDDQRSNSYGSGSSDLVGSWSWDDDAAAL

SEQ ID NO: 49296 - protein, 334 aa, Zea mays
  Clone ID: LIB4764-017-G1_FLI.pep
RGVSTGSQIIRHSPTVPGSALAAMPHLVLLLFLGLGGLLPAASAADEQFVFDGFKGANLSLDGMATVTPDGLLMLTNGTSQLKGHAFYPAPLRFHGAPDGTAAAMESFSTAFVIGIIGAFEDLSSHGMAFVVAKSTNFTSALPGQFMGLVSSATNGNATNHLFAVEFDTILNSEFDDMSGNHVGIDVDGLNSVDADNAGYYDDATGGAFRNMSLVSRKAMQVWVDFDGRTMQVNVTMAPLEAARRPRRPLLSTTVNLSSVIDDGTAYVGFSSATGILFCRHYVLGWSFRMNGAAPPLNVSSLPTLPVTAPRPRSRALEIVLPIASAALVFAAAL

SEQ ID NO: 49297 - protein, 410 aa, Zea mays
  Clone ID: LIB4826-005-F7_FLI.pep
PGLPSHSLPDIDMEPFFLFVGLALVLCFLTPYYRHLQSKKTSPLEPTEWPIVGHLPGLVANIHHFHDWATGVLAGVGYNFEARAGRTGVRYFITCDPSNVRHIFTSNFANYPKGEEYAAIFDVLGGGIFNADGESWRRQRVKAQMLMTGPRFRAFTARCSRDKVERSLLPFLAHHAADDGRTPPCDLHDVFLRLTFDMTCTLVFGVDPGCLAFGLPVVPFARAMDDALETLFLRHIIPMACWKLMHVLEVGQERKMAAARRTIDSFVAATVAKRRADKLKGCECCVSNSYDLLSSFICHEEDGSSENDDDVFLRDTTVNLLLAGRDTTGAALSWFFYLVSKNPRVEQKILDELTPIAASRRTKGAEDAAHAASGMVTFDADELGSLVYLHAALSECLRLYPSVPFEHKVA

SEQ ID NO: 49298 - protein, 155 aa, Zea mays
  Clone ID: LIB4862-009-H12_FLI.pep
RGRPGRELLRLQDSTSCAAAMTFKRRNGGRNKHGRGHVKYIRCSNCAKCCPKDKAIKRFQVRNIVEQAAIRDVQEACVYDGYVLPKLYAKVHHCVSCAIHAHIVRVRSREKRRDRKPPERFRRREDRPAGGQGGPRPGPGAAATAPAPAPVAARP

SEQ ID NO: 49299 - protein, 86 aa, Zea mays
  Clone ID: LIB4863-006-H10_FLI.pep
SQVINRKYIPSLKMSSVVLGATGRENKTSWPEVVGMSIKEAREIILKDMPNANIQVLPVGSLVTQDFRPDRVRIFVDIVAQTPTVG

SEQ ID NO: 49300 - protein, 257 aa, Zea mays
  Clone ID: LIB4865-007-E4_FLI.pep
YQLATYIVKYSSNILAPMAAKIFALLALLALSASVATATIIPQCSQQYLSPVTAARFEYPTIQSYRLQEAITASILRSLALTVQQPYALLQQPSLVNLYLQRIAAQQLQQQLLPTINQVVAANLAAYLQQQQFLPFNQLAGVNLAAYLQAQQLLPFNQLVRSPAAFLLQQQLLPFHLQVVANIAAFLQQQQLLPFYPQVVGNINAFLQQQQLLPFYPQDVANNVAFLQQQQLLPFSQLALTNPTTLLQQPTIGGAIF

SEQ ID NO: 49301 - protein, 216 aa, Zea mays
  Clone ID: LIB4865-009-C4_FLI.pep
DLWRRRHQSVRPSVVGAGERVEMEEAAAAEKASSYRYWVREATGDAAPLPVPRKLDTAANGNGNPPPVGSVWNQAGTWEEKNLNSWANSRIKDLMGSLGSLAFPTGKASIDEVSKCSGDAFQVIVRNKKRVGYNYELSLRFSGEWLIKEENKKIKGHLDIPEFSFGEIDDLEVQVRFGDDKGLASDDRTRICKDLKSFLAPIQEKMRMFEEELKGR

SEQ ID NO: 49302 - protein, 80 aa, Zea mays
  Clone ID: LIB4865-009-E2_FLI.pep
SQVINRKYIPSLKMSSVVLGATGRENKTSWPEVVGMSIKEAREIILKDMPNANIQVLPVGSLVTQDFRPDRVRIFVDIVA

SEQ ID NO: 49303 - protein, 168 aa, Zea mays
  Clone ID: LIB4865-011-H8_FLI.pep
KNNCNPGTERGDAEAPHLRRREMATVPGDLIWQIVRKNNSFLVKQFGNGNAKVQFTKEPNNLYNVHSYKYSGLANKKTVTIQPAAGKDSAVVLSTTKTKKQNTPAKLSHKSVMRKEFRKMAKAVKNQVGDNYYRPDLTKSALGRLSSVYRSLQVAKSGVKKKNRQPTH

SEQ ID NO: 49304 - protein, 128 aa, Zea mays
  Clone ID: LIB4866-005-A8_FLI.pep
CHGQDPGQGGHSPDQQRLIFAGKQLEDGRTLADYNIQKESTLPLVLRLKGGTMIKVKTLTRKEIEINIEPNDTIDRIKEHVEEREGIPPVQQRLIYAGKQLADDKTAKDYNIEGGSVLHLVLALRGGC

SEQ ID NO: 49305 - protein, 419 aa, Zea mays
  Clone ID: LIB84-028-C7_FLI.pep
GKINRPALELLLGSSNIPCLLPFSSVFSYPSDRGSAMPALLVNTVSVSPAASRLGSSRPATARRAASARHGHRCRAEASGSSWVSDYDLYELLGVERSSPQSEIKAAYRSLQKRCHPDVAGAAGGHDMAVVLNEVYALLSDPDARLAYDQEQARRSEFAGYTGRPLYSSWVGAESERRAVFVDEVRCVGCLKCALHASRTFAVESVYGRARAVAQWADDEDRIVDAINTCPVDCISMVERSDLAALEFLMSKQPRGRVRVSEGNAVGARAPNIFNEVAKFKKRFDEMKQKSAAREFQESEAARQSRTSAVHAIRSMSNWWYWRPFGFGPSAPVTIVLASRLLPPPPAAPADPVTERLQEAAAARRKTGGAATATAHAGREDYWTPQLNLPSSASPPSIHQRGRGTPAHQGHGRRRGAAG

SEQ ID NO: 49306 - protein, 537 aa, Zea mays
  Clone ID: 700203256_FLI.pep
PRCMVYLTSTQSRHPLHPWPLTHVGHGSCCMHLLNHLTNTASLCFISPHTTTGANAVMAALLAILMHLLVPALLLMRVVAVVAAGAPPFSCGGGPSLGLPFCNTKLPAAQRAADLVSRMTPAEKASQLGDVANGVPRLGVPSYKWWNEALHGVAISGKGIHMDRGAVRSATSFPQVLLTAASFNDNLWFRIGQATGKEARAFYNIGQAEGLTMWSPNVNIFRDPRWGRGQETPGEDPAVASRYAAAFVRGLQGSSSNTKSVPPVLLTSACCKHATAYDLEDWKGVTRYSFRATVTVQDLADTFNPPFRSCVVDGKASCVMCAYTSVNGVPSCANADLLTKTFRGSWGLDGYVAADCDAVSIMRNSQFYRPTAEDTVATTLKAGLDIDCGPYVQQHAMAAIQKGKLTQQDVDKAVKNLFTTRMRLGHFDGDPKAHVYGNLGAAHICTQEHKNLALEAALDGIVLLKNSAGVLPLKRGSVASAAVIGHNANDVLALLGNYWGPPCAPTTPLQGIQGYVKNVRFLAGCHKAACNVAATPR

SEQ ID NO: 49307 - protein, 383 aa, Zea mays
  Clone ID: 700206628_FLI.pep
SLALREIKMGVGKVLNDVKPYLAMVLLQVGFAGMYIVAVASLKRGMSHFVLVVYRNLCATAVMAPFALWFERNARPRMTITIFLKIMGLAMLEPVLDQNLYYMGANLTSAGFASALINILPAVTFVMALVLRMEKVRLRSVHSQAKIAGTVLTVAGAVLMVLYHGPVVQFPWSKGQHHHDSAGGQGANSAAGGGGFLTGIITIVIACVCWSAFFVLQANTLKSYPAELSLTALICLMGSLMSGSVALVAERRNTQAWVIGFDTRLFTAVYAGIVCSGVAYYVQGIVSRQRGPVFVTAFNPLCMIITAVMGSIILKEEITLGSVIGAAIIVLGLYALIWGKSKDSVADVSASGGSKGAAAAAAIELPITLAQPNGNGNCKHEVG

SEQ ID NO: 49308 - protein, 340 aa, Zea mays
  Clone ID: 700102335_FLI.pep
LLLHSSPSSVASRTRAGRRRGGVLSEPDSQSVSVPLPFGHQITKILQRGMAPSSYEMAASTLLCGEDSSSILDLEAGGQEEEEVLLARSRTRGEPSVVFPVPSEDCVAGFVEAEAAHMPREDYAERLRGGGTDLRVRTDAIDWIWKVHAYYGFGPLTACLAVNYLDRFLSLYQLPEGKSWTTQLLSVACLSLAAKMEETYVPPSLDLQVGDARYVFEAKTVQRMEVLVLSTLRWRMRAVTPFSYIDYFLHRLKDGGAPSRRAVLRSAELILRVARGTCCLGFRPSEVAAAVAAAVAGEEHAVDIDKACTHRVHEERVSRCLEAIQATVPAQPLKAEGPSG

SEQ ID NO: 49309 - protein, 271 aa, Zea mays
  Clone ID: 700237778_FLI.pep
AGEGAGGVVVGVAVRPGARGLEQLRVGGGAAGAGAGVGAAAAVFGPAEGVAGAAAPGAALGAQLRGAPLAQVRRAPGRGARRRRGGAAAASAAARGLHHDRQVVAVHEADVVEVVAAGGVQRELGQRRRRRRVPPVALQGPRAAVSRGARHLPASGVLHAARARPDPAGPPRRRRHRARRARGQREARRVQPRAPRVRLDARPHRRRAPVHERECRGPPSSERCADQNKNYEANSCCNSHGVEAMQLYVVPGNGDWHGQEGKRCIMSAQYR

SEQ ID NO: 49310 - protein, 210 aa, Zea mays
  Clone ID: 700171759_FLI.pep
GERRHVAAQEVRRELQPLHLQLLLQLLELLRRRLRHHHLRILGPTTPATGTTGTLVTAATRTALLGLATAGILGMALATAGVLRLALAAAMAVLRDAGLGAPQLGRLAGLVELPDDGVRIQQAGHRHLPLFRVDAALVDTVDLVEGLLDLLLAPVTVYVHSQHQSLHLEHILLAHPGTGTGTAPPLNATPAERHTTTEQEGFRSGARALN

SEQ ID NO: 49311 - protein, 360 aa, Zea mays
  Clone ID: 700580618_FLI.pep
LAAPFTSQIKSCLKKKIPLRRCMLSEPTVATSADMNWCCVPRAKREENPYSNSIGGKEKYVLFAYKFCICNCMLQDGSTMQYCIISGIYSEKNIRLFSYAELRSATDNFNRTNKVGRGGFGTVYKGTIRSGREVAVKVLSAESRQGIREFLTEIDVISNVKHPNLVELIGCCVEGSNRILVYEYLKNSSLDRALLASNSEPADFTWSVRSAICLGVARGLAYLHEEIAAPIVHRDIKASNILLDRNYVPKIGDFGLAKLFPDNVTHISTRVAGTTGYLAPEYAWHGQLTKKADIYSFGVLVLEIVSGTSSSRSILMDDKILLEKAWELYEAKRLKELVDPALVDCPEEEAIRYIMVALFC

SEQ ID NO: 49312 - protein, 463 aa, Zea mays
  Clone ID: 700802639_FLI.pep
PLSVLLRQEAAHRARMPPRAAPALRVLPLALAAAIFSGLTAILFYLSGVSSSHSGSRLSEADLAALAALRGGFSKCVDANGLGLKAVTGEDYCRVVIQYPSDTVSKWRDPITHKAESLSFEFNLCEAVASWEHVRNSTTVLTKEYIDALPNGWEEYAWRRINKGILLNKCQNRSLCMEKLSLVLPETSPYVPRHFGRCAVVGNSGDLLKTKFGDEIDSYDAVFRENGAPTQNYTEYVGRKSTFRLLNRGSAKALDKVVELDETKKEALIVKTTIHDIMNQMIRELPITNPVYLMLGTSFGSSAKGTGLKALEFALSICDSVDMYGFTVDPGYKEWTRYFSEVRKGHTPLHGRAYYQMMECLGLVKIHSPMRGDPGRTVRWLPTKATIEAARVASEKLLKRPGAGSDDPLGTCTMIKKRRKGKAPNRSGLRDAAMKHLEDMKGAARYPLERNAGGGYLCMINDR

SEQ ID NO: 49313 - protein, 239 aa, Zea mays
  Clone ID: 700397429_FLI.pep
ANGRKKSYYSNGRRRRPEAAGPVGEPIRAAGEARAQPQGPELRERGGGSEGQERAPAQVQPRAPEGPRADPRRQARLRVAGHPAVHRRGLRRHRPVPPPRRPLRARRRSLLGRLHRRQDAARLEPVDDGQDGGGEGRGEEAVGPDGGDVEGALRDCGGQGKPFFGGDSVGYVDVVLGGLLGWVRASEELHGVRPFDPERTPLLAAWSERFGALDAVQTVMPDVGRLLEFGKALMARLAA

SEQ ID NO: 49314 - protein, 177 aa, Zea mays
  Clone ID: 700423214_FLI.pep
FLLRPPRAARADLIPWERVHGVLCPRQRRKTADPTTGRGGGCGGNGTNWGGTGVGVLPARVQLRGLACRYRQLQVLLRQQLRRARTPATLRRDLLSPRHGAILQRPPRPRLHRGHDGTPVRAAVSERSPRGGLRVRRQLRSWRRHGARPGLLPLQGFRHRRRTCAPRHGDEVVSRSA

SEQ ID NO: 49315 - protein, 82 aa, Zea mays
  Clone ID: 701161314_FLI.pep
HAYKPLTNQEWRKKNTNPLALSASSPFLLHSPVTTPDCCRVSICQRAARWPTRRRPRRRSHGPTSKRRRRPRLRRPRQPKRR

SEQ ID NO: 49316 - protein, 202 aa, Zea mays
  Clone ID: 701166789_FLI.pep
RSTTRRMLLLSSLMRPTLRERSPGTLDSWLWLISLIRRRFWSSSVCTCTKLVWNACSTLVSTPGAPAPPNPDSVVSPPSIPYRSPPLSCCCWWSSSSCARSILHSCGLVRAQSLVVVVVVRRRRRSSSTSGEVSTEQGPCLLSMLQMRRSEEEREAARERARRGWVEEVDDDGEGAGEGGGGDQEILRHTKQAQAGWTVFFF

SEQ ID NO: 49317 - protein, 256 aa, Zea mays
  Clone ID: 701176129_FLI.pep
LASSSLLSENPLFHLSLSLSRSRPAPFDVIVSAGLATRRERLVKKNPDIARETERAASLIISMSMSFLSMVEAELPPGFRFHPRDDELICDYLAPKLGAKPGFSGCRPPMVDVDLNKVEPWDLPVAASVGPREWYFFSLKDRKYATGQRTNRATVSGYWKATGKDRPVVAARRGALVGMRKTLVFYQGRAPKGRKTEWVMHEYRMEPAAPLLDHQPSSSNSKQDEDWVLCRVICKKKLAAGGRAGGGSSRSLVASN

SEQ ID NO: 49318 - protein, 134 aa, Zea mays
  Clone ID: 701185496_FLI.pep
APRAHVLHHLLTFVCIRSSWYVSHYPVEVLPHGRVAGARRIWVRHDQRVEVVAAAGDADERRRGGGGRLEEAAVADVFGAIGDGHGDGGHEQVHHLADHPPHHQRVHEPRHDRSINATLGRAQVASSLCTYMCM

SEQ ID NO: 49319 - protein, 324 aa, Zea mays
  Clone ID: LIB3066-008-G3_FLI.pep
PPPSHAAQPRGAMGERRRRASTASLGGGGGGGAGGSGVAPARNEEDKAAEQPPPTLWFALKRSLHCRSELSEVHVPRANKAAGPVVAGSGGGHLSSFVGTLRPGTPGPAWAGAGHGLPCSGSVRGGVRCTPPRSPCVLLERNGSVVSGHRASSCEETAKDGGAGKGSGGLSCHRCGEQFSKWEALEEHHLSRHAVTELVEGDSSRKIVEIICRTSLLKSESSCVRIERVFKVHNTQRTLSRFEEYREAVKLRASKLPKKHPRCLADGNELLRFHGATLSCALGGGGSSSRLCASDKCAVCRIIRHGFSGRKEGKTGVGVFTTST

SEQ ID NO: 49320 - protein, 245 aa, Zea mays
  Clone ID: LIB3245-312-H6_FLI.pep
YNMAPAISKPLLTDLVAQIGKVPSSHIRPVGDRPDLANVDNESGAGIPLIDLKKLNGPERRKVVEAIGKACESDGFFMVTNHGIPAAVVEGMLRVAREFFHLPESERLKCYSDDPNKAIRLSTSFNVRTEKVSNWRDFLRLHCYPLQSFVDQWPSNPPSFRQVVGTYATEARALALRLLEDISESLGLERSHMVAAMGRHAQHMAVNYYPPCPQPELTYGLPGHKDPNAITLLLQDGVSGLQVQR

SEQ ID NO: 49321 - protein, 321 aa, Zea mays
  Clone ID: LIB3245-407-A5_FLI.pep
AAAMEMLSMLKVGYTILRSETPATDLVNTFMDWAARRSLMLLAIFLPPYYIYKLTTSAFAAAVPEDVAGKVVLITGAASGIGQQIAYQYAKKVARLALVARMVGSLHDVAARARDGGSPDVLVVAGDVAKPEDCRRFVQATVEHFGRLDHLVNNAGVANVCWFEDVPDVAALKRVLAVNFWGAVHATHCALPHLKKSGGGKVFVNSSAAAALAMPGMSLYNASEAAVLNFFETLRVELRDEVGITIATSGWIVSEMTGGKQLSKEGTVEVAVRCAEATVDAICRGRRHLTVPLWYRALFLWRALAPEVVEFSQRLLCRRTA

SEQ ID NO: 49322 - protein, 179 aa, Zea mays
  Clone ID: LIB3587-217-H1_FLI.pep
IASKDPAQCSPRRRCCCYGGGGVLLLLRRVTDRFAAISPRPGSTVRAPSPPAGGPDSRVSAALFASLPRSSPRALGNSARSSGSQPFRSPQPPFRLPGFLFFYLVRRHGSMIKVSAFPSSTGSKGGRKSRQLIPRSVPIFRAQAGKIRLCARTSPQECRIDRAHDDDDHQQQQERGGDR

SEQ ID NO: 49323 - protein, 184 aa, Zea mays
  Clone ID: LIB3595-043-G8_FLI.pep
GLGRCGFRLSGGLRGCLGLCGGLRLGGGLGLGLRLGLGGGLGLLGTGLGLLHSGLGLGLRLGGGRGACGQLVGVLHLGELAAGDELLELAEQELAEVGRELVLVLVLDELGDRVLAGPRPLLERRDSLRDHLRTSKPSTIPSDPDATYTTWVQANVAQRLQLPRRTAGGSGWHASWAQRPSWPW

SEQ ID NO: 49324 - protein, 305 aa, Zea mays
  Clone ID: LIB3596-043-H8_FLI.pep
VLAPILLLVELLEHRVADVEGVARHVAARGDQPEVLDGPDLLDGARRRGGLALQRLVRRGEDGGFRLLAAQDLRPLVETGGGRRDVADEVRPAEPQRQPTAFEVCDLDVEQRREEELGAEHLVVAELPDPAGRAVAEPLGHVAVAPGLHDAHAAVVALDVGPARRGVPLRLGAADAAGHGEVVVQPREHGVLEHLGGEAVPGPVVVHPAQVVQLEGQVRVRQRVVHLPRHGARHHRGQPVPVHRARQHRLLLLLLEHHAAFLVLYSAPAPETMWPVAGGRVMVVARGSWLAWLARERVGWELDPT

SEQ ID NO: 49325 - protein, 103 aa, Zea mays
  Clone ID: LIB3597-020-B10_FLI.pep
HDVAPRSTTSAIRPNVTHGHQHVMQQRPQSSKQAQRPEDHWLAATAGPGLLMGMPVTGGAAIPVTGSLAVATVGLAGYILLLLPPPPPPSLLRAHTETVGSRV

SEQ ID NO: 49326 - protein, 294 aa, Zea mays
  Clone ID: LIB36-007-F3_FLI.pep
SCASWPPWSRRPPVLRTGHAGLGFAVTVAADEHRLAAARAPVGAGRGALVLPLPAPASGHVAAEREVEDGGAVAGVDDGVQLDTVDQRADHSLVDLVVQDGALLERVHRADGLVVPVQLVAVVVGDLRAQAGEVEHEGVALAAPLHQPLHPQPDVVLGGQPERVLLVISEHDDAVAGEGEALAEELPHALDVVEGPPQLAAAPARAGVRDADQEGPLLAAGAREARGGRRRRRPLDPPPPDTRHAAALRALDGALAGAHGELRAAVLAPDCRRGHPTHVHGEASRALVALPTLL

SEQ ID NO: 49327 - protein, 187 aa, Zea mays
  Clone ID: LIB3600-057-F5_FLI.pep
SLFADTTKRPRGKNSKETERGSSDFLSILIQTLRGGNNSFRTASGKVCVVAMATEEVAKPSPIPPYPEMILAAIEDLGDKSGSNKSAISRHIEGKYDGDLPPAHASLLAAHLARMKESGELVFVKNNYFRADAPDAPPKRGRGRPPKARDPGTPVSPPSGRGRGRPPKPKDPLDAAVKQATAGMPRA

SEQ ID NO: 49328 - protein, 434 aa, Zea mays
  Clone ID: LIB3606-044-H11_FLI.pep
KHTQAGKALDHRSEGLMAAGGGGSIADEKAPVAEAFGGHLEAAEMTEAEEEHSGGVKSRLSGLLWHGGSAYDAWFSCASNQVAQVLLTLPYSFAQLGMLSGVLFQLFYGLLGSWTAYLISILYLEYRTCREREKAADFRNHVIQWFEVLDGLLGRHWRNAGLAFNCTFLLFGSVIQLIGCASNIYYVNDRLDKRTWTYVFGACCATTVFIPSFHNYRVWSFLGLVMTTYTAWYMAVASLVHGQVEGVQHSGPTRIVLYFTGATNILYTFGGHAVTVEIMHAMWRPQKFKAIYLLATLYVLTLTLPSAAASYWAFGDELLTHSNALALLPRTPFRDAAVVLMLIHQFITFGFACTPLYFVWEKLIGLHDCRSLCKRAAARLPVVVPIWFLAIIFPFFGPINSAVGSLLVSFTVYIIPALAHMVTFRSPQSRENAV

SEQ ID NO: 49329 - protein, 400 aa, Zea mays
  Clone ID: LIB3689-228-H12_FLI.pep
GRRMHMMRRLKSIASGRSSVSDPGGDSGSKRPKFEQDGAGDIVMEPHLTKDKPVRIDQESSSSSNRDAEASTSTSMKPVKTEEAGADLLPKEMNIMTISDDKADGHNDKEGEGVTLDGTGTETGQIIVTTIGGHNGKPKQKVSYMAELVVGTGSFGIVFQAKCLETDETVAIKKVLQDKRYKNRELQTMQLHDHPNVVQLKHHFFSTTQKGEVYLNLVLEFVSETVYRVAKYYNRMNQRVPIIYVKLYAYQMCRALAYIHRVVGVCHRDIKPQNLLVNPHTHQLKICDFGSAKKLVPGEPNISYICSRYYRAPELIFGATEYTTAIDIWSVGCVVAELLIGQPLFPGESGVDQLVEIIKILGTPTREEIRCMNPNYSEFKFPQIKAHPWHKLFGKRMPPE

SEQ ID NO: 49330 - protein, 231 aa, Zea mays
  Clone ID: LIB3911-002-G5_FLI.pep
FFFLSLTLWFTRARCTATYPSGWPPVSRFLFPDHDRLWGWAGQDPEGILGAPQGGHIARLEFRRRLERDSEAREAFERQVREEKERRRSEREARVIPDTDAGLVEFFLDTDAREIEIEIGRLRPRLGQDFFGHVSREIAQIKFAVTRTAEMEDRLIELEAMQKVLLEGVEAYDKLQNDLVTAKERLMKILQSSDRKSTLLEMVERNELNISILTLLDENIASAKTSNQDEA

SEQ ID NO: 49331 - protein, 498 aa, Zea mays
  Clone ID: LIB3918-010-F1_FLI.pep
YCLFVLYFSTYYYRTNAVMAALVAILMHLLVPALLLMRVVAVVAAGAPPFSCGGGGPSLGLPFCNTKLPAAQRAADLVSRMTPAEKASQLGDVANGVPRLGVPSYKWWSEALHGVAISGKGIHMDRGAVRSATSFPQVLLTAASFNDNLWFRIGQATGNEARAFYNIGQAEGLTMWSPNVNIFRDPRWGRGQETPGEDPAVASRYAAAFVRGLQGSSSNTKSVPTVLLTSACCKHATAYDLEDWKGVTRYSFRATVTVQDLADTFNPPFRSCVVDGKASCVMCAYTSVNGVPSCANADLLTKTFRGSWGLDGYVAADCDAVSIMRNSQFYRPTAEDTVATTLKAGLDIDCGPYVQQHAMAAIQKGKLTQQDVDKAVKNLFTTRMRLGHFDGDPKAHVYGNLGAAHICTQEHKNLALEAALDGIVLLKNSAGVLPLKRGSVASAAVIGHNANDVLALLGNYWGPPCAPTTPLQGIQGYIKNVRFLAGCHKAACNVAATP

SEQ ID NO: 49332 - protein, 108 aa, Zea mays
  Clone ID: LIB4302-002-C6_FLI.pep
GTTPPSSPRSPYSGRPTRFCELPALDPAMREILHIQGGQCGNQIGSKFWEVVCDEHGIDPTGRYVGTSDLQLERVNVYYNEVSCGRFVPRAVLMDLEPGTMDSVRTGP

SEQ ID NO: 49333 - protein, 196 aa, Zea mays
  Clone ID: LIB4302-005-A4_FLI.pep
AYLRDSKLLPFPTAAAAAPPHSVDTMRECISIHIGQAGIQVGNACWELYYLEHGIQADGQMPGDKTIGGGDDAFNTFFSETGAGKHVPRAVFVDLEPTVIDEVRTGTYRQLFHPEQLISGKEDAANNFARGHYTIGKEIVDLCLDRIRKLADNCTGLQGFLVFNAVGGGTGSGLGSLLLERLSVDYGKKSKLGFTV

SEQ ID NO: 49334 - protein, 141 aa, Zea mays
  Clone ID: LIB4315-026-H2_FLI.pep
GGEGEGDGRVEVRAGDVAHGVHHHHHGQAPHGADARERHRAARPQVHRHRRAPGEDQEVGPQRLRQDLLHERHGEHGAATGSVLLRALTPRSIDSASSAFLQIQGAVVHAVGNLCSCHLCPLQRQQQQLIAPCCLEEEEEE

SEQ ID NO: 49335 - protein, 178 aa, Zea mays
  Clone ID: LIB4569-001-D9_FLI.pep
RIQKSTELDDTCIMQSSDIWKAHAGSSQSEGSGLDMERNGCNHNYCPSPLQPIASAGQHSESSAAYFSWPTSTLMHGSAEGRANYFGNLQKGVLPGHLGRLPKGQQATTLLDLMIIRAFHSKILRRVNLGTAIGFRIRKGTLTETPAILGVGASKGPQEVGHRYLMGFQLPLEGPWGR

SEQ ID NO: 49336 - protein, 441 aa, Zea mays
  Clone ID: LIB4573-011-E11_FLI.pep
SSPFEIVCISLYSRLSSNQLCSTRSTSSIEWGANNWYQRPLIFASMEPNLQSAMEEQLKILREISDRLAAQEARWRSRESTVVQHSRSIHDLEVAMASAPSATLRAELDAPVAVTYERLDATEAASAARVSALESTTATFDMLFDNSDVVEKFDAEVVADDWGGLFGQHAHPLDSGGARLLLPSAALPFASATDTTFSSIYGIECGTIHTYTAALARPAALHDPLVVAHAKCSTPGHNRVCAETQRQGPRQARRQCRLRVHVRRLHFTGLQLHVRQHGRRRQHVVHVQRVLPGAEPDGRGLRLPWPRVAHGDRPFRAHLQLHHIDPDGGGGGGHGITPPERWLSRAGAYNAATPNEADVLHWALKGVLWPRVTYCIAGWIDLGDGVAEGADHAVRVRFRVDDGCVVEGGTVCAESGSWTEIKGVFRLKRNARVMEVYVQGA

SEQ ID NO: 49337 - protein, 130 aa, Zea mays
  Clone ID: LIB4728-006-E6_FLI.pep
LARSPCNSSAAHCHCQQIELLRLTNPLALLLHLQVCNRAHRDVDDGEPCVPRPEARPRQALLPRYVRGTLALPSNQTNKLACLLRRQYSSTLTKLTDRCLSVCRMHGLQRRPSPEPRRQRWRLSPPRSPP

SEQ ID NO: 49338 - protein, 193 aa, Zea mays
  Clone ID: LIB4729-040-A9_FLI.pep
TDTRHKSPAHSTPHRHTRARPLLPHRGPSPALMATDVAETPAPLVDAAPEAPADTPAAPAVDAKPAKAKKATAPKKRASPTHPPYAEMVSEAIASLKERTGSSSFAIAKFLEDKHKDKLPPNFRKLLNVQLKKLVAGGKLTKVKNSYKLSSATKPKAAPKKTKTGVKKPKAAAKPKAKSPAKPKPATKPKAAL

SEQ ID NO: 49339 - protein, 150 aa, Zea mays
  Clone ID: LIB4729-041-C6_FLI.pep
GPPTSAPKVTAGFTCPPETLTATATATARPSACASATATSPPAVLIVLWSWYIFPSERTDPSAAKTKMAVAMNSEMAARMVSGCVASSLRPTVNRRPGRTPVAVLMSSARNQAKPPASGLFLLACSSGVRTSSFVSNRRAGSQSPAGLEG

SEQ ID NO: 49340 - protein, 479 aa, Zea mays
  Clone ID: LIB4729-053-F9_FLI.pep
PGLQILLPFENLFFSPLLAAAPTISADGRLSPSQLPLTTPPQARKPRRQRHVPRHHPVARPSVQGREAQPHVVTHGRHRAAPLLLLQGGLVRGGVAPGVRAPRARRPEGAGGHPPGPHLHLGRPAESPLPSSRRGGRRRRRRRRARRRGAPQVPPRAGLPRARRARDAAPLRRVARRVRRGRGGGRGAGLQGPGGRGGVHARVGPGRAPRVLQRVRRVQGQGHVRARLRRRRPPGALPPLARPGDGARRARAHAQAPRRQRHHTGDRPEGHAEAGAQSRQQPDPLPLPGQLPGDGGAQGVHQRAVVLLRALLHGLALPDGAHQEQVRHRSRGQRRRDTVQVHPAGAGAGAVRRAEPRRRARERTAEACVRVHHQGWREGVPGDRRYRGRRNDNVGPRRRGLGPGVRRRVRAGGRRQLHPLRGEGEDGPGHNRRRRRRAAAQRLHGSGSRQDGAVHRQLRFPEAEGRRLPLLRAQAVSVA

SEQ ID NO: 49341 - protein, 127 aa, Zea mays
  Clone ID: LIB4730-006-D1_FLI.pep
RAAVDELASVHALGGDEELLLVLVPEGVAEGDLGERGAAAGVVDHVGDYALEVPVALAEVEGAEPGGALAVVGVGLEHGSRTLTLRADHATHLARRRGGSGGGGGGGAAGRGCGSERGAASPGRPRG

SEQ ID NO: 49342 - protein, 269 aa, Zea mays
  Clone ID: LIB4730-061-D3_FLI.pep
IASRKTMSSEASSVVVADENGAAETVGVGRYVEMEKDQDSSAAKSRLSGLLWHGGSAYDAWFSCASNQVAQVLLTLPYSFSQLGMLSGILFQLLYGLMGSWTAYLISVLYVEYRARKEREKADFRNHVIQWFEVLDGLLGRHWRNVGLAFNCTFLLFGSVIQLIACASNIYYINDKLDKRTWTYIFGACCATTVFIPSFHNYRIWSFLGLVMTTYTAWYLAVASLIHGQVDGVKHSGPTKMVLYFTGATNILYTFGGHAVTVEIMHAMW

SEQ ID NO: 49343 - protein, 122 aa, Zea mays
  Clone ID: LIB4730-076-F5_FLI.pep
YPRGRPGTTWARPDSYRLAAHSNKLAICAPTTTTAGRRGPTDRPKMRMSCNGCRVLRKGCSDACTIRPCLQWIDSPEAQANATVFLAKFYGRAGLLNLLAAAPDDAARPAVFRSLLFEACGP

SEQ ID NO: 49344 - protein, 183 aa, Zea mays
  Clone ID: LIB4730-079-H4_FLI.pep
YPRGRPGKPNLPPHLPFPPPNHHGLLRRREWERRRRRRRRRRPGAGGALAGDRREAPRGERPRRLQALRGAGVGGGPAPPWRRRDPRRRRRPPRLPVHGPLGPPGPARHPPAAAWGQPRPGLRLPRIPPPRATPRAPQPAPWRRDGAPPRQRRLRLPLRSVSPPPSARQSRHWYPFLLPLCGP

SEQ ID NO: 49345 - protein, 151 aa, Zea mays
  Clone ID: LIB4732-017-A11_FLI.pep
ATYQQSPLPSQYRVLRTSSRTQVSRDETVDMARTQSAVAVAVVAAVLLLAAAATTSEAAITCGQVSSAIAPCLSYARGTGSGPSASCCSGVRNLKSAASTAADRRAACNCLKNAARGVSGLNAGNAASIPSKCGVSIPYTISTSTDCSRVN

SEQ ID NO: 49346 - protein, 175 aa, Zea mays
  Clone ID: LIB4732-036-C9_FLI.pep
EGRALRRHQHRQVVPVHQAHVVEVHAPAAVHGELGQRGRRGGPAAAAVLPARAAVAGHAGEPARGRVGGAERAAPQPARPPRRHAQSARLPRRQREACGVHPADPALERIPGHTVCSQLLAMVNDLDAAPIIEAAKKLTRARCALAMILRAGERERSPLPLVRQDGWKRDFCCPR

SEQ ID NO: 49347 - protein, 121 aa, Zea mays
  Clone ID: LIB4732-061-C7_FLI.pep
EAGREIDLHHLHRRGADNHLATMSTGTDAVPVAVAPAKRPPINKYAFACALLASMNSVLLGYDISVMSGAQLFMKEDLKITDTQIEILAGVINIYSLFGSLAAGLTSDWLGRRYTMVLAAL

SEQ ID NO: 49348 - protein, 239 aa, Zea mays
  Clone ID: LIB4743-056-H8_FLI.pep
RVVPPFSPCAQSGGPRWRVPLGRRDGTTANITAANNLPSPFDNLTTLQQKFGAVGLDDTDLVALSGKKKRGGEKTGDACLVILAPAQHDTWRHNDGGCIAGAHTFGRVQCQFVTARLYNFCGTNRPDPTLDRGYRAFLSLRCPRAGNASALNDLDPTTPDTFDNNYYTNIEARRGTLQSDQELLSTPGAPTAPIVGRFAASQKEFFRSFARSMVNMGNIQVLTGSQGEIRKNCRMVNGS

SEQ ID NO: 49349 - protein, 212 aa, Zea mays
  Clone ID: LIB4746-018-E6_FLI.pep
PGAQLVRPSRTGFELAPPDPDRHHATAPAITRRAHHDHGCAPSPPRRCHRALLRRIHHGTSRRRGPRGPALRYQRQLHAQQHLPGQHPPPRRHAAEEHLHLGDALRHGHLRRRPGHRLRARALPRRHQRLRLQRLRRRRVPGRAAAVRLQQGRHHVLRPLPPPLLQPELPRRPQQRWPRDRANPHEHAERHRAVQGVRRRRRRAPQRHRRLR

SEQ ID NO: 49350 - protein, 220 aa, Zea mays
  Clone ID: LIB4746-035-D3_FLI.pep
DRYQSMAGTSSWSSSSSCASSFGSPDHDVVCVTEPDSVGAAGAVADAEGSVKFLCSYGGRILPRRTDGTLRYVGGDNRVLSVDRPIRFYVLQRKLRELCGGWEAHLRCQLPTEDLDALISVTCDDDLAKLLEEYDEASKDRLQSLKIRAFLFPTRTPAPSILQRRSPPSIAHLHWQNTSPPAAAGVSLTCAPRWWAAPQASRQAQAPQAQNYDRHSLGEE

SEQ ID NO: 49351 - protein, 229 aa, Zea mays
  Clone ID: LIB4746-045-F2_FLI.pep
RDFASHGRLSAPPDPDRHHATAPAITRRAHHDHGCAPSPPRRCHRALLRRIHHGTSRRRGPRGPALRYQRQLHAQQHLPGQHPPPRRHAAEEHLHLRDALRHGHLRRRPGHRLRARALPRRHQRLRLQRLRRRRVPGRAAAVRLQQGRHHVLRPLPPPLLQPELPRRPQQRWPRDRAHPQEHAERHRAVQGVRRLRRRAPPHEHAERHRAVQGVRRRRRRAPQRHRRLR

SEQ ID NO: 49352 - protein, 262 aa, Zea mays
  Clone ID: LIB4746-060-A6_FLI.pep
SYLSPIMASTIGNNDRLTQLKAFDDTKAGVKGLVDEGVTIVPPIFHHLPDPHDATSNAHAAIPVIDLAAFSATNNDEAHAHQQLVAQVKAAAETVGFFQVVNHGVPAELLPRMLASVKSFNEEPADERRPYYTRDQARRVRYESNFDLFHSPAANWRDTVFFEDSAAPEEMPPAFRDVVPEYARQARGLAAQLLALLSEALGLHAGYLQRDAGCLGGPSLACHYYPPCPEPWLTLGTTRHSDPSFLTVLLQDAVGGLQVLLG

SEQ ID NO: 49353 - protein, 407 aa, Zea mays
  Clone ID: LIB4746-071-D5_FLI.pep
PGQRPFPATEKRTLLSTTKKNIGILCSRAQSEAVNDGFRSAAGGHRAREERQRQVRLRLRHPRLNDLHPSRLWCEHTHTHFTLYCFLHGHRLMRYVRPDFADIGVMSGASLYIKKDLKISDVKLEILMGILNVYSLIGSFAAGRTSDWIGRRYTIVFAAVIFFAGAFLMGFAVNYWMLMFGRFVAGIGVGYALMIAPVYTAEVSPASARGFLTSFPEVFINFGILLGYVSNYAFSRLPLRLGWRVMLGIGAAPSVVLALMVLGMPESPRWLVMKGRLADAKVVLGKTSDTPEEAVERLADIKAAAGIPQELDGDVVAVPKKRDSEEARVWKELILSPTPAMRRILLSGIGIHFFQQASGIDAVVLYSPRVFKAAGITSDNQLLGTTCAVGVTKTLFILVATFLLDRV

SEQ ID NO: 49354 - protein, 101 aa, Zea mays
  Clone ID: UC-ZMFLMO17068C10_FLI.pep
RGIPIRSRPCCYIKRTCSDRRTTEMSGSCTEEQRGELQELEFLNISKLFNSLESSNAVLRFSHVNMNGELASPGASSLPSVVCFFPSLVLYERSVDILSGA

SEQ ID NO: 49355 - protein, 203 aa, Zea mays
  Clone ID: LIB4746-074-H6_FLI.pep
RSTTRRMLLLSSLMRPTLRERSPGTLDSWLWLISLIRRRFWSSSVCTCTKLVWNACSTLVSTPGAPAPPNPDSVVSPPSIPYRSPPLSCCCWWSSSSSCARSILHSCGLVRAQSLVVVVVVRRRRRSSSTSGEVSTEQGPCLLSMLQMRRSEEEREAARERARRGWVEEVDDDGEGAGEGGGGDQEILRHTKQAQAGWTVFFF

SEQ ID NO: 49356 - protein, 118 aa, Zea mays
  Clone ID: UC-ZMFLB73325C08_FLI.pep
MFRAKTSYSIVEAAHMELAEPTIKDAFGKCVQQGASRVIVSPYFLSPGRHWKQDIPALAAEASKEHSNIPYIVTAPLGLHELMVDIMNDRIKYCLRHVAGDVDECTVCAGTGKCRLYS

SEQ ID NO: 49357 - protein, 254 aa, Glycine max
  Clone ID: LIB3028-022-H9_FLI.pep
AWRWFYNVVGDSRCPISDTWWQTETGGFMITPLPGAWPQKPGSATLPFFGVQPVIVDEKGVEIEGECNGYLCVKKSWPGAFRTLYGDHERYETTYFKPFSGYYFSGDGCSRDKDGYHWLTGRVDDVINVSGHRIGTAEVESALVSHPQCAEAAVVGVEHEVKGQGIYAFVTVVDGVPYSEELRKDLVLTVRKQIGAFAAPDKIHWAPGLPKTRSGKIMRRILRKIASRQLDELGDTSTLSDPNVVNQLIELADS

SEQ ID NO: 49358 - protein, 376 aa, Glycine max
  Clone ID: LIB3051-019-E12_FLI.pep
LSERKDGIFVVRSDATRVSSQVLKAGARKHELLVTNAVATKEGRPAASTSKSGHELLLFEALREGLEEEMERDPCVCVMGEDVGHYGGSYKVTKGLATKFGDLRVLDTPIAENSFTGMGIGAAMTGLRPVVEGMNMGFLLLAFNQISNNCGMLHYTSGGQFKIPIVIRGPGGVGRQLGAEHSQRLESYFQSIPGIQMVACSTPYNAKGLMKAAIRSENPVILFEHVLLYNLKERIPDEEYVLSLEEAEMVRPGEHVTILTYSRMRYHVMQAAKTLVNKGYDPEVIDIRSLKPFDLHTIGNSVKKTHRVLIVEECMRTGGIGASLTAAITENFHDYLDAPIVCLSSQDVPTPYAGTLEEWTVVQPAQIVTAVEQLCK

SEQ ID NO: 49359 - protein, 233 aa, Glycine max
  Clone ID: 700657173_FLI.pep
STLGTLYSHSLQKKMEAHPYVPRDLHLPGYAPCFLSMSNILSVFASSSLLIVTLVWIFSGRFKKTKVDRVLMCWWAFTGLTHIILEGYFVFSPEFFKDKTGFYLAEVWKEYSKGDSRYAGRDAGVVTVEGITAVLEGPASLLAVYAIATGKSYSYILQFAISLGQLYGTAVYYITAILEGDNFSTNSFYYYAYYIGANASWIVIPLIIAIRCWRKICAAFRVQGGQTKKPKVR

SEQ ID NO: 49360 - protein, 84 aa, Zea mays
  Clone ID: 700573143_FLI.pep
EFRTPDEADDIDSNLHASSDLDAGAFPSGTPSVVPCPGASCRAEADDALCQLSGVPNVAVPCRLQRSTPRRTVKRALLLHNCFD

SEQ ID NO: 49361 - protein, 151 aa, Glycine max
  Clone ID: 700848307_FLI.pep
GGPLQASTYLYTTRVQLYAYSSTKKRKVTPPYFAWHCLVLHSLFMFPKHTYLISKYSSIPYLEPSLPRPDCLKPPNGATSVEITPSLTPTSPYSRASATRHDRWILFVNTYEPKPALVSLAILIASSSVLNLKRGATGPNASSLDMCISLL

SEQ ID NO: 49362 - protein, 383 aa, Glycine max
  Clone ID: 700847178_FLI.pep
DKFINIQGDYKAIVHNPNPLIPPIFASDDNTCCLEWNTAMEKLTGWSRADVIGKMLVGEVFGSCCQLKGSDSITKFMIVLHNALGGHDTDRFPFSFLDRYGKHVQAFLTANKRVNMDGQIIGAFCFLQIVSPELQQALKAQRQQEKNSFARMKELAYICQGVKNPLSGIRFTNSLLEATCLSNEQKQFLETSAACEKQMLKIIHDVDIESIEDGSLELEKGEFLLGNVINAVVSQVMLLLRERNLQLIRDIPEEIKTLAVYGDQLRIQQVLSDFLLNIVRYAPSPDGWVEIHVHPRIKQISDGLTLLHAEFRMVCPGEGLPPELIQNMFNNSGWGTQEGLGLSMSRKILKLMNGEVQYIREAQRCYFYVLLELPVTRRSSKKC

SEQ ID NO: 49363 - protein, 411 aa, Glycine max
  Clone ID: 700849245_FLI.pep
QGRCKMASVGVAPTSSGLRESSGVDRLPEEMNDMRIRDDKEMEATVVDGNGTETGHIIVTTIGGRNGQPKQTISYMAERIVGHGSFGVVFQAKCLETGETVAIKKVLQDKRYKNRELQTMRLLDHPNVVCLKHCFFSTTEKDELYLNLVLEYVPETVNRVIKHYNKLNQRMPLIYVKLYTYQIFRALSYIHRCIGVCHRDIKPQNLLVNPHTHQVKICDFGSAKVLVKGEPNISYICSRYYRAPELIFGATEYTTAIDVWSVGCVLAELMLGQPLFPGESGVDQLVEIIKVLGTPTREEIKCMNPNYTEFKFPQIKAHPWHKIFHKRMPPEAVDLVSRLLQYSPNLRCTALDALTHPFFDELRDPNTRLPNGRFLPPLFNFKSHELKGVPVEILLKLIPEHARKQCPFLGL

SEQ ID NO: 49364 - protein, 408 aa, Glycine max
  Clone ID: 700849806_FLI.pep
TRIFGTNFSMGEAPALLVDDVQDGALNGLELKNGTCKTTATVGDKMYVIGGADDGTLSIEVQIFDGSLGEWVRPTVRGTKPVLCNGLSAVPLEDRILILKKGSKPDDRIWFLEIDTQYVRQQQKILGTEVVAWSKGVIGNAEKPVVISGPSGVGKGTLISMLMKEFPSMFGFSVSHTTRAPRGIEKDGVHYHFTEKSIMEKEIKEGKFLEFASVHGNLYGTSVEAVELVADAGKRCILDIDVQGARSVRASTLEAIFIFICPPSMEELEKRLRDRGTETEEQILKRLRNADAEIEQGKSSQIFDFILYNDNLEECHERLKKLLGLDGFVTAPPISGPIEIDLPMDHSVSKIDNKIIINCISSGEKESKNLVILDVSSLKGGAPGRTRGLNFQAIGSFSNGLNGIDQLS

SEQ ID NO: 49365 - protein, 426 aa, Glycine max
  Clone ID: 700851377_FLI.pep
ASILHYFLALSLSCSFLFFLSDSVTPTKPINLVVLPVQNDGSTGLHWANLQKRTPLMQVPVLVDLNGNHLWVNCEQQYSSKTYQAPFCHSTQCSRANTHQCLSCPAASRPGCHKNTCGLMSTNPITQQTGLGELGEDVLAIHATQGSTQQLGPLVTVPQFLFSCAPSFLVQKGLPRNTQGVAGLGHAPISLPNQLASHFGLQRQFTTCLSRYPTSKGAIIFGDAPNNMRQFQNQDIFHDLAFTPLTITLQGEYNVRVNSIRINQHSVFPLNKISSTIVGSTSGGTMISTSTPHMVLQQSVYQAFTQVFAQQLPKQAQVKSVAPFGLCFNSNKINAYPSVDLVMDKPNGPVWRISGEDLMVQAQPGVTCLGVMNGGMQPRAEITLGARQLEENLVVFDLARSRVGFSTSSLHSHGVKCADLFNFANA

SEQ ID NO: 49366 - protein, 666 aa, Glycine max
  Clone ID: 700854796_FLI.pep
LRFLSPLRYCFDATTLEREYTLLTNPIVMSCPGSGGIGYGPLAVGPRWLAYSGSPVAISNSGHVCPQQLTPSGSFPGFSSNGSLIAHYAKESSKHLASGIVTLGDMGYKKLSRYCSDSNGSLQSVNSVSKGNGTINGHSTDADNIGMVIVKDIVSKNVIAQFWAHKSPISALCFDPSGTILVTASIQGHNINVFKIMPASENLPASVTGPSYVHLYRLQRGFTNAVIQDISFSDDSKWIMISSSRGTSHLFAINPQGGHVNIQSFDDSFMAKNSGLGTTTNHAVRRSHSSAMQMPKQQSLFVTGPPITLSVVSRIRNGANGWRGTVSGAAAAATGRKNALSGAIASSFRNYRGNEGNFPKAKYQLLVFSPSGSMVQYALRTITGQDSAVVSGLSPAYESIPQADTRLVVEAIHKWNICQSHSRREREDNVDIYGENGISDVNKIYPEEVGEEKNTSPKIKNGVMKVNLCLEEEHLLYISEAELQMHEAQTSLWAKPEIYFHSMLQESTIMDEEAAASGGEFEIESMPTCMIEARSKDLVPIFDHIQTPKVPQTRTPAMDSKTNEQLLHRSSRLAGNGRISPRTILESPESVTKAGDAVSEFRSGIEGTEWDNHLVASETLNFVNNNDTFRPNTQHEIVNNRMEHLNTGAHLMYVNSDRKPENEESF

SEQ ID NO: 49367 - protein, 148 aa, Glycine max
  Clone ID: LIB3055-007-C3_FLI.pep
STPLSLSKTPNQKMAQKAEKNDTDFKVPETIITPCTTTTATSITEPSRFFDATTPATSSRSPKRSLPLDDESQTDQTASSEPKRVVSRCSCCRRRVGLTGFRCRCGDLFCAEHRYSDRHDCSYDYKAAGREAIARENPVVKAAKIVKV

SEQ ID NO: 49368 - protein, 503 aa, Glycine max
  Clone ID: LIB3028-009-G6_FLI.pep
ELQSQNNPFSIHLITFFLFLLFLLFKLVKKSSSNNTSKLPPGPKTLPLIGNLHQLVGSKSHHCFKKLADKYGPLMHLKLGEVSNIIVTSKELAQEIMRTQDLNFADRPNLVSTKIVSYNATSISFAPHGDYWRQLRKLCTVELLTSKRVQSFRSIREDEVSELVQKIRAGASEEGSVFNLSQHIYPMTYAIAARASFGKKSKYQEMFISLIKEQLSLIGGFSLADLYPSIGLLQIMAKAKVEKVHREVDRVLQDIIDQHKNRKSTDREAVEDLVDVLLKFRSENELQYPLTDDNLKAVIQDMFIGGGETSSSTVEWSMSEMVRNPWAMEKAQAEVRKVFDSKGYVNEAELHQLTYLKCIIREAMRLHPPVPLLIPRVNRERCKINGYEIPAKTRVFINAWAIGRDPKYWTEAESFKPERFLNSSIDFKGTNYEFIPFGAGRRICPGISFATPNIELPLAHLLYHFDWKLPNNMKNEELDMTESYGATARRAKDLCLIPITVRP

SEQ ID NO: 49369 - protein, 212 aa, Glycine max
  Clone ID: LIB3039-053-E10_FLI.pep
GLREGASLVEVVKQVKPDVLLGLSAVGGLFSKEVLEALKGSTSTRPAIFAMSNPTKNAECTAEEAFSILGDNIIFASGSPFSNVDLGNGHIGHCNQGNNMYLFPGIGLGTLLSGARIVSDGMLQAAAERLATYMSEEEVLKGIIFPSTSRIRDITKQVATAVIKEAVEEDLAEGYHGMDARELQKLSEDEIAEYVQNNMWSPEYPTLVYKKE

SEQ ID NO: 49370 - protein, 229 aa, Glycine max
  Clone ID: 701214254_FLI.pep
VRRLIFTSSAGTLNVIERQKPVFDDTCWSDVEFCRRVKMTGWMYFVSKTLAEKEAWKFAKEQGLDFITIIPPLVVGPFLMPTMPPSLITALSPITGNEDHYSIIKQGQFVHLDDLCLAHIFLFEEPEVEGRYICSACDATIHDIAKLINQKYPEYKVPTKFKNIPDQLELVRFSSKKITDLGFKFKYSLEDMYTGAIDTCRDKGLLPKPAEKGLFTKPAETPVNAIMHK

SEQ ID NO: 49371 - protein, 195 aa, Glycine max
  Clone ID: LIB3052-017-G2_FLI.pep
RDPIYSNKLGKLFEITPEKNPQLRDLDVFLSVVDMNEGALFLPHFNSKAIVVLVINEGEANIELVGIKEQQQRQQQEEQPLEVRKYRAELSEQDIFVIPAGYPVVVNATSDLNFFAFGINAENNQRNFLAGSKDNVISQIPSQVQELAFPGSAKDIENLIKSQSESYFVDAQPQQKEEGNKGRKGPLSSILRAFY

SEQ ID NO: 49372 - protein, 228 aa, Glycine max
  Clone ID: 701215245_FLI.pep
VISALGAEQIDDQVKIIAAIKEAGNIKRLLPSEFGHDVDHHNAVEPVSSFFEKKVKIRRAIEAEGIPYTYISSNSFAGHFLPNLLQQNVTAPPRDEVVILGDGNIKGVYVIEEDVATYTIKAVDDPRTLNKTLYLRPHANVLTFNELVSLWENKIKSTLDKIYVPEDQLLKSIQESSFPANFMLALGHSMLVKGDCNYEIDPSFGVEASKLYPEVKYTTVDNYLNAFV

SEQ ID NO: 49373 - protein, 301 aa, Glycine max
  Clone ID: LIB3029-008-B12_FLI.pep
RMITLAIPVNKPGRFESFFLSSTQAQQSYLQGFSKNILEASYDTKFEEINKVLFGREEGQQQGEERLQESVIVEISKKQIRELSKHAKSSSRKTISSEDKPFNLRSRDPIYSNKLGKLFEITPEKNPQLRDLDVFLSVVDMNEGALFLPHFNSKAIVVLVINEGEANIELVGIKEQQQRQQQEEQPLEVRKYRAELSEQDIFVIPAGYPVVVNATSDLNFFAFGINAENNQRNFLAGSKDNVISQIPSQVQELAFPGSAKDIENLIKSQSESYFVDAQPQQKEEGNKGRKGPLSSILRAFY

SEQ ID NO: 49374 - protein, 301 aa, Glycine max
  Clone ID: LIB3027-010-B11_FLI.pep
QMICCCNKMDATTPKYSKARYDEIVKEVSSYLKKVGYNPDKIPFVPISGFEGDNMIERSTNLDWYKGPTLLEALDQINEPKRPSDKPLRLPLQDVYKIGGIGTVPVGRVETGVVKPGMVVTFGPTGLTTEVKSVEMHHEALTEALPGDNVGFNVKNVAVKDLKRGFVASNSKDDPAKEAANFTSQVIIMNHPGQIGNGYAPVLDCHTSHIAVKFSEILTKIDRRSGKELEKEPKFLKNGDAGMVKMIPTKPMVVETFSEYPPLGRFAVRDMRQTVAVGVIKSVEKKDPTGAKVTKAAAKKK

SEQ ID NO: 49375 - protein, 542 aa, Glycine max
  Clone ID: 700836872_FLI.pep
GLDAEDIALLFEAIKPALQDAEGVMQKKAYKVLSIILRSSSNDFVSSKFEELRQTMVEVLPCHFSAKRHRLDCLYFLIVHVSKSKADMEHWRDIFLTEIILALKEANKKTRNRAYDILVEIARAFVDEERGGNRESLNNFFQMVAGHFTGETPHLISAAAKGLARLAYEFSDLVLTAFKLLPGTLTLLRSDNKEIIKANLGFLKVLVAKSQAEGLQMHLKSMVEGLLKWQDNSRNHFKAKVKLLLGMLVTKCGLEAVKAVMPEEHMKLLSNIRKIKERKERNRSAKSEETRSHFSKATTSRQSLWNHTKIFSDFDGDSGNSNAEYMISRGSKAFLHPKSAASSFRSNIRLKKNLPEHLSDQSDDEPLDLLDRKKTRSALKTSEHLKRKSRLDDEVEVDSEGRLIIHEEGEWKKEKHADDDFDSRSERDSHISAKSGTTGQKRRKTSDSGWAYTGKEYASKKAGGDVKRKDKLEPYAYWPLDRKMMSRRPQQRAAARKGMASVVKMTKKLEGKSASGVLSINSLKPRRTHKKGSKENKKAARA

SEQ ID NO: 49376 - protein, 254 aa, Glycine max
  Clone ID: LIB3056-002-E4_FLI.pep
EFLAQVSMVSRLKHENFVQLLGYCIDGTSRILAYQFASNGSLHDILHGRKGVKGAQPGPVLTWAQRVKIAVGAARGLEYLHEKADPHIIHRDIKSSNVLIFDDDVAKIADFDLSNQAPDMAARLHSTRVLGTFGYHAPEYAMTGQLNAKSDVYSFGVVLLELLTGRKPVDHTLPRGQQSLVTWATPKLSEDKVRQCVDTRLGGEYPPKAVAKMAAVAALCVQYEADFRPNMSIVVKALQPLLTARPGPAGETPN

SEQ ID NO: 49377 - protein, 131 aa, Glycine max
  Clone ID: LIB3087-002-B5_FLI.pep
QKLVELLAMARIKVYELRQKTKADLLNQLKDLKAELALLRVAKVTGGAPNKLSKIKVVRLNIAQVLTVISQKQKAALRDAYKNKKYLPLDLRPKKTRAIRRRLTKHQASLKTEREKKKELYFPLRKYAIKV

SEQ ID NO: 49378 - protein, 181 aa, Glycine max
  Clone ID: LIB3029-011-F8_FLI.pep
ILVKSLEKAREKKIPTMATISDQPRGSYSYGTSYGAPYGTTYETNTSINNPPSRQTVKFITAATIGITLLLLSGLTLTGTVIGLIIATPLLVIFSPILVPAAFVLFLVASGFLFSGGCGVAAIAALSWIYNYVSGNQPAGYDTLDYAKGYLADKARDVKERAKDYGSYAQGRINEATQGAY

SEQ ID NO: 49379 - protein, 239 aa, Zea mays
  Clone ID: UC-ZMFLMO17255H10_FLI.pep
ARGSAHYRTFWVTDSHYLTATGPAIAIFTNPTKQGYDDGLGEKIIGTFGNCAGGTTPWGTVLSAEENFQSQVPEAVYADGSAVDPAQCPLKISTNGLSGQGNVFGLAGNKYGWMVEIDPANANDYGVKHTALGRFRHEAVAVRATANQPLAVYSGCDRTSGHLYKFVSADTVKSPTDKGNSRLFTAGTLYGAKFNADGTGEWIALTPDTVVNPVRPSDIAVDSSTTGIVYLPHPDRNQA

SEQ ID NO: 49380 - protein, 156 aa, Zea mays
  Clone ID: UC-ZMFLMO17256C06_FLI.pep
DSLLGQDWETATDTEDSFDEDRLTPGAEFKQRAVAIYELYQNQYQRRFKWIRPDLFTPELADNLEQDAKSLINILKISGRWNADEDGKLQSLIRLLTEEHPDEKILIFTQFADTARYLAQALETAGITNIGLATGNSQIDPTILAQRFSPRSNGKA

SEQ ID NO: 49381 - protein, 367 aa, Glycine max
  Clone ID: 700835781_FLI.pep
SGTVTVYKQSSSYPITAPSPLSGLPEFSHLGWGHWFTLRDLELATNRFSKENVLGEGGYGVVYRGQLINGTPVAVKKILNNTGQAEKEFRVEVEAIGHVRHKNLVRLLGYCIEGTHRMLVYEYVNNGNLEQWLHGAMRHHGYLTWEARIKILLGTAKALAYLHEAIEPKVVHRDVKSSNILIDDDFNAKVSDFGLAKLLGAGKSYVTTRVMGTFGYVAPEYANTGLLNEKSDVYSFGVLLLEGITGRDPVDYGRPANEVNLVDWLKMMVGNRRSEEVVDPNIEVKPSTRALKRALLTALRCVDPDSEKRPKMGQVVRMLESEEYPLPREDRRHRRRNREGSGEIESQKEYSDTDRSEIQDSREERRG

SEQ ID NO: 49382 - protein, 159 aa, Glycine max
  Clone ID: 700790546_FLI.pep
ESEVGACLRVNFYPKCPQPDLTFGLSPHSDPGGMTILLPDDFVSGLQVRRGDEWITVKPVPNAFIINIGDQIQVLSNAIYKSVEHRVIVNSNKDRVSLALFYNPRSDLLIQPAKELVTEEKPALYSPMTYDEYRLYIRLNGPCGRPKLNHWPPKHELIV

SEQ ID NO: 49383 - protein, 383 aa, Glycine max
  Clone ID: 700794988_FLI.pep
PLHFCLFSLNMVVTNTNQLGETIDSTYDRKAEKKAFDDSKAGVRGLVESGVTKIPRMFHAGKLDVIETSPSHTKLSIPIIDLKDIHSNPALHTQVMGKIRSACHEWGFFQVINHGIPISVLDEMIGGIRRFHEQDAEVRKEFYTRDLKKKVLYYSNISLYSDQPVNWRDTFGFGVAPDPAKPEEIPSVCRDIVIEYSKKIRDLGFTMFELLSEALGLNPSYLKELNCAEGLFILGHYYPACPEPELTMGTTKHTDSNFMTLLLQDQLGGLQVLHQNQWVNVPPVHGALVVNIGDLLQLITNDKFVSVYHRVLSQNTGPRISVASFFVNSHDPVEGTSKMYGPIKELLSEENPPIYRDTTLKEFLAYYYAKGLDGNSSLDPFRV

SEQ ID NO: 49384 - protein, 213 aa, Glycine max
  Clone ID: 700795154_FLI.pep
RKMVRVLRSCIQSILKLVNSVIGMAGLAMILYSAWMIRVWQRKMGELPFGHDSDYPPPWFIYMFLGLGVAFCVITCLGHVAAETANGCCLYLYMVFVVLLIMLEAAVTVDVFVNQDWEKDFPKDPSGSFDQFKNFIRSNYEMCKWVGLSLVSVQGLSLLLAMILKALGPHQYYDSDDEYAPDRVPLLRNAPPHYVVVDPGYVHGNDAWRRQDK

SEQ ID NO: 49385 - protein, 355 aa, Glycine max
  Clone ID: 700847912_FLI.pep
ANKVLMENETWEMTLYQKLDFSIDDIVMNLTSANVIGTGSSGVVYKVTIPNGETLAVKKMWLAEESGAFNSEIQTLGSIRHKNIIRLLGWGSNKSLKLLFYDYLPNGSLSSLLHGSGKGKAEWETRYDAILGVAHALAYLHHDCLPAIIHGDVKAMNVLLGPGHQPYLADFGLARTATENGCNTDSKPLQRHYLAGSYGYMAPEHASLQPITEKSDVYSFGMVLLEVLTGRHPLDPTLPGGAHLVQWVRNHLSSKGDPSDILDTKLRGRADPTMHEMLQTLAVSFLCVSTRADERPTMKDVVAMLKEIRPLETSRADPDVLKGGLTAHSSPPPPKNVVSHGSSTCSYNFSDNSIN

SEQ ID NO: 49386 - protein, 51 aa, Zea mays
  Clone ID: LIB3070-010-E7_FLI.pep
CSSFLNRRNLSLEHAGPPLLTKWVADGIHVWFICFKQDRTFFPSVGQYQEL

SEQ ID NO: 49387 - protein, 399 aa, Zea mays
  Clone ID: LIB3078-047-F4_FLI.pep
PTLRPRGPPTAAAAAAMHGRRHLAASLTRALIQAPSRSISSTPSLLQTLDPSVPSPPAAGAGRLAELRRRLQADAPSLGDFTYSVEVGTRQRPLPKPKWMKETVPGGAKYAAIKAKLRELKLHTVCEEARCPNLGECWSGGETGTATATIMILGDTCTRGCRFCNVKTSRTPPPPDPDEPSNVAQAIASWGLEYIVITSVDRDDLPDQGSGHFAETVQKLKALKPEMLIEALVPDFRGDPSCVEKVATSGLHVFAHNIETVEELQRNVRDYRANFKQSIDVLEMAKEYAPPGTLTKTSIMLGCGETPDQVIRTMEKVRAADVDVITFGQYMRPSKRHMPVSEYVTPEAFEKYRALGVEMGFRYVASGPMVRSSYKAGEFYIKAMIEAERAKGTAADSSA

SEQ ID NO: 49388 - protein, 123 aa, Zea mays
  Clone ID: LIB3078-049-D9_FLI.pep
EPVPKPAPSAAAEEVAERFRSLVDPDDVASIRQTQHLIMGRLQDSNAVLTHFNEYSERCFVEVSGDFASKTRLLKSMKADLDHIFTKLREMKARLAATYPDAFPNGAMSKTMDQRPDLESPLD

SEQ ID NO: 49389 - protein, 301 aa, Zea mays
  Clone ID: LIB3076-055-A5_FLI.pep
SGSEAPVMLCLSLVAPPPMAPAGRRRRRRHPTSVTRRGQTLAALPCHCGRRHVIGASSAAALLPFLAPPSLAAPPVDPDVVLQRVHPSRPDWYEEFYASAMDQGMKSYEAEIAGYKVKLFSHLSPAGKNILELGVGTGPNFKYYASEDGVNVIGVDPNKHMEKYARAAVVSAGLASSSFTFRRGVAEALPAEDNSMDVVVGTLVLCSVNNIDMALREIKRVLKPGGLYVFIEHVAAPDGTLLRLVQGALDPLQQLVADGCHLTRRTGQSIRDAGFSSLSLDGVRLSNAYIISPHVYGVACK

SEQ ID NO: 49390 - protein, 128 aa, Zea mays
  Clone ID: LIB3070-006-G2_FLI.pep
HELNDARNELASMDDNRRKISESMSLADNEVVDVREMIKSFDKEIKVSTKGINDTKAQKEGVEKRRTEALKVVAKIELDLRDIKDRIVNEKRAKDEAARDLQSVRRESEKSEACQIPGRGRVLRFVSS

SEQ ID NO: 49391 - protein, 517 aa, Zea mays
  Clone ID: LIB3078-016-B5_FLI.pep
RGGPGLVPSSLLPFDVSVVLRGPYWIRIIYRKKFSVDMRCFAGDQVWLQPATPPKGGPSVGGSLPCPQFRPFIMEHVAQGLNALEPNFMNATQASGHLNNNAGVPQTAPSANRLNATPGVSMVRPTSGVANHVAASLSRAGNAMLASSALASGISGTSVRLTAGAGLPVHMKGELNTAFIGLGDDGGYGGGWVPLAALKKVLRGILKYLGVLWLFAQLPELLKEILGSILKDNEGALLNLDQEQPALRFYVGGYVFAVSVHRVQLLLQVLSVKRFHHQQQQQQAQSNAQEELAAVEINEICDYFSRRVASEPYDASRVASFITLLTLPILVLREFLKLITWKKGLSPVHGDIATAQRARIELCLENHSGSASSDNTENSSLAKSNIHHDRAHSSVEFALTFVLDHALIPHMNVAGGAAWLPYCVSVKLRYSFGDNNHIAFLAMNGSHGGRACWLQFEEWERCKQKVSRAVETVNGSGVAGEVGQGRLRMVAEMIQKQLQLCLQQLRDDPLSAGSTAS

SEQ ID NO: 49392 - protein, 125 aa, Zea mays
  Clone ID: LIB3075-001-A12_FLI.pep
RPSRRWDFRHPARALVGSLVLIPVRPFVGWFCVDVRPIRLVLVTGESVVDLGLFRVWFSGGGENHNRREAGVFVSGVLRWWPVRVTLVSDPTPPAVQVSVVLVAVFVVLDGVLCSTGCKEQHGVM

SEQ ID NO: 49393 - protein, 156 aa, Zea mays
  Clone ID: LIB3075-042-C11_FLI.pep
KEGISYTLVLCSALVCAIYIYNMRAVHSNPIQGLRTRKQEQRKTILTRSRSYITYVRSPFLGPGEEPAEAEPAVAALFSGFLGRRGGGGLALAPHLVQDGVRLQQLLLLVQRAEDGVEQALLLLPLPRRRRDDLGRRRRDVRRGGAAHARRPGRRR

SEQ ID NO: 49394 - protein, 151 aa, Glycine max
  Clone ID: 700743149_FLI.pep
GFFGCVLMLLFSHSHTTAMEAITEGVNNINISDSYKKNRIQVSNTKKPLFFYVNLAKRYMQQHNEVELSALGMAIATVVTVAEILKNNELAIEKKITTSTVDIKDDSRGRPVQKAKIEILLGKTEKFDELMAAAAAAAEDGENGDVEEHTA

SEQ ID NO: 49395 - protein, 525 aa, Glycine max
  Clone ID: 700786909_FLI.pep
KVVIRHLPPSLTQSDLFQHIDSHFASRYNWFSFRPGNNSHKRQRHSRAYIDFKCPDDVFEFAEFFDGHVFVNERGAQHKVIVEYAPSQRVPKPSAKKDGREGTIFKDPDYLEFLKLIAKPQEHLPSAEIQLERKESEQVGASKETPIVTPLMEYIRQKRAVDSGMQASSAVAKVCRRSRAALPGKPGSGNIKRGSEKKKYVQKDNAKSATRKESKNMSAFIVVPRRDDQFAESSIKGISDIKTLHGVEGSISGIPLTSESGKKKFLLLKGKQQDIPSATEATVKQQNVQSGNSPISTPAKQNQRREASGRLIRSILLNNEARQSQSTTGTQHKIQILSSENGQRPSRRFGSRSGLNNQVSNHDAAQINSEGDSRRALDEKFIKRDLHGLGSSAKTEKRTRNKDRPDRGVWTPLRRSDVSHAGNDYSSSSLAQPTQSNPESAEGEVKENVPSGNRGGEFSASAGGHGGNPSIENGSQRNFIHHGASYVVKDDGAVSSISKGKPSKKSVGHSAHEKQVWVHKSSSGS

SEQ ID NO: 49396 - protein, 147 aa, Glycine max
  Clone ID: 700877248_FLI.pep
LNDAPTLCKYLESFYTLRKPVASTINTLAGALYKVFCASPDLARKEMRQACFDYLSLGGLFSEGPVSLLSGLNPRPLSLVLHFFAVAIYGVGRLLLPFPSPKRVWIGARLISGASAIILPIIKAEGIRQMFFPATVPAYYRTPPVAQ

SEQ ID NO: 49397 - protein, 533 aa, Glycine max
  Clone ID: 700889140_FLI.pep
RILGGGLASGAAAPSDVHNLGRMGNQIPGSALQAPFVDPMYLQYLRTSEFAAAQLAALNDPSVDRNYLGNSYMNLLELQKAYLGSILSPQKSQYNVPLGGKSGSSTPHGYYGNPAYGVGMSYPGSPMANSVVSTSPVGSASPVRHNELNMRFASGMRNLAGVMGPWHADTGNIDESFASSLLEEFKTNKTKCFELSEIAGHVVEFSADQYGSRFIQQKLETATTEEKNMVYQEIMPHSLALMTDVFGNYVVQKFFEHGLASQRRELANKLLGHVLTLSLQMYGCRVIQKAIEVVDLDQKIEMVQELDGNVMRCVRDQNGNHVIQKCIECVPEDAIHFIVSTFFDQVVTLSTHPYGCRVIQRVLEHCKDPTTQQKVMDEILGAVSMLAQDQYGNYVVQHVLEHGKPHERSCIIKELAGKIVQMSQQKFASNVVEKCLTFGGPSERQLLVSEMLGTTDENEPLQAMMKDQFANYVVQKVLETCDDQQRELILSRIKVHLNALKKYTYGKHIVTRVEKLVAAGERRIAAQAPPQPA

SEQ ID NO: 49398 - protein, 184 aa, Zea mays
  Clone ID: LIB4756-039-H3_FLI.pep
RIPPISLTIVLMSFLAASIKRSSLLSIVRPIAKRSSVPARDMHIQSIPMWEGTGNNYAYLVSDDKTKEAVIIDPANPSEVLPVLKEQTTTGGLKLTKIINTHHHHDHAGGNTEILKAFNLPIIGGRDCEKVSTTPAHNDTFNIGSINVKALHTPCHTQDSICFFFEDGNDRVVFTGDTLFIGGC

SEQ ID NO: 49399 - protein, 205 aa, Zea mays
  Clone ID: LIB4756-079-G2_FLI.pep
REPPPNQSRDTLSLPQICSRGHSSVTMQSIRQPLRSALSKAATRQYATASSQYAETIKNLRINSDTKVLFQGFTGKQGTFHAQQAIEYGTKVVGGTNPKKAGTQHLGLPVFKNVADAMKETQATATAIFVPPPVAAASIEEAIAAEVPLIVTITEGIPQHDMVRITDMLKSQSKSRMVGPNCPGIIAPGQCKIGIMPGFIHKRGP

SEQ ID NO: 49400 - protein, 374 aa, Zea mays
  Clone ID: LIB4758-044-G10_FLI.pep
GSLFVLVLLRRRCARLLPPSPFASDREGIEMASASHQSEPLDSAATSDTDAPSDNIPELPCPPCHIVTKPGQLPVEFLEPSAAQKLVIGFDCEGVDLCRNGALCIMQLAFPDAVYLVDAIEGGKELIQACKPALESDHITKVIHDCKRDSEALYFQFGIKQHNVMDTQIAYSLIQEQEQKGKKKTSDDYNYISFVSLLADKRYCGIPYPEKEEVRILLRQDPNFWTIRPLSDMMVRAATDDVRFLLNIYEKMMEKLNKVSLWRLAVRSELYCRCFCLNDNQFADWSPLPPVPDGIEADVYVPEIDILSVLDVPHGKMGRVIGRKGSTIMVVKESCNVEIHIGGAKGPPDRVFIIGSVNEVRKAEAIFRGRMLEF

SEQ ID NO: 49401 - protein, 462 aa, Zea mays
  Clone ID: LIB4758-050-G5_FLI.pep
KKKKTTDNLPHHTHIHTSSSQLKVSSRLGPPHLIARLAFLPLSPLPTAIARAAFVATDPASLALVAPPAGGDRAMRARKAKTATSSFWRSLLGGCLGGGGGGGRAAGDRQRKVRPGGGGGRLSFTDLSGAADQDLSASLVGSNLHVFSVAELREATRGFVSGNFLGEGGFGPVYRGFVADGVKKGLKAQAIAVKLWDPEGAQGHKEWLAEVIFLGQLRHPNLVKLVGYCCEDEHRLLVYEYMEHGSLENHLFKQIPAVLPWSTRLNIAVGAAKGLAFLHDAEKPVIYRDFKASNILLDSDYKAKLSDFGLAKDGPEGDDTHVSTRVMGTHGYAAPEYIMTGHLTAKSDVYSFGVVLLEILTGRRSVDKTRPSREQNLVDYARPCLKDPLRLGRIMDPAMEGQYSPRAAQSAALVAYRCLSGSPKNRPDMSAVVRALEPLLDLHDDVPVAPLGHAGPVVLFVA

SEQ ID NO: 49402 - protein, 405 aa, Glycine max
  Clone ID: 701097679_FLI.pep
LLLEQLNMEPNQLFSTHFRDGTIASCIEGQHRGAIPSVIVIGAGISGLAAARSLHDASFKVTVLESRDRLGGRIHTDFSFGCPVDMGASWLHGVCNENPLAPLIRGLGLSLYRTSGDNSVLYDHDLESYMLFNIDGKQVPQQMVIEVGDIFKKILEETGKVRDEHTEDISVSQAISIVLDRHPELRQQGLAHEVLQWFICRMEAWFAADADMISLKTWDQEHVLSGGHGLMVQGYDPIIKVLAKDIDICLNQRVKMISSGYNKVMVTVEDGRNFVADAAIITVPIGILKANLIQFEPKLPDWKVSAISDLGVGNENKIALRFDKVFWPNVELLGTVAPTSYTCGYFLNLHKATGHPVLVYMVAGRFAYDIEKLSDEAAANFVMQQLKKMFPNSSKPVSPPLMLSS

SEQ ID NO: 49403 - protein, 386 aa, Glycine max
  Clone ID: 701103727_FLI.pep
SFFNWFYFSINIGALVSSTFIVWIQENAGWGLGFGIPALFMALAIGSFFLGTPLYRFQKPGGSPITRMCQVVVASVWKRNLVVPEDSNLLYETPDKSSAIEGSRKLGHSDELKCLDRAAVVSDAESKSGDYSNQWRLCTVTQVEELKILIRMFPVWATGIVFAAVYAQMSTLFVEQGTMMNTNFGSFRIPPASLSSFDVISVIFWVPVYDRIIVPIARKFTGKERGFSELQRMGIGLFISVLCMSAAAIVEIVRLKVAKEHGLVDEPVPVPLNIFWQIPQYFLLGAAEVFTFVGQLEFFYDQSPDAMRSLCSALSLLTTSLGNYLSSFILTVVTYFTTQGGNPGWIPDNLNKGHLDYFFWLLAGLSFLNTFVYIVAAKRYKQKKSA

SEQ ID NO: 49404 - protein, 389 aa, Glycine max
  Clone ID: 701127494_FLI.pep
LSFDASDTAPFLSLRVLMALPDSSSRRNSLIPSFIYSSSSKTLPLHHMLNSASAAAPSQPPENLHAGSRGLMIPSPSESRKIEMYSPAFYAACTAGGILSCGLTHMAVTPLDLVKCNMQIDPAKYKSISSGFGVLLKEQGFRGFFRGWVPTLLGYSAQGACKFGFYEFFKKYYSDIAGPEYASKYKTLIYLAGSASAEVIADIALCPFEAVKVRVQTQPGFARGLSDGLPKFVRSEGTLGLYKGLVPLWGRQIPYTMMKFASFETIVELIYKHAIPTPKNECTKGLQLGVSFAGGYIAGVLCAIVSHPADNLVSFLNNAKGATVGDAVKKLGLWGLFTRGLPLRIVMIGTLTGAQWGIYDAFKVSVGLPTTGGPAPAAALASDAELAKA

SEQ ID NO: 49405 - protein, 148 aa, Zea mays
  Clone ID: 700266086_FLI.pep
CRLHYQNISNINQLSSCEAGLKDHIKKAKTLLEELECLVENVYGITLTSSLSALEVSDSHCLDNMPSTDCYAMEEDKCADHLDMDVSLVTVMVMVRNMLKLDYTMQEKIVTALSLKTPASELEGYCLMWDLRPYIDDDVMRLAWNMCP

SEQ ID NO: 49406 - protein, 529 aa, Glycine max
  Clone ID: 701129156_FLI.pep
EALTLPNLLFPLFFLSSPNQNLKFPPSTFSPKSTTPTTAKSHYFIYLFVYIHTKRGGRMDSDQGKLFIGGISWDTTEDKLKEHFGNYGDVLSTSVMREKNTGKPRGFGFVVFADPNILDRVLEDKHVIDGRTVDAKKAFSREDQQISVTSRGGNSNSGMNSGNGGNIRTKKIFVGGLPPTLTEEKFRQYFESYGNVTDVVVMYDQNTGRPRGFGFISFDTEDAVDRVLHKSFHDLNGKQVEVKRALPKDANPGASGRMMGGAGGGGYQGYGASGGNQNAYDGRMDSSRYMQPQSAAGGFPPYGSSAYSAPGYGYGPASNGIGYGAYGSYGGATAGYGGPAAATYGNPNVPNAAYAGGPPGGPRSTWPAQAPSGYGSMGYGNTAAWGAPSGGAGSGGGGPGSATAGQSPGGAAGYGNQGYGYGGYGGYGGSDSSYGNSGAYGTVGGRTGSAPNNNASASGGSELTSSGGSGNYMGGGYGDANGNSGYGNAAWRSEQTHASGNYGTPQGNGGQVGYGVGYGGAQSRQAQQQ

SEQ ID NO: 49407 - protein, 367 aa, Zea mays
  Clone ID: LIB3245-244-G2_FLI.pep
LSLIQGGSLKSSLLILEKEYENAINTRGELDERMFANDEDSLLGSGSLSGGAINLPGTKRKYDVMASPAKSISSPNPMSPPRFCLSPKGNSFCNSKMAPITPVSTAMTTAKWLRSTVSPLPSKPSGELLRFFSACDKDVTDDIVHRAGIILGAIFTSSSFGEQICTNMRSANRMDAIWTEQRKMEALKLYYRVLESMCRAESQILSGNNLTLLLSNERFHRCMIACSAELVLATHKTVTLMFPAVLEKTGITAFDLSKVIEGFVRHEDTLPRELKRHLNSLEERLLESMSWEKGSSMYNSLIVARPVLSIEINRLGLLAEPMPSLDAIAAHHNISMGGLPPLPFQKQERLQSITLSATISIMPITCS

SEQ ID NO: 49408 - protein, 641 aa, Zea mays
  Clone ID: LIB3689-258-D4_FLI.pep
INLPGTKRKYDVMASPAKSISSPNPMSPPRFCLSPKGNGFCNSKMAPSTPVSTAMTTAKWLRNTVSPLPSRPSGELLRFFSACDKDLTDDIAHRAGIILGAIFTSSSFGERICTSMRSASRMDAIWTEQRKMEALKLYYRVLESMCRAESQILSGNNLTSLLSNERFHRCMIACSAELVLATHKTVTMMFPAVLEKTGITAFDLSKVIEGFVRHEDTLPRELKRHLNSLEERLLESMAWEKGSSMYNSLIVARPALSVEISRLGLLAEPMPSLDAIAAHHNISLGGLPPLPFQKQERLQDKDEVRSPKRACTERRNVLVDSNSLRSPVKDIIKPKLPPLQSAFASPTRPNPAAGGETCAETGIGVFFSKISKLAAIRIRSLCERLQLPQQVLERVYSLVQQILSQQTGLFFNRHIDQIILCSIYGVAKISQLELSFKEIIFGYRKQPQCKPQVFRSVYVHWPPRSRNGKTGEDHVDIITFYNEVFIPAVKSLLVEVGPGASPKKKEEEKGPADVGPFPESPRLARFPNLPDMSPKKVSATHNVYVSPLRSSKMDTLLSPSSKSYYACVGESTYAFQSPSKDLKAINNRLNSVSGGKKVSGRLNFDVVSDLVVASSLGSDRDAKPAADPAKTTPVKCEPSDS

SEQ ID NO: 49409 - protein, 392 aa, Zea mays
  Clone ID: LIB3689-239-B5_FLI.pep
HRITVLCCGGLVLLLLLPVKIMDAAADDKPEISDDTAHQISVDPWYQVGFVLTTGVNSAYVLGYSGSIMVPLGWIGGTCGLLLAAAISMYANALLARLHEVGGKRHIRYRDLAGHIYGPKIYGLTWALQYINLFMINTGFIILAGQALKATYGLFSDDGVLKLPYCIAISGFVCALFAIGIPYLSALRIWLGFSTLFSLMYIVIAVVLSSRDGITAPARDYSIPKSSQSTRVFTTIGSIADLVFAYNTGMLPEIQATIRPPVVKNMEKALWFQFTIGSLPLYAVVFVGYWAYGSSTSGYLLNSVTGPVWVKAVANLSAFFQTVIALHIFASPMYEFLDTKYGSGRGGPFEIHNVAFRVAVRGGYLTVNTLVAAVLPFLGDFMSLTGLSAPSR

SEQ ID NO: 49410 - protein, 444 aa, Zea mays
  Clone ID: LIB3597-058-E10_FLI.pep
DNRAPLLLPVKIMDAAADDKPEISDDTAHQISVDPWYQVGFVLTTGVNSAYVLGYSGSIMVPLGWIGGTCGLLLAAAISMYANALLARLHEVGGKRHIRYRDLAGHIYGPKIYGLTWALQYINLFMINTGFIILAGQALKATYGLFSDDGVLKLPYCIAISGFVCALFAIGIPYLSALRIWLGFSTLFSLMYIVIAVVLSSRDGITAPARDYSIPKSSQSTRVFTTIGSIADLVFAYNTGMLPEIQATIRPPVVKNMEKALWFQFTIGSLPLYAVVFVGYWAYGSSTSGYLLNSVTGPVWVKAVANLSAFFQTVIALHIFASPMYEFLDTKYGSGRGGPFEIHNVAFRVAVRGGYLTVNTLVAAVLPFLGDFMSLTGALSTFPLTFVLANHMYLMVKGPKLGAIQKSWHWLNVLGFTALAVAAAVSAIRLIMRDSSTYHFFADL

SEQ ID NO: 49411 - protein, 362 aa, Zea mays
  Clone ID: LIB3594-043-B6_FLI.pep
SLHVAREMATASLALLDQTLLPSPLAYNGGSDRLSQEIFSILESNFLFGASPLEGGACSAGRVRVLSIDGGADGGALAAAALVRLERRLQELSGNPAARVADFFDLAAGSGAGGFLAAALFACRMPAEAARDVVAKNRKVLSGRGGGLMSFRRPEAAFRKVFGDLTVRDAAKPLLIPCYDMATAAPFVFSRADAVEADAFDFPLWQVCAAACGVGPAEVASLDGRTRLRAASGAGAGGGGASAAVANPTAVALTHVLHNKREFPFAAGAGDLVVLSLGGRAAASLGRLSSSSLLRIAGACQADMCARIVLFCRLTRPCRWCSGRAERPTTSASRATALRPARRRRRRWRSGAWSRCCSGERS

SEQ ID NO: 49412 - protein, 224 aa, Zea mays
  Clone ID: 700167871_FLI.pep
RHIDQIILCSIYGVAKISQLQLSFKEIVFAYRKQPQCKPQVFRSVYVHWPPTSHNGKTGEDHVDIITFYNEVFIPAVKPLLVEVGPGASPKRKEEGKVGPYPESPRLARFPNLPDMSPKKVSATHNVYVSPLRSSKMDTLLSPSPKSYYACVGESTYAFQSPSKDLKAINNRLNSGKKVSGRLNFDIVSDLVVASSLNGVQNAKPAATEVVPTKTPVKCEPSES

SEQ ID NO: 49413 - protein, 257 aa, Zea mays
  Clone ID: LIB3067-020-F12_FLI.pep
GKCKNIVLEGPREVTPTVLKEMTGLEAEKLAPKKWGLSGSSPYVLIGFLGGVSFLLTQGVDLRPKLSAVLGLAAADAMLLGGTCLAQISCFWPPYKRRILVHEAGHLLTAYLMGCPIRGVILDPFVALRMGIQGQAGTQFWDEKMEKELAEGHLSSTAFDRYCMIMFAGIAAEALVYGEAEGGENDENLFRSLCILLNPPPAVAQMANRARWSVMQSYNLLKWHKKAHRAAVKALEDGHSLSVVIRRIEEAIASDSK

SEQ ID NO: 49414 - protein, 494 aa, Oryza sativa nipponbare
  Clone ID: LIB3475-001-C1_FLI.pep
RRRKKKGGKEKRRKAKRLERDARLHVAAMAARAAAAAFLLLLIVGAATAAPDMSIISYNAEHGARGLEEGPTEAEARAAYDLWLAENGGGSPNALGGEHERRFLVFWDNLKFVDAHNARADERGGFRLGMNRFADLTNEEFRATFLGAKVAERSRAAGERYRHDGVEELPESVDWREKGAVAPVKNQGQCGSCWAFSAVSTVESINQLVTGEMITLSEQELVECSTNGQNSGCNGGLMDDAFDFIIKNGGIDTEDDYPYKAVDGKCDINRENAKVVSIDGFEDVPQNDEKSLQKAVAHQPVSVAIEAGGREFQLYHSGVFSGRCGTSLDHGVVAVGYGTDNGKDYWIVRNSWGPKWGESGYVRMERNINVTTGKCGIAMMASYPTKSGANPPKPSPTPPTPPTPPPPSAPDHVCDDNFSCPAGSTCCCAFGFRNLCLVWGCCPVEGATCCKDHASCCPPDYPVCNTRAGTCSASKNSPLSVKALKRTLAKLNTA

SEQ ID NO: 49415 - protein, 259 aa, Sorghum bicolor
  Clone ID: LIB3476-013-B4_FLI.pep
QTPHEAKQPPDFAVLHHQSMRVAATRLAAAPPPIRFLFLLVLLGSAIGAAMAGHVLGGVKENPAAANSAESDGLGRFAVDEHNKRENALLEFVRVVEAKEQVVAGTLHHLTLEAIEAGKKKLYEAKVWVKPWLNFKELQDFSHKGEATTFTNADLGAKKGEHEPGWREVPIEDPVVKDAAHHAVKSIQERSNSLFPYELLEIVRAKAQVVEDFAKFDILMKLKRGSKEEKIKAEVHKSLEGAFVLNKHQPAEHEESSSQ

SEQ ID NO: 49416 - protein, 292 aa, Zea mays; identical to SEQ ID NO: 47382
  Clone ID: LIB3279-204-A2_FLI.pep

SEQ ID NO: 49417 - protein, 286 aa, Oryza sativa nipponbare; identical to SEQ ID NO: 48884
  Clone ID: LIB3475-008-H12_FLI.pep

SEQ ID NO: 49418 - protein, 476 aa, Zea mays
  Clone ID: LIB3279-193-D11_FLI.pep
DINIGKECTKTSELLKSREASRKSNILVVDRKDPNKDEPDKVKGIQDEVMTKEEGVKGHTCEGRATCWSCLKQANTTKTNDAPNLGSLLVGNEHMQGLMSNLRDNSSHLFEKNHSRHQRDDPCEYRETNLKFPNRIQSVGGNGKTNDVTSRRKRLLLEEKASAHVQNDLTYGPMKRRRYIEANEDEEEQNDLTYGPMKRRRYIEANEDEEDYVGDHHPVHIEDATTELTPQDSISKHCVERQCYCCSKPIDIPRWSGTFKIDGKEHISLAGHLSSKSCEKVWKLSSLPKVVQVTKVPRMAVWPKIFKASEPSGDNIGLYFFPPEMRHDEELDQLVNEVMDKDLILRAIIGEAEMLIFPSVLLPERYQTFQTKHYLWAAFKAKEDKGDAIVEEEVEKGNCVSNQPDKVQSDNASFPSNHGLDRPSMEAPPQSSSSVFGIVVRQAPNLEPEVKRFIQEMERKGALVTVMRGEAIGGGP

SEQ ID NO: 49419 - protein, 323 aa, Zea mays
  Clone ID: LIB3689-225-E11_FLI.pep
SARYSLLSHYPARQSESAVSPVYPSLHRCLDPRRKIPFPPFLSRRRFGATMAAEGEAKNPSGGGEGGNPQHQQAVQAAPAEPPTAQGEAVQEAGAQATGQEPEGEKANRDGEGSAGEKDDGACRDLVLVEDPEVLAVEDPEEAAATAALQEEMKALVASVPDGAGAAFTAMQLQELEQQSRVYQYMAARVPVPTHLVFPVWKSVTGASSEGAQKYPTLLGLATLCLDFGKNPEPEPGRCRRTDGKKWRCWRNTIPNEKYCERHMHRGRKRPVQVVEEAEPDSASGSKSAPGKATEGAKKVDDKSPGSKKLAVAAAAAAAVQST

SEQ ID NO: 49420 - protein, 321 aa, Zea mays
  Clone ID: LIB3593-006-G7_FLI.pep
RYSLPSHYPARQSESAVSPVYPSLHRCLDPRRKIPFPPFLSRRRFGATMAAEGEAKNPSGGGEGGNPQHQQAVQAAPAEPPTAQGEAVQEAGAQVTEQEPEGEKANRDGEGGAGEKDDGACRDLVLVEDPEVLAVEDPEEAAATAALHEEMKALVASVPDGAGAAFTAMQLQELEQQSRVYQYMAARVPVPTHLVFPVWKSVTGASSEGAQKYPTLLGLATLCLDFGKNPEPEPGRCRRTDGKKWRCWRNTIPNEKYCERHMHRGRKRPVQVVEEAEPDSASGSKSAPSKATEGAKKVDDKSPGSKKLAVAAAAAAAVQST

SEQ ID NO: 49421 - protein, 273 aa, Oryza sativa nipponbare
  Clone ID: LIB3599-031-D8_FLI.pep
KNRSRKPVEMSLATPPPPSSSATSAASNTSAGVAPTTTTTSSPAPSYSRPAPHDAAPYQALYGGPYAAATARTPAAAAYHAQVSPFHLQLDTTHPHPPPSYYSMDHKEYAYGHATKEVHGEHAFFSDGTEREHHHAAAGHGQWQFKQLGMEPKQSTTPLFPGAGYGHTAASPYAIDLSKEDDDEKERRQQQQQQQQQHCFLLGADLRLEKPAGHDHAAAAQKPLRHFFDEWPHEKNSKGSWMGLEGETQLSMSIPMAANDLPITTTSRYHNDD

SEQ ID NO: 49422 - protein, 609 aa, Zea mays
  Clone ID: 700075182_FLI.pep
TRTASRYESDELDRSTSPIARQSAPATVAMTEEAEAKAKGNAAFAAGRFEEAVQHFSDAIALAPDNHVLYSNRSAAYASLWRYAEALDDAKRTVALKPDWAKGYSRLGAAHLGLGDAPKAVEAYEKGLALEPSNEALKSGLAQARQSASAPRRPVGSGADAVGKMFQGPELWSKVAADPTTRGYLDQPDFVQMLREVQRNPGRLNSYLSDQRMVQVLTLMLNIKFQNQSSGAPDPAAAQSNPPPPKQQPEAKAREPEPDPEPEPMEVTEEDKEQKERKASAQKEKEAGNAAYKRKDFDTAIQHYTEAMELDDEDISYITNRAAVYLEMGKYDECIKDCDKAVERGRELHADFKMISRALTRKGTALAKLAKSSQDYDAAIEIFQKALTEHRNPDTLKKLNDAERAKKELEQQEYYDPRIADEEREKGNEFFKQQKYPEAVKHYTEALRRNPKDPRVYSNRAACYTKLGALPEGLKDAEKCIELDPTFSKGYTRKGAIQFFMKEYDKALETYQAGLKHDPKNQELLDGVRRCVEQINKASRGELSEEELKERQNKAMQDPEIQNILTDPIMQQVLTDLQENPRAAQAHLKNPGVMQKIQKLVSAGIVQMK

SEQ ID NO: 49423 - protein, 463 aa, Zea mays
  Clone ID: LIB3587-271-E7_FLI.pep
SASAPRRPVGSGADAVGKMFQGPELWSKVAADPTTRGYLDQPDFVQMLREVQRNPGRLNSYLSDQRMVQVLTLMLNIKFQNQSSGAPDPAAAQSNPPPPKQQPEAKAREPEPDPEPEPMEVTEEDKEQKERKASAQKEKEAGNAAYKRKDFDTAIQHYTEAMELDDEDISYITNRAAVYLEMGKYDECIKDCDKAVERGRELHADFKMISRALTRKGTALAKLAKSSQDYDAAIEIFQKALTEHRNPDTLKKLNDAERAKKELEQQEYYDPRIADEEREKGNEFFKQQKYPEAVKHYTEALRRNPKDPRVYSNRAACYTKLGALPEGLKDAEKCIELDPTFSKGYTRKGAIQFFMKEYDKALETYQAGLKHDPKNQELLDGVRRCVEQINKASRGELSEEELKERQNKAMQDPEIQNILTDPIMQQVLTDLQENPRAAQAHLKNPGVMQKIQKLVSAGIVQMK

SEQ ID NO: 49424 - protein, 449 aa, Zea mays
  Clone ID: 700473780_FLI.pep
FTSFLVCSHLLARFLSTGKDVLAKAKTGTGKTVAFLLPAIEVVSKLPPVDRDLKKPPISVVVVCPTRELADQAAAEANKLLKFHPSIGVQLVIGGTRMALEQKRMHTNPCQILVATPGRLRDHMENTPGFATRLLGVKVLILDEADRLLDMGFRSDIEKIVAALPKQRQTLLFSATVPDEVRQVCHIAMKRDLEFVNTVQEGSEETHSQVKQMHLIAPLDKQFSNLYGLLTDHISENVDYKVIVFCTTAKVTSLVAELLSELKLNVREIHSRKPQSYRTRISKEFKESKGLILVSSDVSARGVDYPNVTLVVQLGVPTDREQYIHRLGRTGRRGNEGTGILLLAPWEEYFLRSINDLPITEATQPLIDLDTKKKVDKALAHVEVKDKESAYQAWLGYYNSNKVIGRDKYQLVSLANEFSRSMGLNNPPAVSKLALRKMGLNNIPGLRSK

SEQ ID NO: 49425 - protein, 75 aa, Zea mays
  Clone ID: LIB3245-548-F4_FLI.pep
FDICGLSFRYVSCCDFIADCFCNGTVEFISGYNQPLLLYIVLLILACTARMIGFLHQSIFFRTRYFCMLHFPNCN

SEQ ID NO: 49426 - protein, 184 aa, Zea mays
  Clone ID: LIB3356-050-D6_FLI.pep
FPFLLRRSRPESSAPPGTKACREKLRRDRLNERFNELCAILEPGKPPKADKVAILSDAARLLNQLQGEAQKLKQSNESLQESIKSLKAEKSELRDEKTRLKAEKERLEQMLKGVVSHAAVAAPGPFVPHPAAVAPSFHHHPAAFAQAGKFVPYPSYPPPAAFWQWIPPTSLDTTKDPAHWPPVA

SEQ ID NO: 49427 - protein, 342 aa, Glycine max
  Clone ID: LIB3040-056-C5_FLI.pep
QSDLGAFDMSSGSVRRVSRQDIQLVQNLIERCLQLYMSQKEVVETLLAQAKIEPGFTELVWQKLEEENEEFFKAYYARLVLKQQIMQFNKLLDQQVQLMQLHSSTVASLPTSNGSHIPAVSSLPSSNGSHIPAIPENPACYTADRTQTSLKPENMQHHVDSRLSNVFNNGGSSLHTSMHAAVDMSAHGNRINGPSSMLSAQSANMGLIQGINGGGMIKSEPGYSGCSPYMFGTDGNVLETRPTIGGASVTSFTNVESNSHSLNEVVLDPDTSSFGFLGQIPRNFSLSDLTADFSQSSDILETYSRSPFLATDNENFLDRGEQDNNRLDSISEGLSYEDFGSE

SEQ ID NO: 49428 - protein, 373 aa, Glycine max
  Clone ID: LIB3049-003-D2_FLI.pep
KKWRCSRDAVVDQKYCERHMNRGRHRSRKPVEGQSGHALTTTNTPNASSNSTVVPGNHNNNTFAHINVHHPLPPHSSPANTINRMFMSNNKENNNTSERTKDGLALPMLPPTLEPKPKDNNNSFMVHKHQEPYDESSRNKNEFGLVTSDSLLNPSQKRSFDSSSSSQKDDSSESQQQHSLRHFIDDSPKPQSHHNHNHRSSSSIWPELDNMQSDRTQLSISIPISSSDHFMSFATSSPSNEKLTLSPLRLSREFDPIQMGLGVGSASNEANTRQANWIPITWESSMGGPLGEVLNLSNNNNNSNASDQCGKNNNNTSALNLMKDDDDDDGWDNSPPPIGSSPTGVLQKTAFGSLSNSSAGSSPRGAPENNNKE

SEQ ID NO: 49429 - protein, 109 aa, Glycine max
  Clone ID: LIB3050-010-A3_FLI.pep
HKGAFFQNESDDRAATVGSDGIFARDFSAPTGEDKMDKTILPKVMQVKHFGRSGRTKWTHLVNEDTTDWNNPWTYNDPLRAKYNDKMAAMNAPIVKPKGSRKLKDWESR

SEQ ID NO: 49430 - protein, 154 aa, Glycine max
  Clone ID: LIB3050-014-D7_FLI.pep
WGETKETRKQNAMVDVDVGTSDSPKRHHNNGFLVTISAVLALLTKRRAAKPTKGDEWKKELKKSRPKKLLSNIRSKALFGHNHNNKKKLRSVEETQQGWGNGGVWQKEILMGGKCEPLDFSGVIYYDGNGKQLSEIPLRSPRASPMPGYLTRRL

SEQ ID NO: 49431 - protein, 179 aa, Glycine max
  Clone ID: LIB3074-018-D10_FLI.pep
ITKKIIQKRRDQEREREMGRKNTIFLALVVTLITKETMAERHIVGGSQGWDESTDFNSWVSGQTFKVGDQLVFKYSSLHSVVELGSESEYKNCDLGNAVNSMSSGNDVVKLNKPGTRYFACGTMGHCDQGMKVKITTVSGSETSSPASSSSSSSNSSSASQCLVYLVLIVGLLIASLLN

SEQ ID NO: 49432 - protein, 458 aa, Glycine max
  Clone ID: LIB3087-012-F3_FLI.pep
SISSILISLSFSVSTCHGSFFLALLLLSTPSCRLFQGLLLHSHNLSSLHLFLHSLLHLLHFKHLHPSQPPPFHFTFQTTPSLFHYPFYCYHSSLRPCLQPQCFRVHKISSDFPIGVWPRTAKSTGSASATAIQLKGEDDPFANVLLPVESEPGGNYTSESYFKKVLMKSHFITKDPPEADLFFLPFSMARLWHDRRVGVGGIQDFIRDYIHNISHRYPYWNNTGGADHFYVACHSIGRSAMDKAPDEKFNAIQVVCSSSYFLTGYFAHKDACLPQIWPRKGNPPNLVSSKRKRLAFFAGGVNSPVRVKLLETWKNDSEIFVHHGRLKTPYADELLGSKFCLHVKGFEVNTARIGDSLYYGCVPVIIANYYDLPFADVLNWKSFSVVVTTLDIPLLKKILKDIISSNKYLMLQSNVLKVRKHFQWHSPPQDFDAFYMVMYELWLRRSSIKNTWVDSFRV

SEQ ID NO: 49433 - protein, 329 aa, Glycine max
  Clone ID: LIB3094-060-C7_FLI.pep
VPPFFHPMVPPPHVAVPGYAFPLGPGPFPGAENPLVKPVSQAPGQAFAPPAHAVDGKNVQPLVRGDPNAYVGNFSNGRTNIQEQGDHLNHAWHHQRPFPSRVNIPMQQGLGPRPFIRPPFYGPPPGYMVGPSFPGPAPVWCVPMPPPGSIRGPHPRHFVPYPVNPTPQPPPPETVSLRTSIVKQIDYYFSDENLQNDHYLISLMDDQGWVPISTVADFKRVKKMSTDIPFILDALQSSNTVEVQGDKIRQRDSWSKWIGASSGNSGSSTAQVQQGQLVDGAFNSLENSDAVGDKMKEISEENPKDAVHDSIFEEHNQPNRDMLQVSLMN

SEQ ID NO: 49434 - protein, 389 aa, Glycine max
  Clone ID: LIB3106-051-G6_FLI.pep
LLNPNPSSLSVLSMGSSGTTDYGAYTYQNLEREPYWPSEKLRISITGAGGFIASHIARRLKTEGHYIIASDWKKNEHMTEDMFCHEFHLVDLRVMDNCLTVTKGVDHVFNLAADMGGMGFIQSNHSVIMYNNTMISFNMIEAARINGVKRFFYASSACIYPEFKQLETNVSLKESDAWPAEPQDAYGLEKLATEELCKHYNKDFGIECRIGRFHNIYGPYGTWKGGREKAPAAFCRKTLTSKDRFEMWGDGLQTRSFTFIDECVEGVLRLTKSDFREPVNIGSDEMVSMNEMAEIVLSFEDKNIPIYHIPGPEGVRGRNSDNTLIKEKLGWAPTMKLKDGLRITYFWIKEQLEKEKAEGVDLSGYGSSKVVQTQAPVQLGSLRAADGKE

SEQ ID NO: 49435 - protein, 239 aa, Glycine max
  Clone ID: LIB3028-001-E12_FLI.pep
NRNFMQGWTTFRTATLAVSGKGFIAKDMSFRNTAGPVNHQAVALRVDSDQSAFYRCSVEGHQDTLYAHSLRQFYRECEIYGTIDFIFGNGAAVLQNCKIYTRVPLPLQKVTITAQGRKSPHQSTGFTIQDSYILATQPTYLGRPWKQYSRTVYINTYMSGLVQPRGWLEWFGNFALNTLWYGEYRNYGPGAALAARVRWPGYHVIKDASTASYFTVQRFINGGTWLPSTGVKFTAGLTN

SEQ ID NO: 49436 - protein, 247 aa, Glycine max
  Clone ID: 700664293_FLI.pep
KMDLHDPNRFRNRKQTLSSRERFLGVPSSHAPRIENSSSSATDDDVVVFSNNDDLIEDDVVFSNNDDSTEPSSSSQIPNRHHNHNNHHKAFAFGPSDASFGILAALPENDHASSNGSHFFHHKPSVSVSVSVSLSSSSSSSAAARLIPAIPKPPPERTPSSSSSLKFHQSAPVNVPLMPMRRHHRRDFDDDDDATEEMLPPHEIVARNSAQSPMLAYSVLEGVGRTLKGRDLRQVRNAVWRQTGFLD

SEQ ID NO: 49437 - protein, 543 aa, Glycine max
  Clone ID: 700664708_FLI.pep
DCIYALEEEDEDGIIAGGIGEDGGGAAGFDLTSLCRAYHIHQTLGLEDRFKQYYFENRKLQLTSDFQVSSMTPFLESHQTFFAQIAGFFVVEDRVLRAGGGLISKMEVENLWDIAVSKMCSVLEDQFSRMQTANHLLLIKDYVSLLGVTLRRYGYPIDALLDVLSKHRDKYHELLLSDCRKLIAEAVAADKFEQMLMKKEYEYSMNVLSFQIQTSDIIPAFPYVAPFSSTVPDCCRIVRSFIEDSVSFMSYGGQLEFYEVVKKYLDRLLSEVLDEALVKLINTSINGVSQAMQMAANMAVLERACDFFFRHAAQLSGVPLRMVERSRRNFPLRKARDAAEEMLSGLLKAKVDGFMTLIENVNWMGDEAPQSGNEYVNEVIIYLEILVSTAQQILPSQVLKRVLQEVFAHISEKIVGTLVSDSVKRFNVNAITGIEVDIRLLESFADNQASLFSDGDVDVLRASLASSKQLINLLLSNHPENFLNPVIRERSYNTLDHKKVVIVSEKLRDPSDRLFGTFGSRGARQNPKRKSLDTLIKRLRDVS

SEQ ID NO: 49438 - protein, 191 aa, Glycine max
  Clone ID: 700665788_FLI.pep
YNMVSLFQATMFCFSPLFVTWKKVVNGGDPRLRGCIGTLEARSLINGLKDYALTSALRDRRFPPIQVNELPLLECTVSLLTDYETANHYLDWEIEKHGIIIEFSDPVYNTRCSATYLPEVAANEGWTKTEAVDSLIRKAGYNGPITDELRMQIQLTRYQSTLFTMHYSEYVSYVKERRGEAPILAAKSPNY

SEQ ID NO: 49439 - protein, 336 aa, Glycine max
  Clone ID: 700974382_FLI.pep
AVLIIDSTTGGFEAGISKDGQTREHALLSFTLGVKQMICCCNKMDATTPKYSKARYDEIVKEVSSYLKKVGYNPDKIPFVPISGFEGDNMIERSTNLDWYKGPTLLDALDQISEPKRPSDKPLRLPLQDVYKIGGIGTVPVGRVETGVLKPGMVVTFAPTGLTTEVKSVEMHHESLTEAHPGDNVGFNVKNVAVKDLKRGYVASNSKDDPAKEAANFTAQVIIMNHPGQIGNGYAPVLDCHTSHIAVKFAELMTKIDRRSGKELEKEPKFLKNGDAGFVKMIPTKPMVVETFSEYPPLGRFAVRDMRQTVAVGVIKNVEKKDPTGAKVTKAAQKKK

SEQ ID NO: 49440 - protein, 734 aa, Glycine max
  Clone ID: 700991377_FLI.pep
KKEAVDNGVAVEGGDGLAEGEEVQDLKNETVNNGMETEGGNGVAEGEVWTLKNGVINSGVAIADGSAAAEDGEVSGSKNEVNGVAFADGNGVTEHGEVWGSKNEAVNNEVAIVDGNGVAYGGEVHGSKNGAVNNEVVIADGNGVTEGQEDHCLKNETVNNVVANADEGNSGAVECFQTYKRRKHAKSSSEFKVQENSRKHMGAASQLLAVKKPFDLAVGNTSKDHSHDHWGNVVLKHLYHSLGNDNGGMKWCIREALMSCPKISCAPTMKETLKIVKDGQECSPQLESLFYRLQSEANGHENVVHNGFSSESNGRDTTEGCQRVFRDILASEKFSSLCKVLLENFQGTKPETVFDFSLINSRMKGQAYEQSPTLFLSDVQQVWRKLQSTGNQIVAMARSLSNMSKASFCEQVGISAQSSFEDEKEVLCNQESISHMKPEQTVECVAFRLGTCWHCGDKADGTDCLVCDSCEEMYHLSCIEPAVKEIPYKSWFCANCTANGIGCRHKNCVVCERLNALKTLDDIVGEENIPTNEETLNELEENSNCTYDGIQISTDRRNSSDCKICKMAVDGEKVKICGHSFCPSKYYHVSCLSSKQLKSYGHCWYCPSCICQVCLTDKDDNKIVLCDACDHAYHVYCMKPPQNSIPKGKWFCIKCEAGIQAIRQARKAYESNKGKVGQNDSKPNEDIDKKWNKKRGRELDNVGGMMDMLITAANTLNSEEDLNAMLIDSKKALT

SEQ ID NO: 49441 - protein, 271 aa, Glycine max
  Clone ID: 700993668_FLI.pep
GIDTWKKETIMKKEAAKMLESDSSPGYVSEEDYKSLPAGSADPRDEEVPLLKNIYWKELLVLAYVWVAFLIVQIIKTYTKTCSILYWVLNSLQVPIAISVTLYEAICLCNGTRVIASKGKENTDWMKLHKICLYCSCGIIAGIVSGLLGLGGGFILGPLFLELGIPPQVASATSTFAMVFSSSMSVVQYYLLERFPVPYASYFILVATIAALTGQHVVRKIIAIFGRASIIIFVLAFTIFLSAISLGGVGIENMVEKMENNEYMGFANICH

SEQ ID NO: 49442 - protein, 403 aa, Glycine max
  Clone ID: 700750783_FLI.pep
STGIKGTRPPMLKPPPGARVQVVDDSTCSTWDLLRDLAPQGEEGLPLNRSENESEVAREVERGAVEKEEGEVGTRESPKREEEENVAGLSESCSFSTSNEDDSSSSTTDPTSNNISPQGRIKRIITAESWQKGEFLGGGSFGSVYEGISDDGFFFAVKEVSLLDQGTQGKQSVYQLEQEIALLSQFEHENIVQYYGTEMDQSKLYIFLELVTKGSLRSLYQKYTLRDSQVSSYTRQILHGLKYLHDRNVVHRDIKCANILVDASGSVKLADFGLAKATKLNDVKSMKGTAFWMAPEVVKGKNKGYGLPADIWSLGCTVLEMLTGQLPYCDLESMQALYRIGKGERPRIPDSLSRDAQDFILQCLQVSPNDRATAAQLLNHSFVQRPLSQSSGSSFPHIHGRKG

SEQ ID NO: 49443 - protein, 389 aa, Glycine max
  Clone ID: 700754812_FLI.pep
EAEREMQKRREESDKIPVKRDSASSLPQPQSLVLFTSPFSPFPFLLPLSFAKWVIISFSHNTIFFTFSFFFASLRWGFKFHHRNRMFSRLIHPHEGQEDMQGGSNHAHLGDPCLVLTSDPKPRLRWTADLHERFVDAVTQLGGASKATPKAIMRTMNVKGLTLYHLKSHLQKYRLGKQSGKDSDEGLKDASYLQESPGTDNSSPKLPASDANEGHEVKEALRAQMEVQSKLHLLVEAEKHLQIRQDAERRYMGMLERACKMLADQFIGDVIIDRDGQKFQGLENKTSRSPLVDHGGFFPAACTEVGGMHVSEVPPILQPQGAECSSESCLKSLESLGGLTLEGSPGGSKKRMLNLDSMVAPLIWSEANTRTQGIHLAQVNPPGMTRYGM

SEQ ID NO: 49444 - protein, 355 aa, Glycine max
  Clone ID: 700952246_FLI.pep
SQFKTLLEKVGEMSMSVAEDESSEEVHVPGEIDWQMLDKSKFFFLGAALFSGVSAALYPVVVLKTRQQVAQSKVSCINTAFSLIRGEGFRALYRGFGTSLMGTIPARALYMAALEVTKSNVGTATVRFGLAEPTAAAVANAAAGLSAAMAAQLVWTPVDVVSQRLMVQGVSDSGNPKASALRYINGIDAFRKILSSDGLRGLYRGFGISILTYAPSNAVWWASYSVAQRMVWGGVGYYLCKGNDSAANSALKPDTKTVMAVQGVSAAVAGGMSALITMPLDTIKTRLQVLDGNENGRRGPTAMQTVRSLVREGGWMACYRGLGPRWASMSMSATTMITTYEFLKRLSAKNQEVLT

SEQ ID NO: 49445 - protein, 532 aa, Glycine max
  Clone ID: 700953440_FLI.pep
KPSPFSMGQSPSTTAAPPPDLNRHQIPQIHPNTDSDFTDYTLRLSDDCLAAIFHFLSTADRKRCSLVCRRWLRVDGQRRHRLSLNAQPELLDFVPSLFNRFDSVTKLALRCDRKCASINDDALVLISLRCRNLTRLKLRGCRDITELGMAGVGENCKALKKLSCASCMFGAKGIAAVLDRCVTLEDLTLKRLRGVHHITDVEVGAAASLKSICLKELVNGQSFAPLVIDSKKLRTLKIIGCTGDWDETLVRVGCFNNGLVEVHLEKLQVTDVGLVAVSKCFGLDTLHVVKTAECSDVGLCAVADRCRLLRKVHIDGWRTNRIGDDGLHAIAKHCLNLQELVLIGVYPTFSSLAAIASNCRNLERLALCGIGTVGDAEIECIADKCVALRKLCIKGCPVSNAGIGALASGCPNLVKVKVKKCKRITGKGVEWVREQRVSLAFNYDDSEVEALDGSASDGIGGARDNTVEFLPTINQTTVAVAEADAEASSSNNNNRLTMLRSRFGFLAGRNLVPGAFRRWSNGDNVSSSSSFG

SEQ ID NO: 49446 - protein, 419 aa, Glycine max
  Clone ID: 701100006_FLI.pep
GSDLSWLKVRAMSFAVALCSTSSFFPSGFAIRNPKQLQPFVSMSLSSKLPLHFSGNARFNRNHPTMFKIRASNSNSSSSSKLVLFSSTIVVTTAVANRVLYKLALVPMKEYPFFLAQFITFGYVVIYFSILYFRYRARIVTDEMLAIPKLRFVAIGFLEALGLVSGMSAAAVLPGPVIPILNQTFLVWQLMFSTLLLRRRYSINQLVGCLLVAVGVVVAITSGSNTGQMLSEVQFFWPALMIISCSFQAWASVMKESIFIDSATQLKHKSLDIFVVNSFGSGFQALFVLLSLPILSNLRGIPFAQLPSYFKSGAGCFLNLGADNPNCDGAPLLPLLYVIINLAFNISLLNAVKTSSAVVASLLVMLSVPISVYILSLPLPYLPEGTSLSPFFLLGCAILLCGLFLYNTTRPVRSSSEDD

SEQ ID NO: 49447 - protein, 253 aa, Glycine max
  Clone ID: 701036924_FLI.pep
ILEIEEISQDAAYWIRRIPPRLWATAYFEGHRFGHLTANIVESLNTWILEASGLPIIQMMECIRRQLMTWFNERRETSMQWTSILVPSAERRVAEALDRARTYQVLRANDAEFEVISHEGTNIVDIRNRCCLCRGWQLYGLPCAHAVAALLSCRQNVHRFTESCFTVATYRKTYSQTIHPIPDKSLWKELSEGDANASKATEVVINPPKSLRPPGRPRKKRVRAEDRGRVKRVVHCSRCNQTGHFRTTCAAPI

SEQ ID NO: 49448 - protein, 497 aa, Glycine max
  Clone ID: 701037770_FLI.pep
GPRAKIMATTATEPLPSSAEMPPAPPPPKQPPQPVAAASAVKPEAPLSDSKASAEANVIVVPSYSRWFSWDSIDECEVRHLPEFFESASKSPRVYKYYRNSIVKYFRYNPTRKITFTDVRKTLVGDVGSIRRVFDFLETWGLINYHPSSSLTKPLKWDDKETKSDSASNTTESSSAPAKENTKRLCSGCKVVCTIACFACDKYDLTLCARCYVRGNYRVGVNSSDFRRVEISEETKTDWNEKETTNLLEAITHYSDDWKRVSQHVPGRTEKECVAHFLKLPFVDQFQHYQQHPAVNGTDDSCNPLKRVTNADAESELDTVASAEPNKRMRLTPLADASNPIMAQAAFLSALAGSEVAQAAAQAALTTLSEVYKATKINYRSFPRNTLLQDAGIMSNGGNTSDSFQGSRLHANIQLEKEELDVEKAISEIIEVQMKNIQDKLVQFEDLDLLMEKEGQQLEQMKNMFFLDQLTLLFHKSSAPKTGECQEGNNVKTNHGY

SEQ ID NO: 49449 - protein, 573 aa, Glycine max
  Clone ID: 701151295_FLI.pep
ERTRERTMGAKKQSQGVKNKGNGANNDVFASCSFSSLGLDSNLCEQLRDRLGFEVPTLVQAQAIPVILSGRHALVNAATGTGKTVAYLAPIIHHLQGYENRIQRSDGTFALVLVPTRELCLQVYEILQKLLHRFHWIVPGYIMGGEKRSKEKSRLRKGISILIATPGRLLDHLKNTTAFLYSNLRWIIFDEADRILELGFGKDIEEILDLLGSRKKGHGDQENTVLTHSKIQRQNLLLSATLNEKVNHLAKMSLDNPVMIGLDGKKMEPISTIKRLDSSESDEDSEDKYSSKVPTVGDYKVPIQLIQRYMKVPCGSRLPVLLSILKHLFEREPSQKVVLFFSTCDAVDFHYSLLSEFQFSSYPQTEGVRQVFLGCKTFRLHGNMQQEDRRTSFQAFKTEKSALLLSTDVSARGLDFPKVRCIIQYDSPGEATEYVHRVGRTARLGERGESLLFLQPVEIDYLQDLEKHGVSLTEYPVLKVLDSFPLQKNHTKKSVFLESHPWVLCLQKALEAFIMSKPEMDEHARKAFCSWVRAYTAHRGELKRIFMIKKLHLGHVAKSFALKQQPSLVGQSF

SEQ ID NO: 49450 - protein, 222 aa, Glycine max
  Clone ID: 701151939_FLI.pep
LDNSLPTTMANFKTFFISQTLTLTLLFSTLVTATYHHNISPSLVRSREKLTHLHFYLHEIFTSEKPSNIVIDPPKVVASSPLPFGSQVVIEDPLTIGPDVKSKEIGKAQGFYLSATQRPGLELEIVMGMALTFLEGEFNGSSLSVLGRNKIFNEVRELPIIGGTGEFRFARGYILARTVKVDYHKGDATVEYNAYVYHYSSTSSSSSPHLFNQGLHLCHGDY

SEQ ID NO: 49451 - protein, 512 aa, Glycine max
  Clone ID: 701060856_FLI.pep
RPLSLSLTELTSYVLCFIILLLLLEQISYILKKASIPGPSFVLPFIGNAIPLVRDPTNFWDLQSSFAKSTPSGFSANYIIGNFIVFIRDSHLSHKIFSNVRPDAFHLVGHPFGKKLFGQHNLIYMTGQVHKDLRRRIAPNFTPKALSTYTALQQIIILNHLKSWLNQSQAPDSHSIPLRILARDMNLQTSQTVFVGPYLGPKARERFERDYFLFNVGLMKLPFDFPGTAFRNARLAVDRLIAALGTCTEMSKARMKAGGEPSCLVDYWMQDTLREIEEAKLAGEMPPPFSTDVEIGGYLFDFLFAAQDASTSSLLWAVALLDSHPEVLAKVRTEVAGIWSPESDELITADMLREMKYTLAVAREVLRFRPPATLVPHIAAESFPLTESYTIPKGAIVFPSVFESSFQGFTEPDRFDPNRFSEERQEDQIFKRNFLAFGAGPHQCVGQRYAFNHLVLFIALFTTLIDFKRDESDGCDDIVYVPTICPKDDCRVFLSKRCARYPSFPSVEDFVK

SEQ ID NO: 49452 - protein, 476 aa, Glycine max
  Clone ID: 701109853_FLI.pep
KKEAMARLSSDQVLKDNNAADPTSVTTLHLTHKALSDITCLANFVNLEKLDLKLNNLTSLEGLRSCVNLKWLSVVENKLESLEGIQGLTKLTVLNAGKNKLKSIDQVMSVVSLRALILNENEISSICKLDQLKDLNTLVLSKNPIRKIGEALMKVKSITKLSLSYCELQGIGTSLKSCVELSELRLAHNEIKSLPAELKLNSKLRSLDLGNNVITRWSELKVLELLTNLRNLNLQGNPAATVNKVMRKIKKALSKLQIFNARPVDKDTENKKGSIVDGTRDFSVDQNENDHIEAADDLDSGRKSSKKRKRTVDASKKEDRVVDEENKGHKKDKADRKKESLITNVDPGMENKSTKKKAKKDDKPLDKGFALEENVSKVEKKLKKQHKNDEQSELDVIDDAEASFAELFKINDAENLNLADEMKAQDKVPKDVMKLAGDPVTSFAKHKNAKIQNMESLSAPVAEIGMGGPSTWGDEL

SEQ ID NO: 49453 - protein, 228 aa, Glycine max
  Clone ID: 701125958_FLI.pep
LVPTGLSKSDKPMMFFITKPCQSDSLSVKEKFIHAKYAEKLFVRKPKDNQYRLLVAQQIWEAVHANDKKAVYRYIVNSDVDVNAVYEPTCSSSLTLAKVMLLQEQTSHDHSSTLAGNTLDWSSTKEGQVMDNLDGCTLLHLACETADIGMVELLLQYGANVNATDSRGQTPLHRCILKGRSTFARLLLSRGADPRAVDEQGRTPIELAAESNAGGDREVHAPSTDSNG

SEQ ID NO: 49454 - protein, 335 aa, Glycine max
  Clone ID: LIB3049-026-G7_FLI.pep
RAKRMAPKGLIFLAVLCFSALSLSRCLAEDNGLVMNFYKESCPQAEDIIKEQVKLLYKRHKNTAFSWLRNIFHDCAVQSCDASLLLDSTRRSLSEKETDRSFGLRNFRYIETIQEALERECPGVVSCADILVLSARDGIVSLGGPHIPLKTGRRDGRRSRADVVEQFLPDHNESISAVLDKFGAMGIDTPGVVALLGAHSVGRTHCVKLVHRLYPEIDPALNPDHVPHILKKCPDAIPDPKAVQYVRNDRGTPMILDNNYYRNILDNKGLLIVDHQLANDKRTKPYVKKMAKSQDYFFKEFSRAITLLSENNPLTGTKGEIRKQCNAANKHHEEP

SEQ ID NO: 49455 - protein, 110 aa, Glycine max
  Clone ID: LIB3049-028-F4_FLI.pep
LPPPSRHSSSPSVLYSLHCETKMKVAFAAVLLICLVLSSSLFEVSMAGSAFCSSKCSKRCSRAGMKDRCMKFCGICCSKCNCVPSGTYGNRHECPCYRDMKNSKGKAKCP

SEQ ID NO: 49456 - protein, 686 aa, Glycine max
  Clone ID: LIB3049-034-E2_FLI.pep
VEPKVYQRRVNRQKKVVAGKWCGKVWMSNQVHPLLAKRDSEDVEDEKLLLGWILPDEKLERSEITLKSETTSRKSGKKRKMTAENGRPKKGSYAKKNVVADNSTEGKHNSQPRRILRNKKARCVERDHAALKGDYCPPYHRKSISKQANCSESDAVSDDSLDDDDHMHHRRNAIVEKDKFIDNDVSNDTVDCDSDWQQREELSSKKVEDTERDAISEDSLDVGSLQLLRKNSRAKHAKNISQEDIISDDQMESPLQKRQRRIPKSRQGKYLTGKDIISDDQLEHKKKKQQRKNPKSRQAKYLNEEDIASDDQLEGHYRRYQRKNSRGRHAKCVAGEDGMPDDQLEDRCQKQQTSFSRKRQNKGIDREVKNEISDDHLEDHFLKQQRRFPKSRQNKHTDKEVMDDLAENNSHLLHRTPKRKQAKCMEEDDMNSDDEMEDNQPLRRTLRSKQAKPKTLQQMKQANSFQAKKQASRPIKQGSRMLVKSKAPQQIKQPSHLRNKQSNNTQEFSLDMEEEEEGGPSTRLRKRATKAQESEGKLKDKQTKRMKVKNAAAAKVSVGDARMQDGEAEYQCDIDGCTMSFGSKQELMHHKRNICPVKGCGKKFFSHKYLVQHRRVHEDERPLKCPWKGCKMTFKWAWARTEHIRVHTGARPYVCAEPDCGQTFRFVSDFRRHKRKTGHSAKKNCQ

SEQ ID NO: 49457 - protein, 446 aa, Glycine max
  Clone ID: LIB3049-041-G4_FLI.pep
LYHILTMEAKLATTIILIFSVIWLMRVNGIDPCASQADNSDLNVIPIYSKCSPFKPPKSDSSWDNRIINMASKDPLRFKYLSTLVGQKTVSTAPIASGQTFNIGNYVVRVKLGTPGQLLFMVLDTSTDEAFVPCSGCTGCSDTTFSPKASTSYGPLDCSVPQCGQVRGLSCPATGTGACSFNQSYAGSSFSATLVQDSLRLATDVIPNYSFGCVNAITGASVPAQGLLGLGRGPLSLLSQSGSNYSGIFSYCLPSFKSYYFSGSLKLGPVGQPKSIRTTPLLRSPHRPSLYYVNFTGISVGRVLVPFPSEYLGFNPNTGSGTIIDSGTVITRFVEPVYNAVREEFRKQVGGTTFTSIGAFDTCFVKTYETLAPPITLHFEGLDLKLPLENSLIHSSAGSLACLAMAAAPDNVNSVLNVIANFQQQNLRILFDTVNNKVGIAREVCN

SEQ ID NO: 49458 - protein, 382 aa, Glycine max
  Clone ID: LIB3049-044-A10_FLI.pep
RDGLMKIHMPGYFSSISKGVATIMASYSSWNGVKMHAHHDLITGFLKNTLHFKGFVISDFEGLDRITSPPRANITYSIEAGVSAGIDMFMVPKHYTEFIDVLTMLVKNKHIPMSRIDDAVGRILWVKLMMGIFENPFADYSLVKYLGIQEHRNLAREAVRKSMVLLKNGESADKPLLPLPKKSPKILVAGSHADNLGYQCGGWTIEWQGVSGNNLLKGTTILTAVKNTVDPETTVVYKENPDVEFVKSNGFSYAIVIVGEHPYAEMYGDSMNLTIPEPGPKIITNVCGAIKCVVIIISGRPVVIEPYVGLIDALVAAWLPGSEGQGVADVLYGGYGFTGKLPRTWFKTVDQLPMNVGDPHYDPLFPFGFGLSTKPSKALYSS

SEQ ID NO: 49459 - protein, 341 aa, Glycine max
  Clone ID: LIB3092-053-C4_FLI.pep
AVCVNQRIARMSKQDMMKSQNCLLKVNIHCDGCEQKVKKILQKIDGVYSVNIDAERGKVMVSGHVDPAKLIKKLKRSGKHAELWGGQRGMMYNQNYPTYPQFKNLHIDNTKGGSKDNKSQNHKGGAQKGGGQLAHFQSANGGSKVPPKNQKSVDFNLSEDELDESDFDEFDDDYDEFEDDFDEEDEEEEYGHGHGHGHGQQGHPMQHNKMMAMMAQMGNGRGPHGPGGMMNGPAMNGHKGNGGVKKGEVIDLPIQMKGKGGNFSFSEGKNEIKGNGDGGQKNKGGKQKGGDNNHNNGNKKKNSKGKNGGGFLVRFLGLGKKNKKGGGGGGSADTTTSKNKN

SEQ ID NO: 49460 - protein, 532 aa, Glycine max
  Clone ID: LIB3093-017-F2_FLI.pep
ITSKKMDLLLNCLNLNTIAIASILSLIFLCLFLYRKNSRGKDAPVVSGAWPILGHLSLLNGSQTPHKVLGALADKYGPLFTIKLGMKPALVLSNWEMSKELFTTNDLAVSSRPKLVAVEVMSYNQAFVGLAPYGPYWRELRKIVTFEFLSNRRIEQRNHIRVSEVRTSIKELFDIWSNGNKNESRYTLVDIKQWLAYLTFNMVVRMVVGKRYFGVMHVEGKDKAQRFMKNIREFMNLMGTFTVADGVPCLRWLDLGGHEKAMKANAKEVDKLLSEWLEEHRQKKLLGENVESDRDFMDVMISALNGAQIGAFDADTICKATSLELILGGTDSTAVTLTWALSLLLRNPLALGKAKEEIDMQIGKDEYIRESDISKLVYLQAIVKETLRLYPPAPFSSPREFTENCILGGYHIKKGTRLIHNLWKIHRDPSVWSDPLEFKPERFLTTHKDVDLRGHNFELLPFGSGRRVCAGMSLGLNMVHFTLANLLHSFDILNPSAEPVDMTEFFGFTNTKATPLEILVKPRQSPNYYETL

SEQ ID NO: 49461 - protein, 361 aa, Glycine max
  Clone ID: LIB3093-028-E3_FLI.pep
PQQRVEKMARLITVVWCAVAVLLCAAAGASWVEEAANPIRMVAGVEAEVVRVIGQCRRALKFARFMSRFGKSYRSEEEMRERYEIFSQNLRFIRSHNKNRLPYTLSVNHFADWTWEEFKRHRLGAAQNCSATLNGNHKLTDAVLPPTKDWRKEGIVSDVKDQGSCGSCWTFSTTGALEAAYAQAFGKSISLSEQQLVDCAGRFNNFGCNGGLPSQAFEYIKYNGGLETEEAYPYTGKDGVCKFSAENVAVQVIDSVNITLGAENELKHAVAFVRPVSVAFQVVNGFHFYENGVYTSDICGSTSQDVNHAVLAVGYGVENGVPYWLIKNSWGESWGENGYFKMELGKNMCGVATCASYPVVA

SEQ ID NO: 49462 - protein, 344 aa, Glycine max
  Clone ID: 700648757_FLI.pep
DNFRMCKALMPGDEENMSDEAIWETLPHFWVAISMVFFIAATVFTLLKLSGDVGALGWWDLFINFAIAECFAFLVCTKWSNPVIHRNSREASSSSSTTITYLDWNSGLVVSTDENQHQGRMCSLQDIGGHFMKVPIIVFQVLLCMHLEGTPACAVHIPLPVIFSPLFLLQGAGVMLSASKLGEKLVLLLRSGAGGGIYFRFSSRAHDCLGFLHHGSRLLGWWSIDEGSREEQARLYHEGAIGYNTFCGYPPEIVKKMPKKELAEEVWRLQAALGEQTEITKFSQQEYERLQNEKVLCRVCFEGEINVVLLPCRHRVLCSTCSEKCKKCPICRDSIAERLPVYDV

SEQ ID NO: 49463 - protein, 104 aa, Glycine max
  Clone ID: 700650714_FLI.pep
HLVASALNWHKEGSNKNVGKRQLKLNKLKLKGTWVLLPWSSSCCSKGTQLYYHNTPGAHTGMSCSTSDRKTCRACGIGSGYISSSIVMGILVISDSKKRIRDAP

SEQ ID NO: 49464 - protein, 498 aa, Glycine max
  Clone ID: 700651482_FLI.pep
RTVRVECFMKESSPNIWVRPISGLTMVVDLELMKIVQYHDGGIIPVPTADNTEYRFSHQNPPFGPRQHSLATHQPQGPGFQINGHSISWANWKFHIGFDPRAGIVISLASIYDLEKHKSRRVLYKGYISELFVPYQDPTDDFYYKTFFDAGEFGFGLSTVSLVPNRDCPSNAQFLDTYVHAADGTPLLIKNAICVFEQYGSIMWRHTETGIPNESFEETRTEVNLVVRTVVTVGNYDNIIDWEFKTSGSIKPSIALSGILEIKGVDIKHKSEIKSDQHGILVSANSIGVYHDHFYIYHLDLDIDGVANSFEKTSLKTVRVTDGSSKRKSYWTTEVETAKTENDAKIILGLSPGELSVVNPNKKTSVGNDVGYRLIPAIPAHPLLTDDDYPQIRGAFTNFNVWVTPYNRTEKWAGGLYVDHSHGDDTLAVWTKKNRDINNKDIVLWHVVGIHHVPAQEDFPIMPLLSTAFELRPTNFFERNPVLKTLSPPDVQWPGCPK

SEQ ID NO: 49465 - protein, 637 aa, Glycine max
  Clone ID: 700653251_FLI.pep
GGFVGLEQSERDQKMASSACTKPIFPSAFTVSKSKLSRHVHVSFTSPKPIYYHYRKLSHASQRSLVVNSVLKTVDPTQTSLRRSNSEDVGSLGEKPTILVSEKLGEAGLQVLRGVGHVECAYELSQEELCTKISCCDALIVRSGTKVTREVFEAGKGRLKVVGRAGVGIDNVDLQAATEFGCLVVNAPTANTIAAAEHGIALLAAMARNVAQADASTKAGKWQRSKYVGVSMVGKTLAVMGFGKVGSEVARRAKGLGMHVIAHDPYAPADRARAIGVDLVSFDHAIATADFISLHMPLTPTTNKIFNDNTFAKMKKGVRIVNVARGGVIDEDALVRALDTGIVAQAALDVFTEEPPSKDSKLVQHENVTVTPHLGASTKEAQEGVAIEIAEAVLGALKGELSATAVNAPMVAPEVLSELAPYVVLAEKLGRLAVQLVCGGSGIKSVKIVYRSARGPDDLDTRLLRAMVTKGLIEPISNTIVNLVNADFIAKQKGLRISEERVVVDSSPEMPVDSIQVQISSVDSKFASAVSESGQISIDGRVKFGEPHLTCVGSFDVDVSLEGNLILCRQVDQPGMIGRVGNILGEQNVNVSFMSVGRTSRRNKAIMAIGVDEEPNKEALDNIGAVPAIEEFVFLKL

SEQ ID NO: 49466 - protein, 437 aa, Glycine max
  Clone ID: 700730662_FLI.pep
SKCHFILPYLLDSRVSTMALFLLYESASGYSLFEVHGVDEIGQNTEAVRNSVSDLNRFGKVVKLRSFNPFTSALDALKQCNAVSEGILTDELRTVLETNLPKVKEGKKSKFSLGVSDPKIGSQISEVTKIPCQSNEFVSELLRGVRFHFDTFVGDLKSGDLEKAQLGLGHSYSRAKVKFNVNRVDNMVIQAIFLLDTLDKDINSFSMRVREWYSWHFPELVKIVNDNYLYAKVAKFIEDKAKLAEDTIPGLTDIVGDEDKAKEIVEAAKASMGQDLSPVDLINVHQFAQRVMDLSEYRKNLYDYLVAKMNDIAPNLATLIGEVVGARLISHAGSLTNLAKCPSSTLQILGAEKALFRALKTRGNTPKYGLIFHSSFIGRASAKNKGRMARYLANKCSIASRIDCFAERGTTVFGEKLREQVEERLTFMTRELPLART

SEQ ID NO: 49467 - protein, 340 aa, Glycine max
  Clone ID: 700977657_FLI.pep
PLYNGSTCATIKESQNCIINGRHDSTYLRWRWKPSECHLPRFEPNTFLQLIRNKHVAFVGDSMARNQIESLLCLLATASTPKRVHHKGSRRWHFDSHNASLSLYWSPFLVQGVQRTSTGPQHNVMHLDLVNEKWARDVDQMDLIVLSVGNWFLVPSVYYEGGKVLGCLKCHGLKYSDVSFYGSLRKALRIALNSIIERKVGKGNGVDVILRTFSPSHFEGDWDKGGSCSKTKPYRKGEMQLGEVDAEIRRIEMEEVENAKAKVKQFGGFRLEALDVTKLALLRPDGHPGAYMNPFPFANGVPKRVQSDCVHWCLPGPIDSWNEIFLEMMKKWEKQPRSQQ

SEQ ID NO: 49468 - protein, 506 aa, Glycine max
  Clone ID: 700978672_FLI.pep
QLQEKAMEAQSHHRLNVLFLPYPTPGHLLPMVDTARLFAKHGVSVTILTTPAIASTFQNAIDSDFNCGYHIRTQVVPFPSAQVGLIDGLENMKDATTLEMLVKIGYGLSTLQDEIELRFQDLQPDCIVTDMMYPWTVESAEKLGIPRIFFYSSSYFSNCASHFIRKHRPHESLVSDSHKFTIPGLPHRIEMTPSQLADWIRSKTRATAYLEPTFESESRSYGAHYNSFHELESEYEQLHKNTLGIKSWNIGPVSAWVNKDDGEKANRGHKEDLAEEPELLNWLNSKQNESVLYVSFGSLTRLPHAQLVELAHGLEHSGHSFIWVIRKKDENGDSFLQEFEQKMKESKNGYIIWNWAPQLLILDHPAIGGIVTHCGWNSILESVSAGLPMITWPMFAEQFFNEKLLVDVLKIGVPVGAKENKLWASMGKEEVMGREEIAKAVVQFMAKEETKGLLLRRPQVETETRKTRIRLFIMSFSSAIRSYATFYFAYLIDFGCYTFSSFGSLV

SEQ ID NO: 49469 - protein, 377 aa, Glycine max
  Clone ID: 700978815_FLI.pep
REMLFQVGGQGSRPTFFEMAAAQQLPASLRAALTYSIGVLALRRPFLHKLLDFEDESFALLMLVLESHTLRTTDASFSESLYGLRRRPANIALKNDDATTTTTSSSALRRRQRVLSVVFLVVLPYLKSKLHSIYNREREARLQATLWGDETQGFDDGRGDYSPVSTLTSDAAASISMRIANRVQRIVGFCYPWLHASTEGLQFAYQLLYLLDATGYYSLALHALGIHVCRATGQELMDTSSRISKMRNRERERLRGPQWLKTLQGALLSCSYTVLDYAQTGLIAAVFFFKMMEWWYQSAEERMSAPTVYPPPPPPPPPKVAKEGIPLPPDRTICPLCSQKRVNPSVVSVSGFVFCYACIFKYITQVRALDILTVTNI

SEQ ID NO: 49470 - protein, 315 aa, Glycine max
  Clone ID: 700868256_FLI.pep
LMFSLQKREVGDAFNDSDPQWLVPGLPDPVPSSVLPDAFFNKQGGYATYYKLAQRFKDSKGIIVNSFSELEQYAIDALCDGQIQTPPIYAVGPLINLKGQPNQNLDQAQHDRILKWLDEQPDSSVVFLCFGSRGSFEPSQTREIALALQHSGVRFLWSMLSPPTKDNEERILPEGFLEWTEGRGMLCEWAPQVEILAHKALVGFVSHCGWNSILESMWFGVPILTWPIYAEQQLNAYRMVREFGLAVELKVDYRRGSDLVMEEEIEKGLKQLMDRDNAVHKKVKQMKEMARKAILNGGSSFISVGELIDVMTGSI

SEQ ID NO: 49471 - protein, 547 aa, Glycine max
  Clone ID: 701012620_FLI.pep
VTPNKAHTPTSFPFTMSISSTSNSLIPPKSLIPQSHPLIPNIRPGLRPKPGPSPSILAVHAAEPAKNPVVTDKPKPQAQQSASPAAARATKWAVDSWKSKKALQLPEYPNQEDLEAVLRTLDAFPPIVFAGEARTLEEHLAEAAMGNAFLLQGGDCAESFKEFNANNIRDTFRIILQMSVVMMFGGQMPVIKVGRMAGQFAKPRSDSFEEKNGVKLPSYRGDNINGDSFDEKSRIPDPQRMIRAYCQAAATLNLLRAFATGGYAAMQRVTQWNLDFTDHSEQGDRYRELANRVDEALGFMAAAGLTVDHPIMRTTEFWTSHECLLLPYEQSLTRLDSTSGLYYDCSAHMLWVGERTRQLDGAHVEFLRGVANPLGIKVSDKMDPNELVRLIEILNPQNKPGRITVITRMGAENMRVKLPHLIRAVRRAGQIVTWVSDPMHGNTIKAPCGLKTRPFDFIRAEVRAFFDVHEQEGSHPGGVHLEMTGQNVTECIGGSRTVTFDDLSSRYHTHCDPRLNASQSLELAFIIAERLRKSRIRSQQPLAPLGV

SEQ ID NO: 49472 - protein, 288 aa, Glycine max
  Clone ID: 700836732_FLI.pep
SKAMATSKLKTQNVVVSLSLTLTLVLVLLTSKANSAETVSFSWNKFVPKQPNMILQGDAIVTSSGKLQLNKVDENGTPKPSSLGRALYSTPIHIWDKETGSVASFAASFNFTFYAPDTKRLADGLAFFLAPIDTKPQTHAGYLGLFNENESGDQVVAVEFDTFRNSWDPPNPHIGINVNSIRSIKTTSWDLANNKVAKVLITYDASTSLLVASLVYPSQRTSNILSDVVDLKTSLPEWVRIGFSAATGLDIPGESHDVLSWSFASNLPHASSNIDPLDLTSFVLHEAI

SEQ ID NO: 49473 - protein, 489 aa, Glycine max
  Clone ID: 700838706_FLI.pep
GLVRGEIKMEIIYQSHIDREIESLIERIHPPRVCIDNDSSRDCTVVKIDSANRHGILLEMVQVLTDLDPVISKSYISSDGGWLMDVFHVTDHDGNKLTDRGLVHYIQQTLCEARSNSKEISSDIELTSCNEPPRLVNLAIELTTANQHGLFSEMSAVLLGLGFNVTSATAWTHNDRVACIIHLEDAKKLGPINAERLAQVQPELRNVVKARDRNGEEERVRLRLRSFGAGRNHTERRLHQMMYADGDYERCRACHVGDRNGEKKKGCEETQVTVGRYEEKGYWVVNVRSRDRPKLLFDTVCVLTDMQYEVFHAAVSSNGSMADQEYFVRPKGSSNLDNESEKQKLSLCLIAAIERRVSHGLKVDIRAENTTGLLSKVTRVIRENGLSITKVQIGVESDEMAVGSFCVANSSGQEVNPNIAELVRRETGGSVVANYNSPYRVPKSLSSSKTMHETKSSTEVGQRFSIGSMLWSQLECLSNNFRPIRSHKL

SEQ ID NO: 49474 - protein, 95 aa, Glycine max
  Clone ID: 700892446_FLI.pep
AFKKHIYNSMAGIAYGISVLAVGAGEAPRRPTQAQTTTPNTHHNNNTTSEEFTYLNSGKQNIKGLTNQTGYVKGSANGAINFGTLTTSSSAQMQP

SEQ ID NO: 49475 - protein, 261 aa, Glycine max
  Clone ID: 700944410_FLI.pep
AAAAERERLMEGVPHPIPRTVEEVFTDFKGRRAGLIKALTTDVEKFYQQCDPEKENLCLYGFPNETWEVNLPVEEVPPELPEPALGINFARDGMQEKDWLSLVAVHSDSWLLAVAFYFGARFGFGKNERKRLFQMINDLPTIFELVTGSAKQSKDQPAAHNNGSKCKSSGKSHQSESQAKGMKMSAPPKEEDESGEEEEEDDEQGATCGACGDNYGTDEFWICCDMCERWFHGKCVKITPAKAEHIKQYKCPSCSNKRVRV

SEQ ID NO: 49476 - protein, 287 aa, Glycine max
  Clone ID: 700945449_FLI.pep
HLGIFTRLVLMAGIVVIFDFDSTIIECDSDNWVLDEFGLTEKFYQLLPNMLWNPLMDKMMNELHSQGKTIEDIVQVLNRTPMHPRIVPAIKAAYSLGCELKIVSDANIFFIETILKHHGVWNCFSEVTANPSYVNEEGRLRISPYHDYLKCSHGCNLCPPNMCKGMITERIQNSVDAAGKKFIYLGDGSGDFCPSLKLKDRDYLMPRKNFPLCDLVSENSKHIKAEVHAWRDGEELYDVLLHFIDKAIGEGNKNIISSTPIVSVDCKLGSISIEAHKPLPKAIPVPQ

SEQ ID NO: 49477 - protein, 538 aa, Glycine max
  Clone ID: 700896419_FLI.pep
FLHCHVSAVWRKSKQNRYSLPMAISDVPAAAGTTATTTSDSDLRQPSLRRRSSAGVLFDAARDSGSDNSLTGKITDDDNIKDHKPNNHAASDDNVGAAANDAGQEHRQPVADFKYAYRPSVPAHRRIKESPLSSDNIFRQSHAGLFNLCIVVLVAVNSRLIIENLMKYGWLIKYGFWFSSKSLRDWPLFMCCLSLAIFPLAAFVVERLAQQKCISEPVVVLLHLIISTVELCYPVLVILRCDSAFVSGVTLMLLTCIVWLKLVSYAHTNYDMRALTVSNEKGETLPNTLIMEYPYTVTFRSLAYFMVAPTLCYQTSYPRTPSVRKGWVFRQLVKLIIFTGVMGFIIEQYMNPIVQNSTHPLKGNLLYAIERILKLSVPNVYVWLCMFYCFFHLWLNILAELVRFGDREFYKDWWNAKTVEEYWRMWNMPVHKWMVRHIYFPCLRRGIPKGAASLIAFLVSAVFHELCIAVPCHMFKLWAFIGIMFQVPLVLITNYLQNKYRNSMVGNMIFWFIFCILGQPMSVLLYYHDLMNRKGEVD

SEQ ID NO: 49478 - protein, 406 aa, Glycine max
  Clone ID: 701146322_FLI.pep
NGEGKHDGSINGVRYFHAKSERSGSFVRAHNLNQGISLLESLESRYKSESTKDEDDDMFVLSTSNQRVSVQLLGKDKIHDKLSRLEELTSVSLSYMGISSPGIASHINNTVPNIKELDLTGNLLSEWKDVGTICEQLPALRTINLSDNLMSPYKSKLLLLKNIQVVVLNNTGVDWEQVELLRQSLTTIEELHVMGNSISRILPGSSSMVQGFDYLRLLNLEDNCIDEWKEIMKLSQLRCLEKLYLNNNCLKSVFYPDNGGHYESEVTCYKPFQNLRHLLLANNNISDLASIDSLNLFPNLVDIRLSDNPITDSGRGGVPRFVLIARLAKIQILNGSEVTPRERKDSEIRYVRLVVSRLHASPEEIKQHPRFYELEKIHGIEDERPSIGATVPQTISSGLLCMDYGC

SEQ ID NO: 49479 - protein, 275 aa, Glycine max
  Clone ID: 701147331_FLI.pep
LDRTMAAPRNVTATRDEEKGEEDDSPSAKKPKSERFPLNTWEFAVAVAVFFVFSTGLFCVYLSLPSAAYTNLKLPRTLSDLRLLKEHLSAYASNHPAQFILGYCSTYIFMQTFMIPGTIFMSLLAGALFGVVRGILLVVFNATAGASSCFFLSKLIGRPLVSWLWPEKLRFFQAEIAKRRDRLLNYMLFLRITPTLPNLFINLASPIVDVPFHIFFSATLIGLVPASYITVRAGLALGDLKSIKDLYDFKTLSVLFLIGFVSIAPTLLKRKRVYE

SEQ ID NO: 49480 - protein, 179 aa, Glycine max
  Clone ID: 701043865_FLI.pep
SFHIIAPLRLVTGSRSAPTMMGAWLLAFRKLVNITRSSSESTQLTLNAGKGDCVLHMVSNIPEENFILRLPSYDKILTPVNGAYFLILMVLVFGGTWACCACRKKHRNEVPYQELEMALPESASATNVESAEGWDQDWDDDWDVNVAVKSPAALAGSISANGLTSRSSNKDGWENNWDD

SEQ ID NO: 49481 - protein, 331 aa, Glycine max
  Clone ID: 701205658_FLI.pep
KLAKMAEVRGRDTWTEELASLIEDSGVRYGGDSPPTSFEVHAPQSESGESLKEQALGFVMAWCEILMELGRGFRDILRQNLINEDSYVVRKFGGPCSKVSKRLRFLNDFLPEDRDPFHAWSVVFFVFILALAAISVDPNREAVAPVVKVRQHPPSASRVLLPDGRYMAYHEQGVLADTARFSLVAPHSFLSSRLAGLPGVKASLLEEYGIRLVTYDLPGFGESDPHPNRNLNSSAMDVLHLVNAVNVTDKFWILCHSSGCIHAWASLRYIPEKIAGAAMLAPMINPYDPHMTKEEMKRTWEKWLPRRKMMYSLARRFPKLLSFFLSEKLLA

SEQ ID NO: 49482 - protein, 489 aa, Glycine max
  Clone ID: 700791963_FLI.pep
SLTSSSHLPPLIPFPLSPMELIYLLYLVPTLYACFLIWKMLDERRDRECYILNYQCYKPPNDRMLGTEFCGKLIRRTENLGPSEYRFLLKAIVSSGIGEQTYAPRNIFEGREATPTLRDSIGEMEEFFHDSIGKLLAKSNVSPSEIDVLVVNISMLATVPSLSSRIINHYKMRHDVKVYNLTGMGCSASLISMDIVKCIFKTQRNKLALLITSESLSPNWYTGSDRSMILANCLFRSGGCAILLTNKRSLKDKAMLRLKCLVRTHHGAREEAYGCCTQQEDDQGRLGFHLGKTLPKAATRAFVDNLRVIAPKILPIRELLRFLFVSTIKKINKSSNAPKSVASTGATKSPLNFRTGVDHFCLHTGGKAVIDGIGMSLDLSEYDLEPARMTLHRFGNTSASSLWYVLSYMEAKKRLKKGDTVFMISFGAGFKCNSCLWEVMKDLGEANVWDDCIDEYPPESLANPFMEAYGWINEVDDPYTYEHLPEFLK

SEQ ID NO: 49483 - protein, 550 aa, Glycine max
  Clone ID: 700745847_FLI.pep
LYKMGDKHQQHHQDDSSDFTSEDEGTEDYRRGGYHAVRIGDAFSAGRYVVQSKLGWGHFSTVWLAWDTKHSRYVALKVQKSAQHYTEAAMDEITILQQIAEGDPDDKKCVVKLLDHFKHSGPNGQHVCMVFEYLGDNLLTLIKYSDYRGLPIAMVKEICFHILAGLDYLHQQLSIIHTDLKPENILLLSTIDPSKDPRKSGAPLILPNSKDKMAMESAGMKDTKMLNGDLVKNHKKKIKRKAKQAAHGCVEKEASEGVEGNAETSGAVESSPNASSAREQTSSSAGTSQLSDADGTKLKEQGNKRGSRSMRQKLLASVDLKCKLVDFGNACWTYKQFTNDIQTRQYRCPEVILGSKYSTSADLWSFACICFELATGDVLFDPHSGDNFDRDEDHLALMMELLGMMPRKIALGGRYSRDFFNRYGDLRHIRRLRFWPLNKVLLEKYDLSEKDANDMTDFLVPILDFVPEKRPTAGQCLLHPWMNAGPRLLEPSVPSNHNPAAETSVSDQKRKDKDEREAMETGMGNIVINSDFKPLMHSPSKKVFQGRSQK

SEQ ID NO: 49484 - protein, 542 aa, Glycine max
  Clone ID: 700748186_FLI.pep
KMKRKRGHKKGKAKGSTNHGSSGADANKEETSGLEVDTPSSTGTGMDQQQHYNLANINPDGSVDKAIGRVKVKLKTPKILDSQPTSSDAPSPTQSDTERMEDSANSLPDMKLSTLSKRAASIKIKSSSNHTLSASTEITLPKERKNKQELDASLVVLRKVMKMDAAEPFNVPVNPEALGIPDYFDIINTPMDFGTICNNLEKNEKYMNSEDVFKDVQYVWDNCYKYNNKGDYILDLMRRVKKNFMKYWTAAGLYSEQSKGTKERTSAEDIALSGDGKAGKGGQLKQKTKKRHGRHHKHDCLCAICVLKRRRKEREENARIARSNFGSGGDKHANEFKHEESIQVESPGGEDSSSNIDESMGTDGDVDEDKGEVAKMEISEKQCSPSERKHVSIDVDNDDDNDDHGLEEGEEEENGEEEDEEEIEMNSQKGEMNETLKHGGTLEEKSNVGDATALHDEYRTKQQEGQSAAVQQQKKHKGSQDKQQKAKLLESLYSENHKLSSLCGILFPQNSQSVWSGPHSLIQKRNSARTSSIHAAIRTFMG

SEQ ID NO: 49485 - protein, 326 aa, Glycine max
  Clone ID: 700673225_FLI.pep
DFVQSFDMSMTQFAMVEELAFLVKDNLPCKHLVLTMEESLVNFLQDDDTSSDGILELEPMNSYNRLLLHRLAEIFGFAHESVGEGDDRHLILERCPDTSIPPVLVSDILWKYDDEPQSLVTSHQILRRSESSPVLQKNTASLSQSLEERKAAYLIARERIFSMKLEEVKEPGEQKPRSVPVVARRMIAHALGQRIHTKNQNDLASDSMKDGVLTDELNAHDKNMEESTLKKVSEESSHLRGNSNNSIRNTSSSNAASLNKRNDQTTVDKDLPEFSQERKQGLSVSKDYIKKEHLGAAKRMFAHALGVHSGKDGSVPRSRSGEIKKN

SEQ ID NO: 49486 - protein, 547 aa, Glycine max
  Clone ID: LIB3049-012-H5_FLI.pep
ETMELCTRTFTSFFLFNPSSSSNPLFLRANANAKTPFKFNSLKLSSFPPHIHLFQPFLSPHTSSPFTLSAASASSSSSSSSVAVGTEQDRLPAELNVTETAEPNSRVRLHVEVPSLVCEDCYKRVIAEFMKQAKIPGFRPGKKVPESILISYVGSQNVQKATIESILRRTLSHAMTSVTGRALQDSVRIVTKFSEMEETYSSLGSLRYDVLVDIAPEIKWIPDNNAYKNLKIVVEIDSDIDAHTASEQEFRRRYKSIGALKVVTDRGLQVGDVVVLDISATTIDQDESNVKSIPSAESKGFNFDTEYGEKVLPGFLDCVIGIQQGESKSFPLVFPETWNQENLRGVHAQFTVECKELFYRDLPELDDSIADKLLPGCTTVEQVKDLLLQKCQEVEQTAREQATDNAILDQVSKIVQVDIPQSLFEEQGRQLYGANLLEIQAKMKLNEQQLATLSSSKAVNEFLEHQKENITNLIKQSLAVGDIYRRENLQFATEDLVKEVENSIAEFKRQNQEYDEERVKGQVQEILEGAKVLEWLREHAEVQYITK

SEQ ID NO: 49487 - protein, 635 aa, Glycine max
  Clone ID: LIB3051-008-E8_FLI.pep
LDSAPMSLLPKTEQNDVPVVDIDSDENGVAAVAPAKNDASSHKTPSPQVELVQQETPASGSALSASDGLSRSFWKAGDYVVGPSSKPTPFQGHLEHARVHPKFLHSNATSHKWAFGAIAELVDNAVDEIQNGATFVKIDKFDVKKDNSPALCFLDDGGGMNPNAIRKCMSLGYSSKKSKTTIGQYGNGFKTSTMRLGADVIVFSRAMHSGRATQSVGLLSYTFLRRTGQDDVVVPMIDFDISGHWAEPIIYSSQDEWSANLKTILDWSPFTSKEELMLQFDDIGSHGTKVVIYNLWLNDEGIYELSFDDDAEDIMLRDEANHGAEKNLRKKTVQLQSHISYRLRFSLRAYVSMLYLRKFSNFSIILRGKLVDQFNIADDLIYSKVIPYKPQLAMATNEAIAETKTTIGFIKEAAEIKVTGFNVYHKNRLIKPFWKVVADGSSKGRCVVGVLEANFIEPAHDKQDFERSVLFIRLENKLKQMTMDYWRDHCHLIGYQPLNFKSQKNVVKEAHIRKSAQHSINPQNQLLADQQDTSLVAEHQSDLSQPIVGLAVIGMQGSSREQLGTMLETPVSVSPDEICAENIKLFERCEEYREKETELKQTVVDLEEELKQIKKKCDLLSSLLETKRKAKSVKG

SEQ ID NO: 49488 - protein, 510 aa, Glycine max
  Clone ID: LIB3051-034-G7_FLI.pep
NPTLLSCRAMSHSDSSKKKKQQQRSKHEGGGGEEESKDEGGLMIKPQSFTPPIDTSQWPILLKNYERLNVRTGHYTPIPSGYSPLKRPLAEYLKYGVLNLDKPANPSSHEVVAWIKRLLRVEKTGHSGTLDPKVTGNLIVCIDRATRLVKSQQGAGKEYVCIARLHSDVPDVSKVARALETLTGAVFQRPPLISAVKRQLRIRTIYESKLLEYDPDRHLVVFWISCEAGTYVRTMCVHLGLLLGVGSHMQELRRVRSGIMGEKDNMVSMHDVMDAQWVYDNYRDETYLRRVVMPLEILLTSYKRLVVKDSAVNAICYGAKFMIPGLLRFENDIDVGEEVVLMTTKGEAIALGIAEMTTAVMATCDHGVVAKIKRVVMDRDTYPRKWGLGPRASMKKRLISEGKLDKHGKPNEKTPQEWLRNLVLPTGGDSVIAGLAAAPEPEDDKIQKKEGDGEGKKRKKHESTDSPVAVPAKKVKVDEVEEVEKQEKVKVKKVDEETVEVEVEKKEKKK

SEQ ID NO: 49489 - protein, 453 aa, Glycine max
  Clone ID: LIB3092-013-G2_FLI.pep
TMSSLSLYANLSSLPSSLTIRSSSSKDTSLKQDWRTKSKPIPPGGTYPAKDHCSRCGLCDTYYIAHVKNACAFLGDGMSKIERLEPVVHGRGRKTDNLDETYLGVYEELLYARKLNPVEGAQWTGIVTTIAIEMLKSGMVEAVICVQSDPDDRFAPRPVLARTPEEVLAAKGVKPTLSPNLNTLALVEAAGVKRLLFCGVGCQVQALRSVEHHLNLDKLYVLGTNCVDNGTRQGLDKFLKAASQSPETVLHYEFMQDYKVHLKHLDGHIEEVPYFCLPANDLVDVIAPSCYSCFDYTNALADLVVGYMGVPKYSGIGMTQHPQYVTVRNERGREMLSLIENLLEITPTISTGDRRPFVMETVKADDEAKLGRGPSQPAPKFIGNLLAFILNLIGPKGLEFARYSLDYHTIRNYLHVNRMWGKERADRHMPTYAKKIVDLYNQNGQIEKMLSNK

SEQ ID NO: 49490 - protein, 241 aa, Glycine max
  Clone ID: LIB3092-016-A6_FLI.pep
LIWEGAKNMEKTSWACTVITQVCLCFALYIALNLGQPQTSDLYFISVKGGFRPFTQQLHLLKQMDKVAKAYNASFVVSSSELGEYDSLMQNATQHFPSLRLPWYTTYTTTTSSKTKGQEVGCFSKKITTSNRITSGVIGVDTELLKDYVLRGSLSGNKINQLHWLIKTLAANSSNWRIIVGYHSREPYSIFLNGNSVFKRELANGFLLHHVSSDQIVTNYINFAGEVVCTAVLQQKGREIM

SEQ ID NO: 49491 - protein, 496 aa, Glycine max
  Clone ID: 700563707_FLI.pep
GTVIHWHGIRQVGTPWADGTAAISQCAINPGETFQYRFTVDRPGTYFYHGHHGMQRSAGLYGSLIVDLPKGQNEPFPYDGEFNLLLSDLWHTSSHEQEVGLSSKPFKWIGEAQTLLINGRGQFNCSLASKFINTTLPQCQLKGGEECAPQILHVEPNKTYRIRIASTTALASLNLAISNHKLVVVEADGNYVTPFAVDDIDIYSGESYSVLLRTDQDPNKNYWLSIGVRGRKPNTPQGLTILNYKPISASVFPTFPPPITPLWNDFERSKAFTKKIIAKMGTPQPPKRSDRTIFLLNTQNRVDGFTKWAINNVSLTLPPTPYLGSIKFKIKNAFDKTPPPVTFPQDYDIFNPPVNPNASIGNGVYMFNLNEVVDVILQNANQLSGSGSEIHPWHLHGHDFWILGYGEGKFKSGDEKKFNLTHAPLRNTAVIFPYGWTALRFKADNPGVWAFHCHIEPHLHMGMGVIFAEAVQKVGKIPRDALTCGLTGKMLGNRHY

SEQ ID NO: 49492 - protein, 766 aa, Glycine max
  Clone ID: 700727869_FLI.pep
EAQEFGEMMEHVDEVNFALDGLRKGQPLRIRRASLVSLLTICATTHQRRLLRTQGMAKTIIDSILGLSLDDSPSNLAAATLFYVLTGDGQDDHLLESPGSIQFLMKLVKPIISSAIKDKAPKFGYKLLSLRQNDDMLKNTNTTGRLDSSSAEVFSRVQEILVNFKELKTCQNDSRVERPELCPKWLALLTMEKGCLSAISLDETSGAVRKAGGNFKEKLREHGGLDAVFEVTMNCHSDLENWMKDSSLSTKDLRNDKRIKSLTLLLKCLKIMENATFLSNGNQTHLLGMKRKLSPQGPPTSFTELIITVIKILSDLCLHRSASAASNDNKPYDPFSMTSHDSELDQLRDYKENETLSISSTGKYHGVERASSVKSSNASQINRILTCNRLESSLSISETPSTSTTDTYSLKTRVSSSMSGSCSGASKSSYCKTSTIQNSSGKNVRFMEGTPVVILDDSQDPFAFDEDDFAPSKWDLLSGKQKKSHSKKHLVANREFENECQSHTNVSQRELSNGDINCSSSDVGDEKDSSLLADCLLTAVKVLMNLTNDNPVGCRQIANYGGLETMSMLIAGHFPSFSSSSSFAQIKENGAGTTKDHQSDRHLTDHELDFLVAILGLLVNLVEKDGHNRSRLAAASVLLPSSVSLHQEVRKDVIQLLCSIFLANLGESEGAGEDKHLQLNDEAAVLQGEKEAEKMIVEAYSALLLAFLSTESKSIRAAIADNLPDQNLASLVPVLDRFVEFHLSLNMISPETHKAVSEVIESCRIR

SEQ ID NO: 49493 - protein, 777 aa, Glycine max
  Clone ID: 700755286_FLI.pep
LCLKMGKQVLNSFRPPVVFLLFFIVFSVVSCDEASKTFIFRVDSQSKPTIFPTHYHWYTSEFAQETSILHVYDTVFHGFSAVLTHQQVASISQHPSVLAVFEDRRRQLHTTRSPQFLGLRNQRGLWSESDYGSDVIIGVFDTGVWPERRSFSDLNLGPIPRRWKGACETGVRFSPKNCNRKLIGARFFSKGHEAGAGSGPLNPINDTVEFRSPRDADGHGTHTASTAAGRYAFQASMSGYAAGIAKGVAPKARLAAYKVCWKNSGCFDSDILAAFDAAVNDGVDVISISIGGGDGIASPYYLDPIAIGSYGAVSRGVFVSSSAGNDGPSGMSVTNLAPWLTTVGAGTIDRDFPSQVILGDGRRLSGVSLYAGAALKGKMYQLVYPGKSGILGDSLCMENSLDPNMVKGKIVICDRGSSPRVAKGLVVKKAGGVGMILANGISNGEGLVGDAHLLPACAVGANEGDVIKKYISSSTNPTATLDFKGTILGIKPAPVIASFSARGPNGLNPQILKPDFIAPGVNILAAWTQAVGPTGLDSDTRRTEFNILSGTSMACPHVSGAAALLKSAHPDWSPAALRSAMMTTATVLDNRNQIMTDEATGNSSTPYDFGAGHLNLGRAMDPGLVYDITNNDYVNFLCGIGYGPKVIQVITRAPASCPVRRPAPENLNYPSFVAMFPASSKGVASKTFIRTVTNVGPANSVYRVSVEAPASGVSVTVKPSRLVFSEAVKKRSYVVTVAGDTRKLKMGPSGAVFGSLTWTDGKHVVRSPIVVTQIEPL

SEQ ID NO: 49494 - protein, 781 aa, Glycine max
  Clone ID: 700834118_FLI.pep
RRRSHREPVSYSLSPTRKMASHIVGYPRMGPKRELKFALESFWDGKSSAEDLQKVAADLRSSIWKQMAGAGIKYIPSNTFSFYDQLLDATATLGAVPPRYGWTGGEIGFDTYFSMARGNATVPAMEMTKWFDTNYHFIVPELGPDVNFTYASHKAVDEYKEAKALGVDTIPVLVGPVTYLLLSKPAKGVEKSFSLLSLLPKVLAVYKEVIADLKAAGASWIQFDEPTLVLDLESHKLQAFTDAYAELAPALSDLNVLVETYFADIPAEAYKTLTSLNGVTAYGFDLVRGTHTLDLIKGGFPSGKYLFAGVVDGRNIWANDLAASLTTLQGLEGIVGKDKLVVSTSSSLLHTAVDLVNETKLDDEIKSWLAFAAQKIVEVNALAKALSGNKDVAFFSANAAAQASRKSSPRVTNEAVQKAAAALKGSDHRRATNVSARLDAQQKKLNLPILPTTTIGSFPQTVELRRVRREFKANKISEEEYVKSIKEEIRKVVELQEELDIDVLVHGEPERNDMVEYFGEQLSGFAFTVNGWVQSYGSRCVKPPIIYGDVSRPKPMTVFWSSLAQSFTKRPMKGMLTGPVTILNWSFVRNDQPRSETTYQIALAIKDEVEDLEKAGITVIQIDEAALREGLPLRKSEQAHYLDWAVHAFRITNVGVQDTTQIHTHMCYSNFNDIIHSIIDMDADVITIENSRSDEKLLSVFREGVKYGAGIGPGVYDIHSPRIPPTEEIADRINKMLAVLEKNILWVNPDCGLKTRKYTEVKPALTNMVAAAKLIRNELAK

SEQ ID NO: 49495 - protein, 559 aa, Glycine max
  Clone ID: 701004047_FLI.pep
IFDSFGERIFRCDYYVFFFVQQAMEVSVIGSSQAKLGASELASREVGFCNLKNNLRVLNDRVSFGRNNIRWEKAGISFTLRALQTEPVREEKKPSGIGTRSKTVDGVRLFVGLPLDAVSYDCKSINHARAIAAGLKALKLLGVEGVELPIWWGIVEKDAMGQYDWSGYLAIAEMVQKVGLKLHVSLCFHGSKKPNIPLPKWVSQIGESQPSIFFTDKSGQHYKECLSLAVDNLPVLDGKTPVQVYQSFCESFKSSFSPFMGSTIMSISMGLGPDGELRYPSHPQLLSNGKTQGAGEFQCYDQNMLSFLKQHAEASGNPLWGLGGPHDAPTYDQPPYNGFFNDGASWESTYGDFFLSWYSNQLIAHGDCLLSLASSTFGDSGVTIYGKLPLMHSWYGTRSHPSELTAGFYNTANKDGYEPVAQMFARNSCKIILPGMDLSDANQPEENHSSPELLLAQVMAACKKYEVKVSGQNSSESGVPGGFEQIKKNLSGDNVLDLFTYHRMGASFFSPEHFPLFTEFVRSLKQPELHSDDLPAKEEEGAESAMDMSHESSVSMQAA

SEQ ID NO: 49496 - protein, 172 aa, Glycine max
  Clone ID: 701006284_FLI.pep
SMGNTTSCSCICISNGVISIGNILKKRRKAKKTAMLLDSDGNTREIKLPIKSGELMIEEFGHVVTPVDEIRRTGRVSALLADEELVAGKVYLLLPVNRINSKASEFEMAIAEKQSGHTKSKRGNNMAKVSPSLISRSNERDEENQVTVSVFPVCPRFGNQVRWNPVLDPIVE

SEQ ID NO: 49497 - protein, 503 aa, Glycine max
  Clone ID: 700954648_FLI.pep
CHTSFFSTHTYIPRKIKQRFKKKMGSELEAPIHVLMVSYPAQGHINPLLRLGKCLAAKGLFVTFTTSETAGKNMRTANNITDKSVIPVGDGFLKFDFFEDGMADDDDGPKKINLGDFSAQLELFGKQYVSQMVKKHAEENHPFSCIINNPFVPWVCDVAAEHGIPSAMLWIQSSAVFTAYYSYFHKLVSFPSDSDPYVDVQLPSVVLKHNEVPDFLHPFSPYPFLGTLILEQFKNLSKPFCVLVDSFEELEHDYINYLTKFVPIRPIGPLFKTPIATGTSEIRGDFMKSDDCIEWLNSRAPASVVYISFGSIVYLPQEQVTEIAHGLTNSHASFLWVLKPPPKNIGVPPHVLPDGFFEETRDKGKVVQWSPQEEVLAHPSVACFLTHCGWNSSMEALTLGVPMLTFPAWGDQVTNAKFLVDVFGVGIKLGYGQAEKKVVSREEVKKCLLEATEGPKADELKQNALKWKKDAETAVAVGGSSARNLDAFVKEIKKRGAVGVSGR

SEQ ID NO: 49498 - protein, 343 aa, Glycine max
  Clone ID: 701038150_FLI.pep
TPHRNIPFFSVSISGSVVTDGMATSNGFVDGTPSESALIFLGTGCSSMVPNLMCLLQPSDPPCPVCVQSLSIPPERNPNYRCNTSLLIDYGAAAANGGDRKYILIDVGKTFRETVLRWFVAHRIPRIDSIILTHEHADAVLGLDDIRAVQAFSPTNDIDPTPIYLSQHSMDSIAEKFPYLVQKKRKEGAEIRRVAQIDWNIIADDCNQQFFASGLKFTPLPVMHGEDYICLGFLFGEKNRVAYISDVSRFPASTEYVISKSGAGQLDLLILDSLYRTGSHNVHLCFPQTLETVKRLCPKQTLLIGMTHEFDHHKDNEFLMEWSRREGIPVKLAHDGLRVPINL

SEQ ID NO: 49499 - protein, 375 aa, Glycine max
  Clone ID: 701154338_FLI.pep
ALSVTGESQKPKKGKMALWMEKGSEPLTETEKADLEAIAALKESAAFEFKEKGNQYVKMGKKHYSDAIDYYTRAIDQKALSDSETSILFANRAHVNLLLGNLRRALTDSNEALKLCPSNIKAIYRAAKASLSLNMLAEAREYCLKGLQFDPNNEDLKKLDRQIGLKISEKEKHEAEASKAVAETKKLVSAIENRGLKIGKAMYLELTGLRKPVLDKSNILHWPVLLLYAEVMSSDFIEDFCETDMFSVHLDMIFSEDQPLSWDVENNYKREFIELYYETGSGLCLSKEKLLHCLLEGTAAAHREGVGDEEKDTVEDYKQHMGSPKWIKVNERRTLHDVLKEPNFIIPGIPVFYVVSKRSSFYGKFKAGKWVPPSI

SEQ ID NO: 49500 - protein, 626 aa, Glycine max; identical to SEQ ID NO: 47298
  Clone ID: 701202701_FLI.pep

SEQ ID NO: 49501 - protein, 336 aa, Glycine max
  Clone ID: 701130344_FLI.pep
CWFLHTSWISLCCLFGCYSMVVERARGESQSTSGSLQSLCWGSSAFGGIVSSYFSGSLLDAYGVRFVFGVTSLLPLITSVVAVLVKEQPMIGTARGLNLLFSGPEFLESSKQRIIQLWGSVRQRSVFLPTLFIFLWQATPQSDSAMFYFTTNSLGFTPEFLGRVKLVTSIASLLGVGLYNGFLKNVPLRKVFFATTLLGSTLGMTQVFLVTGLNRKFGISDEWFAIGDSLILTVLSQASFMPVLVLAARLCPEGMEATLFATLMSVSNGGSVVGGLLGAGLTQLFGITKDRFDNLAALIILCNLSSLLPLPLLGLLPGDNPDMNEEDNSDIEMKCN

SEQ ID NO: 49502 - protein, 472 aa, Glycine max
  Clone ID: 701134260_FLI.pep
QQQFNTSKMVHSLLLLLLLLTLTATSAQHDGPSITATMEQFSGYKIHEPHSFQPSSLSVDAQALQNQIDELAAFSDSPAPSVTRVLYTDKDVLGRRYVKTQMELAGLSVREDAVGNIFGRWDGLEPELAAVATGSHIDAIPYSGKYDGVVGVLGAIEAIRVLKRSGFKPRRPLEVISFTSEEPTRFGIGCLGSRLLAGSEDLANSLKTSTDIQNISFLDAAGSAGYSKNEDDLSSVFLKKGTYSAFVELHIEQGPILEDEGISIGIVTAIAAPASLTVEFEGNGGHAGAALMPNRNDAGLAASELALAVERHVLDSGSIDTVGTVGILELHPGAINSIPSKSHLEIDTRDIDEERRNKVVEKIHQSAIKITKTRGVKLSDFRVINQDPPAISDEAVIKAVETATKELNLTSKLMISRAYHDSLFMARLSPMGMIFIPCYKGYSHKPEEFATIEDMSNGVKVLALTLAKLSSQ

SEQ ID NO: 49503 - protein, 199 aa, Glycine max
  Clone ID: LIB3028-023-C3_FLI.pep
TNGEFPISSFFSSMSSFNPFSPPPPTPYLTNLGFGYSIAIALGVLFLLSTLILSSYLCCRTLRHRNNNRHTPRNNTSDGIVLPRVIFVAEDDDDDATRQNDAVTGLDQAVINSYPKFPYVKEGDYDSTCSICLCEYKDSEMLRMMPECRHYFHLCCLDPWLKLNGSCPVCRNSPMPTPLSTPLQEVVPLSQYADARARR

SEQ ID NO: 49504 - protein, 448 aa, Glycine max
  Clone ID: LIB3039-013-F6_FLI.pep
LMLTMASSSCSAATIHFILLSISLFSVSSLPLPDESTSKPKKIFFLPIKIDAATNMFYTTIGIGTPQHSTNLVIDLGGENLWHDCSNRRYNSSSKRKIVCKSKKCPEGAACVSTGCIGPYKPGCAISDCTITVSNPLAQFSSSYTMVEDTIFLSHTYIPGFLAGCVDLDDGLSGNALQGLPRTSKGIIGFSHSELALPSQLVLSNKLIPKFSLCFPSSNNLKGFGNIFIGAGGGHPQVESKFLQTTPLVVNPVATGAVSIYGAPSIEYFIDVKAIKIDGHVLNLNSSLLSIDKKGNGGTKISTMTPWTELHSSLYKPFVQEFINKAEGRRMKRVAPVPPFDACFDTSTIRNSITGLAVPSIDLVLPGGAQWTIYGANSMTVMTSKNVACLAFVDGGMKPKEMHSIQLEASVVIGGHQLEDNLLVIDMASSKLSFSSSLLLRNATCSHV

SEQ ID NO: 49505 - protein, 484 aa, Glycine max
  Clone ID: LIB3051-077-E3_FLI.pep
QDHLGPAVLHELEKFPVHSLGLPSLLSDPSAKTPEEALVHIFGESRRTTPSILYLPQFDVWWETAHEQLRAVLLTLLEELPSDLPILLLGTSSVALSEVEEVPTSIFPHRSVYEVNMPCAKDRTLFFNVLIEAAMSILLEGINKKSQDTGCLPELPKAPKLASGPKVSELKAKVEAEQHALRRLRMCLRDVCNRILYDKRFNAFHYPVTDEDAPNYRSIIQNPMDVATILHHVDNGDYITSAAFLQDINLIVSNAKAYNGEDYNGARIVSRACELRDAVHGMLSQMDPALVAYCEKIASQGGPVQLSDELGDSTFPATPVVLLGQSTRMSARLRHVQPEVNMNQSYEVLKRTKKIAEVHAEDKSQEDSVPPKSSQEHQANDTNSERLENVSIEGDLHGTCTNNLADGNSPDDVTMLDGEFSGEVESVKQLFVKRSENYSIPQLERLYTRVMKGVFETKNKGVNGDLKSSVLKFLLNFVEDDANF

SEQ ID NO: 49506 - protein, 299 aa, Glycine max
  Clone ID: LIB3106-021-C9_FLI.pep
VQPIPSKNNARITQNRKLCLLRRGFLSSLCSCLLRFDLSNDGINFGFLQLTQTLLLSHHRNFYVLPSTLNNFKQCANSQLDSLLARSVLIVLLQELPNRIRVPPGGVRLPRRERARGIRLVEGGRVSVGIKPDNQSRKPKGPHAAALRVLLLEPRNVPRYVLNRDGILHGEPVTLALHTCPVYEHACVGLQPRAGQRNVVVQIHYLPHRPGVLEFGGGFLLDAEDNIVGAADADGGVALADGFEGVLDLEEMAVRGEHGDCSVVPSHSDCDLCFFLLLSFDSKLSLSLSLVKPFVFTLL

SEQ ID NO: 49507 - protein, 557 aa, Glycine max
  Clone ID: 700986164_FLI.pep
FFVLGRGCEVKTMGVEKLSLLSTTNLAVLAQANNKCSSRKHVCWRSSTTPFHLQRKPISWSVLCGFMLFGLGLISLLTGHMVSDLEWYSHRRSLYSTMDGSYRAPIDVWKSQYSKYYYGCSVRGRAYAPAVPEWMSNGYLLIGTSGGLNQQRTGITDAVVVARILNATLVVPELDHHSYWKDDSDFIHIFDVDWFISYLAKDVTIVKRVPDKFMRSMEKPPYTMRVPRKSEPDYYLDQVLPILLRRQVVQLTKFDYRLANNLDNELQKLRCRVNFHALRFTKPIQELGQIIVMRMQKMARRFIAVHLRFEPDMLAFSGCYFGGGEKERRELGEIRKRWTTLPDLSPDGERKRGKCPLTPHEVGLMLQALGFSKDTYLYVASGEVYGGEETMQPLRDLFPNIYTKEMLAEEELKPFLPFSSRLAAIDYIVCDESDVFVTNNNGNMAKILAGRRRYMGHKRTIRPNAKKLSTILAGRHQMDWDTFAKKVKSCQRGFMGEPDEMRPGRGEFHEFPSSCVCKRPYVDEELSKEVYRSPKLVAINLTAKAYSSSNGIRRGRT

SEQ ID NO: 49508 - protein, 313 aa, Glycine max
  Clone ID: 701002452_FLI.pep
VAHCVHVCSRTKKLDLLYAMLDTEDHCMLIQRCPNLEVLETRNVIGDRGLEVLGRCCKRLKRLRIERGDDDQGMEDEEGTVSHRGLIALSQGCSELEYMAVYVSDITNASLEHIGTHLKNLCDFRLVLLDHEEKITDLPLDNGVRALLRGCDKLRRFALYLRRGGLTDVGLGYIGQYSPNVRWMLLGYVGESDAGLLEFAKGCPSLQKLEMRGCLFFSERALAVAATQLTSLRYLWVQGYGVSPSGRDLLVMARPFWNIELIPSRKVATNTNPDETVVVEHPAHILAYYSLAGQRSDFPDTVVPLDTATCVDT

SEQ ID NO: 49509 - protein, 459 aa, Glycine max
  Clone ID: 700842658_FLI.pep
LTHQIAMAAQKRSFPDAPNDNNRHAKHHHEEAKTEEEEEEEEEEAQQQQQHDEEEEEEDNNYKSDDSPPEDKSEYVFVELLEIRKEVQCPICLGIIKKTRTVMECLHRVCRECIDKSMRLGNNECPACRTHCASRRSLRDDPNYDALIAALYPNIEKYEQEELEFREEDKNRNKQASIAKVVQRQSEALVKRRRDTPGSFVTRSQRNQRNVLSRRQNQGMDNQGSEDNEEENDNNEKDSSSTDERCTELRQRRRKRRTRGRPSQPSSSTASPDGGCIESDMDIRISSRLVSKPQKLTWGRGGFRSHTRHGSGNGSNSKSSRSSRLAKLVDYLHSLNENTDELDVHLILLSLDKQITPSLQQPHLCCRPTLSVKHLCEYVAHQTPLLLEEVEILAVKGCCSTVCDKSFDETSSSDELTTLVIDPSKDELETLQGHESLAGIKSKCISKREHLILAYRRKE

SEQ ID NO: 49510 - protein, 597 aa, Glycine max
  Clone ID: 700966883_FLI.pep
HKLPLKHSTSMADPNSNPNHSNAHVNRSRHYTTHVTFRLLCHASRVGAIIGKSGVLIKSLQEATGAKIRIVDAPPDSPDRVILVSAPSVTEDGELSTAQEALLKVFDRVLDVAAGTEVGDLVVSCRLLAETSQVGAVIGKAGKVVEKIRMDTGCKIRVLNEGLPAGTAPSDEIVEIEGQLTSVKKALIAVSHRLQDCPPPDRTKMTGSRHYEVVQSETFSVPLESLTNLHIDHHLQRSSTLSTLSNRSNGNASGAHKLSAEVNRVSALDPKAYQQEVTFRIICSNDRVGAVIGKGGSIVRALQNESGAIISVGPSLVECEDRLVTITASENPESTYSPAQKAVVLVFSKSVEAGVEKGLELGSKKEPYVTARLVVPSNQVGCLLGKGGAIVSEMRKATGANIRVIGNDQVPMCVSDNDQLVQISGVFSNVQAAIHNATGRLRDHLFVSTQNSGGARSLSSVLAGGQPTLAISHSLNRHSLPGLQAPQTVAGINSRGTNGVSRGLISRKGGLELISGSKTAIVTNTTVQIVVPDDVIGSVYGENGSNLARLRQISGAKVIVHEPRPGTSDRTIIISGTPDETRAAQSLLQAFILAGSS

SEQ ID NO: 49511 - protein, 275 aa, Zea mays
  Clone ID: LIB4764-009-B7_FLI.pep
EAGRDTCPPPHSDPRPRRSETRAPAPRQAEAASGTGSGCLPPPASAHPTTAPPPQSGPVPSNSVVPRIDCARARARRFAVFDHPQATYIARREFRPASSSPAAVSERRRSMDLKDGERRGAAGPEPGPLSRQGSIYSLTFDEFQNTLGGTGGGLGKDFGSMNMDELLRSIWTAEESQAMASASASAAGAAGDGGAALQRQGSLTLPRTLSVKTVDEVWRDFAREGTAGGPESQPNRQPTLGEMTLEDFLVRAGVVRDNPAAAAAVPAQPVATRPS

SEQ ID NO: 49512 - protein, 273 aa, Zea mays
  Clone ID: LIB4765-005-A4_FLI.pep
YISPSEPSPRWIPALRAQVQRKLSREHRRRHHLCVCGDDTTPIMAAARTRSLLAAAFLALAAVPAVLCQAPGPAAAAPPSKGPPNVTAILEKGGQYTTFMRLMKSTQQDTQLNGQLNNSFGSGYTVFAPTDSAFSSLKPGTLNKLSQQEQVSLVQYHVLPQFYSLDSFETASNPVRTQASGSDGPYTLNITADSSGQANVSTGLVATRVGQALRAQQPLAVYSVDQVLLANDLFGVKPPASAPPAARKPAKGGPSPRRPPPARLTRRPPARPS

SEQ ID NO: 49513 - protein, 389 aa, Zea mays
  Clone ID: LIB4828-010-E1_FLI.pep
SRPAGVHPLFQVRRGAPISQELSIRTAMHQHEILAIMRLSSLLLVVAALSARAAAQQVPPVGGSALKPDYYSQSCPRAERIIAEVMQTKQMANPTTAAGMLRVFFHDCFVTGCDASVLIASTQFQKSEHDAEINHSLPGDAFDAVVRAKLALELECPGVVSCADILALASGVLVTMTGGPRYPIPLGRKDSLSSSPTAPDVELPHANFTVDRLIQMFGGKGFTVQELVALSGAHTLGFSHCKEFADRLYNFRSQGGKPEPFDPSMNPSYARGLQDVCKDYLKDPPIAAFNDIMTPGKFDNMYFVNLERGLGLLSTDEELWTDPRTKPLVQLYASNPTAFFTDFGRAMEKLSLFGVKTGADGEVRRRCDAYNSGPDVGGAMPMAMPMPKM

SEQ ID NO: 49514 - protein, 177 aa, Zea mays
  Clone ID: LIB4862-001-D7_FLI.pep
THFPQTQGARAATAAAAMSGGIARGRLAEERKAWRKNHPHGFVARPETLADGSANLMVWSCTIPGKQGTDWESGYYPLTLHFSEDYPSKPPKCKFPQGFFHPNVYPSGTVCLSILNEDSGWRPAITVKQILVGIQDLLDQPNPADPAPTDGYHLFIQDPTEYKRRVRLQAKQYPALV

SEQ ID NO: 49515 - protein, 230 aa, Zea mays
  Clone ID: LIB4862-003-F3_FLI.pep
LEAGRAGVNISPPFPLLVSAPLLASDPQFLLRISHSAQRRCEGRGTRRKMGLAFGKLFSRLFAKKEMRILMVGLDAAGKTTILYKLKLGEIVTTIPTIGFNVETVEYKNISFTVWDVGGQDKIRPLLRHYFQNTQGLIFVVDSNDRDRVVEARDELHRMLNEDELRDAVLLVFANKQDLPNAMNAAEITDKLGLHSLRQRHWYIQSTCATTGEGLYEGLDWLSSNIASKA

SEQ ID NO: 49516 - protein, 353 aa, Zea mays
  Clone ID: LIB4862-003-F4_FLI.pep
AYCGKYADELIKNAAYIGTPGKGILAADESTGTIGKRLSSINVENVEENRRALRELLFCCPGALQYISGVILFEETLYQKTKDGKPFVDVLKEGGVLPGIKVDKGTIEVVGTDKETTTQGHDDLGKRCAKYYEAGARFAKWRAVLKIGPNEPSQLAIDLNAQGLARYAIICQENGLVPIVEPEILVDGPHDIDRCAYVTETVLAACYKALNEHHVLLEGTLLKPNMVTPGSDSKKVTPEVIAQYTVRTLQRTVPAAVPAVVFLSGGQSEEEATLNLNAMNKLSTKKPWALSFSFGRALQASTLKAWAGKVENVEKARAAFLARCKANSEATLGTYKGDAAADTESLHVKDYKY

SEQ ID NO: 49517 - protein, 175 aa, Zea mays
  Clone ID: LIB4862-005-E12_FLI.pep
HLYDLPVNICMESLGRTGLFCPCVLFGRNVEAVREDIPWTTPCVCHAVFVEGGITLAILTAIFHGVDPRTSFLIGEGLVFSWWLCATYTGIFRQGLQRKYHLKNSPCDPCMVHCCLHWCANCQEHRERTGRLAENNAVPMTVVNPPPVQEMSMLEEVEEKGAEKSEHDDVEVIPL

SEQ ID NO: 49518 - protein, 257 aa, Zea mays
  Clone ID: LIB4862-007-H12_FLI.pep
YQLATYIVKYTSNILAPMGAKIFALLALLALSASAATSTFIPQCSQQYLSPATAVGFQYPTIQSYMVQEAIQASILRSLALTLQQPYALLQQPSLVHLYLQRIAAQQLQQQLLPTINQVVAANLAAYLQQQQFLPFNQLDGVNPAIYLQAQQLLPFNQLVGSPYAFLLQQQLLPFHLQAVANIAAFLRQQHLLPFYPQVVGNINAFLQQQQLLPFYPQNVANIVAFLQQQQLLPFSQHALTNPTTLLQPPTIGGAIF

SEQ ID NO: 49519 - protein, 177 aa, Zea mays; identical to SEQ ID NO: 44953
  Clone ID: LIB4862-009-C11_FLI.pep

SEQ ID NO: 49520 - protein, 231 aa, Zea mays
  Clone ID: LIB4863-003-B8_FLI.pep
YQLATYIVKYTSNILAPMGAKIFALLALLALSASAATSTFIPQCSQQYLSPATAVGFQYPTIQSYMVQEAIQASILRSLALTLQQPYALLQQPSLVHLYLQRIAAQQLQQQLLPTINQVVAANLAAYLQQQQFLPFNQLDGVNPAIYLQAQQLLPFNQLVGSPYAFLLQQQLLPFHLQAVANIAAFLRQQHLLPFYPQVVGNINAFLPFSQHALTNPTTLLQPPTIGGAIF

SEQ ID NO: 49521 - protein, 141 aa, Zea mays
  Clone ID: LIB4863-003-C12_FLI.pep
WVPSRPAGPGKDRPPPPTGSSPFATKPFEPPTSPRLVPHLLRLLARAAARRLPLVSAPRAVAKMTAGYIVGSLVGSFAIAYLCDTFISDKKAFGGSTPKTVSEKEWWQATDTKFQAWPRTAGPPVVMNPISRQNFIVKSTE

SEQ ID NO: 49522 - protein, 295 aa, Zea mays
  Clone ID: LIB4863-007-C11_FLI.pep
SRPAGPGLFVCFSVFVLSFAAQGQLSPARVVVSAGRSASQTLASRAREKLDAMFGYRKADPDLEAGGSSLLYPGMTESPELRWAFVRKIYVILTVQLAMTAAVSAFVVKVPAVSNFFVSSNAGIALYIFLIVLPFIVLCPLHYYHQKHPINLLLLGLFTVAISFAVGMTCAFTSGKIILEAAILTAVVVNSLTAYTFWAAKRGHDFNFLGPFLIAAIMVLMVFSLIQIFFPLGKISVMIYGGLASLIFCGYIIYDTDNIIKRHTYDQYTWAAVSLYLDVINLFLSLLQLLRAADS

SEQ ID NO: 49523 - protein, 268 aa, Zea mays
  Clone ID: LIB4863-011-E8_FLI.pep
PSRPAGPGHTTQFRRKNTMETSWLLLSGALLLSLLVLRLHAKNRRLPPGPPAVPLFGNLLWLRNSAVQVEPLLLKLFKRYGPVVTLRMGSQLTIFVADRRLAHAALVGAGAVTMANRPQAATSSLLGVSDNIITRTDYGPVWRLLRRNLVAETLHPSRVRLFARARLGARRPHGQAAGEWCRRGRRAARRHGGVPVHHVLPPRAHVLRRAARRARGARHPGRRAQVAALHLPADERLLLLSVRHQARLPRPPADRARPAPGQTELFVR

SEQ ID NO: 49524 - protein, 158 aa, Zea mays
  Clone ID: LIB4865-003-F10_FLI.pep
NYSPLCFAASLWKHLCICNAIQAALARLEALESDNGGVEVVDLNDDEYGSTDEEDPVLMQKKQSKIMKRKTRQGKALEKRAARSLMDVLQEANLESVPPHVPTYSRAAVGPPSTSSRRHYCSVCGSSATYTCVRCGTRFCSCRCQVIHNDTRCLKFVA

SEQ ID NO: 49525 - protein, 315 aa, Zea mays
  Clone ID: LIB4865-004-G9_FLI.pep
RGRPGRLLSLIPISPSLAAGGLRMAGGSGEAAMSPPSSSASGKRGRDPEEDVYVDNLHSHKRYLSEIMASSLNGLSVGDSLPDNIMESPARSETASCYRDEILSQYSPMSEDSDDYRCYDTQLNPSGNHPDAMISPSTSPMSSPHRHQRPQSSLLPSNPYPLPSCSLSSVVCSHARRGSDNEGRFPSSPNDMCHVADLRRTALLRSVQMRVQGPHSYDLSFGIRQGQDHAHEHEGEHDHEHEHLEDLEGTEGSSCNKSIVNEVTYNQRRDHDFGRSEHEIDYINNSTSDDCVSDLKFKQEDKSHSKFDIPMHKNS

SEQ ID NO: 49526 - protein, 327 aa, Zea mays
  Clone ID: LIB4865-005-G4_FLI.pep
RGRPGRDRHQEAEGKRNPHSARTCRLPKISPSPTRLRRPPPSPSRISPSPLAAPPSVHSAMYSNYGNPSGMQMPPQNSQPVQFDNPLYGASSGLIRSGIGVYGEKFLGSSSEFMQSNINRYFSNPQYYFHVNDQYVRNKLKVILFPFFHRGHWTRISEPVGGRLSYKPPIYDINAPDLYIPFMAFGSFIILSGFTLGFMGKFTPAAINLQFTRALIGWGFQLMVLKGLLYSMGGGEVPLLDLVAYGGYLFAGLSLAVVARLMWAYSYYVMMPWMSLCMGVFLVRTMKRVLFTEMRSSERHSSRQHYFLLFMAIAQFPLFFWLGSIGA

SEQ ID NO: 49527 - protein, 127 aa, Zea mays
  Clone ID: LIB4865-006-E5_FLI.pep
TTPSTRQRGSTRARRTDQAEAQDAQLQDAPQEQLALLFSRPDGIVARPHVHGLHSQCSPQPQVVCSRCPPLPDVHLQSLPPGHGTAHPHLSSHPMPDRRLLISSTGLRLRSPHLNQLAAVVALGEHK

SEQ ID NO: 49528 - protein, 437 aa, Zea mays
  Clone ID: LIB4865-007-B5_FLI.pep
VVMESLKSLVFSSSSDDSDDEIDTLLLAQHVEHLVVGDTSTRRRRSSLPRRVIHRDHAAGENLIKHHYFGPNPVYPSHVFRRRFRMHRPLFLRILRAVQREDEYFTIRSDATGLAGLGPLQKVCAALRILAYGLPTDAVDEYIQIGQTTARDCLIRFCRAIISCFSERYLRIPNHDDIARILRVNADRGFPGMLGSIDCMHWEWRNCPTAWRGQFCGRNSRPTMILEAVAGYDLWIWHAFFGMPGTNNDLNVLHRSPVFDPLRNGTMPPVHFTINGTTYNFGYYLADGIYPNWPTFVKAIRHAFEEKKVHFTTKQESCRKDIERAFGVLQARWAVLRGPAYGWDRNHLADMMTACIIMHNMIVEDEGDGAANVDFIGPSGPPEPCNNTPEVRNEWLNNHIRSELPNDPDQDLTCQATYLSLQHNLIEHLWARRGSMG

SEQ ID NO: 49529 - protein, 187 aa, Zea mays
  Clone ID: LIB4865-007-E9_FLI.pep
RQGGPFLSPVNVKQCLFSSSRPEETPTGRWAVAAAGRICAAMATSNTARMEDGGGDLRSTIKKWNIIYPVYLNSKKTVAEGRRIAAAKACPDPTCIEIADCCSHLKIPHAIELDKAYPRDFFQVGRVRVQLKKDDGSPVNPAIKTKKQLMIQVAELVPKHHGRTKKQEPAPNPGGSSKNTKGGKKKK

SEQ ID NO: 49530 - protein, 340 aa, Zea mays
  Clone ID: LIB4865-011-G12_FLI.pep
LEAGRAGESATASEAPPPQDAWLVELGSRLPQWESLRDSSKVIIPISISRVNQFDAARLDVEMSAMLKEQLVKVFSLMKPGLLFQYEPELDAFLEFLIWRFSIWADKPTPGNALMNLRYRDERAAPITGKEVRTGLEGPGLSVSQKIFYCISFVGGQYVWSRLQSFSAFRRWGDSEQRPLARRAWALMRNAEVFYRAASFFNLLLFLYGGRYKTVVERILKARLVYGSPNMNRAVSFEYMNRQLVWNEFSEMLLLLLPLLNSSSVKKFLLPFSKDKSGGSSGDEADCPICRSSPSIPFIALPCQHRYCYYCLRTRCSATTSYRCTRCDGAVVAIQRLGSG

SEQ ID NO: 49531 - protein, 174 aa, Zea mays
  Clone ID: LIB4866-004-A10_FLI.pep
PVLRGSWQRITGPVRMNRGRETGGNLRESGLFSGCDGDGGAGMDRKRIKDVLEKHLERSSPSTSRGVVSKERERLAAGKLPASLGKAEKVSDGEEFETDSEDEDSDISGSESEGTSWISWFCTLRGNEFFCEIDDDYIQDDFNLCGLSMQVPYYDYALDLILDIESSDGEIVVP

SEQ ID NO: 49532 - protein, 257 aa, Zea mays
  Clone ID: LIB4866-004-B9_FLI.pep
YQLATYIVKYTSNILAPMGAKIFALLALLALSASAATSTFIPQCSQQYLSPATAVGFQYPTIQSYMVQEAIQASILRSLALTLQQPYALLQQPSLVHLYLQRIAVQQLQQQLLPTINQVVAANLAAYLQQQQFLPFNQLDGVNPAIYLQAQQLLPFNQLVGSPYAFLLQQQLLPFHLQAVANIAAFLRQQHLLPFYPQVVGNINAFLQQQQLLPFYPQNVANIVAFLQQQQLLPFSQHALTNPTTLLQPPTIGGAIF

SEQ ID NO: 49533 - protein, 237 aa, Zea mays
  Clone ID: LIB4866-004-G4_FLI.pep
RVTAVYNLPDTNRREPPLDLVELVCLHHRISLGNGVPGSSPVVELAVVLVGVAVERAVQVPTPAVESREPNPLPAGAAPVRPYLPPFGDRRHPLAGSGNISGLLHVHCLQLDLGNSYYRVAASNNRLHDGVAAVHDAVDRGGSQLGLILLRYHLLVALRAHVHGRRAAEEATVIDAEDGSLGGLAPSLLVLHGFLNSDETALFAIPLRRSPRGRRGGEGRGIAGNSVGFEIPARPAS

SEQ ID NO: 49534 - protein, 113 aa, Zea mays
  Clone ID: LIB4866-010-E6_FLI.pep
SRPAGPGAPPPQHPESLVRSSSNTAPSPPPPWVRFTDRWPALGRCAGRRPRLQSRTRRRSPAAALTSACNTTAASSPPLLDSARSAAPTHRRSRSSYGFVFYSPLVSSLMATC

SEQ ID NO: 49535 - protein, 257 aa, Zea mays; identical to SEQ ID NO: 49518
  Clone ID: LIB4866-012-F12_FLI.pep

SEQ ID NO: 49536 - protein, 257 aa, Zea mays; identical to SEQ ID NO: 49518
  Clone ID: LIB4867-010-D10_FLI.pep

SEQ ID NO: 49537 - protein, 57 aa, Zea mays
  Clone ID: LIB4756-008-H2_FLI.pep
LEAGREKKKTTTSGSGRHHPSRLVSPLLSFSPLPAQRRSPSPDHSSDRWLRYTTSGP

SEQ ID NO: 49538 - protein, 309 aa, Zea mays
  Clone ID: LIB4756-021-G1_FLI.pep
PHSHKGEEWRDVGEFHHMAVGKGGGLLVLVVVGLLLHGTRVADAQSLRVGYYSQTCGSAESIVADEVQKASYRDRGVLASLIRLHFHDCFVNGCDGSVLLEASDRQAEKNAKPNLSLRGFDVIERIKQRLEAACALTVSCADIVAFAARDSVKLSGGLWYAVPGGRQDGMVSRASMTGDLPPPNQRNVDLLAQYFYRKGLTLDEMVLLSAAHTVGIAHCSSFDYRLTSDQDKGMDPAFRNSLRSQCQYNPSNYVPLDAGSQYAFDTGYFSNVLANRTVLDSDAALASPRTADKVKQWKNNPDWFKNSFA

SEQ ID NO: 49539 - protein, 404 aa, Zea mays
  Clone ID: LIB3060-046-A9_FLI.pep
LCRRHMSSSKHAAGAVGGKAARACDSCLRRRARWYCAADDAFLCQGCDASVHSANPLARRHERLRLRPTDPHSTTLEAGVATATWKKRQQQVAPAWSKRKARTRRPHVKSVGELLSRKLVVVPEVSPIESSEERKAEEEEEEEEGQLLYCVPTFDRALAELCSPPPPVDDPTASSCCRDDVDGAVENNTKAPPVVVAESPVQQLPDSFAGFGPTDAELREFAADMEALLGQGLDDGNELDRSFYMESLGLMAQQAEDVGRIKMEPNGIVSSRSRGEGAPGFGPTEMKPEASSAAAEVLDTDFNCCSPTVMMDNEDEDSFEQKASASNAAAAAAGTQFLKRSLDLSLNYEAIIESWGSSPWTDGQRPSVQLDDFWPHAHLTVRLFPNSRCSSSSTDRLRALSTRA

SEQ ID NO: 49540 - protein, 270 aa, Zea mays
  Clone ID: LIB3060-082-B1_FLI.pep
NPPPSILPSFPLSLSLLAPTVPASQIRAFTGAMAAEHATAAVGEPPPATSQPAEGVTAAAGQRSVPTPFLSKTYQLVDDPAVDDIISWNDDGSAFIVWRPAEFARDLLPKYFKHNNFSSFVRQLNTYGFRKIVPDRWEFANDCFRRGEKRLLCDIHRRKVSPATGAVTVAAAAAAAIPMALPVGSPVYSGEEQVLSSSSPEPPSLQQHPPAPSGSGSGGVVSGDVGEENERLRRENARLARELGQMKKLCNNILLLMSKYAATQQPDAAK

SEQ ID NO: 49541 - protein, 156 aa, Zea mays
  Clone ID: LIB3061-109-A1_FLI.pep
KVEYSSKNRATMAAKIFSILMLLALSACVANATIFPQYSQAPIAALLPPYLPSMTALVCENPALQPYRIQQAIATSNLPLSHLFFQQSPALSLVQSLVQTIRAEQLQQLVLPVISQVALANLSPYSQQQQLLPFNQLALTNPTAFYQQPIIGGALF

SEQ ID NO: 49542 - protein, 133 aa, Zea mays
  Clone ID: LIB3117-040-C3_FLI.pep
SRPIGATSALLSGCWERAMGRSPCCEKAHTNKGAWTKEEDERLVAYVRAHGEGCWRSLPKAAGLLRCGKSCRLRWMNYLRPDLKRGNFTDDEDELIIRLHSLLGNKSVSVCRAAGVLLSSYYSISSRRRCSYS

SEQ ID NO: 49543 - protein, 186 aa, Zea mays
  Clone ID: LIB3245-126-D8_FLI.pep
QSPSAPGKAAAATAVTTHAAPHRRVTPAVSTNREPEGDRRRQLRLGTNNGLAPPAPPPARRAAPGGGHGGPGRGAGLLRAGHGRRARAGRGSSAAPVLPVQEPRQPDGGGLRLRGRARRGQLLRGHGVRGGVRDPRAVPGAAHPRRVLRARRPVRGGRGQPAALPPARHRDGAGPGRPRLRGIRRL

SEQ ID NO: 49544 - protein, 141 aa, Zea mays
  Clone ID: LIB3245-317-H8_FLI.pep
FLISGDRAKASALMMTDHDACDCGKLMAACRKVRPKMTWPIFWQIFVLAMLGPVIDQNFYYAGLKFTGPTFACAMSNILPAMTFVLAVIFRMEKLQMRKVTCQAKVLGTVLTVAGAMLMTLYKGPLMQLAWTTNRHASSSR

SEQ ID NO: 49545 - protein, 177 aa, Zea mays
  Clone ID: LIB3245-384-A3_FLI.pep
RSMHASDSHWFRLMESPTNSIFFPFHRLSKSCPLNLGSSQDAGRHRYLRYSLSGRPYFWQSNSGSTKGHPAASYIGSVSSYTQLPWNRLHDAMPVPGAPPRWARRPPPCRVLLCCLAGLCRRPSVPVPVPAAAAARSSDHATAAARRGRSGSCRCRCLAAIARRCGVSSEELGLAGT

SEQ ID NO: 49546 - protein, 751 aa, Zea mays
  Clone ID: LIB3279-197-F9_FLI.pep
PAMGCCRTGVHCGAGPRRNQLRRCWGGGGSLVLLLLLLVAVAVPARGQRSDGVVIAQADLQGLQAIRQALVDPRGFLAGWNGTGLDACSGGWTGIKCARGKVVAIQLPFKGLAGALSDKVGQLAALRRLSFHDNIIGGQVPAALGFLRELRGVYLHNNRFAGAVPPALGACALLQTLDLSGNSLSGSIPSALANATRLYRVNLAYNNLSGVVPPSLTSLPFLESLQLNNNNLSGVIPLTVGSLRLLHDLSLASNLIGGSIPDGIGNATKLRNLDLSDNLLGGSLPESLCNLTLLVELDLDGNDIGGHIPACFDGLRNLTKLSMRRNVLDGEIPATVGNLSALSLFDVSENNLTGDIPTSLSGLVNLGSFNVSYNNLSGPVPAALSNKFNSSSFVGNLQLCGFNGSAICTSVSSPLVAPSPPLPLSERRTRKLNKKELIFAVAGILLLFFLLFCCVFIFWRKDKKESSPPKKGAKDVTTKTVGKTGTGAGKGTDTGGDGGGKLVHFDGPLSFTADDLLCATAEILGKSTYGTVYKATMEDGSYVAVKRLREKIAKSQKEFEPEVNALGKLRHPNLLALRAYYLGPKGEKLLVFDYMPKGNLASFLHARAPDSSPADWPTRMNIAMGLARGLHHLHTDANMVHGNITSNNILLDEGNDAKIADCGLSRLMSAAANTSVIAAAGALGYRAPELSKLKKANTKTDIYSLGVVMLELLTGKSPGDTTNGLDLPQWVASVVEEEWTNEVFDLELMKD

SEQ ID NO: 49547 - protein, 161 aa, Zea mays
  Clone ID: LIB3356-061-B11_FLI.pep
LPSRIPKYSLPIPILRSTFVPAPSRSADPAACGAAAWRRLMRTVTWSCGSAGCGRGRGAGTQRRSGTRRRRRASGSAHSTPPRTPPAPTTPQRGCCAGPRPGPTSRSPPQPPSTTPTCPLLPPQQLHHTQHIPPPRASSRRRRSPDRLAAASAPPWSPSAA

SEQ ID NO: 49548 - protein, 176 aa, Zea mays
  Clone ID: LIB3591-011-A10_FLI.pep
VQRRPHRAVEAQPEDEEVAGRAALQHAQRHPDLVRGLLRRHVRGGVVHQRLRHRQRQARVPLAALRRGVLVIFLRLGRRGRGRGRRDQGARGEHEEEAGECGGEEQAQRQACLTLLRDLCPQGGEADGLADVRGAGHGSCSSSSPRRDQSNLLWRPRLGDMIAAAAAATGDGVEVK

SEQ ID NO: 49549 - protein, 181 aa, Zea mays
  Clone ID: LIB3591-097-E2_FLI.pep
KRTSSPTLQSNPIQAEFQSIISPDSTGTGGACVHGGGGGGGFGSGCGGEAEDGGGGRCGRQRPQLPRAGVDSAARGGARRRRGGRGRRPRRRQGAPRLRRQLGARPGRGGGRRAQDRAVQRGGEAPRRPARAGQPRLRRRQEGAAGERQRLLRAPRALLRHDSQAANKIQMKKTKNLPACC

SEQ ID NO: 49550 - protein, 259 aa, Zea mays
  Clone ID: LIB3591-118-G4_FLI.pep
ERERSYRDRTPPSLLTGELYFQAPRSLGFHHPARCSFSSMDQNFGNLGTGAGSSGGCGGSNSNSKAVAAVSSSSFLQLPLSTAAAASPAYYGAPLALLHHGTTAGPSSSQQQQHQSPYAKHGAEMSAAEADAIKAKIVAHPQYSALLAAYLDCQKVGAPPDLLERLTAMAAKLDARPPGRHGPRDPELDQFMEAYCNMLVKYREELTRPIDEAMEFLKRVEAQLDSIAGGGSSSSARLSLADGKSSEGAGSSEDDDMDP

SEQ ID NO: 49551 - protein, 135 aa, Zea mays
  Clone ID: LIB3594-024-B10_FLI.pep
ISVARARTHCRPHFLVALAVALAAMPDSDVPSPASSPLGSVQKIARGRKSRRGGGRSPAYRGVRMRAWGKWVSEIREPRKKSRIWLGTFPTAEMAARAHDAAALVVKGRGAVLNFPEMAASLPRPASAAPRDVQA

SEQ ID NO: 49552 - protein, 368 aa, Zea mays
  Clone ID: LIB3594-031-E8_FLI.pep
PSLAPYILLLPRARARACTLASCRSPRHHGVRRERQQVGGGVGEPSPRDPDARVRAAGARGAVVDGVREPAHHGVVRRDVHLRELLRHAQVVARVRPAHAQHRVLLQGPRRQPGRLLGAHQRGDPAVGGAGHGRRHEPVRVPHGVPGRVRRVRPHHPVHAVPAPPWAGDELRPLLLLPLPLHRAGVLPPRHDRGAEAGAFLPRRVRRGRHAAAHPPPHAPRRRRQAGVQDLPGAPARRRRPAAADHHLRVGNGRHQENRAAAGADADDVDFVVLWVREDHVPSAGSWGGLHDPAGAGERGHAGAVRGDNLRRGRDADGDRQHGADRRVAGLPSQEREHVRVPDQHLELRGARDGGLRLGGGAGPVPRA

SEQ ID NO: 49553 - protein, 196 aa, Zea mays
  Clone ID: LIB3606-060-G5_FLI.pep
LTDPPAPFHSSHGAARPAHRAAARAHRGIPGVAGRVTPPPRALLPAGLRVPQALRRPQGDHRDGGRRHRAQQAAGPLRVPLPPQGDRQLRHRRAHLLPAQRAAGPGGEPHPRRRAGGDGRVLRRRRGGGARQDGRARARRRPGGPQRGLLLPGAVPGVQARAPLRHAGRRDGVQPLRDGLQRGARRRGPRARRDAD

SEQ ID NO: 49554 - protein, 405 aa, Zea mays; identical to SEQ ID NO: 41675
  Clone ID: LIB3689-213-B12_FLI.pep

SEQ ID NO: 49555 - protein, 217 aa, Zea mays
  Clone ID: LIB3689-224-E6_FLI.pep
CADLKGRGSRGTLVAGPACHATIEAPAVGVGTHTASLAAAARRHRQSGQLGWDRSQASTQSGWKQWPHGGSTFTFSPATSALMQMEHSAAAGSSSPASPRRRGDAGGRYSVTGSPRMASASRPGSDAAAADDGELASASGSSGAWRWHLQRRYRHSATKKTTAHSSPTSSGTARPCTAKLLSPTSPYRHRITTCGLPPPAAASCAAIVRHTPLPLAH

SEQ ID NO: 49556 - protein, 202 aa, Zea mays
  Clone ID: LIB3689-253-F6_FLI.pep
AAGSSRRRRSASTSSRACESPATITHEPLSSSDASSRDSRANPQADASEGGHDHARAFPPPEPLSAAPAALDHETRCRNWTQEDPEEADAETGWGRSKKEARWGREREGRYGDRWIPTASEMKSAPEKKSTLLRLRCRPASPMGTKSTHDARRDHARLRRGRNHRPARRPNVRLHFTAERGRSSGEGATRSGHGAGSRAARG

SEQ ID NO: 49557 - protein, 116 aa, Zea mays
  Clone ID: LIB4729-010-G5_FLI.pep
ARLVEQGAEDRRAGVGVVWRGGDQVEQPRPAVELGEEEGGVGLRLGVLHPLQAGADGAGVGAALAQDAAAAAARDHPRLRPSGGGGGGGDRSTDREHASCRVSCPIRTNPAAAPTL

SEQ ID NO: 49558 - protein, 129 aa, Zea mays
  Clone ID: LIB4732-027-E7_FLI.pep
RRGQDHAPHRARLHARPHHVQSSPDGRLDHFFRSGDQEGVVAAGDGVVEAAVFVQVGAEDPQGPERLQVLEVGVLLHVIRVPDRRLDGVALLQQHLDERRGDIPVSSGHARRPHLPAAGRHRRRSSRRG

SEQ ID NO: 49559 - protein, 111 aa, Zea mays
  Clone ID: LIB4732-028-H4_FLI.pep
IRAHSISTASSTLPTSIPLHDSASSELRLSHLHTRSPQVHAGDGRNAGAGSGLVLPGALRLRRRPAGPFCRRPQHRRAGAAGATLGGRPLRAAIVEQQHAHVPVAGRHLRE

SEQ ID NO: 49560 - protein, 308 aa, Zea mays
  Clone ID: 700335861_FLI.pep
ETIPNSIGELFNLRLLCLNKTKVKELPKSITKLQNLQTMSLENGELVKFPQGFSKLKKLRHLMVSRLQDVTFSGFKSWEAVEPFKGLWTLIELQTLYAITASEVLVAKLGNLSQLRRLIICDVRSNLCAQLCGSLSKLCQLSRLTIRACNEDEVLQLDHLTFPNPLQTLSLDGRLSEGTFKSPFFLNHGNGLLRLMLFYSQLSENPVPHLSELSNLTRLSLIKAYTGQELYFQAGWFLNLKELYLKNLSRLNQIDIQEGALASLERITMKHLPELREVPVGFRFLKSLKTIFFSDMHPEFESSFQKEM

SEQ ID NO: 49561 - protein, 239 aa, Zea mays
  Clone ID: 700343334_FLI.pep
SWPQRYTVAAGIASVLSYLHQECEQRVIHRDIKTSNILLDVNLSPRLGDFGLARLMDHNKSPVSTLTAGTMGYLAPEYLQSGKATEQTDVFSYGVVLLEVCCGRRPIDKDECGRGGGGKNVNLVDWVWRLHGEDRLIEAADARLAGEFDKAEMLLLLLVGLSCANPNCEERPAMRRVVQILNREAEPVPVPPKKPLLVFSSSASAKLQEIAFSCGDDVRGGYSVAKPASPKSEGADIER

SEQ ID NO: 49562 - protein, 206 aa, Zea mays
  Clone ID: 700331867_FLI.pep
GAAGKPPPLVCFKWPWGPNPIPSASSSPSPCGDLELPWLFKSIRTLAQGLLIAGDIPSPASSPSGGVRGVQRRTGAAVVEVDRGDAEQRALAASLASGRPATVLEFYSPRCRLCASLQGLVRELQDGASGSASFVLADAEDDRWLPELLHYDIRYVPCFVLLDKHGRALAKTGVPTSRQHVVAGLHHLLRMQQPSGLEGNQNAPPS

SEQ ID NO: 49563 - protein, 145 aa, Zea mays
  Clone ID: 700331994_FLI.pep
TKEQLTCGASTLHRGVNRVAQLRETGNGVYTLQYTFRLITDRNGEEEDDDDIEIIKQQWAGERTLYACLLHFPTRLCWFFPPCRLAIRVATTQRTMTTVTIRMTKRRLNLSKDDGGGGNQPFRSAVVFGSRSSSLVGGGGSSGGW

SEQ ID NO: 49564 - protein, 334 aa, Zea mays
  Clone ID: 700336272_FLI.pep
VPLKTVNRQCSSGLQAVADVATAIKAGLYDIGIAAGLESMTVNKVSLDGQANPKVELFSQARDCLLPMGLTSENVAHRFGITRLEQDQAAVESHRKAAAAAAAGKFKEEIVPVHTKIVDPKTGEEKKIVVSADDGIRVDTSLAVLSKLKPAFSKDGSTTAGNASQVSDGAGAVLLMRRDVAMKKGLPVLGVFRTFAAVGVDPAVMGIGPAVAIPAAVKAAGLQMDDIDLFEINEAFASQYVYCCKKLELDPAKVNVNGGAMALGHPLGATGARCVSTLLNEMKRRGKDCRFGVISMCIGSGMGAAAVFERGDGVDELTNARGISTHNWLSKDAM

SEQ ID NO: 49565 - protein, 207 aa, Zea mays
  Clone ID: 700332801_FLI.pep
LAAKFRNSGQTCVCANRILVQEGIYEKFAKAFIQAVQSLKVGNGLEESTSQGPLINEAAVQKVEKFINDATSKGANVMLGGKRHSLGMSFYEPTVVGNVSNDMLLFREEVFGPVAPLIPFKTEEEAVHMANDTNTGLAAYIFTKSIPRSWRVSESLEYGLVGVNEGIISTEVAPFGGVKQSGLGREGSKYGIDEYLELKYICMGNLG

SEQ ID NO: 49566 - protein, 276 aa, Zea mays
  Clone ID: 700343020_FLI.pep
NDFFALFLDPTMTYSCGIFKAEDESLEAAQLRKLDNLINKAKVDPGHHVLDIGCGWGSLAIRLVKRTGCKCTGITLSEEQLKYGKRKVKEFGLEDRITLLLCDYRQIPNGQKFDRIISCGMLEHVGHEFYEDFFASCEYHLAEHGLLVLQSIAVPEELYDKMRTKPDFLKEYIFPGGCIPSLARIASAMSNASRLCIQHVENIGYHYYPTLIHWRENFEANEEKVLALGFDEKFIRTWEYYLNYCAAMFKSHMGLDYQIVFARAGDAKLPSYVAIA

SEQ ID NO: 49567 - protein, 379 aa, Zea mays
  Clone ID: 700335017_FLI.pep
VHSLPRLLILPSPSLWRVVANWRGVQSSGDPDFDWFSAVGLMGSKDGTGDISEAQGYAADIDSIREAQARIAPYVHRTPVMSSTSIDAMVGKKLFFKCECFQKAGAFKIRGASNSIFALDDEQVSKGVVTHSSGNHAAAVALAAKLRGIPAHIVIPRNAPACKVENVKRYGGHIIWSDASIESREYVCKRVQEETGAVLIHPFNSKYTISGQGTVSLELLEQVPEIDTIIVPISGGGLISGVALAAKAINPSIRILAAEPKGADDSAQSKAAGKIITLPSTNTIADGLRAFLGDLTWPVVRDLVDDVIVVDDTAIVDAMKMCYEILKVAVEPSGAIGLAAALSDEFKQSSAWHESSKIGIIVSGGNVDLGTLWESMYKH

SEQ ID NO: 49568 - protein, 232 aa, Zea mays
  Clone ID: 700334018_FLI.pep
ARGLHYLHTGFAQSIIHRDVKSANILLDENLLAKVSDFGLSKVGPEFDQTHVSTAVKGSFGYLDPEYFRRQKLTDKSDVYSFGVVLLEVICARPVIDPTLPRDMINLAEWAIKWQKRGELDQIVDQRIAGTVRPEALRKFGETVEKCLAEYGVERPTMGDVLWNLEFVLQLQEAGPDMSNINSMNQISELPSNPKRVSSLDISSTDQSRVPIDYSDMSTSNAFSQLINAEGR

SEQ ID NO: 49569 - protein, 143 aa, Zea mays
  Clone ID: 700333805_FLI.pep
QLGTHPPDVCVGTPCWMAPEVVKAMHEKHHYGLEIDIWSFGCFLLEMLTLQMPYQGLSDTEIYDLILRKKQRPRLTQELEAFWTMDEPATRLKLGITSDAHADKLRHLIDLFYQCTRGHASRRPKAVQIYNSLCSLPTCYDMR

SEQ ID NO: 49570 - protein, 206 aa, Glycine max
  Clone ID: 700756283_FLI.pep
HNNNKNGLKKAKSARVSPVSRRKPSFSNGERSNSFVGTEEYVSPEVVRGDGHEFAVDWWALGILIYEMLYGTTPFKGKNRKETFRNVITKPPVFVGKRTALTDLIEKLLEKDPTKRLGYTRGAVEIKEHEFFRGVRWELLTEVVRPPFIPTRDDGAGDSTDRISDRNCGFDIRGYFLNLKSSPSLPGSPLPSPSCRFKKNVSLTEF

SEQ ID NO: 49571 - protein, 266 aa, Glycine max
  Clone ID: 700743039_FLI.pep
YLSSSSSSQPSSILSFRLQNLISESKKMNTLISPPSTNRYLCGVPYSFLSPLRHNNNTNLNLPRFHSTVATNFLSHSPVRATLSARATSDEVDTQTVVEELSEENKVEENTNEDNTNTSTFSAPIDKELKKVAQKTAATFAPRASTATKNPAVPGTVLYSVFEVQGYVSMLLGGALSFNLIFPSDEPDIWRLMGMWSIWMFTIPSLRARDCSKNEKEALNYLFLLVPLINVIIPFFWKSFAVVWSADVVAFLGMYAWKFGWLQRTD

SEQ ID NO: 49572 - protein, 238 aa, Glycine max
  Clone ID: 700753138_FLI.pep
EVLHGKKGGHLHWDTRYKIAVEAAKGLCYLHHDCSPLIVHRDVKSNNILLDSNHEAHVADFGLAKFLQDSGTSECMSAIAGSYGYIAPEYAYTLKVDEKSDVYSFGVVLLELITGRKPVGEFGDGVDIVQWVRKMTDSNKEGVLKVLDPRLPSVPLHEVMHVFYVAMLCVEEQAVERPTMREVVQILTELPKPPGSKEGDLTITESSLSSSNALESPSSASKEDQNPPQSPPPDLLSI

SEQ ID NO: 49573 - protein, 305 aa, Glycine max
  Clone ID: 700744905_FLI.pep
KIVAVKKLNQDGLQGHREWLAEINYLGQLQHPNLVKLIGYCFEDEHRLLVYEFMPKGSMENHLFRRGSYFQPFSWSLRMKIALGAAKGLAFLHSTEHKVIYRDFKTSNILLDTNYNAKLSDFGLARDGPTGDKSHVSTRVMGTRGYAAPEYLATGHLTTKSDVYSFGVVLLEMISGRRAIDKNQPTGEHNLVEWAKPYLSNKRRVFRVMDPRLEGQYSQNRAQAAAALAMQCFSVEPKCRPNMDEVVKALEELQESKNMQRKGADHKQHHVRNSGPGRTNGGDGGSDAPRKASAYPRPSASLLRG

SEQ ID NO: 49574 - protein, 329 aa, Glycine max
  Clone ID: 700747038_FLI.pep
EIAQMIGYVFNTKAPMASYYFLLLVLVGATTASGAELCADFYSCTCPNLLPIVKKGVAKAIQKEPRMGASLLRLHFHDCFVNGCDASILLDDTSNFIGEQTAAANNQSARGFNVINDIKASVEKECPRVVSCADILALSARDSVVYLGGPSWEVGLGRRDSTTASRSDANNSIPGPFLSLTALINNFANQGLSVTDLVALSGAHTIGLAECKNFRAHIYNDSNVDPSYRKFLQSKCPRSGNDKTLEPLDHQTPIHFDNLYFQNLVSKKALLHSDQELFNGSSTDNLVRKYATNAAAFFEDFAKGMLKMSNIKPLTGSQGQIRINCGKVN

SEQ ID NO: 49575 - protein, 304 aa, Glycine max
  Clone ID: 700760203_FLI.pep
KEWLAELDILGDLVHPNLVKLVGFCIEDDQRLLVYECMPRGSLENHLFRKGSLPLPWSIRMKIALGAAKGLAFLHEEAQRPVIYRDFKTSNILLDAEYNAKLSDFGLAKDGPEGEKTHISTRVMGTYGYAAPEYVMTGHLTSKSDVYSFGVVLLEMLTGRRSIDKNRPNGEHNLVEWARPVLGDRRMLLRIIDPRLEGHFSVKGSQKAAQLAAQCLNRDPKSRPMMSEVVQALKPLQNLKDMAISSYHFQVARVDRTMSMPKNGMQAQLASLSRKGQPVRILSSPKGPHGSPYHHYIKSPKPNG

SEQ ID NO: 49576 - protein, 403 aa, Glycine max
  Clone ID: 700743136_FLI.pep
GDKIKDSTMASASATLLKSSPVLDKCEWVKGQTLRQPLVRCNPSSASALTIKAASYADELVKTAKTVASPGRGILAMDESNATCGKRLASIGLENTEANRQAYRTLLVTVPGLGEYISGAILFEETLYQSTVDGRKIVDVLVDQNIVPGIKVDKGLVPLAGSNDESWCQGLDGLASRSAAYYQQGARFAKWRTVVSIPNGPSALAVKEAAWGLARYAAISQENGLVPIVEPEILLDGEHGIDRTFEVAQKVWSEVFFYLAENNVLLEGILLKPSMVTPGAESKDKATPLQVADYTLKLLHRRIPPAVPGIMFLSGGQSEVEATLNLNAMNQSPNPWHVSFSYARALQNTCLKTWGGLPENVKAAQDALLFRAKSNSLAQLGKYTAEGESEEATRGMFVKGYSY

SEQ ID NO: 49577 - protein, 361 aa, Glycine max
  Clone ID: 700747183_FLI.pep
VNPIIMKKGNLGLGLKLSVPVSDQSNFARFLTESGTFKDGDLLVNRDGVRIVSQNDVEAPPPIKPTDNQLTLADIDVIKVVGKGNGGVVQLVQHKWTSQFFALKVIQMNIEESMRKQIAQELKINQQAQCPYVVVCYQSFYENGVISIILEYMDGGSLADLLKKVKTIPEDYLAAICKQVLKGLVYLHHEKHIIHRDLKPSNLLINHIGEVKITDFGVSAIMESTSGQANTFIGTYNYMSPERINGSQRGYNYKSDIWSLGLILLECALGRFPYAPPDQSETWESIFELIETIVDKPPPIPPSEQFSTEFCSFISACLQKDPKDRLSAQELMAHPFVNMYDDLEVDLSAYFSNAGSPLATL

SEQ ID NO: 49578 - protein, 186 aa, Zea mays
  Clone ID: 700336605_FLI.pep
EQRLLVYEYVPNKTLEFQLHGSGRPTLDWPRRWKIAVGSAKGLAYLHEDCHPKIIHRDIKAANILLDYNYEPKVADFGLAKYQAAEVTSVSTRVMGTFGYLAPEYAATGKVNDRSDVFSFGVMLLELITGRKPIMTSSEYQPETLVSWARPLLTRAVEEENYDELIDPRLETNYDAYDMARLVACA

SEQ ID NO: 49579 - protein, 109 aa, Zea mays
  Clone ID: 700337153_FLI.pep
LIGAYCTVVRYNNRRKRLVVWNIYIVITTTFCACMLRAVRSACASASLALEQAREPQRRCFRVPGQPVLVVHVDYAEPLGVAHCPLEVVQERPRKVPADISSVLDRLRN

SEQ ID NO: 49580 - protein, 92 aa, Zea mays
  Clone ID: 700338347_FLI.pep
DVHGNGMNRFEIVIMRSTLLSPSLLLLGPLVTQPPERNVATLFQLPHGYSQKLIHDTHTHTPPVHRQGLPAPKTRHRYSPRAQIGKMFLYWE

SEQ ID NO: 49581 - protein, 56 aa, Zea mays
  Clone ID: 700342151_FLI.pep
LMLSNMNIIFSCTVFQVSSDLQFKSKFSEEIQINELNLLTIETLLKLSTNDTCRST

SEQ ID NO: 49582 - protein, 141 aa, Zea mays
  Clone ID: 700336806_FLI.pep
VAPGNFERHWGILRYDGQPKYPMDLSGQGQNAMLVPARGVEYLPRTWCVVNTNAGNMDKLADNINYACTFADCTALGYGSTCGGMDSNGNASYAFNAFFQVQNQKEEACGFQGLAVPTQTDPSTAACNFTIQIATTSAGHR

SEQ ID NO: 49583 - protein, 147 aa, Zea mays
  Clone ID: 700337559_FLI.pep
VPTWIGAQPSLAVLSLRNNTFQGVVPESLGSAPSLRSLVLASNNLSGNLPDMSQQANLQVLDVGGNSLEPAFPKLGRKVVTVVLARNRFVAFLQNPQLVQEFRPDKQYNIHMLQERYQIGPDQIEALYQCAKFQFECGNYSGAARVM

SEQ ID NO: 49584 - protein, 112 aa, Zea mays
  Clone ID: 700338026_FLI.pep
TECSVEHSVIGIRSRLEPGVQLKDTMMMGADYYQTEAERLSELSVGKVPVGVGENTKIRNCIIDKNARIGKNVVIMNSENVQEADRPAEGYYIRSGITVVLKNAVILNGTKI

SEQ ID NO: 49585 - protein, 127 aa, Zea mays
  Clone ID: 700341881_FLI.pep
KTTATYITEAQRPTFTVYSTSQIRLYTSISPEPFRRSSAVALSQRAPSRRVVAATSTHARSLHRSARRATVAYICERPHMPHTVLSERSAMGFEDPYHLLQAVPIIDEWLAGRSDGLKCGRPFLSPE

SEQ ID NO: 49586 - protein, 173 aa, Glycine max
  Clone ID: 700743260_FLI.pep
NCELSMGRSPCCEKAHTNKGAWTKEEDDRLISYIRAHGEGCWRSLPKAAGLLRCGKSCRLRWINYLRPDLKRGNFTEEEDELIIKLHSLLGNKWSLIAGRLPGRTDNEIKNYWNTHIRRKLLNRGIDPATHRPLNEAASAATVTTATTNISFGKQQEQETSSSNGSVVKGSIL

SEQ ID NO: 49587 - protein, 93 aa, Zea mays
  Clone ID: 700353255_FLI.pep
AKIRPDKHRHLGAGFGKLVAKVLGLGVLALGRCTTLPLVPKVHVLQHQTPARHTAPEQHRHRRRRRALDVLEVNVIESHPGHVLVLAVVVGAV

SEQ ID NO: 49588 - protein, 45 aa, Glycine max
  Clone ID: 700663768_FLI.pep
KYLDPFFTGYHLRDFKVSEVSKDYRKLVSEFVKMGLFEKKEHVTL

SEQ ID NO: 49589 - protein, 74 aa, Glycine max
  Clone ID: LIB3028-016-G5_FLI.pep
ITTLNVLQAYTLKRIRDPDYHVKLRPHLSKDYMESSKPAAELVKLNPKSEYAPGLEDTLILTMKGIAAGMQNTG

SEQ ID NO: 49590 - protein, 70 aa, Glycine max
  Clone ID: LIB3053-007-D1_FLI.pep
VVVGFQEPYDVIFYFFRVLLLETLWKKSILYIFLLALYVPLKKSYMLLMDDLLLCCIYMMNTYSAFECFR

SEQ ID NO: 49591 - protein, 31 aa, Glycine max
  Clone ID: LIB3053-006-C8_FLI.pep
HEREVSQSSFIDMIYDYYRLPSLGYAGSQDL

SEQ ID NO: 49592 - protein, 101 aa, Glycine max
  Clone ID: LIB3028-050-D12_FLI.pep
GFQVAPAELEALLIAHPNISDAAVVGMKDEAAGEIPVAFVVRSNGSEIAEDEIKKYISQQVVFYKRIGRVFFTDSIPKAPSGKILRKVLTARLNEGLVVAN

SEQ ID NO: 49593 - protein, 37 aa, Glycine max
  Clone ID: LIB3056-014-G8_FLI.pep
MLTGRLQVDHQLSGRDMLMSVADFIESVKECMLTQFS

SEQ ID NO: 49594 - protein, 89 aa, Glycine max
  Clone ID: 700561657_FLI.pep
EQNHHTCGIRMKTFNYFEGCNLQLSLFVFQIIKIHLLVPSYQPLLRELSHSRWEPRIHEDSSQLQQRWQARRLEHHFGILHQGPIRDHQ

SEQ ID NO: 49595 - protein, 119 aa, Glycine max
  Clone ID: 700665701_FLI.pep
SEGSRHLRSDFMAPKKDKAPPPSSKPAKSGGGKQKKKKWSKGKQKEKVNNMVLFDQGTYDKLLSEAPKYKLITPSILSDRLRINGSLARKAIRELMARGSIRMVSAHASQQIYTRATNT

SEQ ID NO: 49596 - protein, 97 aa, Glycine max
  Clone ID: 700663968_FLI.pep
TINHEVRDTDMSEAAAEDPELALALQLSVEDSSKDSASQSDVSKLLADQSFVSSILASLPGVDPNDPSVKDLLASMQNQSEPQQKNEDKPPNEEEKK

SEQ ID NO: 49597 - protein, 278 aa, Glycine max
  Clone ID: LIB3028-016-F7_FLI.pep
RTEQGFLFLFLCLLLHFLSFQSKKIMGRKFFVGGNWKCNGTTEEVKKIVTTLNEAKVPGEDVVEVVVSPPFVFLPFVKSLLRPDFHVSAQNCWVRKGGAYTGEVSAEMLVNLGIPWVIIGHSERRQLLNESNEFVGDKVAYALQQGLKVIACIGETLEQREAGTTTAVVAEQTKAIAAKISNWDNVVLAYEPVWAIGTGKVATPAQAQEVHADLRKWVHDNVSAEVAASVRIIYGGSVNGGNCKELAAQPDVDGFLVGGASLKAEFVDIINAATVKKN

SEQ ID NO: 49598 - protein, 300 aa, Glycine max
  Clone ID: 700850145_FLI.pep
VATEGESNTPISRKIDEEIITSTRWWQKVFSPPPRGEDYTILQALFSLDMILLFFAGTCGVGGTLTAIDNLGQIGTSLGYPKASISTFVSLVSIWNYMGRVFSGFVSEHFLKKYKFPRPLMLTLTLLLSCVGHLLIAFDVANGLYVASVIIGFCFGAQWPLVFAIISELFGLKYYSTLYNFGGAASPIGLYVLNVRVTGYLYDKEALKQLAATGISRKIDTELTCVGSSCFKLSFIIITAATFFGALISLILVARTIKFYKGDIYKRYREQAEEEATAVTEMAVVQNRAEKLEETKVIGA

SEQ ID NO: 49599 - protein, 349 aa, Glycine max
  Clone ID: LIB3027-010-B7_FLI.pep
DELIANAAYIGTPGKGILAADESTGTIGKRLASISVENVESNRRALRELLFTAPGALKYLSGVILFEETLYQSTAAGKPFVEVLKEAGVLPGIKVDKGTVELAGTNGETTTQGLDGLGQRCAKYYEAGARFAKWRAVLKIGPNEPSELAIHENAYGLARYAVICQENGLVPIVEPEILVDGSHDIHKCAAVTERVLAACYKALNDHHVLLEGTLLKPNMVTPGSNSAKVSPQVVAEHTVRALQRTVPAAVPAIVFLSGGQSEEEASVNLNAINQVNGKKPWSLSFSFGRALQQSTLKAWSGKEENVKKAQEALLVRAKANSEATLGTYKGNSKLADGASESLHVEDYKY

SEQ ID NO: 49600 - protein, 195 aa, Glycine max
  Clone ID: 700674206_FLI.pep
TLSSHITCTDVAGTFGYLAPEYFMYGKVNDKIDVYAFGVVLLELLSGRKPISRDYPKGQESLVMWASPILNSGKVLQLLDPSLGDNYDHEEMEKIVLAATLCIKRAPRARPQMNLISKLLQGDAEAIKWARLQVNALDPPEMLDDEACPPSNLQSHINLALLDVEDDLLSMCSVEQGLTLEDYLRGRWSRASSFD

SEQ ID NO: 49601 - protein, 315 aa, Glycine max
  Clone ID: 700675662_FLI.pep
PLLQQPLRSDSGNSQQLNPTAKKIKRTTSIPEFASDKEMGFATVGCTGSLVRTCSLPTETEEEWRKRKELQTLRRMEARRKRSEKQRNMKALREQQQRVVGVVGSQGSNPVDQGAGEYGEVAVAPPLARTVSLTTRVCGLGLNGDSEKEKKSGIVLPPPSPSQGSIGSSGISEAESQQGQGTTPMDVRSPTSANLLPDSELKSPAGVAENNTGKNAAAAVVTMRSQSNKHSPPQSRTKDIVRNLLEDMPCVSTKGEGPNGKRIEGFLYRYGKGEEVRIVCVCHGSFLTPSEFVKHAGGGDVANPLKHIVVSPSLL

SEQ ID NO: 49602 - protein, 228 aa, Glycine max
  Clone ID: LIB3028-006-F10_FLI.pep
AKYYEAGARFAKWRAVLKIGPNEPSELAIHENAYGLARYAVICQENGLVPIVEPEILVDGSHDIHKCAAVTERVLAACYKALNDHHVLLEGTLLKPNMVTPGSNSAKVSPQVVAEHTVRALQRTVPAAVPAIVFLSGGQSEEEASVNLNAINQVNGKKPWSLSFSFGRALQQSTLKAWSGKEENVKKAQEALLVRAKANSEATLGTYKGNSKLADGASESLHVEDYKY

SEQ ID NO: 49603 - protein, 215 aa, Glycine max
  Clone ID: LIB3049-022-A10_FLI.pep
EIKKNCEDHNGTEVKPQEENQSKASHIAQFLPTSRRIVQFSNGKGPGPNARIVYIDGAFDLFHAGHVEILKRARELGDFLLVGIHSDETVSEHRGNHYPIMHLHERSLSVLACRYVDEVIIGSPWEITNDMITTFNISVVVHGTVAEKTLNCELDPYEVPKSMGIFHLLESPKDITTATVAQRIMANHEAYVKRNAKKTRSEQRYYEEKKYVSGD

SEQ ID NO: 49604 - protein, 175 aa, Glycine max
  Clone ID: 700673721_FLI.pep
RNFIKKVTKKPRVGTPARPGSALPSFLFALFNENQKPGPSTERHFGLLHPNGSRVYDVDLSGETPEAEFRPLPVPENNEKFKGRIWCVAARRDNATALTAALAYACSQGNGTCDPIQSKGKCFKPDSVFWHASYAFSAYWAQFRKVGGTCYFNGLATQTAKDPSYGSCKFPSVTL

SEQ ID NO: 49605 - protein, 288 aa, Glycine max
  Clone ID: 700785944_FLI.pep
RILLVKFTMGLFENPLADTSLVNELGSQEHRDLAREAVRKSLVLLKNGKNESASLLPLPKKVPKILVAGSHADNLGYQCGGWTIKWQGFSGNSDTRGTTILNAIKSAVDTSTEVVFRDNPDNEFVKSNNFEYAIVVVGEPPYAETAGDSTTLTMMESGPNVINNVCGTVKCVVVIISGRPIVIEPYISSIDALVAAWLPGTEGQGVTDVLFGDYGFTGKLARTWFKSVDQLPMNVGDPHYDPLFPFGFGLTTESVKDLVARSTSAAVGARACIFTIIVTLIISLYLPG

SEQ ID NO: 49606 - protein, 264 aa, Glycine max
  Clone ID: 700753593_FLI.pep
PLSLLLISFDSSLSKKMALIGLLLMGFLTMFSSAHAYGGGWTNAHATFYGGSDASGTMGGACGYGNLYSQGYGTNTAALSTALFNNGLSCGSCYEIRCANDHRWCLPGSIVVTATNFCPPNNALPNNNGGWCNPPLQHFDLAQPVFLRIAQYKAGIVPVSYRRVACRRKGGIRFTINGHSYFNLVLITNVGGAGDVHSVSIKGSRTGWMPMSRNWGQNWQSNNYLDGQSLSFKVTTSDGRTIVSNNVAPSGWSFGQTYTGAQFR

SEQ ID NO: 49607 - protein, 177 aa, Glycine max
  Clone ID: 700793925_FLI.pep
KNCSRSSLVDKWAVLIGGGRNHRMGLFDMVMIKDNHISAAGGVADALKAVDLYLEQNNLQMEVEVETRTLEEVEEVLHYSSQTKTSLTRIMLDNMVVPLPNGDVDISMLKEAVQLINGRYETEASGNVTLDTVHKIGQSGVTYISSGSLTHSVKALDISLKIDTELALKVGRRTGRA

SEQ ID NO: 49608 - protein, 116 aa, Glycine max
  Clone ID: 700731134_FLI.pep
VENSELSVTTRLACGAAAGTVGQTVAYPLDVIRRRMQMVGWNHAASVLTGDGRGKVPLEYTGMIDAFRKTVQHEGFGALYKGLVPNSVKVVPSIAIAFVTYEVVKDVLGVEIRISD

SEQ ID NO: 49609 - protein, 211 aa, Glycine max
  Clone ID: 700730242_FLI.pep
DMRGELDDTAAFKNFKKWGNIEFPLPFGRVMSTTEAFIHGLDEKTSASLKFTVLNPMGRIWTMVAGGGASVIYADTVGDLGYAPELGNYAEYSGAPKEDEVLQYARVVIDCATSNPDGQKRALVVGGGIANFTDVAATFSGIIRALKEKEQKLKEAKMHIYVRRGGPNYQKGLAKMRALGEEIGIPIEVYGPEATMTGICKQAIQYITAAA

SEQ ID NO: 49610 - protein, 246 aa, Glycine max
  Clone ID: 700727585_FLI.pep
VVVSTENITQNWYFGNKKSMLIPNCLFRVGCSALLLSNKPADRRRAKYRLVHVVRTHRGADDKAFRCVYQEQDDAGKTGVSLSKDLMAIAGGALKTNITTLGPLVLPISEQLLFFVTLLMNKLFKAGVKPYIPDFKLAFDHFCIHAGGRAVIDELEKNLQLLPEHVEASRMTLHRFGNTSSSSIWYELAYIEAKGRIKKGNRIWQIAFGSGFKCNSAVWQALRNVRPSPNGPWEDCIHKYPVEIVT

SEQ ID NO: 49611 - protein, 134 aa, Glycine max
  Clone ID: LIB3028-005-E6_FLI.pep
DSTNIYAYISIIALIVCIPPAVILEGPTLLKHGFNDAIAKVGLVKFVSDLFWVGMFYHLYNQVATNTLERVAPLTHAVGNVLKRVFVIGFSIIVFGNKISTQTGIGTAIAIAGVALYSFIKARMEEEKRQAKAA

SEQ ID NO: 49612 - protein, 268 aa, Glycine max
  Clone ID: LIB3028-044-C11_FLI.pep
GRVQDNAFDAEVETLGKIRHKNIVKLWCCCTTRDCKLLVYEYMPNGSLGDLLHSSKGGSLDWPTRYKIAVDAAEGLSYLHHDCVPAIVHRDVKSNNILLDGDFGARVADFGVAKAVETTPIGTKSMSVIAGSCGYIAPEYAYTLRVNEKSDIYSFGVVILELVTGKHPVDPEFGEKDLVKWVCTTWDQKGVDHLIDSRLDTCFKEEICKVFNIGLMCTSPLPINRPSMRRVVKMLQEVSTEDQTKPAKKDSKLSPYYYDDASDHGSVV

SEQ ID NO: 49613 - protein, 163 aa, Glycine max
  Clone ID: LIB3028-041-E7_FLI.pep
KCCPKERASFSFLSSPLEETEMGSKTKTFTFEEVAKHNHRKDCWIIVKGKVYDVTPFLDDHPGGDEVLVTATEKDATTDFEDIGHSDSATEMMEKYFVGEVDTNTLPAQVTSSSSVRPPTQAPVYNNQSSGFVVKILQYIVPLLILAFAFGLQYYGKKSKSEN

SEQ ID NO: 49614 - protein, 163 aa, Glycine max
  Clone ID: 700755370_FLI.pep
MVLKTELCRFSGAKIYPGKGIRFVRGDSQVFLFANSKCKRYFHNRLKPSKLTWTAMYRKQHKKDIAQEAVKKRRRAAKKPYSRSIVGATLEVIQKKRAEKPEVRDAAREAALREIKERIKKTKDEKKAKKAEVTAKSQKAGGKGISKGAMPKGPKLGGGGGKR

SEQ ID NO: 49615 - protein, 319 aa, Glycine max
  Clone ID: 701205068_FLI.pep
QMDKTRIGVLVGSGMGGITAFSNGVEALVQKGYKKITPFFIPYSITNMGSALLAIDTGLMGPNYSISTACATANYCFCAAANHIRKGEADIMVVGGTEAAIMPSGLGGFIACRALSHRNEDPKKASRPWDKDRDGFVMGEGSGVLVMESLESATKRGAKIIAEYLGGAITCDAHHMTDPRADGLGVSSCISKSLEDAGVSPEEVNYVNAHATSTLAGDLAEVNAIKKVFKDTSELKMNATKSMIGHGLGAAGGLEAIATIKAITTGWLHPSINLDNLEASVTIDTVPNVKKKHEVNVGISNSFGFGGHNSVVVFAPFRP

SEQ ID NO: 49616 - protein, 229 aa, Zea mays
  Clone ID: UC-ZMFLMO17204C10_FLI.pep
EGQPRAPVLDAELDAAVQGARSGQRARRRRRREDDPLLLLLLVVVVAAVQRVREAVVVPRPPRRAALAGAVRARHEGRRRVEHGRRAHGEGRLGLGVRRGALGEDDGAGGQGRRVQQPRGGEQGTRGRNLAAGGAGPATVTVAWTGRRSRGLIGDVAPLRAGAAVHRPRSPPQDHLLDLRSQETRQQHRTKNPRPYTTLFRLGGVDRGSSYQETPSAMRDATPWTGRRA

SEQ ID NO: 49617 - protein, 406 aa, Glycine max
  Clone ID: 700852996_FLI.pep
LFGELGINDRLQWKEHSMIFAMPNKPGEFSRFDFPDVLPAPLNGIWAILRNNEMLTWPEKVKFAIGLLPAMLGGQPYVEAQDGLSVQEWMKKQGVPERVTDEVFIAMSKALNFINPDELSMQCILIALNRFLQEKHGSKMAFLDGNPPERLCMPIVDHIQSLGGEVHLNSRIQKIELNDDGTVKSFLLNNGKVMEGDAYVFATPVDILKLLLPDNWKGIPYFQRLDKLVGVPVINVHIWFDRKLKNTYDHLLFSRSPLLSVYADMSVTCKEYYSPNQSMLELVFAPAEEWISRSDEDIIQATMAELAKLFPNEISADQSKVKILKYHVVKTPRSVYKTVPNCEPCRPLQRSPLEGFYLAGDYTKQKYLASMEGAVLSGKLCAQAIVQDSELLATRGQKRMAKASVV

SEQ ID NO: 49618 - protein, 419 aa, Glycine max
  Clone ID: 701205758_FLI.pep
ERSRIILRFADLLEKHNDEVAAIETWDSGKTYEQAANVEIPMVVRLFRYYAGWADKIHGLTVPADGPYHVQTLHEPIGVAGQIVPWNFPLLIFSWKVAPALACGNTVVMKTAEQTPLSALYVSKLFLEAGLPPGVLNVISGFGPTAGAALCSHMDVDKLAFTGSTSTGKRVLELSAHSNLKPVTLELGGKSPFIVCKDADVDAAVEASHFALFFNQGQCCCAGSRTFVHESIYGEFVEKAKARALKRVVGDPFKNGVEQGPQIDSVQFEKIMKYIRSGVESGAQLESGGQRIGSKGYYIQPTVFSNVQDNMLIAKDEIFGPVQSILKFKDLEEVIRRANATSYGLAAGVFTKNMDTANTLMRALQAGTVWINCYDVFDAAIPFGGYKMSGQGRVRGIYSLRSYLQVKAVVTALKNPAWL

SEQ ID NO: 49619 - protein, 190 aa, Glycine max
  Clone ID: 700648732_FLI.pep
DAPDEAEYVEIEIESGLPVSVNGKRLSPATLLTELNEIGGRHGIGRIDMVENRLVGMKSRGVYETPGGTILFAAARELEFLTLDRETIQVKDSLALKYAELVYAGRWFDPLRESMDAFMQKITETTTGSVTLKLYKGSVTVTSRKSPFSLYRQDISSFESGQIYDQADAAGFIRLYGLPMRVRAMLEQGI

SEQ ID NO: 49620 - protein, 449 aa, Glycine max
  Clone ID: 700750549_FLI.pep
VIMGKEKTHINIVVIGHVDSGKSTTTGHLIYKLGGIDKRVIERFEKEAAEMNKRSFKYAWVLDKLKAERERGITIDIALWKFETTKYYCTVIDAPGHRDFIKNMITGTSQADCAVLIIDSTTGGFEAGISKDGQTREHALLAFTLGVKQMICCCNKMDATTPKYSKARYDEIVKEVSSYLKKVGYNPDKIPFVPISGFEGDNMIERSTNLDWYKGPTLLEALDQINEPKRPSDKPLRLPLQDVYKIGGIGTVPVGRVETGVVKPGMVVTFGPTGLTTEVKSVEMHHEALTEALPGDNVGFNVKNVAVKDLKRGFVASNSKDDPAKEAANFTSQVIIMNHPGQIGNGYAPVLDCHTSHIAVKFSEILTKIDRRSGKELEKEPKFLKNGDAGMVKMIPTKPMVVETFSEYPPLGRFAVRDMRQTVAVGVIKSVEKKDPTGAKVTKAAAKKK

SEQ ID NO: 49621 - protein, 364 aa, Glycine max
  Clone ID: LIB3030-012-A2_FLI.pep
SMARYINIVLLGIVLVVVRLKGAEAQRAFFVFGDSLVDNGNNNFLATTARADAPPYGIDYPTGRPTGRFSNGYNIPDFISQSLGAESTLPYLDPELDGERLLVGANFASAGIGILNDTGIQFVNIIRIYRQLEYWEEYQQRVSGLIGPEQTERLINGALVLITLGGNDFVNNYYLVPYSARSRQYNLPDYVKYIISEYKKVLRRLYEIGARRVLVTGTGPLGCVPAELAQRSTNGDCSAELQRAAALFNPQLVQIIQQLNSEIGSNVFVGVNTQQMHIDFISNPQRYGFVTSKVACCGQGPYNGLGLCTPASNLCPNRDIYAFWDPFHPSERANRLIVQQILSGTSEYMYPMNLSTIMALDSKN

SEQ ID NO: 49622 - protein, 121 aa, Glycine max
  Clone ID: 700751413_FLI.pep
IMAELIVKEPLFRGKSELEQLDKIFRTLGTPDEKIWPGLSKLPGAKANFVKQPINTLRKKFPAASFTGLPVLSELGFDLLKRLLTYDPEKRITAEDALLHDWFHEAPLPKSDFKPIFPSWQ

SEQ ID NO: 49623 - protein, 348 aa, Glycine max
  Clone ID: LIB3029-004-C10_FLI.pep
KSFRGDYILGEGGFGTVYKGYIDENVRVGLKSLPVAVKVLNKEGLQGHREWLTEVNFLGQLRHPNLVKLIGYCCEDDHRLLVYEFMFRGSLENHLFRKATVPLSWATRMMIALGAAKGLAFLHNAERPVIYRDFKTSNILLDSDYTAKLSDFGLAKAGPQGDETHVSTRVMGTYGYAAPEYVMTGHLTARSDVYSFGVVLLELLTGRKSVDKTRPGKEQSLVDWARPKLNDKRKLLQIIDPRLENQYSVRAAQKACSLAYYCLSQNPKARPLMSDVVETLEPLQSSSVGPGEVSLSGSNSGSAGPFAMNKISDYRMRHKFSNNVGPGATCRSPNPNCSPGGPATLRVR

SEQ ID NO: 49624 - protein, 146 aa, Glycine max
  Clone ID: LIB3028-039-A6_FLI.pep
ITIYTLLFSLFIFHNTPLLPNQFSDLFALLFPEFENLRTISVHNTFCSLMASSSISASGSWSVKDNKAFEKALAVYDKDTPDRWYNVAHAVGGKTPEEVKRHYELLVQDVKHIESGRVPFPNYKKTTSGSTDQEEKRLRNLNLNLQ

SEQ ID NO: 49625 - protein, 117 aa, Zea mays
  Clone ID: 700338620_FLI.pep
NSNAVASTNNHHVPCRTTGSSLLSLKHYNLSPHQDLVMHRIYLSLSMSSLHCSIAVARSKQPISLITLTPENKLSFLRLFTRLNQHVYRFSIQLVQILEFREPNDTRALDHIGSSTF

SEQ ID NO: 49626 - protein, 162 aa, Zea mays
  Clone ID: 700336826_FLI.pep
GKLFHPPALPPFSCRVYRYYLSYFWANDRRTRDALGIKEGTVDEWVRCHNDDQELPYESELKSVVKYHRNLTSRGYRAMVYSGDHDLLVPHLGTQAWVRSLNFPVVDDWRAWHLGGQSAGFTITYSNNMTFATIKGAGHTAPEYEPERCFAMFSRWILNRPL

SEQ ID NO: 49627 - protein, 82 aa, Zea mays
  Clone ID: 700332153_FLI.pep
DKHLSPFIASHLRASLRHVLYSTEEYNKYVTPIDHHHMPIANHVRTTHACGLARNLYIISIIHCCCCYVPTVRERPVYVRVE

SEQ ID NO: 49628 - protein, 153 aa, Glycine max
  Clone ID: 700741226_FLI.pep
RERMTISVFLVPSTPQLCNYRISWPIPTYPSLSSSKLTVSLCSPSPPTSVIEEGPSPSPELTSGCKACGREEVEQGCNGEGRIQGGIATVPGFGWWPIKAYRPCPAFVASGGRYRRQGQSMDEVVSGSGKTKTPIATDSNTSNKKESSKKSKR

SEQ ID NO: 49629 - protein, 306 aa, Glycine max
  Clone ID: 700739771_FLI.pep
LQSMAATSTSLFSSNLHSLNSQPFSSSLSFRNVHSTLSFPSSKPSRGVVAMAGSGKFFVGGNWKCNGTKDSIRKLVSDLNSATLESDVDVVVAPPFVYIDQVKNSITDRIEISAQNSWVGKGGAFTGEISVEQLKDLGCKWVILGHSERRHVIGENDEFIGKKAVYALSEGLGVIACIGELLQEREAGKTFDVCFQQLKAFADVVPSWDNIVIAYEPVWAIGTGKVATPEQAQEVHAAVRDWLKKNVSAEVSSKTRIIYGGSVNASNSAELAKQEDIDGFLVGGASLKGPEFATIINSVTSKKVVA

SEQ ID NO: 49630 - protein, 276 aa, Glycine max
  Clone ID: 700743611_FLI.pep
SSVICRLTLLSTRASRLVLEFCLRSRDSGAFFRGWVPTLLGYSAQGACKFGFYEFFKKYYSDIAGPEYASKYKTLIYLAGSASAEVIADIALCPFEAVKVRVQTQPGFARGLSDGLPKFVRSEGTLGLYKGLVPLWGRQIPYTMMKFASFETIVELIYKHAIPTPKNECTKSLQLGVSFAGGYVAGVLCAIVSHPADNLVSFLNNAKGATVGDAVKKLGLWGLFTRGLPLRIVMIGTLTGAQWGIYDAFKVFVGLPTTGGPAPAAAPAPGSELAKA

SEQ ID NO: 49631 - protein, 263 aa, Glycine max
  Clone ID: 700786228_FLI.pep
PVAYASCPIETINYVSAHDNETLFDIVSLKTPMDISVSERCRINHLATSIIALSQGIPFFHSGDEILRSKSLDRDSYNSGDWFNRLDFTYNSNNWGVGLPPQEKNEKNWPLIKPRLANPSFRPQKTDILATVDNFLNLLCIRYSSPLFRLKTANTIQERVRFHNTGPSWVCGVIVMSIEDGHNGFPGLSQLDPIYSFIVVVFNASPKEVSFVSPALQLRNLQLHPIQVSSSDDLVKSSRYEASSGCFVVPRRTTAVFVEPRKT

SEQ ID NO: 49632 - protein, 105 aa, Glycine max
  Clone ID: 700786258_FLI.pep
FNPPPSLAMYGVTKTALLGLTKALAAEMAPNTRVNCVAPGFVPTNFASFITSNDAVKKELEEKTLLGRLGTTEDMGAAAAFLASDDAAYITGETIVVAGGTPSRL

SEQ ID NO: 49633 - protein, 155 aa, Glycine max
  Clone ID: 700744975_FLI.pep
NRQIVEHRSQRFRAGTTDDGYWRRRSITYSRHVAVEVRGVAAVPAPAGQIDAARRTPVAGVRGGGAFVLAARVLCGRLLRRFVRLRHIHPQPSDRVPLPSGGPRDRDSQRRRPYTPHRRLRRVSPLRSPPPRVQVLRYDVKRAPPETTSLSVSED

SEQ ID NO: 49634 - protein, 176 aa, Glycine max
  Clone ID: 700747479_FLI.pep
ANTHITTRVMGTFGYMAPEYASSGKLTEKSDVYSFGVVLLELITGRKPVDASQPLGDESLVEWARPLLSHALDTEEFDSLADPRLEKNYVESELYCMIEVAAACVRHSAAKRPRMGQVVRAFDSLGGSDLTNGMRLGESQVFDSAQQSEEIRLFRRMAFGSQNYSTDFFSRASLNP

SEQ ID NO: 49635 - protein, 224 aa, Glycine max
  Clone ID: 700749247_FLI.pep
GEVTEVGSKVDKFKVGDKVAAGCLVGSCHSCQNCVNNLENYCQQVIPTYGAKYVDGTITYGGFSDFMVADEHFVVNIPSALPLDAAAPLLCAGITVYGPLRYFGLDKPGMHLGVVGLGGLGHLAVKFAKALGLKVTVISTSPKKKNEAIQHLGADFFVVSRDQDQMQAAMCTLDGIIDTVSAVHPLMPLIDLLKSHGKLVAVGAPEKPLELLLPPLIGEKKYSG

SEQ ID NO: 49636 - protein, 173 aa, Glycine max
  Clone ID: 700749283_FLI.pep
IIWINLRQFQDQLEAYDLLIDPRVLGALPVSRALREPQCNFLVSTFNCITSMDNIPSNVNGKVTTDSSRLRLSWVCGSDNLSASCNNILALPDHGNNRARDNVIHQTTKERLGRQISIVLLSKRTVHSNKFQTFQVETFLLKSANDLANKASLDAIRLDHDEGLLSHVSFDVF

SEQ ID NO: 49637 - protein, 207 aa, Glycine max
  Clone ID: 700750122_FLI.pep
TGPTLDNTHVSTVVKGSFGYLDPEYFRRQQLTDKSDVYSFGVVLFEVLCARPALNPTLAKEQVSLAEWAAHCYQKGILDSIIDPYLKGKIAPECFKKFAETAMKCVADQGIDRPSMGDVLWNLEFALQLQESAEESGNGFGDIHCEEPLYTDSKGKKDSDPGYDGNVTDSRSSGISMSIGGRSLASEDSDGLTPSAVFSQIMNPKGR

SEQ ID NO: 49638 - protein, 171 aa, Glycine max
  Clone ID: 700751504_FLI.pep
AKAPPSGSSFSQCQNVVVEALHVNATCSYKDCTFGGIWNGGGGAGENNFFIASFFFEVADEAGFVDPNAPNAKVRPVDFENAAKVACNTELKDLKSIFPRVKDGDVPYICLDLVYEYTLLVDGFGIDPQQEITLVRQVEYQDSLVEAAWPLGSAIEAISSLPKFEKLMYFI

SEQ ID NO: 49639 - protein, 198 aa, Glycine max
  Clone ID: 700756716_FLI.pep
SVGVILFELLVGIPPFNAEHPQTIFDNILNRKIPWPAVPEEMSPQAQDLIDRLLTEDPNQRLGSKGASEVKQHVFFKDINWDTLARQKAAFVPASESALDTSYFTSRYSWNTSDGLVYPASDDEDSSDADSLSGSSSCLSNRQDEVGDECWGLTEFDSGTSVNYSFSNFSFKNLSQLASINYDLTKGWKDDPPTNSSA

SEQ ID NO: 49640 - protein, 164 aa, Glycine max
  Clone ID: 700758982_FLI.pep
HLYVANVGDSRTIISKAGKANALSEDHKPNRSDERKRIENAGGVVMWAGTWRVGGVLAMSRAFGNRMLKQFVVAEPEIQDQEIDEQIELIILASDGLWDVVQNDDAVSLARTEEEPEAAARKLTEAAFSRGSADNITCIVVQFHHEKAELANPDKAEAASAQHE

SEQ ID NO: 49641 - protein, 223 aa, Glycine max
  Clone ID: 700844894_FLI.pep
FTYQHLKRVAEIARKLGIFVISDEVYAHVTYGSNPFVPMGVFSSIVPVITIGSLSKRWLVPGWRTGWIATCDPHGIFQKTGVVKSIISYLEITTDPPTFLQAAIPEILGKTKDDFLSKNLNILRETANIFYDLCKEIPCLTCPHKPEGAMCVMVEINFSQIKDIVDDMDFCAKLAEEESVLLLPGVTVGLKNWLRISFAVDTSNLVEGLSRIKAFCLRYAKMP

SEQ ID NO: 49642 - protein, 158 aa, Glycine max
  Clone ID: LIB3028-015-E1_FLI.pep
LIQMVETELEKRKQQGTYKGGFRGQSHFFGYEGRCGLPTNFDSTYCYALGYGAAALLQSGKTGLISSVGNLCAPVEEWTVGGTALTSLMDVERRHGKFKPVIKKAMVELEGAPFKKFASLRDEWALKNCYISPGPIQFTGPGSDAINHTLLLELGAQA

SEQ ID NO: 49643 - protein, 279 aa, Glycine max
  Clone ID: LIB3051-058-F12_FLI.pep
LFNNRKMSFQDIEAGRSFAARRNLINGKQDPTQAVASGIFQINTAVSTFQRLVNTLGTPKDTPELRDKLHKTRLHIGQLVKDTSAKLKQASEIDHNVEVNTSKKIADAKLAKDFQAVLKEFQKAQRLSAERETAYTPFVPQGALPSSYTASEVDISSDKTPEQRALLVESRRQEVLFLDNEIAFNEAIIDERDQGIQEIQSQIGEVNEIFKDLAVLVHEQGAMIDDIGSNIEHSHAATVQAKSQLAKASKTQRSNSSLTCLLLVIFGIVLLIVIIVLAA

SEQ ID NO: 49644 - protein, 292 aa, Glycine max
  Clone ID: 700730731_FLI.pep
APSHSERKNNNSCLKNVFKPPKRGEDYTIFQALFSIDMLILFIATVFGVGGTLTALDNLGQIGNSLGYPKKSLTTFVSLVSIWNYLGRASSGFVSEYLLTKYKFPRPLLLTLVMLLSCVGHILIAFGIPNSLYFSSVIIGFCFGAIWPLMFAIISEIFGLKYYSTLYNFGAVASPVGSYILNVRVTGYLYDKEALKQLGVKGLIRQKGKDLTCVGVQCYRMAFLIITASTLVGCVVSFILVLRTRNFYKGDIYEKFRVVELDTGESLPTFGSTGTTTTTTNRTEEPDKINRK

SEQ ID NO: 49645 - protein, 73 aa, Glycine max
  Clone ID: LIB3028-017-D4_FLI.pep
LMSQFMNKGCWSEDVVIHCGKGVTTIIGGGDSVAAVEKVGLADKMSHISTGGGASLELLEGKQLPGVLALDDA

SEQ ID NO: 49646 - protein, 268 aa, Glycine max
  Clone ID: LIB3051-008-C12_FLI.pep
NDTVGTVARARFSNQDVIAGVILGTGTNAAYVECAHAIPKWHGLLPKSGEMVINMEWGNFRSSHLPLTEYDHALDAESLNPGEQIFEKIISGMYLGEIVRRVLLKLAEEVDFFGDTVPPKLRIPFVLRTPDMSAIHQDTSSDLKVVGNKLKDILEINNTSLKMRKIVVELCDIVANRGARLSAAGIFGILKKIGRDTVKDGKKSVVALDGGLFEHYTKFRSSLESTLKELLGDEAAETIGIEQSNDGSGIGAALLAASHSQYLEVQES

SEQ ID NO: 49647 - protein, 63 aa, Glycine max
  Clone ID: LIB3049-003-A6_FLI.pep
SLKMKFISLILFLNEGETNTETKIMNAPPVTSCKAPLLQCVDLPPMQKMKLVLHVFPLFGNKI

SEQ ID NO: 49648 - protein, 626 aa, Glycine max
  Clone ID: LIB3030-001-B5_FLI.pep
VTQEDGPEVDGELTQLTRGVDGSSTKALPTIWLEVMRFFTNPHKPMILALSRPDPKKNITTLLKAFGECRPLRELANLTLIMGNRDDIDEMSSGNASVLTTVLKLIDKYDLYGQVAYPKHHNQSDVPEIYRFAAKTKGVFINPALVEPFGLTLIEAAAHGLPMVATKNGGPVDIHRALNNGLLVDPHDDIAIADALVKLLSEKNMWHECRKNGWKNIHLFSWPEHCRTYLTRVAACRMRHPQWQTNNPEDDKAVEEEESFNDSLKDEHDMSLRLSIDGDLAAASGGTGLDMQDQVKRILSKIRKTDSGSNGNGGGNINMLLDNVTSTSTSTNTSKYPLLRRRRRLIVIALDLYDNNGAPEKKMIEMVQKIIKAVQLDPQTARVTGFALSTAMPVIETVEFLTSGNVQVNEFDALICSSGSQVYYPGINTEEGKLLPDPDYEVHIDYRWGCEGLKKTIWKLMNGDENSPIEEDLKSSNAHCISYKIKDLSKAKKVDELRQKLRMRGLRCHPMYCRGSSRMHVIPLLASRAQALRYLFVRWRLNVANMYVILGETGDTDYEEMISGTHKTIIMKGVVSKGSEELLRGPGSYQRDDIVPNESPLVASITETTHENIANALKQLSKSGGI

SEQ ID NO: 49649 - protein, 579 aa, Glycine max
  Clone ID: LIB3051-050-G2_FLI.pep
EFCTFLGHNPFKIPCFGLTSISLHFPKNWLCSPCFQTPSLSYCRRLSSIMPSDSSVISNGHSNGSVNPLPNLQRTYQVVVAATQDWGIGKDGKLPWRLPTDLKFFKEITMKTSDPGKKNAIVMGRKTWESIPLEYRPLSGRLNVVLTRSGSFDIATAENVVICGSMSSALELLAASPYSLSIEKVFVIGGGQIFREALNVPGCEAIHLTEIQSSIECDTFMPPVDFTIFRPWYSSFPKVENNIRYSFTTYVRVRSSAAESAGQNIDPLLDNNSESMKFEVKDFSFLPKMISERHEEYLYLKLVQDIIAEGTTKGDRTGTGTLSKFGCQMRFNLRGNFPLLTTKKVFWRGVVEELLWFISGSTNAKVLQEKGIHIWDGNASREYLDGVGLTEREEGDLGPVYGFQWRHFGARYTDMHHDYSGQGFDQLLDVINKIKRNPDDRRIILSAWNPVDLKLMALPPCHMFAQFYVAHGELSCQMYQRSADMGLGIPFNIASYALLTCMIAHVCDLIPGDFIHVIGDAHIYRNHVRPLQEQLHNQPKPFPTLKINPKKKDIDSFVAADFKLIGYDPHQKIDMKLSV

SEQ ID NO: 49650 - protein, 483 aa, Glycine max
  Clone ID: LIB3055-005-A2_FLI.pep
SAASPTTFSLLHSATPSSSSTATSASPSPSRVQLTSSLRARPLRRLGFAAADPLLAASVAARVAAVRGGGKGARGVVSMAKKSVGDLSAADLKGKKVFVRADLNVPLDDNQNITDDTRIRAAIPTIKHLIQNGAKVILSSHLGRPKGVTPKYSLAPLVPRLSELIGIQIVKAEDSIGPEVEKLVASLPDGGVLLLENVRFYKEEEKNDPEHAKKLASLADLYVNDAFGTAHRAHASTEGVTKYLKPSVAGFLLQKELDYLVGAVSNPKRPFAAIVGGSKVSSKIGVIESLLEKVDILLLGGGMIFTFYKAQGLSVGSSLVEEDKLDLATSLLAKAKEKGVSLLLPSDVVIADKFAPDANSKVVPASAIPDGWMGLDIGPDSVKSFSEALDTTQTIIWNGPMGVFEFDKFAVGTEAIAKKLADLSGKGVTTIIGGGDSVAAVEKVGVASVMSHISTGGGASLELLEGKELPGVLALDEAVPVAV

SEQ ID NO: 49651 - protein, 257 aa, Glycine max
  Clone ID: LIB3056-012-A6_FLI.pep
NNMKKGLRHGEASPLLDKIVFDKVKQGLGGRVRLILSGAAPLSAHVEGYLRVVTCAHVLQGYGLTETCAGTFVSLPNEIEMLGTVGPPVPNVDVCLESVPEMGYDALASTPRGEICVKGKTLFAGYYKREDLTKEVLIDEWFHTGDIGEWQPNGSMKIIDRKKNIFKLSQGEYVAVENLENIYGQVSSIESIWVYGNSFEAFLVAVVNPSKQALEHWAQENGISMDFNSLCEDARAKSYIIEELSKIAKEKKVFFFT

SEQ ID NO: 49652 - protein, 338 aa, Glycine max
  Clone ID: LIB3055-009-G7_FLI.pep
ELPVVFMDLPEKLFFAAFLILSVAIDGTQADTMVTGTVFCDQCKDGQRSLFDYPINGAKVTLSCADSNGQITMSREETTNWFGSYTMRFDGAPDLSGCSAHVSGSGQGSTGCGEVAGPSQNPKLMFRMFDMEMYTVDSLLAQPAQPMQYCSTSSNPVPAPDTPTKPPPHFNLPPVPGFPPLPPLPPLPPLPSLPPLPSLPPLPSLPPLPPVIFAEASACPSEKWTLPEYKCYWRGVNGDTKVAVAFGMVAARRYGTDITLWHGLKGRGDPYRTLLREGITALLNSYNSFQFSYHPLGVVQHMNLALMGSTRSVLLTALRFKRANSGAGNVTCKFTTCK

SEQ ID NO: 49653 - protein, 345 aa, Glycine max
  Clone ID: LIB3028-035-F8_FLI.pep
FFDILESMDSSQGSTIAGFVDNASIKRNESSFDGVPVYVKELIAGGFAGALSKTSVAPLERVKILWQTRTPGFHSLGVYQSMNKLLKHEGFLGLYKGNGASVIRIVPYAALHFMTYERYKSWILNNYPVLGTGPFIDLLAGSAAGGTSVLCTYPLDLARTKLAYQVADTRGLIKDGMKGVQPAHNGIKGVLTSVYKEGGVRGLYRGAGPTLTGILPYAGLKFYMYEKLKTHVPEEHQKSIMMRLSCGALAGLFGQTLTYPLDVVKRQMQVGSLQNAAHEDVRYKNTIDGLRTIVCNQGWKQLFHGVSINYIRIVPSAAISFTTYDMVKSWLGIPPQQKSQSVSAA

SEQ ID NO: 49654 - protein, 242 aa, Glycine max
  Clone ID: LIB3028-032-C4_FLI.pep
AKQHFVDALLTLQDKYDLSEDTIIGLLWDMITAGMDTTAISVEWAMAELIRNPRVQQKVQEELDRVIGLERVMTEADFSNLPYLQCVTKEAMRLHPPTPLMLPHRANANVKVGGYDIPKGSNVHVNVWAVARDPAVWKDPLEFRPERFLEEDVDMKGHDFRLLPFGSGRRVCPGAQLGINLAASMLGHLLHHFCWTPPEGMKPEEIDMGENPGLVTYMRTPIQAVVSPRLPSHLYKRVPAEI

SEQ ID NO: 49655 - protein, 226 aa, Glycine max
  Clone ID: LIB3028-030-F9_FLI.pep
MAFPSVTSVTVENVTFPPTVKPPCSPNTFFLAGAGVRGLQIHHAFVKFTAICIYLQYDALSFLSVKWKTKSAHQLTESDQFFSDIVTGPFEKFMQVTMIKPLTGQQYSEKVAENCVAIWRSLGIYTDSEAEAIDKFLSVFKDLTFPPGSSILFTVSPNGSLTISFSSDETIPEVTSAVIENKLLSEAVLESMIGKNGVSPAAKQSLASRLSHLFKEPGVCDPQSHK

SEQ ID NO: 49656 - protein, 88 aa, Zea mays
  Clone ID: 700572502_FLI.pep
PIEGTSSFIVQCYTTFRACRVCKYGHSKTYSLHTNYTTRRHNTSLMHITNGNGLQLRVAQTRRQALTSTPTRHGLHHNLQCPPVPLLL

SEQ ID NO: 49657 - protein, 157 aa, Glycine max
  Clone ID: 700791189_FLI.pep
SLKDKYTMADILSEEQIVDFKEAFGLFDKDGDGCITVEELATVIRSLDQNPTEEELQDMISEVDADGNGTIEFDEFLSLMAKKVKDTDAEEELKEAFKVFDKDQNGYISASELRHVMINLGEKLTDEEVEQMIKEADLDGDGQVNYEEFVKMMMTVR

SEQ ID NO: 49658 - protein, 131 aa, Glycine max
  Clone ID: 700837058_FLI.pep
FIFSTAALVPVAAAGHAAIKVAKLEKWRREAIWNRVKDFHLLTGIPVTSHIISLVVGSEDKALQASRHLLQSGFHVTAIRPPTVPPNSCRLRVALSAVHTREDLENLAAALSRCINFQDTRIYDSNAYARL

SEQ ID NO: 49659 - protein, 70 aa, Zea mays
  Clone ID: LIB3070-003-B4_FLI.pep
SCQAIRVKTSMTRCSTRRIISWTHKGCFRSTPNPLPRSTYSVSSPLAATPTFSASRSGNLMSPNIASRAS

SEQ ID NO: 49660 - protein, 137 aa, Zea mays
  Clone ID: LIB3079-001-F12_FLI.pep
MESCIQLKEVQDDGDNDDDDDGAEDVDDNDEEEDTEDDDEDSDDDDDAREETEEEFLERYALAAAAGESVEEGDIDEETQDIELGSLDDVDIQQVVIPLMQKLPALQPAGAFPDSLVERIAETFPEYEQFLQALRRA

SEQ ID NO: 49661 - protein, 257 aa, Zea mays
  Clone ID: LIB3078-037-H3_FLI.pep
PNLVKLLGYCWEDRELLLVYEFMAKGSLENHLFRRGCAPLSWELRLKIAIGAARGLAFLHASEKQVIYRDFKASNILLDANYNAKLSDFGLAKLGPTGSKSHITTRVMGTYGYAAPEYVATGHLYVKSDVYGFGVVMLEMLSGQRALDPNRPNGQLSLADWAKPFLADRRRLARLMDPRFEGQYNSKQAFQAAQLTLNCLAGEPRSRPSMKEVVETLEQIESVKSRAREARGGSSRDRHHGRAGAAHQRSPRAGGEP

SEQ ID NO: 49662 - protein, 102 aa, Zea mays
  Clone ID: LIB3076-006-B6_FLI.pep
IDKGTIYILFLTHSPELLLRNINVKFTTVSFPLFSADGRIGHISSLSSGSTLLRLQLFVYCVNLRLVIVQHILSLLLHCCSHQIPLDVKRHRIQHYAFDVLE

SEQ ID NO: 49663 - protein, 106 aa, Zea mays
  Clone ID: LIB3075-043-B7_FLI.pep
DEYINYAEINSYKLVLQFWNICISWNQGESGQKKRRMVKWRIHLVVHFHEHTNTSGAYTLRNSGIALPSGRWYAVQVMAPVAAVVPILTREEHDQDNGKPNYQQEE

SEQ ID NO: 49664 - protein, 134 aa, Zea mays
  Clone ID: LIB3078-008-G10_FLI.pep
KLQRCLFQLRRIRPPRNGLPKQVVRWKRWRGLPLPHGVDDPDWPEHQSGCTQSEIPKPTPPADRCTTPDTQPTLLLATVLRGRLASENRGRFWHPDYSYYIKRSSFSLFMSHGHYSTLQGYVSISFFICIFFVV

SEQ ID NO: 49665 - protein, 322 aa, Zea mays
  Clone ID: LIB3075-030-D3_FLI.pep
AILSSSSSDEDGRGRRRRSYGSTIIIPTDMFWYLDADYYRRRRVENENGMNFIESVFSFVFGDGDPNDGLEEKRWKMIGQYISSNGGVVTAEELAPFLDVPPPSEESKDDESFVLPVLLRFQGHPEIDEQGNILYRFPSLQRTASSKSGRSREYVGTKWSAMFSGVEKYLEEKPWKFSKANATEKAMVAGLGGLNLFGVIILGNLLKQMTVTPGGLISFAAQLYPLLQIYAGSFFAIPLFRWFLLRKTNNGIKKRNKAREQRAQELVSPDSSLRRKLLSARDMAERKVITPEEIVYTTEKDLLEQDYEVKEWERRFKELESE

SEQ ID NO: 49666 - protein, 115 aa, Zea mays
  Clone ID: LIB3070-008-E12_FLI.pep
IFSYTKTEHAGSITLKNNIIDISLLVPILILAVYIIQPRNTRLPSISLFVANVAGDKGCILFVTKHAAAPGRRFAVAADQHFPFRIGHQEAFETGDRGIASCVTCDRYLLIVLAR

SEQ ID NO: 49667 - protein, 110 aa, Zea mays
  Clone ID: LIB3076-032-G3_FLI.pep
VTAVPHSESTILNTSSSLLRSLTICSSVSPRLTSLFASISPPIILSVITNNWLFIFIQNIACTDTHKVPVYAIPYERLPHWSIERQGMRSTTSASACQLLRFVLRVNLLG

SEQ ID NO: 49668 - protein, 120 aa, Zea mays
  Clone ID: LIB3078-049-H3_FLI.pep
QSAYNQAMQQNICDGKIHPLTSIHCTSTYNSSLCKLMEYCLSPAVITLQDRLKENELRLSMLKEECKQLEADTQGMRNGSPRRLMNHGAGGSGSPMAQSRHPFSSQGSPRSPSGGSRRRA

SEQ ID NO: 49669 - protein, 133 aa, Zea mays
  Clone ID: LIB3079-006-G4_FLI.pep
TARSWTAATSPSTRPSPAAAVEAAAVGTVVAVEAAATAVAGAVMAAAATAVAAATVAAAATVVVAAATAVATVAAATATPTGTGGTERWGPRGQVILFAAVMFTLVQRVYLRSSRVCCCPSVFLIARSLCVSC

SEQ ID NO: 49670 - protein, 201 aa, Zea mays
  Clone ID: LIB3076-018-G4_FLI.pep
LLLLACFFFAKIDCVCRLRASLRNANLQAKENIRKAAQEERELLLGGGEESTIRRRNLQTKVGMTSAAESITESLRRSRQMMVQEVERSASTLATFDESTSVLRKAEGEYQGHRSLLMRTRGLLSTMQQQDVLDRIILTIGFIIFSLAVLYVVSRRIGLLTLQRKLADAIRSGSLSADDIVANAQRGPAPANVPAPIYDEL

SEQ ID NO: 49671 - protein, 86 aa, Zea mays
  Clone ID: LIB3076-019-F10_FLI.pep
EQTQTHETAPTRPKKISKHISWLKGRGTDSARGGSACNHTNYSAGAASALVSVTLPESVDSDLPLSSDLPSLTVSFSSNPAVDEPS

SEQ ID NO: 49672 - protein, 250 aa, Zea mays
  Clone ID: LIB3075-008-E4_FLI.pep
KEFFVIGIQWASIYHPALWCAFSLIFSLLLVPQVLAVVFKDRFTYKSLCAYGGQRTLLKSLVGGFICCFVELARLVLVWLLLLLYAIYLVFIPWLFGHPITEDGSLTYMTHKGWILKGPSSSNEVVHAGIPDVMVIVLPHLCFVLVPTIVILAAMAAERTAYREHYLSRSGKKKDDYRKSRRQIEHENFWNGRWISKFLCLLCVVVLCKHWKLCRALVKAYAMNPLLHAPVLFFFVPLLMVFGIYKTRSI

SEQ ID NO: 49673 - protein, 194 aa, Zea mays
  Clone ID: LIB3075-017-A7_FLI.pep
TNEKEQQQAARALQQIEAKAKKSYQKDLENNQRNVDGDTSAAPGDGWVLDSASGYYHDKSTGLYYDSNSGFYYSDSLGKWVTQEEAYKSVQASKSDAGQSSASQTKAPAAAETAVPAIKGGAAPGRVVTKPLNPMRPIKGTPAPSAVAVNKRKRDDGKPKAVSKEEEAALKAREAARKRVEDREKPLMGLYKTY

SEQ ID NO: 49674 - protein, 146 aa, Zea mays
  Clone ID: LIB3075-034-A6_FLI.pep
QIFACRLAVARGTGNNYIRIAASNNYFGRSVAGFTTTTWKMSTRSLYRRVFQQRNGSSPFGAHVAHFRFQSQSCITAQSIGASTYSSAMLTAREARRLTCIICTVVSELTVSWAVKIASADLHYNFPTKHRGANGLTYGVLGAGPV

SEQ ID NO: 49675 - protein, 53 aa, Zea mays
  Clone ID: LIB3075-035-B10_FLI.pep
VPKEDVDIHILEGTKTFYYNITGKQKRNPLCLCLLNKGSCNLKFIFFHKRCSN

SEQ ID NO: 49676 - protein, 125 aa, Glycine max
  Clone ID: 700741457_FLI.pep
NAKNWDRPTATYVEKCKFPEDGSSPKSLRYIGSMVADVHRTLLYGGIFLYPADKKSPNGKLRVLYEVFPMSFLMEQAGGQSFTGKERALDLVPTKLHERSPIFLGSYDDVEEIKALYAAAEGEQE

SEQ ID NO: 49677 - protein, 45 aa, Glycine max
  Clone ID: 700744539_FLI.pep
KPCLHFIHLRSGNQEISMLSWNLCIQTLYLCYIYEQTKLVGYSHQ

SEQ ID NO: 49678 - protein, 304 aa, Glycine max
  Clone ID: 700762368_FLI.pep
MNINALARQSLINANGIIETTFLPSKYSVEMSSAVYKNWVFTDQALPADLIKRGVAIKDPSTPHGVRLLIEDYPYAADGLEIWAAIKTWVQEYVPLYYARDDDVKNDSELQHWWKEAVEKGHGDLKDKPWWPKLQTLEDLVEVCLIIIWIASALHAAVNFGQYPYGGLIMNRPTASRRLLPEKGTPEYEEMINNHEKAYLRTITSKLPTLISLSVIEILSTHASDEVYLGQRDNPHWTSDSKALQAFQKFGNKLKEIEEKLVRRNNDPSLQGNRLGPVQLPYTLLYPSSEEGLTFRGIPNSISI

SEQ ID NO: 49679 - protein, 229 aa, Glycine max
  Clone ID: 700742922_FLI.pep
DLNSATLESDVDVVVAPPFVYIDQVKNSITDRIEISAQNSWVGKGGAFTGEISVEQLKDLGCKWVILGHSERRHVIGENDEFIGKKAVYALSEGLGVIACIGELLQEREAGKTFDVCFQQLKAFADVVPSWDNIVIAYEPVWAIGTGKVATPEQAQEVHAAVRDWLKKNVSAEVSSKTRIIYGGSVNASNSAELAKQEDIDGFLVGGASLKGPEFATIINSVTSKKVVA

SEQ ID NO: 49680 - protein, 102 aa, Zea mays
  Clone ID: 700570469_FLI.pep
PSIVSSQSPEQNGKKAERQQLVKEAERCTQTRPERTLHAAHRRGSTRRRGAISCWPHPPPPPPPRRCYRRRRRRSGSGRRCAPGCRHGGPGSSAQSASAGCT

SEQ ID NO: 49681 - protein, 101 aa, Glycine max
  Clone ID: 700739616_FLI.pep
NQESMHMMKKVCGFAIVVMAALFLVEMSPMAEAVTCSPVELSPCLGAITSSSPPSTTCCQKVREQRPCLCGYLKNPSLRPYVNSPGSRRVASSCGVPFPTC

SEQ ID NO: 49682 - protein, 157 aa, Glycine max
  Clone ID: LIB3028-013-G6_FLI.pep
AAEVRIYGDPDFTFPYVPAHLHLMVFELVKNSLRAVQERFMDSDEVAPPIRIIIADGIEDVTIKVSDEGGGIPRSGLPRIFTYLYSTAKNSSSVEHEPSDIGTMENVTMAGYGYGLPICRLYARYFGGDLQVISMEGYGTDAYLHLSRLGDSQEPLP

SEQ ID NO: 49683 - protein, 260 aa, Glycine max
  Clone ID: LIB3055-002-G6_FLI.pep
FFRSSRFARLQGIQCAMAGKNAYLRFTCSTGDAMGMNMVSKGVQNVLDFLLNDFPDMDVIGISGNYCSDKKPAAVNWIEGRGKSVVSEAIIKEEVVQKVLKTNVSALVELNMLKNLAGSAVAGALGGFNAHASNIVSAIFIATGQDPAQNVESSHCITMMEAVNDGRDLHISVTMPSIEVGTVGGGTQLASQSACLNLLGVKGASKESPGSNSRLLATIVAGSVLAGELSLMSAIAAGQLVNSHMKYNRSSKDVTKISSS

SEQ ID NO: 49684 - protein, 183 aa, Zea mays
  Clone ID: 700573954_FLI.pep
NKLKKMALRVIAESLSEEEIGGLKELFKMIDTDNSGTITYDELKDGLKRVGSDLMEPEIQALMDAADIDNSGTIDYGEFLAATLHMNKLEREESLVSAFAFFDKDGSGFITIDELSQACEQFGLSDVHLEDMIKDVDQNNDGQIDYSEFAAMMRKGNAGGAGRRTMRNSLHVNLGELLKPTET

SEQ ID NO: 49685 - protein, 62 aa, Zea mays
  Clone ID: LIB3067-030-A12_FLI.pep
KMNLMSSGDEIKQGGKEQHSIGMHNSKGGYYARFRAPRFVKTRAPQNSNLLPGGLAGTMTKT

SEQ ID NO: 49686 - protein, 129 aa, Zea mays
  Clone ID: LIB3067-030-A2_FLI.pep
SNRSPTPNHPHHSRSLADAMDVDPAADQRRKNKGGLESELERHYDDLQREMMLMAADRPHKQLQQHRRHGHRPDLLQNCDLPPPAKLFGPVPTLQRLETAAAKDHKADDGLLRALRLSQSRAREAEDKL

SEQ ID NO: 49687 - protein, 412 aa, Zea mays
  Clone ID: LIB3069-004-F5_FLI.pep
HRGILLDTARNYYPVRDILRTIRAMASNKLNVFHWHITDSQSFPIVLPSVPNLANFGSYSPVMRYTDQDVRRIVRYAGAFGIRVIPEIDMPGHTGSWAGAYPEIVTCANKFWAPTAKPALAAEPCTGQLNPLNPKTYRVAEDVLRDLAALFPDPYLHAGADEVNTACWEDDPVVRGFLADGGSHDRLLELFVNATRPFLVHELNRTSVYWEDVLLGPKVSVGQTVLPHDTTVLQTWNNGAENTKRIVAAGYRAIVSSASYYYLDCGHGGWVGNDSRYDVQEKEHDGMPLFNDPGGTGGSWCAPFKTWQRIYDYDILHGLTEDEARRVLGGEVALWSEQSDAAVLDGRLWPRASAAAETLWSGNKGSNGRKRYANATVRLNEWRYRMVARGIRAEPIQPLWCPMHPRMCNLSQ

SEQ ID NO: 49688 - protein, 56 aa, Zea mays
  Clone ID: LIB3069-014-G11_FLI.pep
RRNMGELNESAIGVLQFTTNYLMPSFFCFPLYIFSTGVTRIVVLGLFRQTRDGCLS

SEQ ID NO: 49689 - protein, 101 aa, Zea mays
  Clone ID: LIB3069-018-A3_FLI.pep
RESRPVSRRRLSHRKIPKSAAERREPERGAQPERSEKGKKMVRVATYFAMTFGAFLFWQSMDRVHVWIALHQDEKKERMERELEIKRMQAELLAQAKENES

SEQ ID NO: 49690 - protein, 105 aa, Zea mays
  Clone ID: LIB3067-023-C3_FLI.pep
FFPLRLKFDMFTTLTHFFAWVPTQFRRLVFALQCDNGCEFDNATHSFLTHGIQLRRSCPYTSPRTAEPNASFAAPPNRMCLKMHSSSQLPRSGHQQASYIQFQNI

SEQ ID NO: 49691 - protein, 169 aa, Zea mays
  Clone ID: LIB3067-025-F8_FLI.pep
ERKIKRQNPSMCDCDLCTGLSLPPQPALIASNAFCISRVIALSTLPEDIFLCAFCKWSLSELLLRPAFLPQIGHTFIAGLLCCHSMEIFPCSFLSRSSKILANPSLGCARRCTFFSMFHASRRVQFLKRKRGNYEMMTASRTIKNKERCNSNLPILTDVNSGLIDLKIT

SEQ ID NO: 49692 - protein, 153 aa, Zea mays
  Clone ID: LIB3067-047-H1_FLI.pep
PLHITRGGSRLFDLLHGSNSVHHHTRMHRGARHSRARRPCAHNLLRLVTNQPNQATQQVQSRRVCCALLYRPPATSRRRGALGVAAAVVANGLELEGRGVGGEPLLDGEQLLPAPLVRARGGDLHVVAVPPVVVAGAVGGQPHPAWRLLHAGP

SEQ ID NO: 49693 - protein, 107 aa, Zea mays
  Clone ID: LIB3068-016-A9_FLI.pep
LKLVCSEGDDGIASGRFSQELPMQTTAVYDATGMEAERVLISEIFGSTPLFTRGADSDSFRKQSSSGPLMTGKNRKFWQRLRSLSRGSMSEHGISPDYETRSQYSGR

SEQ ID NO: 49694 - protein, 86 aa, Zea mays
  Clone ID: LIB3068-020-E1_FLI.pep
HQLPRAGRRRHAAAGCSRRLRGLGGDRRVLRPRRVRVRWPARPLRLRHSGPVGYVAAAGVERGGLKPRSCTRRHVSVSSARVVDSW

SEQ ID NO: 49695 - protein, 92 aa, Zea mays
  Clone ID: LIB3068-020-G11_FLI.pep
GKSLRMSLLLLFTQTMYKHGLNRRPARDSVTEQTNKQQTPPQHSCISPKRYFHPGNSQAHFPRAGAITFDKHAVQQVLVQTKGKVTFVADLC

SEQ ID NO: 49696 - protein, 58 aa, Zea mays
  Clone ID: LIB3069-011-C5_FLI.pep
FVFHRYKMLLHLFPPILNSLGREPIAIVEIIQSRWWKVDIDLCVVSGIINRTCTVWCW

SEQ ID NO: 49697 - protein, 130 aa, Zea mays
  Clone ID: LIB3069-022-F6_FLI.pep
SSSSEARFPIPDIILRTVTGSMFPVIDPGQVISIQEHEYVYCLAIVKSMKLNIIGQNFMTGLRVVFDRERKILGWKKFNCFSPSTSENYSPQEARNPAGVSQLRPLNNSAPAALYDSLLLMLILVHLAVN

SEQ ID NO: 49698 - protein, 169 aa, Zea mays
  Clone ID: LIB3069-052-G10_FLI.pep
PPPSTSPSPSLVVRSPRQTVSLIRNRRPHRDWAPSSRSPSFAARDHGPKPSEVYGFVGSITTVIATAVYLAWAYTPEPVLQSLGITYYPSKYWALAVPSFVVVTVVLSMGIYMGLNFAATPPPTSFSTIFDEKSREHTAFFPATEDERPIEPISDIGIDRINTLMFGDR

SEQ ID NO: 49699 - protein, 427 aa, Zea mays
  Clone ID: LIB3069-053-C7_FLI.pep
HGLKDGWYDGVSIFLAVFLVAAVSAVSNHGQARRFDRLATESDNIAVAVVRGGRRQELSIFEVVVGDVVVLNIGDAVPADGVFMQGHALQVDESSMTGEPHPVDIDAEKSPFLASGVKVIDGCGHMLVTAVGTDTAWGEMMGSITREKTEPTPLQERLEALTSSIGKVGIAVAVLVFAVLTARHFTGSTRDEQGNPTFDRHHVSFNTVFTALVGIFQQAITIIVVAIPEGLPLAVTLTLAFSMKRMVKEHALVRTLSACETMGSVTAICTDKTGTLTLNQMKVTEFWVGTDRPKAAATVAAAVVSFLRQGAGLNTTGSVYKPDNVSPPEISGSPTEKALLSWAVAELGMDADALKRSCKVLHVEAFNSDKKRSGVMIRDNATGALTAHWKGAAEMVLASCSAYVGSDGAARELDAGKRRKLQEIISG

SEQ ID NO: 49700 - protein, 299 aa, Zea mays
  Clone ID: LIB3069-053-G3_FLI.pep
PDHIILLVSPQPSSISLSSTLPSIDPSYCVRMGRGKIEIKRIENTTSRQVTFCKRRNGLLKKAYELSILCDAEIALIVFSTRGRLYEYSSNSVRSTIERYKKASASTSGTAPVTDVNSLQYFQQEAAKLRQQIQTLQNSNRHLMGESTGNMTAKELKGLESRLERGIGRIRSKKHELLLAEIEYMQKRESDLHNENMFLRAKVAEAERALEQEAAEDQTMMVPAAVRGATTELKALPASFDASGYYQYQQHQHVVAAASAASSSQYAEQPQGQQEYHHQTALHLGYHVKIDSAADKGFL

SEQ ID NO: 49701 - protein, 172 aa, Zea mays
  Clone ID: LIB3067-032-D4_FLI.pep
GRGVVLVQVVHRGRAGDGDDGIGRRSRRVPGAEPLGGAAVRVARRHGGAGEVLGAVLGGVSVAAGELLDEGAETSGASLDAHGVGDVHHFDGFLAPALVLPRRGAAPPAPRSIASGTVLLPLAPLLVVHRSAQLCERRRSSETERSWKRVIGMRGWRQGATSGSGHARTNRR

SEQ ID NO: 49702 - protein, 60 aa, Glycine max
  Clone ID: 700725821_FLI.pep
KRKIRNKSIVSNNSSQPCHPNLEQNLPTLPLYLEGGGGGGVDEPHTSTTDLDLHPSIRIL

SEQ ID NO: 49703 - protein, 65 aa, Zea mays
  Clone ID: LIB3068-008-D5_FLI.pep
KVMASRPDTNDFQKAVVGVPPIEATDEHGKDVARHQHVYHQGVLPHPLHGDGRSSEPVQIHKSID

SEQ ID NO: 49704 - protein, 84 aa, Zea mays
  Clone ID: LIB3069-030-B5_FLI.pep
AKRKASVLSYQGLRSSKSGVVKKVKVTQQPSNQGKQRKTDETGATAGKAKRPAVAARKAKQLAKKRKVDASTPENTHRSKKPRK

SEQ ID NO: 49705 - protein, 192 aa, Zea mays
  Clone ID: LIB3067-027-E6_FLI.pep
EGSVRTLPNMALGALARLLRLAPTPRLARPFAAKVRASRPQEPELPSEDDNDFAGGELTAPTEGIGKPLAEVLKELGKRVPDSLVKTRVENNGFAIKYIPWHIVNKILNIHAPEWSGEVRSIVYSFDGKTVSVVYRVTLHGIDAEIYREATGTASVDDTSYGDPIQKAEAMAFRRACARLGLGLHLYHEDMS

SEQ ID NO: 49706 - protein, 158 aa, Zea mays
  Clone ID: LIB3067-050-G4_FLI.pep
QGQSHLPSTQAGSHTELSLRRIKSRSRGALAVAVGVAGLPQHGCLRDQRGHHVRVHVGRRPPVLEVAFAFLLGVAAHPHRRPAVRDAPDEGVDVGGLVAAGEAALVAVPVRGDVLPVPEAQLADRLLDHLVPAVTPHRLGAVVGVCTSAIPVPRNWLG

SEQ ID NO: 49707 - protein, 198 aa, Zea mays
  Clone ID: LIB3067-058-E10_FLI.pep
DFIPSGRRRPPRGAIRRQRAPAHQDPGLCCESAYPFTMINFVLLISRQGKVRLTKWYSPYTQKERTKVIRELSGLILTRGPKLCNFVEWRGYKVVYRRYASLYFCMCIDAEDNELEVLEIIHHFVEILDRYFGSVCELDLIFNFHKAYYILDEILIAGELQESSKKNVARLIAAQDSLVEAAKEEASSISNIIAQATK

SEQ ID NO: 49708 - protein, 71 aa, Zea mays
  Clone ID: LIB3069-024-B12_FLI.pep
GLNKASSKADEGSSILCSLSLSMVATKLNLSGSDIVDDEPLSLSLGLPSVVGGRADQEMKQFLPEKPGINT

SEQ ID NO: 49709 - protein, 94 aa, Glycine max
  Clone ID: 700870920_FLI.pep
TSRGKFRCSWLAPLLRRVASVGGCSKRITSQDDPKHFPNQIKPVARPQHSVRRNAYFSLNDGHWFVSSGIMKGREQTTLTRRIDNVPLYCGTWA

SEQ ID NO: 49710 - protein, 222 aa, Glycine max
  Clone ID: LIB3028-041-D1_FLI.pep
DSAKINYCKGTSFFETTLMITCASKIAKMQSLLLGGSLCDLGSGGVFLLNTLDDSNSYGLTHVPHSKTTKGRILRESFNHHGLGWNHLNHTSITILQKFGLLLKLLTRSPVNLGQDFRKLHSNVRSVAVKDWCVSITNLARMVHDNDLGCEVGSFLGRVVLGVGCNKTTLEILDCNILHIKSNIVTWKSLCESLMVHLNRLNLSCQPSGTKSHHHTRLHNPS

SEQ ID NO: 49711 - protein, 157 aa, Zea mays
  Clone ID: UC-ZMFLMO17228F12_FLI.pep
IMDSPRQLSSPTLTNVIPLAAGIIVALVGIAAKIQPLQSGIMGFTAGVSGAATASLATKKEREILLLAEQELSKTKINNTLSELQEQKKIIDKDITRLEERRSQSEKIAGELEIRQAKRDSIEAEIKNLQAVQQNLESRVAEINKANPTLENLEIPE

SEQ ID NO: 49712 - protein, 118 aa, Glycine max
  Clone ID: 700838540_FLI.pep
ATCHGGPAEIIEHGISGFHIDPYHPDQASQLLVEFFQKSKEDPSHWKKISDGGLQRIYERYTWKIYSERLMTLAGVYSFWKYVSKLERRETRRYLEMFYILKFRDLANSVPLAKDDAS

SEQ ID NO: 49713 - protein, 148 aa, Glycine max
  Clone ID: 700837701_FLI.pep
YKVLSSMENKPDKMLHDNEECIDSTSTNTNHPEIGVGKGVLKNFTRSSGDVAETKIAADWKGGENCPKGTRPEEIDASGDVNMEASITPDDVIRAGGFGARDDISSFLPVASDSTDFEASIRDARDYEEPQGQVSRPGLGWTGATKGE

SEQ ID NO: 49714 - protein, 329 aa, Glycine max
  Clone ID: 700791932_FLI.pep
DENKIGQGGFGVVYKGVLPSGQEIAVKRLSVTSLQGAVEFRNEAALVAKLQHRNLVRLLGFCLEGQEKILIYEYIPNKSLDYFLFDPAKQKELDWSRRYKIIVGIARGIQYLHEDSQLRIIHRDVKASNVLLDENMNPKISDFGMAKIFQADQTQVNTGRIVGTYGYMSPEYAMRGQFSVKSDVFSFGVLVLEIVSGKKNTDFYQSNHADDLLSHAWKNWTLQTPLELLDPTLRGSYSRNEVNRCIHIGLLCVQENPSDRPSMATIALMLNSYSVTMSMPQQPASFLRGRGPNRLNQGMDSDQSTTDQSTTCSIPWSVNEVSITDVYPR

SEQ ID NO: 49715 - protein, 59 aa, Glycine max
  Clone ID: 700888243_FLI.pep
ASEGVGSTHTGSHRDFDLNLPAFPDFSTRFFVDDEVTSPHPSKKSRLNLTIPKIEIPQY

SEQ ID NO: 49716 - protein, 146 aa, Zea mays
  Clone ID: 700570704_FLI.pep
RARRRHPRDRPPRAPPRGAAPRGGDLRRGRRRRRGKRHPPHPPRAPRGSCPGGLPRLPRHQPLLPHQQGHPQHDAPRGRGLILPCQFRPGLFCSRTCSTWSVAKGIRPCGLRTQIVPVKYGLQSCRLCPYNMIDSRVILGIAVSCC

SEQ ID NO: 49717 - protein, 179 aa, Glycine max
  Clone ID: 700844012_FLI.pep
LLEIIALSLGLEAKRFEEFFIKDQTSFIRLNHYPPCPSPHLALGVGRHKDIGALTILAQDDVGGLEVKRKADQEWIRVKPTPGAYIINVGDLIQVWSNDLYESVEHRAMVNSEKERFSIPFFLFPAHYTEVKPLEELTNDQNPAKYRPYNWGKFLVRRKGSNFKKLNVENIQIYHYKIA

SEQ ID NO: 49718 - protein, 275 aa, Glycine max
  Clone ID: LIB3051-002-B9_FLI.pep
GFEDSQTVLRYDYGKYYASKTIFEDGKNRRVLLGWVNESSSVSDDIKKGWAGIHTIPRAIWLHKSGKQLVQWPVVELESLRVNPVHWPTKVVKGGEMLQVTGVTAAQADVEISFDVNEFGKGEVLDQWVDPQILCSRKGAAVKGGLGPFGLLVFASRGLQEYTAVFFRIFRYQNKNLVLMCSDQSRSSLNKDNDMTTYGTFVDMDPLHEKLSLRTLIDHSVVESFGGEGRACITARVYPTIAINEKAQLYAFNNGTAAVKITRLSAWSMEKAKIN

SEQ ID NO: 49719 - protein, 172 aa, Glycine max
  Clone ID: LIB3028-040-F8_FLI.pep
EMLVNLGIPWVIIGHSERRQLLNESNEFVGDKVAYALQQGLKVIACIGETLEQREAGTTTAVVAEQTKAIAAKISNWDNVVLAYEPVWAIGTGKVATPAQAQEVHADLRKWVHDNVSAEVAASVRIIYGGSVNGGNCKELAAQPDVDGFLVGGASLKAEFVDIINAATVKKN

SEQ ID NO: 49720 - protein, 106 aa, Glycine max
  Clone ID: 701208747_FLI.pep
ESVILAKFIEAVQSCPDPSSQAALKLVCDLYALDRIWNDIGTYRNVDYVAPNKAKAIHKLAEYLSFQVRNIARELVDAFDLPDHVTRAPIAKRSGAYSQYTQYVGF

SEQ ID NO: 49721 - protein, 387 aa, Glycine max
  Clone ID: 701210428_FLI.pep
PLLYKNNISRQRPYLAPNMSSLNLGTWPRPTSMLNTPSHLLPPFHTLTLTTTLPKLASGTPKLISSFPLVSAVPTKEHTVTTQEIQLQDTPLNFDFKGYMIAKAHTVNQALDAAIALRDPHKIHQAMRYSLLAGGKRVRPVLCIAACELVGGTEATAIPAACAVEMIHTMSLIHDDLPCMDNDDLRRGKPTNHKVYGEDVAVLAGDALLAFAFEHVAASTEGVSPSRVVRAIGELAKSIGTEGLVAGQVVDIDSEGVANVGLETLEFIHVHKTAALLEAAVVLGAIVGGGSDEEVEKLRKFARCIGLLFQVVDDILDVTKSSEELGKTAGKDLVADKVTYPKLLGIDKSKEFAQELLKDAKEQLSGFDPPKAAPLFALTNYIAYRQN

SEQ ID NO: 49722 - protein, 300 aa, Glycine max
  Clone ID: LIB3065-013-B12_FLI.pep
EKIRKSLHNSDAVVQLIKSCFTATLGMNSSPISSSGGVGALLGQGFKYHLCGGLCPVAPGILYLRAYRSIRDIVFLTEEIVSILMHSVREIVCSGLPRERLEKLKATKDGIKYGQASLAASMTRVKLAAALGASLVWISGGLMLVQLLIKETLPSWFISVHRLDQEEKSGGMVAMLGGYALAYFAVLCGAFAWGVDSSSAASKRRPKVLGTHMEFLASALDGKISLGCDSATWRAYVSGFVSLMVGCTPNWVLEVDVHVLKRLSNGLRQLNEEELALALLGVGGVGTMGAAAELIIDTEI

SEQ ID NO: 49723 - protein, 104 aa, Glycine max
  Clone ID: 700875570_FLI.pep
KLHKTSNDQKPVSPLMFSSNMNLLFNSKGHRLSQFAVLESIEHLEVTFALTAFKIGHVLPEAIHTSECQEPVRVNLPCVLLMNTLESTLGDFVPVRWISLALLK

SEQ ID NO: 49724 - protein, 104 aa, Glycine max
  Clone ID: 700645507_FLI.pep
KPPGHVYPLAILCHDIMPPPLKVEKEIGEKRIISFHGAGISVAPALSFSETTATSENPEKAKELFSKALYDSVTEQYNVLKSAIHGKKGFEASTPVVSLSQPWK

SEQ ID NO: 49725 - protein, 157 aa, Glycine max
  Clone ID: LIB3028-013-H6_FLI.pep
FWIWFPLLISSLPNWGERVMFVLASFAVCSIQHLQFCLNHFAADVYEGPPNGNDWFEKQTGGTLDISCSTWMDWFFGGLQFQLEHHLFPRLPRAQLRKISPLVIDLCKKHNLPYRSLTFVEANLWTLKTLRTAALQARNLSNPSSQNLLWEAFNTHG

SEQ ID NO: 49726 - protein, 199 aa, Zea mays
  Clone ID: UC-ZMFLMO17227A08_FLI.pep
TVKITNLATGQLQATLVVAPTIARAIVWIGPDCLAIGGIDGHIRLWYPFTEQAPVLVTAHTDIVNSLSWDANSNLLASSSSDSTVKLWDVETGICHRIWREAVPVRWATWSPDGHTLAISREDGGIVLWNPHSDQAPRYLNGHPETVWSLDWNPDGAWLASSSHDATVRLWDVVTGRCRRILRSHQNWVWYARWHPHQP

SEQ ID NO: 49727 - protein, 91 aa, Zea mays
  Clone ID: 700570446_FLI.pep
RTSSPSSTASDWTVACSTTSGWRTTALLVLLLLHTTSSLVFVRSNKQFSSSSLLFFLQSEFRVLQINKGIHSLHPQSARMPSLAALVLLCI

SEQ ID NO: 49728 - protein, 150 aa, Zea mays
  Clone ID: 700575270_FLI.pep
PRYARAARGRGVTRTSSSSTPSRPSSSTTSTTKTSSPTVASSAPTRCSSPAAEPPLTLSSSTPPTRISSSSTSRAPLSRWATSRRSPGPMARSGRTAGGSTTPDRLLCDPSTVWLLGLLIQWPQLPEVYYLFPSNSMDFPCPSVVFFQNC

SEQ ID NO: 49729 - protein, 238 aa, Zea mays
  Clone ID: 700574042_FLI.pep
KGLFKNLKFYLSREVPRESLLFIIPAFGGTVSWEGEGAPFKEIDEDITHQIVDRPTQSHVFLSREYVQPQWVFDCVNARIILPTEGYLVGRVPPPHLSPFVDNDAEGYMPEYAETIKRLQAAARNEVLPLPGIGDEDLDNSLVAAMMDRTASNEAAEKKRKLEMLEKQYIDELKKEIDGVAFSSLSNKEADKSPNAKDDTQSDREEDASKQEEDDDDDIGTALMSRKQRGLYKAMKMG

SEQ ID NO: 49730 - protein, 281 aa, Zea mays
  Clone ID: 700571779_FLI.pep
AIAQSAHCLAQGKIGSGFDVSAAVYGSQRYVRFSPEILSSAQAIGGTVLPDVVSDVLTQRWDHENKQFSLPPLMTLLLGEPGTGGSSTPSMVGSVKRWLKSDPEKSRDTWSKLAIANSTLENQLRILKGLSENHHEAYESMVRSCSRLTYGKWAEVATNQHQELIIRSLLAARDACLEIRLHMREMGIAAGVPIEPDSQTRLLDATMNMEGVLLAGVPGAGGFDAVFSVVLGDASNAVAHAWSSVGVLPLPVREDCRGVSLEDADPRTREVSAAVWSIQIN

SEQ ID NO: 49731 - protein, 147 aa, Zea mays
  Clone ID: 700571781_FLI.pep
FILLGPHNIGVAMATTHGLVVPNIKKVQSLSILEITKELARLHEMASQNRLSAADIEGGTITLSNIGAIGGKFGSPLLNLPEVAIIALGRIQKLPRFDDDENVYPSSIINVTVGADHRVVDGATVARFCNEWKSLVEKPELLLLHMR

SEQ ID NO: 49732 - protein, 159 aa, Zea mays
  Clone ID: 700572185_FLI.pep
KLDKATYLQYKYYFLPKLLNISGSATAWRHMKFLALLQCWLNERPALGDKDERNPPRRRHPRRLAHVEVRLSHAGGELPFEVVQKADKRELQDRQREVDTGADPPAGAERDELVVGTSEVHRGTAAHEPLRAELVRCVPHSRVPPDGPHVDEESRLGRD

SEQ ID NO: 49733 - protein, 102 aa, Glycine max
  Clone ID: LIB3051-055-G5_FLI.pep
EFSGDEYKSAKVDPIAQFSKPVASHMNKDHAEDNKVIVQHWTSVPVDFAFILDLDSLGFNVKAGYQGDTFKLRVPFPRCAEDRKDVKTLIVEMLQAARPKVD

SEQ ID NO: 49734 - protein, 240 aa, Glycine max
  Clone ID: 700835753_FLI.pep
KQRMPLIYVKLYTYQIFRGLAYIHTVPGICHRDLKPQNLLVDRLTHQVKLCDFGSAKVLVEGESNISYICSRYYRAPELIFGAAEYTTSVDIWSAGCVLAELLLGQPLFPGENQVDQLVEIIKILGTPTREEIRCMNPNYTDFRFPHIKAHPWHKVFHKRMPPEAIDLASRLLQYSPKLRYSAVEAMAHPFFDELREPNARLPNGRPLPPLFNFKQELDGAPPELLPKLIPEHVRRQTQM

SEQ ID NO: 49735 - protein, 65 aa, Glycine max
  Clone ID: 700840271_FLI.pep
MFLCNSVGENQHQMHCLGTMAYYKLQLRDRSIELATFIVNKWDSYLPKNMGPHTFFSYVVFCHVF

SEQ ID NO: 49736 - protein, 122 aa, Glycine max
  Clone ID: 700840436_FLI.pep
LNMPKYSLTKKQRKTEQEQGKHTNPPSSTCVHQHTNPKPLTMFLTYDSPTEIGLPEIPNGDREICRLISRRTGLISGLPGDQSTIFSDSCLIFITWLCIGTPFCANLSSLFIFMFSMLSITQ

SEQ ID NO: 49737 - protein, 132 aa, Glycine max
  Clone ID: 700840385_FLI.pep
VKSYDMPCTIESVSLEPKYGNKFVAGGEDMWVHVFDFHTGNEIACNKGHHGPVHCVRFSPGGESYASGSEDGTIRIWQTGPLTLDGSETVSANGSVDKVKVTADEVSHKIEGFQIADEGKSKEKDEAVEESS

SEQ ID NO: 49738 - protein, 173 aa, Glycine max
  Clone ID: 700844141_FLI.pep
ERADPHIIHRDIKSSNVLIFDDDVAKIADFDLSNQAPDMAARLHSTRVLGTFGYHAPEYAMTGQLNAKSDVYSFGVVLLELLTGRKPVDHTLPRGQQSLVTWATPRLSEDKVRQCVDARLGGEYPPKAVAKMAAVAALCVQYEADFRPNMSIVVKALQPLLNARHGPAGETPN

SEQ ID NO: 49739 - protein, 54 aa, Glycine max
  Clone ID: 700842062_FLI.pep
ECRQRSLSPWQMWRQHPLQDQHLHQLRHHQVLKGGSSIRKKLQGSFSVAGYYIS

SEQ ID NO: 49740 - protein, 156 aa, Glycine max
  Clone ID: 700844911_FLI.pep
LDHCDDLIQLPSSICGMKSLQNLSLTNCHNLTQLPVELGKLRSLEILRLYACPDLKTLPNSISHMIRLKYMDISQCVNLTCFPEEIGSLVSLEKIDMRECSMIRNVPKSALSLQSLRLVICDEEVSGIWKEVEKAKPNNFHIQVSEQYFDLDWLKE

SEQ ID NO: 49741 - protein, 89 aa, Glycine max
  Clone ID: 700844831_FLI.pep
GSRYYTKSFKGSVDAFHVNTVDTTGAGDSFVGALLAKIVDDQSILEDEPRLREVLKFANACGAITTTQKGAIPALPKEEAALKLIKGGS

SEQ ID NO: 49742 - protein, 498 aa, Glycine max
  Clone ID: LIB3052-011-E8_FLI.pep
EERMAVASSSSLITLKVKPCIFGSPRRSAVVRNCAKSTAGTISTSWSLDSWRAKKALQLPEYPDANELDLVLQTLSSFPPIVFAGEARNLEEKLAQAAMGNAFLLQGGDCAESFKEFTANNIRDTFRVILQMGVVLMFGGQMPVIKVGRMAGQFAKPRSDSFEEKNGVTLPSYRGDNVNGDAFDAASRIPDPQRMIRAYCQSVSTLNLLRAFATGGYAAMQRVNQWNLDFMEHSEQGDRYRELAHRVDEALGFMNVAGLTADHPIMSTTDFWTSHECLLLPYEQALTREDSTTGLHYDCSAHMLWVGERTRQLDGAHVEFLRGVANPLGIKVSDKMVPDELVKLIDILNPKNKPGRITVIVRMGAENMRVKLPHLIRAVRRAGQIVTWVSDPMHGNTIKAPSGLKTRSFDAIRAELRAFFDVHDQEGSYPGGVHLEMTGQNVTECVGGSRTITYDDLSSRYHTHCDPRLNASQSLELAFNIADRLRKRRLNSTRSLGI

SEQ ID NO: 49743 - protein, 423 aa, Glycine max
  Clone ID: LIB3030-001-A2_FLI.pep
FVNKGGQIGELDFRFPIGAPIHGIRAFLTTNQLNTYDKARNAVALALSPVVRALVDPDGALRDIRNLDSISFSDWFLSKGGTRMSITKMWDPVAYALGFIDCDNISARCMLTIFALFATKTEASLLRMLKGSPDVYLSGPIRKYIMDRGGRFHLRWGCRELLYDKSADGSIYVTGLSMSKATAKKIVKADAYVAACDVPGIKRLLPSEWREQEFFNNIYELVGVPVVTVQLRYNGWVTELQDLEKSRRLGKAVGLDNLLYTPDADFSCFADLALSSPEDYYIEGQGSLLQCVLTPGDPYMPLPNDEIIARVAKQVLALFPSSQGLEVTWSSVVKIGQSLYREGPGKDPYRPDQKTPVRNFFLAGSYTKQDYIDSMEGATLSGRQASAYICDAGEELVALRKKLDAEFKDDLKISNTKDELSLV

SEQ ID NO: 49744 - protein, 126 aa, Glycine max
  Clone ID: 700845147_FLI.pep
NQKLQAEILALKSREPTESINLNKETEGSCSNRSENSSDIKLDISRTPAIDSPHSTHQQQPSRPFFPPSSVRPAGVAQLFQTSSRPELASCQKIDQMVKEESLSNMFCGMDDQSGFWPWLEQQHFN

SEQ ID NO: 49745 - protein, 266 aa, Glycine max
  Clone ID: LIB3065-012-E8_FLI.pep
HHMDTLPEDCVSKILSYTSPPDACRFSMVSSTLRSSADSDLLWRTFFPSDYSDIVSRALNPLSLNSSSSYKHLFYALCHPLLLDGGNMSFKLDKSSGKKSYILSARQLSITWSNDPLYWSWRPVPESRFKEVAELRTVSWLEIQGKIGTRILTPNTSHVVYLIMKTSHREYGLDSVACEVSIAVDNKVKQSGRVYLCQNEKDENNLKKESIGIPMRREDGWMEIEMGEFFCGEADEEVLMSLMEVGYQLKGGLIVEGVEIRPKIIV

SEQ ID NO: 49746 - protein, 127 aa, Glycine max
  Clone ID: 700843769_FLI.pep
LGLQKQKQALAKQLNLRPRQVEVWFQNRRARTKLKQTEVDCEFLKKCCETLTDENRRLQKELQELKALKLAQPLYMPMPAATLTMCPSCERLGGGINGGGGGSPKTPFSMAPKPHFFNPFANPSAAC

SEQ ID NO: 49747 - protein, 144 aa, Glycine max
  Clone ID: LIB3051-005-D5_FLI.pep
NYYKGVTTMMITCASKIAQMQSLLLGSGLGDLGSGGVFLLNTLDDSDSHSLTHVPHSKTTKGRILRESFNHHGLGWNHLNHTCITILQKFGLLLKLLTRSPVNLGQDFRKLDSNVRSVAIKHRCVSISNLARVVHDNDLRCEVG

SEQ ID NO: 49748 - protein, 156 aa, Glycine max
  Clone ID: 700842889_FLI.pep
EFWARWAHRALWHASLWHMHESHHRPREGPFELNDVFAIINAVPAIALLSYGFFNKGLVPGLCFGAGLGITVFGMAYMFVHDGLVHKRFPVGPIANVPYLRRVASAHQLHHSEKFNGVPYGLFLGPKEIEEVGGLEELEKEISRRARSYKIANENN

SEQ ID NO: 49749 - protein, 79 aa, Glycine max
  Clone ID: 700842638_FLI.pep
GGELSPADATGDDDDDGAAGASEAARGGHGGVRGAEDEGGWARHSDKGTSCPGNNKDDSALSYHETRKWFQFISLMYDL

SEQ ID NO: 49750 - protein, 185 aa, Glycine max
  Clone ID: 700841225_FLI.pep
REREREREMEGEGRRREGGERETATAAATRKVVEGADQRRYKGIRMRKWGKWVAEIREPNKRSRIWLGSYSTPVAAARAYDTAVFYLRGPSARLNFPELLIGEGAAALTGGCDMSAASIRKKASEVGARVDALQATLHHHHHHVVPPRQLLSASCGGGSGDFAVRVVDLNKMPEPESSDCEWNVN

SEQ ID NO: 49751 - protein, 115 aa, Glycine max
  Clone ID: 700741249_FLI.pep
HPIPPKANLSEHNTTQLFYYSYKGLSNWISNVYPFSRRNLFPYPCWSRTRLQGRELQFVSSKSSGGCTGNIFKGKEVYLVTFIQIRKNYWHGGSGLNFTDSFQMSSFTCSSAHVG

SEQ ID NO: 49752 - protein, 218 aa, Glycine max
  Clone ID: 700842617_FLI.pep
GFRKVVPDRWEFSNEYFRRGEKRLLCEIQRRKILSASPPPAGATATVAVPSPLPLSAIPTAKPIVSPSNSAEEQVLSSNSSPARAPVELLDENERLRKENILLTKELVKMRSLCNNIFNLMSNYANAQADGSSAAAAKRCSGEDAVEEMNPKLFGVAIGKKRAREEEGHGAKYDTALSLHQPFHADVKSEALDLPGRGENKKTPWLNQCHRANQRVCN

SEQ ID NO: 49753 - protein, 134 aa, Glycine max
  Clone ID: 700790474_FLI.pep
VMGFFKRVAGFLGFGNHKHDSKDETDDGQPRVRETVVDRPHLAPVLTPSTSGDGGIQGLDWYVNHLRMDEDGDLADQFLDEVSSEKPEGVAVDHHKTQARFKLKNGTKSVRVKKPILLGGKIIPQIVESHQGRL

SEQ ID NO: 49754 - protein, 41 aa, Zea mays
  Clone ID: 700573076_FLI.pep
TVLWRGDMNWEFLFPCLMSIKAPFQSHGINFSFLLNFSYMN

SEQ ID NO: 49755 - protein, 270 aa, Glycine max
  Clone ID: 700665913_FLI.pep
EDWGPGKRKRREKESDAVDSLMTLHESENRHPNNEHNMTSKDSSSIKIKRHCFRIPRDAVERLRQVFAENELPPRSIREGLSKELGLDTEKVSKWFKNARYLALKNRKHQAEGVADQLQSITSTKNRLQKQENVDPLKSKTPKITRTHSQKDVKNVNGRKKMKSSNKKRQPEIPPPPGENGKKDFMEISDDVSLKKLLKKRKKRLINFTFGGDSQLAELEFERLSELKTKVDSMKQKLTAIQNYRVKGSPYSNEPSIVYVPTAVLREKVE

SEQ ID NO: 49756 - protein, 108 aa, Glycine max
  Clone ID: 700750758_FLI.pep
RKQYPQAVILYADYYDAYRTVMKNPSKYGFKETFNVCCGSGEPPYNFTVFATCGTPNATVCSSPSQYINWDGVHLTEAMYKVISSMFLQGNFTQPPFNFLLEKKERVG

SEQ ID NO: 49757 - protein, 152 aa, Glycine max
  Clone ID: 700741539_FLI.pep
DYPIVSIEDPFDQDDWEHYAKLTAEVGQQVQIVGDDLLVTNPKRVEKAIKEKACNALLLKVNQIGSVTESIEAVRMSKQAGWGVMASHRSGETEDTFIADLSVGLATGQIKTGAPCRSERLAKYNQLLRIEEELGSAAVYAGAKFRAPVEPY

SEQ ID NO: 49758 - protein, 210 aa, Glycine max
  Clone ID: 700840647_FLI.pep
IFEASKLKVLFLGVDENKHPGNLPRTYTLTHSDITAKLTLAISQTINNSQLQGWYNRFQRDEVVAQWKKVKGRMSLHVHCHISGGHFLLDILARLRYFIFCKELPVVLKAVVHGDENLFNSYPELQDALVWVYFHSNIPEFNKVECWGPLKEASAPTGGVQEEGLAIPQPCQEECQCCFPPLTLSPIQWSKQVPSRHYEPCDGIGTQQNL

SEQ ID NO: 49759 - protein, 123 aa, Glycine max; identical to SEQ ID NO: 44699
  Clone ID: 700842846_FLI.pep

SEQ ID NO: 49760 - protein, 162 aa, Glycine max
  Clone ID: 700845160_FLI.pep
APELIFGATEYTTAIDMWSVGCVLAELLLGQPLFPGESGIDQLVEIIKILGTPTREEIRCMNPNYNEFKFPQIKAHPWHKVFHKRMPPEAVDLVSRLLQYSPNLRCTALAACAHPFFDDLWDPNACLPNGRPLPPLFNFTSQELANAPEELRQRLIPEYARS

SEQ ID NO: 49761 - protein, 151 aa, Glycine max
  Clone ID: 700844046_FLI.pep
YYANQQLTEKSDVYSFGVVLLELISGKKPVSSEDYGPEMNIVHWARSLIRKGDVISIMDPSLVGNVKTESVWRVAEIAMQCVEQHGACRPRMQEVILAIQDASNIEKGSEIQLKLSSSGGSKPQSSRKTLLASFLEIESPDLSNSCLPSAR

SEQ ID NO: 49762 - protein, 71 aa, Zea mays
  Clone ID: 700337055_FLI.pep
VILIALSRLQSHIISHIHTSNTQILSHTTDNNLNITLHSRIVAILIIIVLEPHHDPSIFPSRFGWSFSSLQ

SEQ ID NO: 49763 - protein, 140 aa, Glycine max
  Clone ID: LIB3028-009-D6_FLI.pep
EIELEMKINMYPPCPQPHLALGVEPHTDMSALTILVPNEVPGLQVWKENSWVAVNYLQNALMVHVGDQLEVLSNGKYKSVLHRSLVNKERNRMSWAVFVAPPHQAVIGPLPSLINDQNPPKFSTKTYAEYRYRKFNKLSQ

SEQ ID NO: 49764 - protein, 202 aa, Zea mays
  Clone ID: 700351889_FLI.pep
PTSLAARTGHVHATVTASYVPGYVRHTHTHTQRDASNRSVLNSKIPCHTAMYARERLPRHARTPIPWGLGPGRRRCVRTASLAGLLGLLRSSSLRLGGRLLGTSRSRSRSLRLVRGELLGSSSLCLGDRLGRGGLLGTSRRSSSSLLLGGCLLLDRRSLLGTSRSSSLRLGGRFGRDGLLGTSRSRGLRLGGCLLLGRGKLL

SEQ ID NO: 49765 - protein, 179 aa, Zea mays
  Clone ID: 700356675_FLI.pep
TILAPLPCVTPPYPASPTKMSRATAAVLFYILAVAALSAAEAPAESPKAGSPAKAPAESPKAGSPAAPAKAPESAATRTAPAKAPQAASTPAAAAAPSSSSSRKSGPAAAPTTAASTPSSSTDEELSPSPSASTAEVASPAADGPAEGPAAADASGAATLGSGAAIAGVAAAVATMIFY

SEQ ID NO: 49766 - protein, 75 aa, Zea mays
  Clone ID: 700382290_FLI.pep
VAPPSRRPSAAAFCSSSTLARTAAPLPSAVISSRTTAAMSSLPLAPGTRSAAPTPSHSSTAFCLWSANSGHASMG

SEQ ID NO: 49767 - protein, 141 aa, Zea mays
  Clone ID: 700382663_FLI.pep
VPDSTTSRCWCGAEGITAYNSKAYSRKAFRASSEMLAAGPYPKTRLLRNIRNSSENSRGGRRGARWEAQGQNTGWFLFGFEGAEPLRHSRRLLIIKMYMASVRPLKDLSYNQCSACSSHVSTSTQKYRPAVQLQLTEAAIF

SEQ ID NO: 49768 - protein, 155 aa, Zea mays
  Clone ID: 700421686_FLI.pep
RRRTFYIVMYGCGDSSCRVTRSRFLADSERPNAISCSRFGDVEGATGGAADEATVETMLELPPLAVVVLKKLSDDFGGGGLSSSITPSSICTTFPMDGRCPGCSWMHQKLTCSARSTCAMSRSSAGSLLSMMPARLPLSYSSYAHTENFFPRVSS

SEQ ID NO: 49769 - protein, 151 aa, Zea mays
  Clone ID: 700424541_FLI.pep
VELAQPTAAAAAVTTAEQAQDLIDAARYDDLEDVVALFSAGVSLDSTDSQGRTALHMASANGHLAVVEYLIQNGANVNATNMEKNTPLHWACLNGRIEVIRALISAGASVSALNSHEKTPMDEAVTTGKMDVIDAIGAAVAQAELDAVTVS

SEQ ID NO: 49770 - protein, 151 aa, Zea mays
  Clone ID: 700426109_FLI.pep
DDPHGLDGWQWQACTEMIMPMTISNESMFPPSAFSYDDRSDECFQSWGVRPRPHWITTEYGGYKIDKVLKRFGSNIIFSNGMRDPWSRGGVLKNISSSIIALVTEKGAHHLDLRSSTKGDPDWLIEQRRQEVEIIQGWIDQYHQDMAETSS

SEQ ID NO: 49771 - protein, 137 aa, Zea mays
  Clone ID: 700426440_FLI.pep
EHSIMTLSTISIRMMAKTKAAQTPAETLISQRSTARASRIYKTTGLQFMDGFHVRCPLQSPLLDMIPPTHEEVVHHQPEPRGHLNAIFPSISFPEQLLQLIAVHVLDVGHLFRIRVELHVTNHEQEVIQLVFAPFSI

SEQ ID NO: 49772 - protein, 183 aa, Zea mays
  Clone ID: 700426684_FLI.pep
GGPKPVIYRDFKTSNVLLDVEYNAKLSDFGLAKAGPQGDKTHVSTRVVGTYGYAAPEYVMTGHLTSKSDVYSFGVVLLEMLTGRRSMDKKRPTGEQNLVAWARPYLNDRRRLYQLVDPRLGLNYSVKGVQKVAQICHYCLTRDSKSRPSMDEVVKQLTPLQDLNDMASASPRPRSTQRGKVHR

SEQ ID NO: 49773 - protein, 121 aa, Zea mays
  Clone ID: 700427029_FLI.pep
RARSSVPGSSLMRRRRASPISTLLADGRCSRLCGCTGRSLMPLRQTTTTTSPSVRTSARPRSCCRYRLHMQGLRLHHEPSVDHIFFFFSFPNPPCFAPPFLFFLYIISFSCLHGISLACSG

SEQ ID NO: 49774 - protein, 81 aa, Zea mays
  Clone ID: 700451410_FLI.pep
YAYSFILLEYGSSFSSRAGSLTNRAGSLTNRARMLAQLVKKFKRADPIRAELTTNRASQRATSISSSPRWYPTGASTRGCT

SEQ ID NO: 49775 - protein, 79 aa, Zea mays
  Clone ID: 700451824_FLI.pep
ENQNGVYLPEWVYERVVTGQDLTLSKKIADQEKETVRQLAIVALWCIQWNPKNRPSMTKVVNMLTGRLQNLPIPPKPYA

SEQ ID NO: 49776 - protein, 112 aa, Zea mays
  Clone ID: 700452438_FLI.pep
GHSLVTRPTRGTFLSALFTITIHHRSSISVPSHISQNQQRNREFFFFFCPSTSVHLIHFLPHVFRNDPVDKLGGEPFEFGCCEVEQRWHWPSVRQASLGVPQLIEERMGTGV

SEQ ID NO: 49777 - protein, 221 aa, Zea mays
  Clone ID: 700453156_FLI.pep
RSPGRRPGETCCCCRCKKKNRYTDSMSGVQAMPTAVGVAGLRGSGLVSSSSTSLFAGDCKRKARRPSYSAWALRQSRIGSRSRIRSKRGLGIVCNLAGQYEDSFDDVQRQLMNYFTYKAVRTVLTQLYELNPPSYRWFYNFVAVNKPTDGKHFLRALGKERQELAERVMVTRLHLYGKWIKKCDHAKTYEKISDENLALMRERLMETVIWPTDDSSTEKIG

SEQ ID NO: 49778 - protein, 166 aa, Zea mays
  Clone ID: 700454308_FLI.pep
CSISTSSSVTVKQCRAPGTSFSVPLQQIICPRKQNQAKPHLNSPPLGRAEAQPAMGWLATYSMARGSESILSASMSGISSLNSSSMAMTTSTVSRLSSPRSFSKCASGVTLEGSILGWLLMTSRIRSMTSSRVSEGEGERRMRRRIAGRSAAAAISRCGFGFYWPV

SEQ ID NO: 49779 - protein, 102 aa, Zea mays
  Clone ID: 700454131_FLI.pep
HPKKYSARYVCSLVADFHRTLIYGGVAMNPRDHLRLVYEANPLSFLAEQAGGRGSDGKNRILTIQPVKLHQRLPLFLGSMDDMLELESYGDVQQKVNPGYEV

SEQ ID NO: 49780 - protein, 246 aa, Zea mays
  Clone ID: 700454178_FLI.pep
PYRSPNVASRAAAPRAPTRHGHCSGSSADQGRRASCSVVVVPAGAGDDAAVAGPVPRGGGDEPERARRRAAADRPVLRLAARARPEHRPRPAVRRAALELERGVEQRHRLPVRLRVLPHLPVRRGPPAARLEGPRRRLPGARPRRRLRLPRLVQLRLRPLLRGRRHRTPRQLELQWAAAACAELRGGGSAAGLLQVAGAGLLLHQHQWQQCRRRRFVFLRSRRWASGVRAPPAAGRCMSFGSRLSS

SEQ ID NO: 49781 - protein, 106 aa, Zea mays
  Clone ID: 700454532_FLI.pep
KTTCFIDSSRDRASFAPQGRGCLAAADQAAAAAQAASAARSTLTWRRRAPPRSPPSSSGWPRRRRPRPSSSRPRRSPARPPTAAAAVAAASATPATADHIDRRPWI

SEQ ID NO: 49782 - protein, 228 aa, Zea mays
  Clone ID: 700455051_FLI.pep
LPHQDLPRGDVPGRAPGARHGRHPGAHGRAPQAPGYTRPKRRGGRALRHPHGRAAARPAAEGCRHRRHGRDGAPVHGLHGGAHACHRAYRGGRHRKVPRHRHRQRHGWPGRGRALRRGVEAAVASQQAAAEGVLLLRHGRPAQAGPRGNAAVLRRLLRPGATLLARFPVIQTVPAGALDVRPRTVRERLQLVEAGDHGQGHRASWQDDWQLDTGQRWVRRVCIPTFFT

SEQ ID NO: 49783 - protein, 165 aa, Zea mays
  Clone ID: 700456329_FLI.pep
FSRVLTTMRGTMGYLAPEWLAGAPVTAKADVYSFGLLLFELISGRRNNGSSEAGSNSAVYFPVHAAVRLHAGDVAGLLDDKIAGDANAKELERVCMVACWCIQDEEGDRPTMGLVVQQLEGVADVGLPPIPSRLHMLAMMNKCAVGGEAEVEPCSNSGSKIDTEV

SEQ ID NO: 49784 - protein, 132 aa, Zea mays
  Clone ID: 700456476_FLI.pep
GREATLDMAQGLLQRAVRRRAGGPGHGQHGQGPGVGERPPHRAVLVVQGILLRRLRRLQLRGDVQRDQVPDRLRRRLPEVLPRPALLAQPQRQPAGAARGVRRRPARREAGDQDGVIRNGEGRACRTHTGCE

SEQ ID NO: 49785 - protein, 52 aa, Zea mays
  Clone ID: 700464609_FLI.pep
LCHFLGHIHPEFQKGRRLKERVERKQWLWELWTMEEQLRLLESRALYYTCRC

SEQ ID NO: 49786 - protein, 219 aa, Zea mays
  Clone ID: 700464574_FLI.pep
TISFQELNQKKYRTPLLLGIGLLVLQNLSGINGVLFYASSIFKAAGVTNSDLATCSLGAIQVLATGVTTWLLDRAGRRILLIISTSGMTLCLLAVSVVFFLKDNISQDSNSYYILTMISLVGIVSFVITFSFGMGAIPWLMMSEILPVSIKSLGGSIATLANWLTSFAITMTTNLMLTWSVGGTFLSYMVVSAFTIVFVVLWVPETKGRTLEEIQFSFR

SEQ ID NO: 49787 - protein, 132 aa, Zea mays
  Clone ID: 700464948_FLI.pep
MGSAMNKDKVHDKETHGTSSDITEKTPVETVKGPNLLERAKEEIEALAGAVHTKMEHHSSPHAKKDESHKEGKEGSLHKIKAHTDETHGTSADINENTPVDKVKGPNVFERAKEEIEAIVEAIHPKNGSDSK

SEQ ID NO: 49788 - protein, 192 aa, Zea mays
  Clone ID: 700467507_FLI.pep
LLEILSLVILKDTNYISTLASGPYGLIFASFVPFFLDIPITSRFRIFGLNFSDKSFIYLAGFQLLLSSWKRSLIPGIFGLVAGSLYRLNVLGIRKMKLPQVISSFFARYFAPSPGSTSRPSRSLVGNTPSHRGRAVQNQPSTGFAPIVEPPESSVAMLVSMGFDGNNARQALVRARNDINVATNILLEAQSH

SEQ ID NO: 49789 - protein, 60 aa, Zea mays
  Clone ID: 700467714_FLI.pep
INPSSLSKRAISMGEPRLDPIILSFHFSREVNAPPGTPIYLALSFPAAGPAGFSSSQASI

SEQ ID NO: 49790 - protein, 99 aa, Zea mays
  Clone ID: 700468226_FLI.pep
TSRCWGGSPSPSHHITSGGAAVHVLGLGDIVVERGRSVVELGDDVVRRQPTVALAEALDADVHDLLEHVVFLDEGLLHELLQRHPLRCLNLCLVNLDLT

SEQ ID NO: 49791 - protein, 161 aa, Zea mays
  Clone ID: 700468820_FLI.pep
AIQVLATFVTTMFLDRAGRRILLIISSAGMTLSLLVVAIVFYIKDNISHDSDLYDILSMVSLVGVVAYVIAFSFGMGAIPWIIMSEILPVSIKSLAGSFATLANWLTSFGITMTANLLISWSAGGTFTSYMIVSAFTLVFVIVWVPETKGRTLEEIQWSFR

SEQ ID NO: 49792 - protein, 155 aa, Zea mays
  Clone ID: 700469527_FLI.pep
NAAGVCRHRRCSPAFTAPNSPPCLPCALQPLHSPSFSPGQDLLGPWIKKKKLEVSNTSHTYKHHCSVGVDVHEIFFKRSRLRVVLSYIGIIFLLVNACQPLLTKESLSLGSVWNITFAVLVAKCLQYKPVKRESVVIMPAFGVQLEIHFWRFSSQ

SEQ ID NO: 49793 - protein, 274 aa, Zea mays
  Clone ID: 700469566_FLI.pep
ICPENVRSLLHYLVVRNCFAKGEFIIFIVLCGTSTGGSILGLPLLDPLAGLVVSGMILKAGIKTGYESVLELVDAAVDPSLLAPIKETILRVHGVKGCHRLRGRKAGTSLYLDVHIEVYPFLSVSAAHDIGETVRHQIQKEHNQVAEVFIHIDPSYSVGPTMDLKRILKDSDGTNSEAIPRQQSAEAIVSNIISSHFSEKMALEHLMLHYVQGRVLLQVQVSMSPEILIRDAMEVAKQAEEEILRADASISQISLQLRLGQQIKQLQLASQERR

SEQ ID NO: 49794 - protein, 360 aa, Zea mays
  Clone ID: 700472168_FLI.pep
GKERERERERERRSAMAAKARVSLTAVLAAAAWACLSVVAASAFDVPTVAFEEGFSPLFGDGNLVRSSDDRSVRLLLDRRSGSGFISSDYYLHGFFSASIKLPKDYTAGVVVAFYLSNGDVYEKTHDELDFEFLGSRWGGQWRVQTNVYGNGSTSRGREERYLLPFDPTVEAHSYSILWAPTHIIFYVDDTPIREVIRHPDMGGDFPAKPMAVYATIWDGSAWATDGGKYKVNYKYAPFASDFSELAVVGSRADPVLRVPRRDGAAHQDLLALMTADYAVVTPRKRAAMRAFRARQMTYTVCYDAVRYADGPFPECDNSDEERESFSAWGESKTVVMRPRARGRRRGRKAGRGRAGVSSS

SEQ ID NO: 49795 - protein, 157 aa, Zea mays
  Clone ID: 700474231_FLI.pep
YSCNIHEHPLSRSCFIYATAGMHAKDASGDKTPVILLVRMHACARSMGAMVISSVGSVVGLDLPALVVALAPLPEHDVGAVTDAAVPLVAVEGVEVEVDVVDHADAAEAVADVAALRPQHRLVQKVRVVGHQAHRVGLPQRVLDGLPGRLVHQRERR

SEQ ID NO: 49796 - protein, 151 aa, Zea mays
  Clone ID: 700474904_FLI.pep
RRVRAQGEEGGGGHEGRELRGGGGQAEQGDGHGLRGRRQGHAPRRLQDGQAGGALALRALRDGAAPLRAGRLRQEGPRRLRPQRRRRPHRRAARQGLLHRGPLHRRLQRREPQRLLRHVDPPTDPLFSFWTSGSRPQEVAAPSFFLSLAIS

SEQ ID NO: 49797 - protein, 179 aa, Zea mays
  Clone ID: 700475216_FLI.pep
SATILFRTSVTGKTHSPRTTLHIALESSQQLHIIDDHNHKNRWRGKEKKKGKLERTNRARDDRCLEKTQCHTRASNSDLRVGGPYHTGAGAGAGQDSQTRGKREGPLRRRNSGISTVLLPSAGDGRRPFSLCCPPFDTRPSGSSCRLKPVAIKVMLTCPLSDGSMTAPNIRLAFGSTRS

SEQ ID NO: 49798 - protein, 284 aa, Zea mays
  Clone ID: 700475155_FLI.pep
EKVAEKLGVDDPSKIRLTSHNCYSQQPKPQPIKYRGVERLLDMLIHYNQTSDILYYEVLDIPLPELQALKTLKVTYHHATKDEVSVHSIRLPKNSTVGDVLNDIKTKVELSHPNAELRLLEVFYHKIYKVFAPNEKIENINDQYWTLRAEEVPDEEKNLGPFDRLIHVYHFTKDTQNQTQVQNFGEPFFMVIREDETLSSIKERIQRKLKVPDEDFSKWKFAYISLGRPDYFEDSDTVALKFQRNMYGAWEQYLGLEHPDTAPRKAHTINQNRHSFERPVKIYN

SEQ ID NO: 49799 - protein, 274 aa, Zea mays
  Clone ID: 700549863_FLI.pep
ALKAVLLLSKISNKNNLVGDPIERERLHDAIDCLLSFANKDGTFSTYECKRTYSWLEILSPCETFPNIVVDYPYPECTSSVLQALILFKDLYPGYRTEEIEALVRSAATFIETKQQEDGSWLGNWGICFTYGAFFSIKGLVASGRTYKNSPCIRKACHFILSKQLSTGGWGESHIAIETQVYVNLKGDRAHAVNTAWAMLALIYAGQFERDPTPLHRAAKELINMQLETGEFPQQEHVGCFNCSLYFNYPSYRNLFPIWALGEYHRGLRAKKDK

SEQ ID NO: 49800 - protein, 96 aa, Zea mays
  Clone ID: 700550995_FLI.pep
NVVVSTIQCSSYNGSSSFAPTVIRIIGNDMYIFYIEAACSDLSDSAGAAADTSSSPKLGALGIRPRILNIAWSASKSLFAVVRSFSPAKMELAPAR

SEQ ID NO: 49801 - protein, 128 aa, Zea mays
  Clone ID: 700553210_FLI.pep
NELGAMVDRMESAKLKTVNLTDNDLAKDHLRYFIGGRSEIKDELVYRFIFPERPGALMKFLDAFSPRWNISLFHYRAQGETGANVLVGIQVPPVDFDEFKSHADNLGYEYMSENNNEIYRLLLRDPEV

SEQ ID NO: 49802 - protein, 292 aa, Glycine max
  Clone ID: 700554113_FLI.pep
FPMSKMLGVFVGLLLLVGLAASAKFDELFQPSWAMDHFIHEGELLKLKLDNYSGAGFGSKSKYMFGKVTIQLKLVEGDSAGTVTAFYMSSDGPTHNEFDFEFLGNTTGEPYSVQTNVYVNGVGNREQRLNLWFDPTKDFHTYSIFWNQRQVVFLVDETPIRVHTNLEHKGIPFPKDQAMGVYSSIWNADDWATQGGRVKTDWSHAPFVATYKDFQIDACACPVPVTSADSAKNCSSSEDKKYWWDEPTLSELNLHQSHQLMWVRANHMVYDYCADTARFPVIPAECVHHRHH

SEQ ID NO: 49803 - protein, 272 aa, Glycine max
  Clone ID: 700554165_FLI.pep
TQLSANQTNTNKNISQQMNILGQSLHQSNNGSYSCSSPETANSSNLPTTPKAVHPDEEVNTLASAHPKKRAGRRIFKETRHPVYRGVRRRNNNKWVCEVRVPNDKSTRIWLGTYPTPEMAARAHDVAALSLRGKSACLNFADSAWRLPLPASTNAKEIRRVAAAAAVAIAAEDSRGKQLRTNAIDAVADCEVSSSDIGVDENCNNNKASQRFCDLDEITMPDAPVFEDMHEWLQTMAAEPLRSPTFVTYVNVRDVWNFVEDDAEVSLWSFTV

SEQ ID NO: 49804 - protein, 286 aa, Glycine max
  Clone ID: 700554479_FLI.pep
QIKAMATSNFSIVLSVSLAFFLVLLTKAHSTDTVSFTFNKFNPVQPNIMLQKDASISSSGVLQLTKVGSNGVPTSGSLGRALYAAPIQIWDSETGKVASWATSFKFNIFAPNKSNSADGLAFFLAPVGSQPQSDDGFLGLFNSPLKDKSLQTVAIEFDTFSNKKWDPANRHIGIDVNSIKSVKTASWGLSNGQVAEILVTYNAATSLLVASLIHPSKKTSYILSDTVNLKSNLPEWVSVGFSATTGLHEGSVETHDVISWSFASKLSDGSSNDALDLPSFVLNEAI

SEQ ID NO: 49805 - protein, 350 aa, Glycine max
  Clone ID: 700554818_FLI.pep
DYEKAFAQHQQSSRFQEKEITTWREVLERVASLSGWDIRNKEQPTVIDEIVQKIKKIVGCKFSILRNDNLVGMESHFSTLSKQLGPVNDVRVVGITGMGGIGKSTLGRALYERISHQFNSSCYIDDVSKLYRLEGSAGVQKDLLSQSLNETNLKIWNLSYGTELAWRRLHNAKALIVLDNVEEDKQLNMFTANRKNLLRERLGRGSIVIIISRDQQILKARGADLIYQVKPLDDTDALRLFCKNAFKNNYIMSDFKTLTSHVLSHCEGHPLAIEVLGSSLFGKDVSYWGSALVSLRESKSIMDVLRISFDQLEDTHKEIFLDIACFLYDHDVIYVKEILDFRGFNPEYGL

SEQ ID NO: 49806 - protein, 50 aa, Glycine max
  Clone ID: 700555454_FLI.pep
CGERSYEELGVGGAVVYQSFVQGCDGSTSPRSILKCCWSEDENEDEVREI

SEQ ID NO: 49807 - protein, 262 aa, Glycine max
  Clone ID: 700555631_FLI.pep
KLAFTGSTDTGKVVLELAARSNLKPVTLELGGKSPFIICEDADVDKAVELAHFALFFNQGQCCCAGSRTFVHERVYDEFLEKSKKRALRRVVGDPFKKGVEQGPQIDVEQFEKVLRYIRSGIESHATLECGGDRLGSKGFFVQPTVFSNVQDDMLIAQDEIFGPVQSILKFKDIDEVIRRANKTRYGLAAGVFTKNVSTANTLMRALRAGTVWINCFDVFDAAIPFGGYKMSGIGREKGIYSLHNYLQVKAVVSPVKNPAWL

SEQ ID NO: 49808 - protein, 384 aa, Glycine max
  Clone ID: 700556105_FLI.pep
LSSQPKIPMASLSVLRHNHLFSGPLPARPKPTSSSSSRIRMSLRENGPSIAVVGVTGAVGQEFLSVLSDRDFPYRSIHMLASKRSAGRRITFEDRDYVVQELTPESFDGVDIALFSAGGSISKHFGPIAVNRGTVVVDNSSAFRMDEKVPLVIPEVNPEAMQNIKAGTGKGALIANPNCSTIICLMAATPLHRRAKVLRMVVSTYQAASGAGAAAMEELELQTREVLEGKPPTCKIFNRQYAFNLFSHNASVLSNGYNEEEMKMVKETRKIWNDKDVKVTATCIRVPIMRAHAESVNLQFERPLDEDTARDILKNAPGVVVIDDRESNHFPTPLEVSNKDDVAVGRIRQDLSQDGNQGLDIFVCGDQIRKGAALNAIQIAEMLL

SEQ ID NO: 49809 - protein, 247 aa, Glycine max
  Clone ID: 700556019_FLI.pep
ACNSLDHDPDLQHMPVFAVSSRFFNSITSHFYGRKLEFDFIARFLICYQHFTFYPVMCVARVNLYLQTILLLFSRRKVQDRALNIMGILVFWTWFPLLVSFLPNWPERVMFVLASFAVCSIQHIQFCLNHFAANVYVGLPSGNDWFEKQTSGTLDISCSSSMDWFFGGLQFQLEHHLFPRLPRCQLRNISPLVSDLCKKHNLPYRSLSFWEANQWTIRTLRTAALQARDLTNPAPKNLLWEAVNTHG

SEQ ID NO: 49810 - protein, 221 aa, Glycine max
  Clone ID: 700557003_FLI.pep
ICGMEEPLEIPIINDLTMILGSISQSKAAGVVVDFTDPSSVYDNVKQATAFGMKSVVYVPQIKLDTVAALSAFCDKASMGVLVAPTLSIGSILLQQAAISASFHYSNVEIVESRANANDLPSADANQIANNLSNLGQIYNREDPSTDVLARGQVLGDGIRVHSMVLPGIPSSTTVHFSGPGEVYSIKHDITDVKCLMPGLLLAIRKVVRLKNLVYGLEKFI

SEQ ID NO: 49811 - protein, 380 aa, Glycine max
  Clone ID: 700557018_FLI.pep
PRKSKEGNSRCFVALCSALLLWAWAGLGWAGLGMAIAAAAVVVPLGLLFFASGLLVNLIQAICYVVVRPVSKSLYRRINRVVAELLWLELVWLIDWWAGVKVQIFTDHETFRLMGKEHALVISNHRSDIDWLVGWVSAQRSGCLGSTLAVMKKSSKFLPVIGWSMWFSEYLFLERSWAKDESTLKSGIQRLSDFPLPFWLALFVEGTRFTQAKLLAAQEYATSTGLPVPRNVLIPRTKGFVSAVSHMRSFVPAIYDVTVAIPKSSPAPTMLRLFKGQPSVVHVHILGVSGCCGVCKVPAMVFVTLFLEGCCIFSFWFGSCYCTYANSDSILTVRAFKPGQDRACKVKKQGVLIYLANLKLHLCVMSDSCNTHYFAFNILS

SEQ ID NO: 49812 - protein, 215 aa, Glycine max
  Clone ID: 700556829_FLI.pep
QQKRKNGYNPGKRRMNHKMDMEKREEMIRRTVYVSDIDQLVTEEQLAALFLNCGQVVDCRVCGDPNSILRFAFIEFTDDEGARAALSLSGTMLGYYPLRVLPSKTAIAPVNPTFLPRSEDEREMCSRTIYCTNIDKKLTQADVKHFFESICGEVHRLRLLGDYHHSTRIAFVEFALAESAIAALSCSGVILGSLPIRVSPSKTPVRPRAPRPPMH

SEQ ID NO: 49813 - protein, 76 aa, Glycine max
  Clone ID: 700557043_FLI.pep
LYRAKGDQGSNIFLIYLQFHIMLQLTRKHDHITSFSSFKTAMKASWGTSTLPIDFILFFPSACFLSNFFFLEISPP

SEQ ID NO: 49814 - protein, 241 aa, Glycine max
  Clone ID: 700557056_FLI.pep
DLHLTTEMLNQLELQVDGGFNQNLNSKTLSAPNLSAMDYPALTSPDGQTASVEYVVDNVQQSGNPYRSYDSDVLLFKSVSSVSSRGGAIDFASAVRKLASRDSGGIWKYDKNGSGDAAIGSSRNSNVLASGYNGGQGRAHFGDRLQNRGSARAFPVWLETGDAVANMYSELREEARDHACLRNAYFEQAQQAYLIGNKALAKELSAKGQLHNMHMKVAHGKAQESIYLQSCSRVAGRWKRK

SEQ ID NO: 49815 - protein, 267 aa, Glycine max
  Clone ID: 700556884_FLI.pep
HTLSLSLSAMAGMVPLCIASLVTLFVATSARIPGVFNGGAWQGAHATFYGGNDASGTMGGACGYGNLYSQGYGVNTAALSTALFNNGLSCGACFEIKCDQDPRWCNPGSPSIVITATNFCPPNFALPSDNGGWCNPPRPHFDLAMPMFLKIAQYKAGIVPVSYRRVPCRKVGGIRFTINGFRYFNLVLITNVAGAGDIARVSVKGSKTGWNSMSRNWGQNWQSNANLVGQALSFRVTGSDRRTSTSWNVAPSHWKFGQTFTGKNFRV

SEQ ID NO: 49816 - protein, 70 aa, Glycine max
  Clone ID: 700557414_FLI.pep
SPSSLKFKISQQVTKAGSTLGLKDLFLLRRVPHISKASSNRTKCSSVFVLSAFVMVSLVVFTDIWGYLKF

SEQ ID NO: 49817 - protein, 142 aa, Glycine max
  Clone ID: 700557230_FLI.pep
ASVSATSLRFQPFLKLSTRTTTQGCYKTSSLGAVSVGWNRRTFPSLRSSRLRICAVKAQPETVQKVCDIVRKQLALPAESELTPDTKFSALGADSLDTVEIVMGLEEEFGITVEEDGSQNISTVQEAADLIEKLIQDKSGAS

SEQ ID NO: 49818 - protein, 96 aa, Glycine max
  Clone ID: 700557336_FLI.pep
FSMLCNSRFISCWNFQPHLTVVIRKPFQYTISAADKCLEFRCKKTKFLRICIPFVQCIQPLLGCQKPLLVSSPWPFLQILLSSYPGVHTQVLEYHH

SEQ ID NO: 49819 - protein, 74 aa, Glycine max
  Clone ID: 700557179_FLI.pep
LFPQFLWTFTGTTKIKNLDQNIGALAVKLSEKDLREISEAVPIGDVAGGRYYNGLDHFSWKYANTPPKDSKIST

SEQ ID NO: 49820 - protein, 134 aa, Glycine max
  Clone ID: 700557608_FLI.pep
NHRSSSVHENRWITTITPKSLSKFIHSGLHEKDTGLSMSLDTNLVATNCIDDGVVPRVREVLQEVLKWSFACHVVLNYESQECQHSQSPIGKFLLLGLQSRCKVQGVEHTTRVSTLMWGQAVLLEDGRTSRTLA

SEQ ID NO: 49821 - protein, 156 aa, Glycine max
  Clone ID: 700557821_FLI.pep
DLEAHVADFGLAKFLYDPGASQSMSSIAGSYGYIAPEYAYTLKVDEKSDVYSFGVVLLELIIGRKPVGEFGDGVDIVGWVNKTRLELAQPSDAALVLAVVDPRLSGYPLTSVIYMFNIAMMCVKEMGPARPTMREVVHMLSEPPHSATHTHNLINL

SEQ ID NO: 49822 - protein, 335 aa, Glycine max
  Clone ID: 700557575_FLI.pep
ENDRIFFGVPIFSYKELQEASNNFDPTRKLGDGGFGTVYYGTLRDGREVAIKHLFEHNYKRVEQFMNEIEILTRLRHRNLVSLYGCTSRHGQELLLVYEYVPNGTVASHLHGDLARVGLLTWPIRMQIAIDTAAALTYLHASNIIHRDVKTNNILLDISFSAKVADFGLSRLLPNDVSHVSTAPQGSPGYLDPEYFQFYRLTDKSDVYSFGVVLIELISSMPAVDAARERDEVNLANLAMKKIQKGKLSELVDPSLGFESDQVVKRMLTSVAGLAFRCVQGDNELRPSMDEVLEALKKFQNGNYESENLEKGDDDGVISSTSSSEVHPPVYTGIW

SEQ ID NO: 49823 - protein, 112 aa, Glycine max
  Clone ID: 700557774_FLI.pep
FVPMSITTAPFFSQLPRTMLGTPTSTTTISASEVICSGFFVYACNTLTVAWCLYCNSKEVGNPTILLLPIITALFPLISTPCLSNNSMQPLGAQGTKKGFLPLIARFPIFKG

SEQ ID NO: 49824 - protein, 73 aa, Glycine max
  Clone ID: 700558609_FLI.pep
RFLGRNLTGTKALVQWLLLIRTPTLATLLWFDSTKSTMPMYQQTTMLWMRLWKWNESNLFVILILVMLSQLLA

SEQ ID NO: 49825 - protein, 160 aa, Glycine max
  Clone ID: 700558422_FLI.pep
YKTKKKKKKVFAMASKRILKELKDLQKDPPTSCSAGPVAEDMFHWQATIMGPPDSPYAGGVFLVTIHFPPDYPFKPPKVAFRTKVFHPNINSNGSICLDILKEQWSPALTISKVLLSICSLLTDPNPDDPLVPEIAHMYKTDRNKYESTARSWTQKYAMG

SEQ ID NO: 49826 - protein, 325 aa, Glycine max
  Clone ID: 700559641_FLI.pep
EVKKLFERSHDGQITEIVYKGTHDHPKPQSSCRYSTGTVMYIQGERSDKASLAGRDDKASTMYGQVSHAAEPNSTPESSPVATNDDGLEGAGFVSNRNNEEVDDDDPFSKRRKMELGNVDITPVVKPIREPRVVVQTLSEVDILDDGYRWRKYGQKVVRGNPNPRSYYKCTNAGCPVRKHVERASHDPKAVITTYEGKHNHDVPAARNSSHDMAVPAATAGGQTRIKLEESDTISLDLGMGISSAAEHRSNGQGKMLHSELGETQTHASNSNFKFVHTTSAPVYFGVLNNSSNPYGSRDNRSDGPSLNHSSYPCPQSMGRILLGP

SEQ ID NO: 49827 - protein, 141 aa, Glycine max
  Clone ID: 700559551_FLI.pep
ASSFARIMEGGYARRLLQVGIRSINKEGREQAKKFGVEQFEMRHFSKDRPFLENLNLGEGAKGVYISIDVDCLDPGYAVGVSHYESGGLSFRDVMNMLQNLKGDIVGGDVVEYNPQRDTPDRMTAMVAAKFVRELAAKMSK

SEQ ID NO: 49828 - protein, 324 aa, Glycine max
  Clone ID: 700559567_FLI.pep
ATSTSPTLCSCSSSSMAATSTSLASQLYIGLRRPCLKLDSFNSQSFSVFDPNLRLSLSPPRPSRAIVAMAGTGKFFVGGNWKCNGTKDSISKLVADLNSAKLEPDVDVVVAPPFLYIDQVKNSLTERIEISAQNSWVGKGGAFTGEISAEQLKDLGCKWVVLGHSERRHIIGENDEFIGKKAAYALSQGLGVIACIGELLEEREAGKTFDVCFQQLKAYADAVPSWDNIVIAYEPVWAIGTGKVATPQQAQEVHVAVRDWLKKNVPDEVASKTRIIYGGSVNGGNSAELAKQEDIDGFLVGGASLKGPEFATIVNSVTSKKVAA

SEQ ID NO: 49829 - protein, 204 aa, Glycine max
  Clone ID: 700559577_FLI.pep
NVTSGLKKVTNDMKTKNRTDRTGVVGAIEKETPASSRVFSKAGPPKFELQMGRKWVVENQIEKKDLVIEDCDSKQSVYIYGCKNSVLQILGKVNNITIDKCTKIGVVFKDVVAACEIVNSNGVEVQCQGAAPTISVDNTSGCQLYLSKDSLEASISTAKSSEINVLVPGADPDGDWVEHSLPQQYIHLFKNEHFETTPAAHSGG

SEQ ID NO: 49830 - protein, 527 aa, Glycine max
  Clone ID: 700559917_FLI.pep
NHHASTTKTNGFLIHPKLGFEPARSRSRLAMASPANTSEPKIVTGTAGYILEDVPHFTDYIPNLPTYPNPLQDNPAYSVVKQYFVHVDDSVPQKVVVHKDGARGVHFRRAGPRQKVYFEADEVQAAIVTCGGLCPGLNTVIRELVCGLHHMYGVKKVLGINGGYRGFYARNTITLTPKSVNDIHKRGGTVLGTSRGGHDTKKIVDSIQDRGINQVYIIGGDGTQKGASAIFEEVRKRGLKVSVVGIPKTIDNDIPVIDKSFGFDTAVEEAQRAINAAHVEAESVENGIGVVKLMGRNSGFIAMYATLASRDVDCCLIPESPFYLEGPGGLYEYIEKRLKENGHMVIVIAEGAGQELVSESVQSMSKQDASGNKLFQDVGLWISQKIRDHFAAQKTLPITLKYIDPTYMIRAIPSNASDNVYCTLLAQSAVHGAMAGYTGYTSGLVNGRQTYIPFYRITERQNHVVITDRMWARLLSSTNQPSFLDAKGDNEEKEEEEALNQLPDGHCAKDTSLASKEINSSIYPTAC

SEQ ID NO: 49831 - protein, 245 aa, Glycine max
  Clone ID: 700560407_FLI.pep
AVLTRRNSITGVAYKDDPTIMAWELMNEIRCPSDQSGRTVQAWITEMASYLKSIDGNHLLEAGLEGFYGQSKPQSNPNFNVGTDFIANNQIPGIDFATVHSYPDQWLSSSSYEDQISFLGRWLDEHIQDAQNTLHKPLLFAEFGISTKSYGGNSTPRDRLFNTVYSAIYSSASSGGAAVGGLFWQLMVQGMDSYRDGYEVVLDESPSTANLIAQESQKLNRIRKMYARLRNIEKWNEAKQIRGGN

SEQ ID NO: 49832 - protein, 229 aa, Glycine max
  Clone ID: 700560894_FLI.pep
VTMASTTLSPTTPSQLCSGKSGIFSPSQALLVKPVKRQMMGKSKGMRIACQATSIPADRVPDMGKRQLMNLLLLGAISLPSAGMLIPYTYFFVPPGSGSSAGGTVAKDAVGNDVIAENWLKAHGPGDRTLAQGLKGDPTYLVVEKDRTLATYAINAVCTHLGCVVPWNQAENKFICPCHGSQYNDQGRVVRGPAPLSLALAHCDIDDGKVVFVPWVETDFRTGDAPWWA

SEQ ID NO: 49833 - protein, 294 aa, Glycine max
  Clone ID: 700561610_FLI.pep
NFGQDALIGEGSYGRVYYGVLKSELAAAIKKLDASKQPDEEFLAQVSMVSRLKHENFVQLLGYCIDGSSRILAYEFASNGSLHDILHGRKGVKGAQPGPVLTWAQRVKIAVGAARGLEYLHEKADPHIIHRDIKSSNVLIFDDDVAKIADFDLSNQAPDMAARLHSTRVLGTFGYHAPEYAMTGQLNAKSDVYSFGVVLLELLTGRKPVDHTLPRGQQSLVTWATPKLSEDKVRQCVDTRLGGEYPPKAVAKMAAVAALCVQYEADFRPNMSIVVKALQPLLTARPGPAGEIPN

SEQ ID NO: 49834 - protein, 97 aa, Glycine max
  Clone ID: 700561617_FLI.pep
SCCHTINLVPVLESNQVIHCTNCRTTLMYPYGASSVKCAICRYITNVSMTNGRLPIPVQRPNGTANSGTVSSTSSVCLSPFLLVILLEQLLHSCYDT

SEQ ID NO: 49835 - protein, 90 aa, Glycine max
  Clone ID: 700561911_FLI.pep
RLQSANKKLAENIEAKEEACVETEAANSILRAQTMELADRLRFLNSILEIAEEVEGLSVEIPEIPDPLLKPWQIPHPIQPIMATANMFLR

SEQ ID NO: 49836 - protein, 341 aa, Glycine max
  Clone ID: 700562219_FLI.pep
YPFLRTMRAGKGSQEEDEYEEEEFGSSKKQGTSSAPNTNKDGKAIDKASAIRSKHSVTEQRRRSKINERFQILRDLIPHSDQKRDTASFLLEVIEYVQYLQEKVQKYEGSYQGWGQEPSKLMPWRNSHWRVQSFAGQPTAVKNGLGPVSPFPGKFDESNVSISPTMLNGSQNTIDPDQSRDIVNKTAERQPDLVSKGIPLPLAMHANMSVPVRSDGVLAHPLQGTVSNAQSTECPTTSEPQNQQDELSVEGGTISISSAYSQGLLNNLTQALQSAGLDLSQASISVQINLGKRANKGLNCGTSSLKHHDNPSSNNQTIAHFRDAGSGEDSDQAQKRMKTYK

SEQ ID NO: 49837 - protein, 111 aa, Glycine max
  Clone ID: 700562302_FLI.pep
WQWPKVCASCIVLLKRAVSFVIKHVLTLTACRHLNAAIRENESNNPLDSNGSVFGFPPNRSPYSCIQMNGKEVFCFAVRCVPQSIEFALGKAGLPASSIDWLLLHQLHKMI

SEQ ID NO: 49838 - protein, 187 aa, Glycine max
  Clone ID: 700562665_FLI.pep
YEPLKGLMFSFVFSKDYASSTWCLRELAHIRNCIQTSPRHLLPIFYDVDPSQVRKQSGDYQKAFAQHQQSFRFQEKEINIWREVLELVANLSGWDIRYKQQHAVIEEIVQQIKNILGSKFSTLPYDNLVGMESHFAKLSKLICLGPANDVRVVGITGMGGIGKSTLGRALYERISHQFNSLCYIDDV

SEQ ID NO: 49839 - protein, 126 aa, Glycine max
  Clone ID: 700564875_FLI.pep
AEPCDSNSSGSNPLDNLLTKDGDFDVEQSWPVVTSSPPFFCGSPPSRAANPLIQDARFGDENFSPLSPPSWVVVPAAASGLPPSPSSSARKGGCVRANFGNNPAVRIEGFDCLDRDRRNCSIPALA

SEQ ID NO: 49840 - protein, 146 aa, Glycine max
  Clone ID: 700565375_FLI.pep
AAFAHFTHETGHFCYIEEINGASGDYCDESNTEYPCAPNKAYYGRGPIQLSWNFNYGPAGQSIGFDGLNAPETVANDPVVSFKTALWYWMEHVRPVINQGFGATIRAINGRLECDGANPSTVQARVNYYTQYCSQLGVSPGDNLTC

SEQ ID NO: 49841 - protein, 288 aa, Glycine max
  Clone ID: 700565645_FLI.pep
ITSQVPEGLSKHVVSSKKAQANWYRKLVDAWKEAKPPPKTPEEAARLVIQTLRRHQKADVEGLLAFYGLPLPHTLVQGTTQPLSSLPDGVQFEMHTLPVDAKAVADGDTITVYVSTTDPRESAFVPGNVHAAAVRRSEARARRNFTEADALHKQIIDSGYRVIPVQNEEILAKKYRIRLRGIDAPESAMPYGKEAKTELTKIVQGKPLRILVYEEDRYGRSVGDIYCNGIFVQEMMLKKGLAWHYVAYDKRPELETWEKQARAKRVGLWASKNPEKPWEWRKDRREAA

SEQ ID NO: 49842 - protein, 279 aa, Glycine max
  Clone ID: 700566218_FLI.pep
FCEENSEMILVYEYVEKGPLKKHLYGSSLQTPLSWKQRLEICIGAARGLHYLHTGFAQGIIHRDIKSTNILLDENYVAKVADFGLSRSGPCINETHVSTNVKGSFGYLDPEYYRRQQLTDKSDVYSFGVVLFEVLCGRPAVDPQLAREQVNLAEWGLEWLQKGMVEQIVDPHLVGQIQQNSLKKFCETAEKCLAEYGVDRPAMGDVLWNLEYALQLQESGQQREPHANRHASEEFVSVTNAIIPGNPSTNRRTERDHYNCSSDVSTSQVFSQLMNNEGR

SEQ ID NO: 49843 - protein, 295 aa, Glycine max
  Clone ID: 700566446_FLI.pep
LLPSSLIFICFCHIIKHSHIASQFLVFPIAAKKSSVPFYPFLNKKKLGNATMAQAVEEWYKQMPVITRSYLTAAVVTTIGCSLDIISPYHLYLNPILVVKQYQFWRLVTNFLYFRKMDLDFLFHMFFLARYCKLLEENSFRGRTADFFYMLLFGATVLTGIVLLGGMIPYLSESFAKIIFLSNSLTFMMVYVWSKQNPFIHMSFLGLFTFTAAYLPWVLLGFSVLVGASAWVDLLGMIAGHAYYFLEDVYPRMTGRRPLKTPSFIKALFADDPVVVARPANVRFAPPPAEELHQD

SEQ ID NO: 49844 - protein, 78 aa, Glycine max
  Clone ID: 700566567_FLI.pep
KIMEITSTRKLKFSNHTSLEHYNPGATDLAIAPNLQCRSLQSCQRLELHAEVQKILQLNHLPHVQEWHHHLDVLPHMR

SEQ ID NO: 49845 - protein, 216 aa, Glycine max
  Clone ID: 700566008_FLI.pep
AAYRGLAFMYDWFMEPLYSGTYPAVMVNRVGGRLPKFTKREYLMVKGSYDFIGLNYYTSTYATSSPCPRERPTAFTDACVRFTTVRNGLLIGPKAASDWLYVYPPGIQGLLEYTKEKFNNPIIYITENGIDEVNDGKMLLNDRTRIDYISHHLLYLQRAIRNGVRVKGYFAWSLLDNFEWNAGYSLRFGLVYVDYKNGLKRYRKRSALWFKIFLHQ

SEQ ID NO: 49846 - protein, 64 aa, Glycine max
  Clone ID: 700567010_FLI.pep
FVRAWRVNFRSLFLPFWWYFNCMVNWSVAINKVPDAGLCKSQGNQQDDELLCYLFNLIEKLLLY

SEQ ID NO: 49847 - protein, 146 aa, Zea mays
  Clone ID: 700577234_FLI.pep
GRGRRPRAEGVLGRGAQRGARRQEGRAVVARAGHPRQPGGDADHHHVGHLRPPLGRQLRPVPLRRLLPQPADHHPEEHAGGGGRAGRGDGEVPQAASPSDPSSACISPIKSGGVLLLHAEAACRIKRTICTIVLYMCVNATRGTFE

SEQ ID NO: 49848 - protein, 114 aa, Zea mays
  Clone ID: 700579355_FLI.pep
IIYINPGFLISCGDSAVHSFLDLEVNCTIFLNIGTKVYQFENQAEPIILRYVSTHKAKTQSPQQTPQHPPPQEATAELLLSSTPTRKRHSPIDGSRYVIIPSPPKSQLFGSCFC

SEQ ID NO: 49849 - protein, 96 aa, Zea mays
  Clone ID: 700579741_FLI.pep
KDGAQNSLPFLLSEVLLRSMLRLKIVGFPDDVLQGLGKVLVELMKFQSVTLCFSDFYHVERGCNLQYLSSNVEVSLPPCLYLFEPQLVIFLLNIKS

SEQ ID NO: 49850 - protein, 130 aa, Zea mays
  Clone ID: 700580769_FLI.pep
VRAAIHAKPKSSIGSWELYTARIDFTHDTGTMVSYHKKFTALGYRVLIYSGDHDLCIPYPGTEAWVKSIGYQVTDRWRPWYFGDQVAGYTEGYGHNLTFLTIKGAGHAVPEYKPKEALAFYSRWLAGEKF

SEQ ID NO: 49851 - protein, 112 aa, Zea mays
  Clone ID: 700582008_FLI.pep
LHVVDRLKELIKYKGFQIAPAELEGLLLSHPEILDAAVIPYPDAEAGEVPIAYVVLSPKSSLAEADVQKFIEKQVAHYKRLRKVTFVGSVPKSAAGKILRRELIAQVRLSKL

SEQ ID NO: 49852 - protein, 188 aa, Zea mays
  Clone ID: 700582230_FLI.pep
AQPRRGRPQHQPHLRQHALRPDRRRVRGHGGHGAHRPHRQDLRDRVAVQRGRGRGGRHRGQRRRVQREPHEEDRHGPGHAAQAARARRRLRVRALQRGHEARGNVGEELRLVLPQRHAGVQPRLFQRSVLQPVADVLLFFQAGDYISDGGCCPARQLLHPTQCRAVPCVKIIAIFLTNPSVPSLYTLG

SEQ ID NO: 49853 - protein, 65 aa, Zea mays
  Clone ID: 700583429_FLI.pep
LIGATDPQKSEPGTIRGDLAIVVGRNIIHGSDGPETAKDEIALWFEPKELVSYTSNAEKWIYGVN

SEQ ID NO: 49854 - protein, 132 aa, Zea mays
  Clone ID: 700583718_FLI.pep
PCTITDIHKARRQARTGVDAGRPGCSVSPGEEALPALVDLAGAGVDVLLDPGLAHHEAVAAVVTMVVVVVGAGACDRVDLLELLLDDVLLDAAAVAAEAGRGHRPHLLRAVVHLLVVSHWCRRLVCLCAAPV

SEQ ID NO: 49855 - protein, 100 aa, Glycine max
  Clone ID: 700605481_FLI.pep
FPSVTLQPRGRRFQLRCAAKPETVKKVCDIVKKQLALPDESAVTGESKFAALGADSLDTVEIVMGLEEEFGITVEEESAQSITTVQDAADMIDKLLETKA

SEQ ID NO: 49856 - protein, 248 aa, Glycine max
  Clone ID: 700685633_FLI.pep
GRNYSCSNNNIPMHSCYDFLLSLDINGGCDSLTTFPLDIFPILRKIFIRKCPNLKRISQGQAHNHLQSLGMRECPQLESLPEGMHVLLPSLDRLHIEDCPKVEMFPEGGLPSNLKGMGLFGGSYKLIYLLKSALGGNHSLERLSIGGVDVECLPEEGVLPHSLVNLWIRECPDLKRLDYKGLCHLSSLKTLHLVNCPRLQCLPEEGLPKSISTLWTYNCPLLKQRCREPEGEDWPKIAHIKRVSLHGG

SEQ ID NO: 49857 - protein, 177 aa, Glycine max
  Clone ID: 700698445_FLI.pep
DHLNDPLKTPLDWRTRLQIANGVVAALEYLFLFSDPPVCHVSITSSNIMLDENFTAKLSDFGLLTSGGNSVMVPYSEDLKQKSCKIIFQLGVLILELVTGQSSEMEGSDLIEWIQESRFYNSIDKMIDPDLGNNYDCTELKSLLAVAKLCIKSWDKPSFTIPQLFRHLQKKIDISNY

SEQ ID NO: 49858 - protein, 91 aa, Glycine max
  Clone ID: 700899857_FLI.pep
VVIIWNCSNQNEKEVKVPVSWSYLWNSLQLLQGHTSTVVIHTWIWRQNVQALADPPSKETMEKLIICMFKYDALVLLFVATAVTTTLAKSS

SEQ ID NO: 49859 - protein, 220 aa, Glycine max
  Clone ID: 700900743_FLI.pep
ISKYMTIHNNKMTSIATNSTVVATRMLVVITLVLALVCCVTSAQSPAAAPAPESNGCLMALTNMSDCLTYVEDGSKLAKPDKGCCPELAGLIDSNPICLCELLGKPDSIGIKIDLNKALKLPSVCGVTTPPVSTCSAVGVPVSLPPSMSEGSLSPGIAPGVSSPSNTDASPASSPGGPGPSSEEAVASPSQNKNGVSAIQASALTNFIFGLSTLFVSVFF

SEQ ID NO: 49860 - protein, 90 aa, Glycine max
  Clone ID: 700906510_FLI.pep
SFQQRSICVLPMCLRGSFSFQSLLIFFNGFEKLRKIAFPKTPTCTLLVHLPFLILHHAPDPLNYLYEYRWPVPNRLGENLKQSALIISVN

SEQ ID NO: 49861 - protein, 288 aa, Zea mays
  Clone ID: 700336144_FLI.pep
ALGSGLASTVSQSPGPHRPPVFWSPQISHRGTLPEHQPWRSRRASCAASRSTSTPRSLALSAQFPRPPPRPPRRPPRPPRRPPRSPIASCASSPSISRGRAARSSASPGRHSSARSPTRSSSSRPPTASRISTRAPPSARSTSRRSGSTSCRHRPTRSGTCSRARPGTASSTSTRAWAARSSSRRSCMAWSSLSPSLSRGTSRNGLPRRMARCGFRRCEPSFIPLARSSLCASAIPFYVTDLMKNNSLMGKTCHWLTFVLLNVECNGCCNVESRCNYRSSMFKNKKKR

SEQ ID NO: 49862 - protein, 130 aa, Zea mays
  Clone ID: 700335353_FLI.pep
AAAEPERLVVAVEGDSGFGFSAMEVETLVRYQLPVVVIVFNNNGVYGGDRRSPDEITGPYKDDPAPTSFVPAAGYHKMMEAFGGKGYLVETPDELKSALSESFRARKPAVINVIIDPYAGAESGRMQHKN

SEQ ID NO: 49863 - protein, 114 aa, Glycine max
  Clone ID: 700749436_FLI.pep
DLVLKGCSADPIQEVTGTKSCSDQHADLEAQDYAGVTPMRRLTMRRFRQRYMYYSYCYDTLRYPVPQPECVIVPSEKQRFKETGRLKFGGSHHRQSRRRGRTTTPVDHTDQGDM

SEQ ID NO: 49864 - protein, 165 aa, Glycine max
  Clone ID: 700751664_FLI.pep
PTTTPSVVNLVPSVIDLTGLGVPEDGKKMITDLMSIYDTNVQSNKNLSSSNHVSAENPNLPQPGIQQQHDNFFRSQGISMEGNFFEEANMSNNNHHMFAREEGQFDRFKALNAPPFETNHNNNNFHLMFGSPCDLASFDFKEDMQGGVVGMDALQKQPDISIWYQ

SEQ ID NO: 49865 - protein, 304 aa, Glycine max
  Clone ID: 700749355_FLI.pep
NLFFLLSYVNSSLSMMALDMIDVVPRTRMEEENIAIQEAASAGLKSMEHLIRLLSPSSSLHNNLNNLNLNHLDCSEITGFTVSKFKQVINLLNRTGHARFRRSPPQAQAQAQTNPQPQPQIQQQGFSLDFVKPTILNSKPINKDETLTLSTTSSSFMSSVTNDASVSDGKIGPFLPPSAAKPPLSSAHRKKCRDAAAALSAKPSCHCSKKRKSRVKRTIRVPAISSKIADIPPDEYSWRKYGQKPIKGSPYPRGYYKCSTVRGCPARKHVERAQDDPKMLIVTYEGEHRHVLPLTSAAGVSFGH

SEQ ID NO: 49866 - protein, 180 aa, Zea mays
  Clone ID: LIB3067-029-D9_FLI.pep
IRHETDRIDGGGIAVVKPRGRSDEPQETQARSERPWIMAGAVDRILFTGRRYYIYYTPPRRRPLDSRAPSPSRAGSVAAAAGAAAAGAALAGVAVAAAALGGRLEAAGAGLGGRRGEDRGLDAAGGGGLHVRVHTAAVASAAAGAAGAAPALAAAARRHDHRRREEVWFLLVLLPCCFCL

SEQ ID NO: 49867 - protein, 546 aa, Zea mays
  Clone ID: LIB3069-015-A8_FLI.pep
NACHDNIVHQQKVLTRIHRDDDDKSSSDWASQPLQQTHETDTIRLVHLLDLGARATASSRSVLVHAAGATHVGTRALVHLGDDGVAKALQLLHLVIELVRLGELVGVQPADGRVDGVLDLLLVVGSQLGRDLLVLDRVAHVVGVVLQRVLGLHLLLVLLVLRLVLLRVLHHLLDLLLGQTALVVGDCDLVLLPRRLVLGRHVQDAVGVDVEADRDLGDTTRSRWDAGELELPKQVVVAGPGPLTLVHLDQHTRLVVRVGGEHLLLLGGDGGVPRDKDGHHSSGSLQTQRERSDVQQKQVLHLLVALTTEDSGLDSSTIGNGLIRIDVLAQLLAVEEVLEQLLHPGDPSGATNKDNIMDAALVHLGIPQAFLNRLHALPEQVHVELLKPGTGDGGVEVNALVQRVNLNGGLGSGRQSSLGPLTRGPQPPESPRVASDILLVLSLELLDKVVNHPVVKVLTTKMGVASCGLDFKDTFLNCKEGDIEGTTSKVKNEDILLTDTGCLLVKTIGNSSSGWLIDDTQHIEASNHPSILCGLPLRVVEIGRDR

SEQ ID NO: 49868 - protein, 227 aa, Zea mays
  Clone ID: LIB3067-045-H4_FLI.pep
FLTHTTIVKHAGEGEQSRETKAATGSLTPLQVLAARERGPFAALVVRVRLAPVLDDAVSLGERPAQAVVAQVQLLQRGQPLQRQRHGAPDEVVGQVQVRHLRREHQLAHVADPVPAGGADGPHPGLPGRAVQPAVPDRLPHQRVRRHPGVPGAAARPRLGGPLQQPADGRHPGVVRRPAQPPVAGPRAQPADGQHPGGAGAGAVPVAGPVVQPADGPDPARRRARRD

SEQ ID NO: 49869 - protein, 670 aa, Glycine max
  Clone ID: 700843719_FLI.pep
DFEPFNAAFPRPTLNKSIGNGVQFLNRHLSAKLFHDKESLHPLLEFLRLHSVKGKTLMLNDRIQNPDALQHVLRKAEEYLGTVPPETPYSEFEHKFQEIGLERGWGDNAERVLESIQLLLDLLEAPDPCTLETFLGRIPMVFNVVILSPHGYFAQDNVLGYPDTGGQVVYILDQVRALENEMLHRIKQQGLDIVPRILIITRLLPDAIGTTCGQRLEKVFGTEHSHILRVPFRTEKGIVRQWISRFEVWPYLETYTEDVAHELAKELQGKPDLIVGNYSDGNIVASLLAHKLGVTQCTIAHALEKTKYPESDIYWKKLEERYHFSCQFTADLFAMNHTDFIITSTFQEIAGSKDTVGQYESHTAFTLPGLYRVVHGIDVFDPKFNIVSPGADQTIYFPPTETSRRLTSFHPEIEELLYSSVENEEHICVLKDRSKPIIFTMARLDRVKNITGLVEWYGKNAKLRELVNLVVVAGDRRKESKDLEEKAEMKKMYGLIETYKLNGQFRWISSQMNRVRNGELYRVICDTKGAFVQPAIYEAFGLTVVEAMTCGLPTFATCNGGPAEIIVHGKSGFHIDPYHGDRAADLLVDFFEKCKLDPTHWETISKAGLQRIEEKYTWQIYSQRLLTLTGVYGFWKHVSNLDRRESRRYLEMFYALKYRKLAESVPLAVE

SEQ ID NO: 49870 - protein, 546 aa, Zea mays; identical to SEQ ID NO: 43208
  Clone ID: LIB3069-033-H8_FLI.pep

SEQ ID NO: 49871 - protein, 197 aa, Zea mays
  Clone ID: LIB3069-002-D6_FLI.pep
WPSYYLLTPPSSSSMDHRYNPMRVDWTNKWMVISYQENTIYLQGIRSSLLVGMVVELLLLSETSLSTSDSSIAVVVVYSRVQAVLDSYPSIFIDLVGLPPTCPCDHSISLIPGAQPFHIRPYRYPPTLKDEIETQVKEMLSQGVIRKSSSPFGSPILLVKKKDHSWRFCVDYRYLNATTVKSKYPVLIFDQFFVLRH

SEQ ID NO: 49872 - protein, 391 aa, Zea mays
  Clone ID: LIB3069-006-G11_FLI.pep
QGQSHLPSTQAGSHTELSLRRIKSRSRGALAVAVGVAGLPQHGCLRDQRGHHVRVHVGRRPPVLEVAFAFLLGVAAHPHRRPAVRDAPDEGVDVGGLVAAGEAALVAVPVRGDVLPVPEAQLADRLLDHLVPAVTPHRLGAVVGVCTSAIPVPRNWLGVEGDNHAGDLGDPLKNVASHPELVAGRDADGRADLELPLPRHDLPVDATDVDAGVEAGLVVRVHDVPPVGLVRSDGAVVRSLRARVAAQRPTERPLGVLLEKGVLLLNPEPWFLSLDVRVAKDLRGPVPLVARDRLPVRLVAVAHDQYVLPLPERVPEDGPRAKDDFAVVARSLAGAGAVEVPLRKLAGVINRSGQRPGFAPDVHPGTANPDVLGDDLPGAAREVEVDEVGEQ

SEQ ID NO: 49873 - protein, 369 aa, Zea mays
  Clone ID: LIB3067-038-H7_FLI.pep
ILSAATFAAVVLGCVAIVLLQTLNNRKRFNRNGGKLLNAQGITTYTKRELKKITNGYSKRLGGGHFGNVYEGTIVDGRKVAVKCPLRTRVSSHRCHWKNLIRPRRVPLPQQRVEEDGSFMNEIRFQFEVSRHKNLVQLLGCCLETDIPILVFEFVANGSLEDILHSAKKPCTLSLPERLDIAIGSAEAIAYMHSLDNQKRVHGDIKPSNILLDDDLNPKVSDFGSSKLLAIHSYYVRAVAADIGYMDPLYMKTEHFTLECDVYSFGVVLLELITRRRASWYEQDQQGNKILPIEFVKCFKDHGSGCAMYDSRLDFSGEDTQSRCNKRCLDMIGMLAVRCLKEDKRERPTMAEVVEELKRVKVLLLGTHI

SEQ ID NO: 49874 - protein, 385 aa, Zea mays
  Clone ID: LIB3067-048-B8_FLI.pep
AASRTCCDQLSSSLLDADTLTRARAVAMVAAAAAILLVLPVVAVLASSSAAADGSFITWDDLSTPSAAAVQGGVKAASGGGARELDTIVVAQDGTGHSRTVQGAVDMVPAGNSRRVKILVRPGVYREKVTVPITKPFVSLIGMGSRRTVITWNARASDMDRSGHQVGTFYSASVAVEADYFCASHITFENSAPAAPPGAVGQQAVALRLSGDKTMLYRCRILGTQDTLFDNIGRHFLYNCDIQGSIDFIFGNARSLYQGCTLHAVATSYGAIAASQRSSAEEDSGFSFVGCRLTGSGMLYLGRAWGRYARVVYSYCDLGGIVVPQGWSDWGDQSRTKTVLFGEYSCKGPGASTRNRVPWSRSLTYDEARPFLGPSFINGEQWLRL

SEQ ID NO: 49875 - protein, 535 aa, Zea mays
  Clone ID: LIB3067-049-H12_FLI.pep
ASRGETEPLEVMVSVLRVVVEHPLPRRQHPPAVLRPHHALVLRLVPHGRHHVVLPEEVGGLVHQRGVPPAGLEPRAGAAEAVQQVQVRLQVVVAREVQGLLEERRHLVVQLQQHAQVRVHAAEAQPVRRPQDELRERRLVEEHAGHLGHAVVHVHDAQRPHAQLPLEPPPEGDVPDARAGEGEHAHRRHPVARRHVRARLRDVEGAQHRQRAAQAVARDRHAHLLAPPVVQIHQLAHLGQHLLPRRVPAEAAAGALVRVQRHEPSLHLHVGVRAGDARLAQGDLVGRQIGHPLEAGDGAAPRHGDVPAAEPRRLLVGGHGHVPDERAGLAPHLGVGGRLDAEVGELEVVAGGVEVAGDLVADAAEADVVEEGLRRVLAAAAVGGEAVVVEAVVGGLGELAVADELLEEHAVDGVQQTLPVVAAVDLPPPRGELPVVGRGLMRAEVHVLDRHRGGLLFGSRRRGDDKIAARTTTALKRVRQCHTGEPAGPVVHGGDEAQAGRYGGRHQLLGAAVVVDAVRDHAARRCVFVLNASVF

SEQ ID NO: 49876 - protein, 234 aa, Glycine max
  Clone ID: 700793076_FLI.pep
RKVSVLLGISFAFMLHVISIYWWYRNDDLLYPLAMLPPKTPPPFWHTIFIILVNDTLVRQAAMAFKCLLLIYYKNGRGHNFRRQGQMLTLVEYTLLLYRALLPTPVWYRFFLNKDYGSLFSSLTTGLYLTFKLTSVVEKVQCFVSALKALSKKEVHYGVHATTEQVNAAGDMCAICQEKMQAPILLSCKHMFCEECVSEWFERERTCPLCRALVKPADLRTFGDGSTSLFFQLF

SEQ ID NO: 49877 - protein, 141 aa, Glycine max
  Clone ID: 700793081_FLI.pep
EIVCGQRNSKIRGNEENAEDLLSFAWKNWRGGTVSNIVDTTLKDYSWDEIKRCIHIGLLCVQEDINGRPTMNSVSIMLNSSSFSLAEPSEPAFLMRGKSQLPMIMLSGSEQYSEATKSSDSGSQFAQGSSNKAPITEPYPR

SEQ ID NO: 49878 - protein, 173 aa, Glycine max
  Clone ID: 700793227_FLI.pep
FSTATRNLFLELANSQASGSDADSSNTRLVVALYDALNSGDSNAVVKIVAADLEWWFHGPPSHQFLMRMLTGDSAADNSFRFVPQSIAAFGSTVIVEGCDSARNIAWVHAWTVTDGMITQIREYFNTALTVTRIHDSGEIVPARSGAGRLPCVWESSVSGRVGKSVPGLVLAI

SEQ ID NO: 49879 - protein, 85 aa, Glycine max
  Clone ID: 700794411_FLI.pep
NSHCISLSSLPEDIGDLCNLRNLNMTSCARCELPYSVTNLENLKVVVCDEETAASWEAFEAMLPNLKLEVPRVEVNLNWLHSISS

SEQ ID NO: 49880 - protein, 344 aa, Zea mays
  Clone ID: LIB3069-044-D6_FLI.pep
VEGDEENYGYSDVEEEKVSPKASPEASEEESKDASESESGESDSLSESSGSEASMRKKKGRNKSRRSSKRSRQRHRHRSYSSEIEDESKSDDDSVGSYDSEESRDRSKKRSRRHNRSKKRSRSSRRKKRRSQDTASEQSSEEEEEEDSKKKNKGLKRKRSKRSDSEESVPSDATPDDVKEIEETKVPEIDPEAIKFKEILEAQKKASLENDMPVGPMPLPRAEGHISYGGALRPGEGDAIAQYVQQGKRIPRRGEVGLSAEEIQKFEDLGYVMSGSRHQRMNAIRIRKENQVYSAEDKRALAMFNYEEKSKREHKVMADLQRLVQRTIGHDVGPSHDPFATTDG

SEQ ID NO: 49881 - protein, 371 aa, Glycine max
  Clone ID: 700791514_FLI.pep
RSFPMQVVSDEAIMTTRVQSLAQSGLSRVPPQYIQPPQTRPIRHAPPESDSESIPVIDLCSFDPTQRASTRDSIARACRHWGAFHVTNHGVPPSLLASLRRAGLSFFSDTPMPDKLRYSCSAAAASEGYGSKMLATTTTTTTSDQNGAVQVLDWRDYFDHHTLPLSRRNPTRWPESPSDYRELVARYSDEMNVLAQKLLALISESLGLRASCIEDAVGEFYQNITISYYPPCPEPDLTLGLQSHSDMGAITLLIQDDVGGLQVLKGSDKWVTVQPLSDAVLVLLADQTEIITNGKYRSCEHRAITNPDRARLSVATFHDPAKTAKISPASELINDSSPAKYRDVVYGDYVSSWYTKGPGGKRNIDALVLDS

SEQ ID NO: 49882 - protein, 137 aa, Zea mays
  Clone ID: UC-ZMFLMO17228F11_FLI.pep
LNLMRMQFVFMCWMKIRCNARLPTGLPNQKNLVVLLSKKSFFKFWHTYSEGLFPGGVAKLLLNLEKSILSRIQTAYYFEGLADFGKIFWKVCQSLLSSTFPVRGRRGRSFLLLIPAIGTETIVVPLAVAFNASFLLL

SEQ ID NO: 49883 - protein, 225 aa, Zea mays
  Clone ID: UC-ZMFLMO17228G12_FLI.pep
GTGCRSLLPDIDISTSPAGRILPFISRPLEQRFSHRSATHSLLASFTLALVSYALWFAMPVIPLVIVHALNIGYFAGWFLDCFTKSGVEMFYPLGVRCVCPGNRNLRISTGSAAEYWLMVFVVAIAVWTFQLNNTGGLVKNFNALIAAPSGVVELYNRKGGNEIIYAEYEGVWAGNRAPIKEEAPVIATNGQGFLVLRDDQVVKVGTEADSTIIVNRIRGREGEP

SEQ ID NO: 49884 - protein, 223 aa, Zea mays
  Clone ID: UC-ZMFLMO17230D05_FLI.pep
LQSMAEMTLSAAKRGAELTRHLLAFARGNPLDPKPKNINHLVEAMWGLIRRTLPENIELEFAPDPDLGIAEVDANELETALLNLVVNARDAMQDGGKLIIETSSAVLDNDYAALHCEVIPGDYVMICVSDTGIGMSADTVSHAFEPFFTTKPVGKGSGLGLSMVFGFTKQSGGHIKIYSELGEGTSIKLYFPKVKDAQRINYQPAKELIPKSGTEHILVVEDD

SEQ ID NO: 49885 - protein, 319 aa, Zea mays
  Clone ID: UC-ZMFLMO17230F07_FLI.pep
LLETKGIFLAEEKPDHDFLADIRAGQVMKTEVESLEQSLTLAQVLPIMSNSHHRGFPVVQGGKLVGVFTQTDLANAAQESVHIALKQIMTPNPITVDPEAPLSDVLYLLNRYQLSRLPVVEGDNKLVGIITRTDIIREEVSQLGGQIIHPPHPAYSVYQTRSPLVGEGRILLPIRDSDSALVLFQIAAAIAKKQNYEIDCLQVVKVSKAQSPSVQRVQWQRQRQLMQKLERIARHQRVLFHTEIKLAYSITDTILDTIQTRHSDLLILEWQGEMPIGGQIFGQITDQWWYPNVLNPALSLHFEYKNSYLALNPDRETYF

SEQ ID NO: 49886 - protein, 741 aa, Glycine max
  Clone ID: 700873747_FLI.pep
INNNIILLIPSFLNLAPSPSTHHNMASEANAANTNFCVNVSNNGYISANDPLNWGAAAEAMAGSHLDEVKRMLEEYRRPVVKLGGETLTISQVAAIAAHDQGVKVELAESSRAGVKASSDWVMESMNKGTDSYGVTTGFGATSHRRTKQGGALQKELIRFLNAGIFGNGTESNCTLPHTATRAAMLVRINTLLQGYSGIRFEILEAITKLLNNNITPCLPLRGTITASGDLVPLSYIAGLLTGRPNSKAVGPSGEILNAKEAFELANIGAEFFELQPKEGLALVNGTAVGSGLASIVLFEANIIAVLSEVISAIFAEVMQGKPEFTDHLTHKLKHHPGQIEAAAIMEHILEGSSYVKAAKKLHEIDPLQKPKQDRYALRTSPQWLGPLIEVIRFSTKSIEREINSVNDNPLIDVSRNKALHGGNFQGTPIGVSMDNTRLALASIGKLMFAQFSELVNDYYNNGLPSNLTASRNPSLDYGFKGAEIAMASYCSELQYLANPVTSHVQSAEQHNQDVNSLGLISSRKTHEAIEILKLMSSTFLVALCQAIDLRHLEENLKNTVKNVVSQVAKRTLTTGVNGELHPSRFCEKDLLKVVDREYTFAYIDDPCSGTYPLMQKLRQVLVDYALANGENEKNTNTSIFQKIATFEEELKTLLPKEVEGARVAYENDQCAIPNKIKECRSYPLYKFVREELGTALLTGERVISPGEECDKVFTALCQGKIIDPLLECLGEWNGAPLPIC

SEQ ID NO: 49887 - protein, 469 aa, Glycine max
  Clone ID: 700792492_FLI.pep
KRKVENKMGEDGNSWIRRTNFSHTVCHRLDPARLGSIPISVQSEQKSRPSSKAQRHPMTYKQRSLSPLPETYLSEAFREARLEQKRFSTPNPRREKRIMGKLLNKDSRETKESSSKSPSRSPNRQVKSKNRKDSAWTKLLDNGGGKITAVETAEEWNVDMSQLFFGLKFAHGAHSRLYHGVYKDEAVAVKIIMVPEDDGNGALASRLEKQFIREVTLLSRLHHQNVIKFSAACRKPPVYCIITEYLAEGSLRAYLHKLEHQTISLQKLIAFALDIARGMEYIHSQGVIHRDLKPENILINEDNHLKIADFGIACEEASCDLLADDPGTYRWMAPEMIKRKSYGKKVDVYSFGLILWEMLTGTIPYEDMNPIQAAFAVVNKNSRPIIPSNCPPAMRALIEQCWSLQPDKRPEFWQVVKILEQFESSLASDGTLSLVPNPCWDHKKGLLHWIQKLGPLHQNSGPVPKPKFT

SEQ ID NO: 49888 - protein, 71 aa, Zea mays
  Clone ID: 700803335_FLI.pep
KHFISKKFGGEQLDYPFHGIMDEHELLFVFIYVLFLVDSNSMDELFCNLLFSFWMKNYANATMQVSVLFRL

SEQ ID NO: 49889 - protein, 423 aa, Glycine max
  Clone ID: 700831777_FLI.pep
KRKKEVVTRKARGSRWFNRKESNFVLHQRQRKRGSFLLLLFSSTQRHRFIALSLVRTQFLMGIYLSTPKTEKASEDGENDKLRFGLSSMQGWRATMEDAHAAHPCLDESTSYFGVYDGHGGKAVSKFCAKYLHLQVLKSEAYLAGDLGTSLQKSFLRMDEMMRGQRGWRELAILGDKIEKLSGMLEGFIWSPRSSEANDRVDDWAFEEGPHSDFTGPNSGSTACVAVVRGNKLVVANAGDSRCVLSRKGQAHNLSKDHKPELEAEKDRILKAGGFIQVGRVNGSLNLARAIGDMEFKQNKYLPAEKQIVTADPDITSVELCDDDEFLVIACDGIWDCMSSQQLVDFIHQQLKTENKLSAVCERVFDRCLAPTAGGEGCDNMTMILIQFKKPSSSPDASSVMNQPQSSAQSSEADRSSETVESK

SEQ ID NO: 49890 - protein, 345 aa, Glycine max
  Clone ID: 700833881_FLI.pep
CHQMQIVVSSFDMVAGCGAAEPYTTLALRTISRHFRCLRDAISGQIQVTQRSLGEQEGIPRLRYVDQQLRQQKALQQLGVMRQAWRPQRGLPESSVSILRAWLFEHFLHPYPKDSEKIMLARQTGLTRNQVANWFINARVRLWKPMVEEMYKEEFGDSEMNCNLSSENNTVKCKKDDLVQESDNINNNNKWEETQDNLVTVDSVQVQPQAELDRGVNVENVVMDSGTGKLQGDQNQQRLGMNNNNNFYSISTNQNDGGLMGCSTHATYDLSELGNFTVGSHVSLALELRNCESDGFAMSDDAIRKRRNQALASSPETDLLDYHFTDSGKQQHRFGNPHLLHEFVV

SEQ ID NO: 49891 - protein, 710 aa, Glycine max
  Clone ID: 700869225_FLI.pep
PQFSSEDYMMLYTTIYNMCTQKPPHDYSQQLYDKYRESFEEYIVSTVLPSLREKHDEFMLRELVKRWANHKIMVRWLSRFFHYLDRYFIARRSLPPLNEVGLTCFRDLVYKELNGKVRDAVISLIDQEREGEQIDRALLKNVLDIFVEIGMGQMDHYENDFEAAMLKDTSAYYSRKASNWILEDSCPDYMLKAEECLKREKDRVAHYLHSSSEPKLLEKVQHELLSVYANQLLEKEHSGCHALLRDDKVEDLSRMFRLFSKIPRGLDPVSSIFKQHVTAEGMALVKLAEDAVSTKKAEKKDIVGLQEQVFVRKVIELHDKYLAYVNDCFQNHTLFHKALKEAFEIFCNKGVAGSSSAELLATFCDNILKKGGSEKLSDEAIEETLEKVVKLLAYISDKDLFAEFYRKKLARRLLFDKSANDDHERSILTKLKQQCGGQFTSKMEGMVTDLTLAKENQTSFEEYLTNNPNADPGIDLTVTVLTTGFWPSYKSFDLNLPAEMVRCVEVFKEFYQTKTKHRKLTWIYSLGTCNISGKFDPKTVELIVTTYQASALLLFNSSDRLSYSEIMTQLNLSDDDVIRLLHSLSCAKYKILNKEPNTKTISSTDYFEFNSKFTDKMRRIKIPLPPVDEKKKVIEDVDKDRRYAIDASIVRIMKSRKVLSYQQLVMECVEQLGRMFKPDVKAIKKRIEDLISRDYLERDKDNANLFRYLA

SEQ ID NO: 49892 - protein, 142 aa, Glycine max
  Clone ID: 700871711_FLI.pep
KKEAIENIGADSFVVSREQDQMQAVMGTMDGIIDTVSAVHPLVPLIGLLKPHGKLVMVGAPEKPLELPVFSLLMGRKMVGGSSIGGMKETQEMIDFAAKHGVKPDIEVIPIDYVNTAIERLAKADVKYRFVIDIGNTLKPSS

SEQ ID NO: 49893 - protein, 418 aa, Glycine max
  Clone ID: 700875318_FLI.pep
QIVVSSFEQAAGYGAAKSYTALALKTISKQFRCLKDAISAQIKATSKTLGEDDCLGVKVEGSRLRYVDHHLRQQRALQQLGMIQPNAWRPQRGLPERAVSILRAWLFEHFLHPYPKDSDKVMLAKQTGLSRSQVSNWFINARVRLWKPMVEEMYLEEIKEHEQGNASENTKSKESSKELGSTANVAPESGAIKLDHLQSKQESFKHQNTSPTEISTNSSMSPMGGSLQSPSGFHLAGSSDMQIRSPKKPRSSEIQNSPSSILSVGMEMKHNNNGDHANNREANNTKFGNERHHQKDGYPLMTSNANHGGGFGAFTMEDMGSRFNVTTEQLASRFHGNGVSLTLGLPHNENLSMPGTQQHGFLSQNIHLGRRLEMGTNGNEFCAINTPPSSHSGTTYESIDIQNRKRFVAHQLLPDFVA

SEQ ID NO: 49894 - protein, 199 aa, Glycine max
  Clone ID: 700832235_FLI.pep
MYMMSVDPEDAPDQAEYVEIGLESGLPVSVNGKRLSPASLLAELNEIGGKHGIGRIDMVENRLVGMKSRGVYETPGGTILFAAARELESLTLDRETIQVKDSLALKYAELVYAGRWFDPLRESMDSFMQKITETTTGSVTLKLYKGSVIVTSRMSPFSLYREDISSFESGQIYDQADAAGFIRLYGLPMKVRAMLEQGI

SEQ ID NO: 49895 - protein, 106 aa, Glycine max
  Clone ID: 700567892_FLI.pep
ASYENISKKWIPELRHYAPNVPIVLVGTKLDLRDDKQFLIDHPGSARITTAQGEELKKMIGAVTYIECSSKTQQNVKTVFDAAIKVALRPPKPKKKPRKKKTCPFL

SEQ ID NO: 49896 - protein, 210 aa, Zea mays
  Clone ID: 700806970_FLI.pep
ALSQGIPFFHAGDEILRSKSLDRDSYDSGDWFNKIDFTYETNNWGVGLPPREKNEGSWPLMKPRLENPSFKPAKHDIIAALDKFIDILKIRYSSPLFRLTTASDIQRVHFHNTGPSLVPGVIVMSIEDARNDRHDMAQIDETFSCVVTVFNVCPYEVSIEIPDLASLRLQLHPVQVNSSDALARQSAYDTATGRFTVPKRTAAVFVEPRC

SEQ ID NO: 49897 - protein, 220 aa, Glycine max
  Clone ID: 700808447_FLI.pep
RTMKVHISKTKRSHFPLFKESQSMARSTLPPETTIPIWLQSFHAGFFWKVSDRTAARPIAPLGSTTTLRISKHSFMAFIISLSSTVIISSTRSRTTGHVKSPRNARSPSAIVLVSGNRIILPAALDCAASSAPLGSAAKIRIAGLMDLAANAIPDIKPPPAVSFVGKSRSRFWNLCDFYNILVHNLSEKKVNKPLMGTTSVSICGACSRISKDMVPWPLQ

SEQ ID NO: 49898 - protein, 407 aa, Glycine max
  Clone ID: 700895907_FLI.pep
SIFFFSSSSHKAASILEMETFLFTSESVNEGHPDKLCDQVSDAILDACLEQDPESKVACETCTKTNMVMVFGEITTKASVNYEKIVRDTCKGIGFVSPDVGLDADNCKVLVNIEQQSPDIAQGVHGHMTKKPEEIGAGDQGHMFGYATDETPELMPLTHVLATKLGARLTEVRKNKTCPWLRPDGKTQVTVEYKNDGGAMIPIRVHTVLISTQHDETVTNEQISKELKEHVIKPVIPAKYLDDKTIFHLNPSGRFVIGGPHGDAGLTGRKIIIDTYGGWGAHGGGAFSGKDPTKVDRSGAYIVRQAAKSVVASGLARRCIVQVSYAIGVPEPLSVFVDTYQTGKIPDKDILALIKEKFDFRPGMIAIHLDLMRGGNFRYQKTAAYGHFGRDDPDFTWETVKILKPNA

SEQ ID NO: 49899 - protein, 335 aa, Glycine max
  Clone ID: 700844888_FLI.pep
SHIVDDFQDYADLCFKEFGDRVKFWTTLNEPWLFSQGGYATGATAPGRCTGPQCLGGDAGTEPYIVTHNQILAHAAAVHVYKTKYQAHQKGKIGITLVSNWFIPLAENSTSDIKAARRAIDFQYGWYMEPLTKGEYPKNMRALVGSRLPKFTKWQAKLVNGSFDFIGLNYYSSGYINGVPPSNDKPNFLTDSRTNTSFERNGRPLGLRAASVWIYFYPRGLLDLLLYTKEKYNNPLIYITENGMNEFNDPTLSVEEALMDIYRIDYYYRHFFYLRSAIKAGANVKGFFAWSFLDCNEWFAGFTVRFGLNFVDYKDGLKRYPKLSAQWYKNFLKRN

SEQ ID NO: 49900 - protein, 231 aa, Glycine max
  Clone ID: 700839826_FLI.pep
TDLTPERVRPAINNTLQELQLDYLDLYLIHWPFRLKDGASRPPKEGEVLELDMEGVWREMEKLVKENLVRDIGICNFTLTKLDKLMSIAQIMPSVCQMEMHPGWRNDKMLQACKKNAIHVTAYSPLGSSDGGRDLINDQKVDRIANKMNKNPGQVLVKWAIQRGTSVIPKSTKPDRIMENVSVFNWELPERDFKTLSNMPDQRRVLDGEDLFVNKSAGPFRSVEDIWDHED

SEQ ID NO: 49901 - protein, 211 aa, Glycine max
  Clone ID: 701098060_FLI.pep
FSPKPSNKGNRILFHFSIMASSTQFSTTLVTLCLFQFLAGSYSTTFTIVNKCSYTVWPGNCTATGCVVDLNTPCPAELMVMSSGEGVACKSACEAFDDPQYCCSGAYATPDTCKPSSYSQFFKSACPRAYSYAYDDGSSTFTCATADYTITFCPQPSTSSIKSGNGKYPMAVDNSGANVDVRTNNVMAVIASVLVAFVATQLGVPSLPKLH

SEQ ID NO: 49902 - protein, 637 aa, Glycine max
  Clone ID: 701049961_FLI.pep
TIHRPSRKEEKKQGDIIMACSFSRGSLLPLAIIVSLGCLFAISIAKEEATKLGTVIGIDLGTTYSCVGVYKNGHVEIIANDQGNRITPSWVAFTDSERLIGEAAKNLAAVNPERVIFDVKRLIGRKFEDKEVQRDMKLVPYKIVNKDGKPYIQVKIKDGETKVFSPEEISAMILTKMKETAEAFLGKKINDAVVTVPAYFNDAQRQATKDAGVIAGLNVARIINEPTAAAIAYGLDKKGGEKNILVFDLGGGTFDVSILTIDNGVFEVLATNGDTHLGGEDFDQRIMEYFIKLINKKHKKDISKDSRALSKLRREAERAKRALSSQHQVRVEIESLFDGVDFSEPLTRARFEELNNDLFRKTMGPVKKAMEDAGLQKNQIDEIVLVGGSTRIPKVQQLLKDYFDGKEPNKGVNPDEAVAYGAAVQGSILSGEGGEETKDILLLDVAPLTLGIETVGGVMTKLIPRNTVIPTKKSQVFTTYQDQQSTVSIQVFEGERSLTKDCRLLGKFELSGIPPAPRGTPQIEVTFEVDANGILNVKAEDKGTGKSEKITITNEKGRLSQEEIERMVREAEEFAEEDKKVKERIDARNSLETYVYNMKNQVSDKDKLADKLESDEKEKVETAVKEALEWLDDNQSV

SEQ ID NO: 49903 - protein, 203 aa, Glycine max
  Clone ID: 701055256_FLI.pep
FSTVTTLFWCRKKDESQETDFKDAVVLCLPLINAAIRDVVNGTFLKNCFLNIEIPKSPLTSKGFKLTKQSMWRSTPNWQAVSTSRYPPGHFLASKQGFGLQFAQIGRDASAAGAARRLTTQKKNLEIVESIGAAGKADSNRVKKYFRLEFLDKQQEDIDDDLDYMALENGFVAVTPLSLSLHTETDIQMAASDWISSVLSGEQ

SEQ ID NO: 49904 - protein, 274 aa, Glycine max
  Clone ID: 701107287_FLI.pep
MGEDERELLLLRNHEFLAEQEQLKAKYNIMQKNIDEFGRDPKNRSIVFDRPARIEIINEQSEIPLVVYVSRERRPNVPHTYKGGALNTLLRVSGLFSNGPYVLVVDCDMYCNDPSSAKQAMCFFLDPETSKDIAFVQFPQMFHNLSMKDIYDSQHRHAFTTMWQGMDGLRGPGLSGSGNYLSRSALIFPSPYEKDGYEHNAQNKFGNSTMYIESLKAIQGQQTYKTSISRNVILQEAQAVASCSYEIDTNWGNERMEINLPLPQKTLFLGMCPH

SEQ ID NO: 49905 - protein, 650 aa, Glycine max
  Clone ID: 701108481_FLI.pep
VSKHMASTFCLLHSPLYQFPSSSSSSSGPIKLRASTTSCLGQQDKEPLRNRRTVLLTSIALLPFRRLKRAPALESPPPPPPPTEETDVKTQEDNQKAEKAPEVDQPSNSFLLLLNGIGIFSSGVLGALYTLAQKEKSTAVATIETMSSKLKEKEELIVSLKKNYELKLLNKREEQAKLLEKAKEEQLALINQLNSANSTINRLGQELKNERSLIEDLKLQIDRLKAELSKTDTDKKDLENNLKEKIDSIGVLQERINLLSVDLKDKEDAVQNLNSSQAEKELELKSLKSTYEQTKDDLINVQLQIQGLKDELLKTQEELEAKDSLVIELNSRVSSLTIENNNFRSKCDVMEKEYNDLKFSAVKKAALDSKVLREKEEELHQLKDQFELALGEASKSQIVIADLSQERDDLKEALDNESSKVNHLKQELQVTQENLAKSRNESAELENLLTLSNKLCKELELEVSKLSSELTEVNESLQRNLDDAKHEAEMLASELTTAKEHLKEAQAELQGVSKELTAALEKNDSLQKELVEVYKKAESTAEDLKEQKQLVASLNKDLQALEQQVSKDKESRKSLERDLEEATISLDEMNRNAVILSGELQRANSLVSSLEKEKDVLIKSLTNQRNACKEAQDNIEDAHNLIMKLGKERE

SEQ ID NO: 49906 - protein, 294 aa, Glycine max
  Clone ID: LIB3167-015-A9_FLI.pep
SVFSYIPFSTTHSILNLWAWLASTFNINMAIPYPHFIATEKAAMDAGLLHPSSPSVILTQDDLKKIAAYKAVEYVESGMILGLGTGSTAKHAVDRIGELLRQGKLKDIVGIPTSTKTHEQALSLGIPLSDLDAHPAIDLAIDGADEVDPFLNLVKGRGGSLLREKMVEGACKKFIVIVDESKLVNYLGGSGLAMPVEVIKFCWRFTAARLQKLFEEAGCVARLRTFGEKEKEEPYVTDNGNFIVDLYFERSIGDLKAASDAILQLAGVVEHGMFLDMATTVIVAGELGLTVKNK

SEQ ID NO: 49907 - protein, 176 aa, Zea mays
  Clone ID: 700201948_FLI.pep
IALDSGLSTGGFTDCLLQHGASHVYGVDVGYGQVAEKIRTHERVSVIERTNLRYLSQLPEPVDLVTLDLSFISILLVMPAVIKVMKTDSTLITLIKPQFEARRSQVGGGGIVRDPLVHQEVLDRIISGVEEFGFCNKGWIESPIKGAEGNKEFLACFNRIPISESQPEAEAKEPVT

SEQ ID NO: 49908 - protein, 145 aa, Zea mays
  Clone ID: 700043830_FLI.pep
EKARLAFCKFMVTPSTLLILDEPTNHLDIPSKEMLEEAISEYTGTVITVSHDRYFIKQIVNRVIEVKDQTIQDYQGDYNYYLERNLEARERELAREEELEERAPKVKAKSKMSKAEKAVRKKQKMQAFQQSKQKSKSLKNSKRWN

SEQ ID NO: 49909 - protein, 387 aa, Zea mays
  Clone ID: 700346241_FLI.pep
HPQLFYEAKLYNTLQGGSGIANVKWCGVDGEENVLVIDLLGPSLEDLFCYCGRKFTLKTVLMLADQMITRIEFMHSKGYLHRDIKPDNFLMGLGRKANQVYIIDFGLAKRYRDSTTNRHIPYRENKSLTGTARYASCNTHLGIEQSRRDDLVSLGYVLLYFLRGSLPWQGLKAATKAQKYDKICEKKISTPIEVLCKSCPVQFSSYFHYCHSLAFDQRPDYAFVKRLFRDLFISQDYEFDYVFDWTVLKYKQGHKQKQSPGAPIARPIQAHGPKQAGVNGVINHNEAQEHVETSRPTGQAAWSQDKQATNNDRNPDVRHTVNLRQDMAAGKAQLTTSVALPSSQWKNYSDSRHKGQFDAVHHNQGIVNITSSSNSWLPTFQHNAPGK

SEQ ID NO: 49910 - protein, 259 aa, Zea mays
  Clone ID: 700551229_FLI.pep
ISIDEAVEENEGSPRACACQIACSTSASRPSRNSALPGCAKFMASDTRKKLIQIDVSSDTVCPWCFVGKKNLEKAMEQSKGKFDFEVRWHPFFLNPDAPKEGVKKSDFFKMKFGPVQYEGAMSRMTEIFRGLGLEYDMSGLTGNTMDSHRLITLAGHQGYDKQNVLVEELFLNYHCQGKYIGDKQVLLDAARKVGIEGAEELLEDPIKGVDEVQEELKKYSSDISGVPHFVINNKYQLSGGQPPNEFTRAFEMAAKDGT

SEQ ID NO: 49911 - protein, 651 aa, Zea mays
  Clone ID: 700551647_FLI.pep
FLNRHLSSIMFRNRDCLEPLLDFLRGHRHKGHVMMLNDRIQSLGRLQSVLTKAEEHLSKLPADTPYSQFAYKFQEWGLEKGWGDTAGHVLEMIHLLLDIIQAPDPSTLEKFLGRIPMIFNVVVVSPHGYFGQANVLGLPDTGGQIVYILDQVRALENEMVLRLKKQGLDVSPKILIVTRLIPDAKGTSCNQRLERISGTQHTYILRVPFRNENGILKKWISRFDVWPYLETFAEDAAGEIAAELQGTPDFIIGNYSDGNLVASLLSYKMGITQCNIAHALEKTKYPDSDIFWKNFDEKYHFSCQFTADIIAMNNADFIITSTYQEIAGSKNTVGQYESHTAFTLPGLYRVVHGIDVFDPKFNIVSPGADMSIYFPHTEKAKRLTSLHGSIENLIYDPEQNDEHIGHLDDRSKPILFSMARLDRVKNITGLVEAFAKCAKLRELVNLVVVAGYNDVNKSKDREEIAEIEKMHELIKTHNLFGQFRWISAQTNRARNGELYRYIADTHGAFVQPAFYEAFGLTVVEAMTCGLPTFATLHGGPAEIIEHGVSGFHIDPYHPEQAANLMADFFERCKQDPDHWVKISGAGLQRIYEKYTWKIYSERLMTLAGVYGFWKYVSKLERLETRRYLEMFYILKFRELAKTVPLAIDQPQ

SEQ ID NO: 49912 - protein, 369 aa, Zea mays; identical to SEQ ID NO: 42422
  Clone ID: 700440029_FLI.pep

SEQ ID NO: 49913 - protein, 135 aa, Zea mays
  Clone ID: 700623502_FLI.pep
LRSFHTWPTIVAHCAFNLQKEMDTAVNRKDLGVPVGDTLFGKTILILGFGAIGIEVAKRLRPFGVKILATKRNWSSDTLPSYVDELVDKKGGPEDMYEFAGEANIVIACMTLTSETVNASLGVLSYKYSFKMAST

SEQ ID NO: 49914 - protein, 257 aa, Zea mays
  Clone ID: 701169533_FLI.pep
HHVAERLGLKPYHVYHVTVMPCYDKKLEAVRDDFTFSVDGKEVTEVDSVLTTGEVLDLIQSKSIDFKTVEESSLDRLLTNVDEEGHLYGVSGGSGGYAETIFRYVAHVIYKREIEGPLDFRILRNSDFREITLEVEGKPVLKFALCYGFRNLQNVVRKIKMGKCEYHFIEVMACPSGCLNGGGQLKPVEGQSAKELIQQLESVYTQDILISDPFRNPIAKKLYDEWLGQPGSENAKKYLHTEYHPVVKSVASQLQNW

SEQ ID NO: 49915 - protein, 595 aa, Glycine max
  Clone ID: LIB3139-107-A10_FLI.pep
FSHQLPSIAFIMSGATTPLPSGVSTPDIRTRELKQPMDVAEYLFRRLHQVGVRSVHGLPGDYNLVALDYLPKCGLDWVGNVNELNAGYAADGYARIKGISAIITTFGVGELSAINAIAGAYSEYVPVVHIVGYPTTAAQKNNLLLHHTLGNGDFNSFADMSRKVSCAVSMLNDPHEAATLIDDAIKKCYVLSRPVYIALPSDMVGKKIEGERLKTPLNLEFSPNHEEKEDYVVDVVLKYLHAAKNPVILVDACAIRHRALKETDEFIKKTGIPTFVAPMGKSAVDETLPNYGGVYAGDGSNAGVRERVESADLIISIGAVKSDFNTAGFTYRTSQLNTIDLHSYGVAVKYSEYPGVRMNGVLTKVTAKLGKLNIESGPVPNNTVPKEHADSSDPTITQAWLWPRVGQWLRENDIVITETGTANFGIWETRFPKGVTAISQVLWGSIGYATGCLQGAALAAKELGRERTILFTGDGSFQLTAQEVSTMIRKNLNPIIFVICNDGYTIERCIHGWDAVYNDIQNWNYKDLPAAFGGKPEQFDTYQVKTKEELNKLFAEESFNTSKKLRFVELYMPRDDAPAALMLTAEAAAKRNLEG

SEQ ID NO: 49916 - protein, 756 aa, Zea mays
  Clone ID: 700048807_FLI.pep
IVTSPDLTKPQICAPAMAVRASLACFPSDPALHAACGMPWGVAITPFSATDERGFPPATGTEGHLLPRCQSCFAYFNLLCPLDRWSWNCAICGAENDLSADAAARYARDGGHDPPEMRSAFVDLLLPVEEGEAAAAAAPTPVYVAAIDLSSSEEFLELVKSALQAALEALLPGSLFGLLTFSSKIGLYDVQGPIPIVKNVFIPPDSDGALQVDLEDIMPLCSFLASIDSCKDRITEALETIKPMSSWEVAANAHDGQDHVLHHIRGFGVALDVLINYLSSEYGNAFELARIFAFLSGPPNYGAGQLDINEDQNSGKARGADHILLQEQTSFYRNLATSAVQAGVCVDLFAITNEYTDLTSLKVLSVESGGSLFLYSSTDESTLPQDIYKMLSRPYAFGCVMRLRTSSQFKIVDSYGHFFPDPQYMHVQHINCCDSFATYSYDFEFEKDSQFSRKSSPPIIQIAFKYTVLVHNGDISDLPNSGCRFKYLLERRLRVRTIQYNTTANIWDLYDFVDPDVVLTILVHQVILASLSDALETRLWLQDWLVVVIAQYNKAYKNVTSGGGTEIYNIDVNFSHCSQLQPLSRFVFAILLSPLLQVSSEGIHPDYVTYLQCLLSALEPASLRQAIWPTLISYSSPDVEAEVHQSLSRTVFTSERPIYILDAYKDLLVYYSPTASSEIPFPPPRNCLLRSTVDRLKQERNITPKLVFIHGAHDDTTEFEKYLVEDQTLDGSPLSSSTGFSSFLDEVRSKVAEHGI

SEQ ID NO: 49917 - protein, 103 aa, Zea mays
  Clone ID: 700192923_FLI.pep
LHRAVLPGDEAAEAALSGPAPALETFVRCCCFNSLVDRAEPVVVVAAILAALRLNLSVSCICVVPCFFASHVAILLSVEGDIRLPCCCTVTSSPYLYNPSLCC

SEQ ID NO: 49918 - protein, 265 aa, Zea mays
  Clone ID: 700266176_FLI.pep
HKAEFLFGLADPTMASSDGKPLPTPASVGGGGGSSTAPPGQPTTVASKVLDMGAAAMQSLRPVKQAKQHMCTFALYAHDPKRQVETHHYVSRLNQDFLQCAVYDSDKADARLIGVEYIVSRKIFDSLPAEEQRLWHSHAHEIKSGLWTSPHVAGLLEKAELDHMAATFGKFWCTWQVDRGDRLPLGAPALMVSPQADPAAAVRPDLVRKRDDRYGLSTEELRAARADVEAPAEEHPGQADYWLRHRKGFAVDVVPHEMKRHAPFP

SEQ ID NO: 49919 - protein, 362 aa, Zea mays
  Clone ID: 700333915_FLI.pep
RTMARYSPPSLRCFFRCAASSASRAVGSGTRKKNLVFLGSPQVAASVLDKLLGASGSPESAFQVAAVVTQPPAAKNRGRKLMPSAVAQLALDRGFPEELIFTPERAREESFLSALKEVEPDVCITAAYGNILPQKFLDIPSCGTVNIHPSLLPLYRGAAPVQRALQDGVAETGVSLAYTVRALDAGPVIACERFSVDECIKAPELLSMLFHLGSKLLINELPSILDGSAKDKAQPQDDSKATLAPKLNSEESWLSFDEEAKVLHNKVRAFAGWPGTRAKLQLINQNSVPDVLEIKVISTKVSTSCVKVGDENEILFSGSSLLIPCSGSTWLEVLELQLPGKKVTKAQDFWNGLRGQKLMKLP

SEQ ID NO: 49920 - protein, 101 aa, Zea mays
  Clone ID: 700282485_FLI.pep
DLLARLHIIAACILVIVVSKMEVRSFHLILFLKFLRNSKCVATRNEPTLAAAENGPHQEKRNPQSSNPPFNGRLVNLDRRPRREEGGGERRQRRRVPGRRS

SEQ ID NO: 49921 - protein, 399 aa, Zea mays
  Clone ID: 700450362_FLI.pep
RLELEPLGCQGMGIPVGKLSLYTALGGVRPSACLPITLDVGTNNEELLNDEFYIGLRQRRATGQEYTDFLQEFMSAVKQNYGEKVLIQFEDFANHNAFDLLARYGTTHLVFNDDIQGTASVVLAGLIAAQTLLGGSLADHTYLFLGAGEAGTGIAELIALEISRQTKAPIEECRKKIWLVDSKGLIVSTRKESLQHFKKPWAHEHKPLSNLLDAVNAIKPTVLIGTSGKGQTFTKDVVEAISSFNERPIILALSNPTSQSECTAEQAYTWSKGQAVFATGSPFDPVEYNGKIHVPGQANNAYIFPGFGLGVVMSGAIRVHDDMLLAASEALAQQVTEENFEKGLIYPPFSNIRKISAHIAASVAAKAYELGLASRRPRPKDLVKYAESCMYSPIYRNYR

SEQ ID NO: 49922 - protein, 412 aa, Zea mays
  Clone ID: 700457230_FLI.pep
YNPFRLIGVGLLVWTIATAGCGVSFDFWSITICRMFVGVGEASFISLAAPFIDDNAPVAQKTAWLGMFYMCIPTGIALGYVYGGLVGKYLNWRAAFWGESILMVPFVILGFVIKPLNLKGFAHNTTKEYGQMLNPEVQDQINNNATKHVLPGGIEDLSGKVPQKFSLSSFCHGIMTEIGRFSKDMKELLQEKVFVIVVLGYISYNFVIGAYSYWGPKAGQEIYNMGSADLMFGGITIVCGIIGSLAGGFILDKIGSTIPNAFKLLSGATFVGAIFCFGAFCFKSLYGFIPSFAVGELSVFATQAPVNFVCLHAVKPHLRPLAMAVSTVSIHIFGDVPSSPLVGLLQDKINNWRATALILTSILFAAVVFWFIGIFIPSVDRFNEESEHGLTVAERSNLRPLLDEKDEPRTSD

SEQ ID NO: 49923 - protein, 558 aa, Zea mays
  Clone ID: 700458828_FLI.pep
QKHPTHLLIRMAALTQTTDGPRLGEQEMKKMSPSFHPTLWGDFFLSYEAPTEAQEAQMREKAGVLKEEVRNMIKGSHDVPEIVDLIITLQRLNLDYHYEDEITEKLTVVYNSNYDGGNLDLVSRRFYLLRKCGYHVSSDVFLNFKDQYGNFIEADTRSLLSLYNAAYLRIHDETVLDEAISFTTRCLQDRLEHLESPIAEEVSSALDTPLFRRVGTLEMKDYIPIYEKDAKQNKSILEFAKLNFNLLQLLYSSELKECTAWWKELHVESNLSFVRDRIVEVYFWMSGGCYDPQYSHSRIILTKIVAFITILDDTLDSHANSYESMQLAEAVERWDETAVSLLPEYMKDFYMYLLKTFSSFENELGPDKSYRVFYLKEAVKELVREYTKEIKWRDEDYVPKTLKEHLKVSLISIGGTLVLCSAFVGMGDVVTKKIMEWVMSDAELVKSFGIFVRLSNDIVSTKREQREKHCVSTVQCYMKQHELTMDEACEQIKELTEDSWKFMIEQGLALKEYSIIVPRTVLEFARTVDYMYKEADKYTVSHTIKDMLTSLYVKPVLM

SEQ ID NO: 49924 - protein, 172 aa, Zea mays
  Clone ID: 700423304_FLI.pep
PFVRRPPWLRSTDGCTALVSLPADQRRRYSKIIIQQGTATATRVRAEAGDRTSSPLVVRCRSQRRRAAMASLSSPGGPGARPAAPPTARRPCPQLRRTMLLALARATPCGAAGRDVQVLEQRDWEPKRQQVTFLAIPASSAAQNLRAALHVLIFSPHFAKHASGTLLIASAD

SEQ ID NO: 49925 - protein, 349 aa, Zea mays; identical to SEQ ID NO: 49279
  Clone ID: LIB3959-003-G12_FLI.pep

SEQ ID NO: 49926 - protein, 387 aa, Zea mays
  Clone ID: LIB3591-121-E9_FLI.pep
ILIVVDRSIDRPAGQPSSWQALAPIGSSAGQGKAAVRTTMAQGSRSAAVPAAASFFALLAVAPLLLCCAPAAAELARLEHPAKDGGSLSLLVVGDWGRKGAFNQSRVAHQMGRVGEQLSIDFVISTGDNFYENGLTGTDDEAFEQSFTDIYTAKSLQKPWYLVLGNHDYRGDALAQLSPVLRKIDSRFICMKSFVVNAEIVEFFFVDTTPFQLKYWTHPKDDHYDWRGVAPREKYINNLLKDLDGAIKRSTAAWKVAVGHHTMRSVSDHGDTKELLQLLLPVLQANGVDFYINGHDHCLEHISSKDSPIQYFTSGGGSKAWRGVQNPTEDDLKFFYDGQGFMSLQLDRSQAKFTFYDVDGKALYSYTRSSLMETGHHLQASGYVNEE

SEQ ID NO: 49927 - protein, 349 aa, Zea mays
  Clone ID: LIB3357-056-A10_FLI.pep
ALVTDPCSFFDAPPGMANRSVAMGVALAFVAMTALCCAPGAAELPRLDHPARSDGSLKLLVVGDWGRKGTHNQSRVADQMGRVGEKLDIDFVISTGDNFYKDGLKGVRDQAFEESFVDIYTAQSLQKPWYSVLGNHDYRGNALAQLSPVLRKIDDRFICMRSFIVNAELVDFFFVDTTPFQLEYWTHPGKDRYDWRGVAPRGKYIANLLKDLDVAMKKSTARWKIVAGHHTMRSVSEHGDTKELLELLLPVLKDNGVDFYINGHDHCLEHISSRDSPLQYFTSGGGSKAWRGVFHPNKDKLRFFYDGQGFMSLQLNQDQAHFIFYDVFGNILYRWSSRHPQPSTYLDEE

SEQ ID NO: 49928 - protein, 249 aa, Zea mays
  Clone ID: LIB3608-047-B3_FLI.pep
KPPIGKDEACDRLRCAALFSPPRLVHRGGLRFLLPCPTVAGLVLRHAAGLLLPGRRGQAGGGVRHPRDVAGPELADAVVQEPAQLRVLELRVEEARHLLQPGPARLLRARAAAQGAARPRGGPRGRRDRAVRHRHVPGGPRQGRHRAGDRLRGQPRVQPRRGRRGAAVPGVPVRGPRGQGPHRLPAPHAHQVHRSGQVARLLIPSFWLSFAIVKTGRVQIDRYDDTCMFAYVISKADLNKCVFTFYLRM

SEQ ID NO: 49929 - protein, 327 aa, Zea mays
  Clone ID: LIB4185-002-B9_FLI.pep
QAGQETEIHPPDTRTPRIAFAKQRRVGGAGAMETRRPRRGWNKRFVLPLALLCLAVLLPGALLPPSASASSSSPAAGGGSRKRRWVGFDYYVLALQWPGTICRETSNCCDTNGCCRSQPLKWFTIHGLWPQYNYGGWPSCCRPTRFNINKILMLMPILEKYWPSLYCGSSSTCFGGRGPFWVHEWETHGTCAYPEIQDEYDYFSTALYLYSKYNVTKALRKARIRPTSGRKYAVGHIVAVIEYAFGAMPSLVCKNGSVQELRLCFHKDYQPRDCTLEAGSAPNGRSYCPRYITFPSYKPSVVANTTEGINNQSNGEVPSYMRTSDSE

SEQ ID NO: 49930 - protein, 532 aa, Zea mays
  Clone ID: LIB3689-260-G12_FLI.pep
IKYKIKGSTSSSPLSPSTSHGGRAAAAAGGPGCTRLATMPDPTTKLPSPRPRRRRRLFSLCLGTALLALIVSALVHVVAQPPGPAPASARFSVIIDGGSTGTRAHVFAAGPDGRPDLARSTVMRVSPGLSSFAADPARAGESLKPLLDFARDKIGGAVREAEVRLMATAGLRLLEERAQEAILASCRDVLRASGFRFEDAWAKVIPGSDEGVYAWVAANYALGRLGGDPNKTVGIIELGGASAQLTFVSDEVLPPKLSYNYTFGETTYTLYTNSFLNFGQNAAQDSFHEMLRSRGSFKNGTLADPCAPRGYSRNEGASRSTLENQYVNNGTGNFTECISSSQLLLQKGKEKCQYQQCHLGSTFVPELRGYFLGTENFYFTSKFFGLKKSSSLSDFMFAGEQFCNQHLSSLRKKHPNRSDEDFSRYCFSMAYIVALLHDSLGVPLDDKRIEYSNQVGDIQVEWALGAFITLMQNTSLKPLHTTAESTHSNRPLFVVLGMFLLCGVLFVSRWRKPKTKIIYDLEKGRYIITRIS

SEQ ID NO: 49931 - protein, 350 aa, Zea mays
  Clone ID: LIB3608-042-A9_FLI.pep
IKYKIKGSTSSSPLSPSTSHGGRAAAAAGGPGCTRLATMPDPTTKLPSPRPRRRRRLFSLCLGTALLALIVSALVHVVAQPPGPAPASARFSVIIDGGSTGTRAHVFAAGPDGRPDLARSTVMRVSPGLSSFAADPARAGESLKPLLDFARDKIGGAVREAEVRLMATAGLRLLEERAQEAILASCRDVLRASGFRFEDAWAKVIPGSDEGVYAWVAANYALGRLGGDPNKTVGIIELGGASAQLTFVSDEVLPPKLSYNYTFGETTYTLYTNSFLNFGQNAAQDSFHEMLRSRGSFKNGTLADPCAPRGYSRNEGASRSTLENQYVNNGTGNFTECISSSQLLLQKGKD

SEQ ID NO: 49932 - protein, 465 aa, Zea mays; identical to SEQ ID NO: 37241
  Clone ID: LIB3958-010-B3_FLI.pep

SEQ ID NO: 49933 - protein, 443 aa, Zea mays
  Clone ID: LIB3607-003-A8_FLI.pep
TVSAGAAVLGRKAGGSSPATTHEGTNPAGTGMGTGTAQYAVIFDGGSTGSRVHVFKFDKQLDLVKIGDEIQFFAQVKPGLSEYAGEPQEAARSIAPLLEKAQGAVPASLQSTTPLKLGATAGLRLIGDEKSEEILEAIRDLVKSKSEFEYNPNWITVLEGSQEGSYLWVALNYLLGKLGGDYSDTVGVVDLGGGSVQMAYAISDDASANAPAVPEGQDPYVTKEHLKGKHYNLYVHSYLHYGLLAARAEILKANNGPFSPCILRGFSGTYTYNGEEYEAAAAPEGASYEKCRDGAVAALNLGARCEAKNCTFNGVWNGGGGAGQADLYVASYFYDRASQVGIIGGDAPNGRSTPAAFADAALKVCSLSVADAEAAFPDAWDAEYLCMDLVYEYTLLVDGFGLEPTKEFTLVTKVKYGEYYVDAAWPLGDAIETLSSQKLNQIA

SEQ ID NO: 49934 - protein, 579 aa, Zea mays
  Clone ID: LIB3607-009-H2_FLI.pep
VCTGSHATRTPALHCRRACVTGRGEMTAPGGSNLAVLDALDSARTQMYHMKAIVIAGMGFFTDAYDLFCISTVSKLLGRIYYPDDNLYIDKPKPGTLPVSVNNMVTGVALVGTLMGQLVFGYFGDKLGRKRVYGITLVLMAACAIGSGLSFGSSAHAVIGTLCFFRFWLGFGIGGDYPLSATIMSEYSNKKTRGAFIAAVFAMQGVGIIFAGLVSMIVSGILLHYHPAPAWKENHDRSWQDQMPAADYMWRIVLMIGAFPALATFYWRMKMPETARYTALIEGNAKQAANDMQKVMDVEIQAEQDKLARYKAANDYPLLSREFARRHGLHLIGTATTWFLLDIAFYSQNLTQKDIFPAIKLTSPVDDINALKEVFEISKAMFLVALLGTFPGYWVTVALIDKMGRYLIQLIGFFMMSVFMLLMGVMYNDLKNKHTTLFALFYALTFFFANFGPNSTTFVLPAELFPTRVRSTCHAISAASGKAGAIVAAFGVQSLTLKGDVGHIKKALIILSVTNILGFFFTFLVPETMGRSLEEISGEDGNVENGPGAPAGVAMGVADVSKDDKMPVSSTEWQSSMHA

SEQ ID NO: 49935 - protein, 598 aa, Zea mays
  Clone ID: LIB3689-228-D1_FLI.pep
DLISSILACSPLPVSPPPATPMSQSSPLFSVARAHAGAGGRAVAAALLLRRRPIAQLPHSIHGLRCLSPARATPSKTLLSLPRATLSSFADPDGDGGSSAKASDGGAKAGAGGEEQVGECEMSEMARAFHISPRVATSISVTIAFAALTVPLAMRSLVCHGTFRMNALAYFTLLSGFYMAWNIGANDVANAMGTSVGSGALTLRQAVLTAAVLEFSGAFLMGTHVTSTMQKGILVASAFQGKDSLLFAGLISSLAAAGTWLQVASSYGWPVSTTHCIVGAMVGFGLVYGGVDAVFWSSLARVSSSWVISPLMGAAVSFLVYKCIRRFVYSAPNPGQAAAAAAPIAVFTGVTAISFAAFPLSKVFSIAILQAVSSGAIGAIIVSRVIQKQLGDLLSSEAEKIASAEKSSAQQAGFLSDIAGPTGAQLQIVYGVFGYMQVLSACFMSFAHGGNDVSNAIGPLAAALSILQGVASSAEIVIPTEVLAWGGFGIVAGLTMWGYRVIATIGKKITELTPTRGFAAEFAAASVVLFASKLGLPISATHTLVGAVMGVGFARGLNRVRAETVREIVASWLVTIPVGAVLSIFYTLILTKILAYFM

SEQ ID NO: 49936 - protein, 490 aa, Zea mays
  Clone ID: LIB4171-001-F7_FLI.pep
KPSKLSVMAPPATNSPGEVDSGGRPHVMFIPSAGMGHLIPFFRFIAALAGQSVDISVVTVLPTVSAAEEDYFTSLFAALPRVRRVDLHLLPFDASKLPSNDRDPFVLRWEALRRSAHLLGPLIAGAAPRVSAVITDVTLTSHVIPIAKELGVQCHVLFPSSATMLSLLAYTPVHIDKKAEQGSDIGDVDIPGVCRIPQSCLPQVLLHLDKLFTKQFIANGREIINADGFLVNTFDALEPVALAALRDGKVVPGFPPVYAIGPLMSQQHSVDEGGKEEGSGSPVAWLDEQPARSVVYVAFGNRCAVSHDQIREIAAGLEASNCRFLWVLKTTTVDRDDSAVLTELLGEGFLERVQGRGLVTKAWVDQEALLKHPAMGLFLSHSGWNSVTEAAAASVPLLAWPRGGDHRVNAKVAVSGGVGVWMEHWSWDGEDWLVTGEEIAKKVKEVMSDEAVRARTTRTAEEAAKAVAEGGTSYRSMEEFISSVKATVAS

SEQ ID NO: 49937 - protein, 540 aa, Zea mays
  Clone ID: LIB3689-206-E4_FLI.pep
NFRCFQEAAATMGNCCAAPSTEGSGKTRPKKQKENPYNVAYNRGAAPVRPGLVVLRDPTGRDLGAEYELGGELGRGEFGVTYLCTEPATGARYACKSISKRKLRTPVDVEDVRREVDIMRHMPPHPNIVSLRAAYEDRDAVHLVMELCEGGELFDRIVARGHYTERAAAAVMRTIVEVVQKCHRHGVMHRDLKPENFLYASKDSSPLKAIDFGLSVFFRPGERFTEIVGSPYYMAPEVLKRNYGPEVDVWSAGVILYILLCGVPPFWAETEQGVAQAIIRSVVDFKREPWPRVSEPAKDLVRRMLDPNPLTRFTAAQVLEHPWLHDSKNTPDVSLGDTVRARLQQFAAMNKLKKKALRVIAEHLSAEEVADIKQMFDKMDVNKNGKLTFEEFKAGLRKLGNQMHDSDLQILMDAADVDRNGTLDYEEFVTVSVHVRKIGNDEHIQKAFAYFDRNKSGYIEIEELREALADELDGSDEDIIGGIIRDVDTDKDGKIGYDEFAAMMKAGTDWRKASRQYSRQRFSNLSLKLQKDGSLGADTR

SEQ ID NO: 49938 - protein, 465 aa, Zea mays
  Clone ID: LIB3060-075-A8_FLI.pep
EFGVTYLCTESATGARYACKSISKRKLRTPVDVEDVRREVDIMRHMPPHPNIVSLRAAYEDEDAVHLVMELCEGGELFDRIVARGHYTERAAAAVTRTIVEVVQMCHRHGVMHRDLKPENFLYANKKESSPLKAIDFGLSVFFRPGERFTEIVGSPYYMAPEVLKRNYGPEVDVWSAGVILYILLCGVPPFWAETEQGVAQAIIRSVVDFKREPWPRVSEPAKDLVRRMLDPNPLTRFTAAQVLEHPWLHDSKKMPDISLGDTVRARLQQFAAMNKLKKKALRVIAEHLSVEEVADIKQMFEKMDVSKNGKLTFEEFKAGLRKLGNQMPDSDLQIMMDAADIDKNGTLDYEEFVTVSVHVRKIGNDEHIQKAFTYFDRNKSGYIEIEELREALADELEGTDEDIINGIIRDVDTDKDGKISYDEFAAMMKAGTDWRKASRQYSRQRFSNLSLKLQKDGSLGAETR

SEQ ID NO: 49939 - protein, 522 aa, Zea mays
  Clone ID: LIB3332-007-F5_FLI.pep
PPPSPAKHIKATLAKRLGGGKPKEGTIPEEGGAGAGAGAGAGAAVGAADSAEADRPLDKTFGFAKNFGAKYDLGKEVGRGHFGHTCSAVVKKGEHKGHTVAVKIISKAKMTTAISIEDVRREVKILKALSGHDNLVRFYDACEDALNVYIVMELCEGGELLDRILARGGRYTEEDAKAIIVQILSVVAFCHLQGVVHRDLKPENFLFTTRDESAPMKLIDFGLSDFIRPDERLNDIVGSAYYVAPEVLHRSYSMEADIWSIGVITYILLCGSRPFWARTESGIFRSVLRADPNFDDSPWPSVSAEAKDFVKRFLNKDYRKRMTAVQALTHPWLRDEQRQIPLDILIFRLVKQYLRATPLKRLALKALSKALSEDELLYLRLQFKLLEPRDGFVSLDNFRAALTRYSTDAMRESRVLEFQHALEPLAYRKMDFEEFCAAAISPYQLEALERWEEIAGTAFQHFEQEGNRVISVEELAQELNLAPTHYSIVQDWIRKSDGKLNFLGFTKFLHGVTIRGSNTRRH

SEQ ID NO: 49940 - protein, 657 aa, Zea mays
  Clone ID: LIB3689-226-A12_FLI.pep
LSLSLSPLLPLPFPTDDATTRLPCPALPHARTRGGAEGRNLNPNPSGPPAMGQCYGKAGGASSRRADHDDAVAPPSPLPANGAPTPPQQPATPGRRKSGSATPVHHQAATTAWPSPYPAGGASPLPAGVSPSPARSTPRRFFKRPFPPPSPAKHIKATLAKRLGGGKPKEGTIPEEGGAGVAADSAEAERPLDKTFGFANNFGAKYDLGKEVGRGHFGHTCSALVKKGEYKGHAVAVKIISKAKMTTAISIEDVRREVKILKALSGHNNLVKFYDACEDALNVYIVMELCEGGELLDRILARGGRYTEEDAKAIVVQILSVVSFCHLQGVVHRDLKPENFLFATRDESAPMKLIDFGLSDFIRPDERLNDIVGSAYYVAPEVLHRSYSMEADIWSIGVITYILLCGSRPFWARTESGIFRSVLRADPNFDDSPWPSVSAEAKDFVKRFLNKDYRKRMTAVQALTHPWLRDEQRQIPLDILVFRLVKQYLRATPLKRLALKALSKALREDELLYLRLQFKLLEPRDGLVSLDNFRTALTRYVTDAMRESRVLEFLHALDPLAYRKMDLEEFCAAAISPYQLEALESWEEIAGTAFQHFEQEGNRVISVEELAQELSLAPTHYSIVQDWIRKSDGKLNFLGFTKFLHGVTIRGSNTRRH

SEQ ID NO: 49941 - protein, 654 aa, Zea mays
  Clone ID: LIB3592-099-D2_FLI.pep
LFLFLPCFPFHSRRTTQQPACPALPHARTRGGAEGRNLNPNPSGPPAMGQCYGKAGGASSRRADHDDHAHAVAPPSPLPANGAPPPQPATPGRRMSGSATPVHHQAATTAWPSPYPAGGASPLPAGVSPSPARSTPRRFFKRPFPPPSPAKHIKATLAKRLGGGKPKEGTIPEEGGAGVAADSAEAERPLDKTFGFANNFGAKYDLGKEVGRGHFGHTCSALVKKGEYKGHAVAVKIISKAKMTTAISIEDVRREVKILKALSGHNNLVKFYDACEDALNVYIVMELCEGGELLDRILARGGRYTEEDAKAIVVQILSVVSFCHLQGVVHRDLKPENFLFATRDESAPMKLIDFGLSDFIRPDERLNDIVGSAYYVAPEVLHRSYSMEADIWSIGVITYILLCGSRPFWARTESGIFRSVLRADPNFDDSPWPSVSAEAKDFVKRFLNKDYRKRMTAVQALTHPWLRDEQRQIPLDILVFRLVKQYLRATPLKRLALKALSKALREDELLYLRLQFKLLEPRDGLVSLDNFRTALTRYVTDAMRESRVLEFLHALDPLAYRKMDLEEFCAAAISPYQLEALDSWEEIAGTAFQHFEQEGNRVISVEELAQELSLAPTHYIVQDWIRKSDGKLNFLGFTKFLHGVTIRGSNTRRH

SEQ ID NO: 49942 - protein, 555 aa, Zea mays
  Clone ID: LIB3245-507-A9_FLI.pep
FVSSTHQLGCRLRAGRNNLTREMGQCCSRAPAPDSGRGGTNGYGYSNQAKPAQTPSSYNPPQQPAEVRYTPPATNPPVVPPVPVPVPPKPTADTILGKQYEDVRSVYSLGKELGRGQFGVTYLCTEVASGKQYACKSISKRKLTSKADREDIRREIQIMQHLSGQPNIVEFRGAYEDKSNVHVVMELCAGGELFDRIIAKGHYTERAAATICRAVVNVVNICHFMGVMHRDLKPENFLLASKEENAMLKATDFGLSVFIEEGKMYRDIVGSAYYVAPEVLKRSYGKEIDVWSAGVILYILLSGVPPFWAETEKGIFDAILHEEIDFESQPWPSISESAKDLVRKMLTRDPKKRLTSAQVLQHSWLREGGGASDKPIDSAVLSRMKQFRAMDKLKKMALKVIASNLNEEEIKGLKQMFMNMDTDNSGTITYEELKAGLAKLGSKLSEAEVKQLMEAADVDGNGSIDYVEFITATMHRHKLERDEYLFKAFQYFDKDNSGFITRDELESALIEHEMGDTSTIKEIISEVDTDNDGRINYEEFCAMMRGGMQQPMRLK

SEQ ID NO: 49943 - protein, 555 aa, Zea mays; identical to SEQ ID NO: 37250
  Clone ID: LIB3060-111-C12_FLI.pep

SEQ ID NO: 49944 - protein, 279 aa, Zea mays
  Clone ID: LIB3150-091-F4_FLI.pep
RRQLSLPSETPSTTAAAATMAVGKNKRISKGKKGGKKKTVDPFSKKDWYDIKAPSVFSVRNIGKTLVSRTQGTRIASEGLKHRVFEVCLADLQGDEDQAYRKIRLRAEDVQGRNVLTNFWGMNFTTDKLRSLVKKWQTLIEAHVDVKTTDNYMLRLFCIGFTKRRPNQVKRTCYAQASQIRQIRRKMVEIMINQASTCDLKELVSKFIPEVIGKEIEKSTSSIFPLQNVFIRKVKILKAPKFDLGKLMEVHGDYKEDVGVKLERPVEGDEAVQEVAAAE

SEQ ID NO: 49945 - protein, 548 aa, Zea mays; identical to SEQ ID NO: 43486
  Clone ID: LIB3061-101-H7_FLI.pep

SEQ ID NO: 49946 - protein, 525 aa, Oryza sativa nipponbare
  Clone ID: LIB3477-009-G7_FLI.pep
PPPDRRRGRGAPACSVKMDGNAKGGGHSEALKNYNLGRTLGIGSFGKVKIAEHKLTGHRVAIKILNRRQMRNMEMEEKAKREIKILRLFIHPHIIRLYEVIYTPTDIYVVMEYCKFGELFDYIVEKGRLQEDEARRIFQQIISGVEYCHRNMVVHRDLKPENLLLDSKYNVKLADFGLSNVMHDGHFLKTSCGSPNYAAPEVISGKLYAGPEVDVWSCGVILYALLCGTLPFDDENIPNLFKKIKGGIYTLPSHLSALARDLIPRMLVVDPMKRITIREIREHQWFQIRLPRYLAVPPPDTAQQAKMIDEDTLQDVVNLGYGKDHVCESLRNRLQNEATVAYYLLLDNRFRATSGYLGADYQESLERNFNRFASSESASSNTRHYLPGSSDPHASGLRPHYPVERKWALGLQSRAQPREIMIEVLKALQDLNVSWKKNGQYNMKCRWSVGTQATDMLDVNNSFVDDSIIMDNGDVNGRLPAVIKFEIQLYKTRDEKYLLDMQRVTGPQLLFLDFCADFLTKLRVL

SEQ ID NO: 49947 - protein, 364 aa, Sorghum bicolor
  Clone ID: LIB3476-034-E3_FLI.pep
RRCVQTSDDDVVRRGQGSKPAREVAMERYEVIKDIGSGNFGVAKLVRDVRTKELFAVKFIERGMKIDENVQREIMNHRSLRHPNIVKFKEVVLTPTHLAIVMEYAAGGELFERICKAGRFSEDEARFFFQQLISGVSYCHSMQICHRDLKLENTLLDGSIAPRLKIFDFGYSKSSVLHSQPKSTVGTPAYIAPEVLARKEYDGKVADVWSCGVTLYVMLVGAYPFEDPDEPKNFRKTLTRILSVQYAVPDFVRVSMECRHLLSRIFVAIPEQRITIPEIKNHPWFLKNLPIEMTDEYQMNLQLVDMNGPSQSLEEIMTIIQEARKPGDGLKHSGQLPGLGSMELDDIDVDDIDVEDSGDFVCAL

SEQ ID NO: 49948 - protein, 535 aa, Oryza sativa nipponbare
  Clone ID: LIB3477-005-E1_FLI.pep
FLLKMTSLNKVVSNGDTRSMLPNKVTALNPNAAEFVPSCIRPSFESSAVSDVSKADLRASGKTILDRSESSKSNNSDDEAHQFWRKQLPDDIIPDFSFEKIEQEPEELSLAGLSLNAPPFYGTTASRFSREHDLSSQANKSLELGLTSLLYEDNSQASFPTMGSSNWEQNFVGDLHFTNGNQGLHYDSESAAGFSDSFASDYAAATDDVLDPLAYLASQFPDFSSESLAELYYANGCDFNHTIEILTQLEMQVDATSNPTLTPRTPNFSTGDFPALPTVEDQNGFSKGNADILSIFNGRSSPSVSTGTGDFVSAVRKLASQNSGHWKYKKGPEYGNGVSTVSVPKQYSSTTKTSSGNKFQSVSSARAAPWLETGDAVANMYSESRGEARDFARIRNACFEQARQAYLIGNKALAKELSMKGQTYNTQMKASHEKAREAIYRQRNPSSQRGSDRLIDLHGLHVNEAIHILKVELGTLKSTARATGERMQVMICVGTGHHTKGSRTARLPIAVEQFLLEEGLHYTQAQPGLLRVVVF

SEQ ID NO: 49949 - protein, 292 aa, Zea mays
  Clone ID: LIB3059-041-G5_FLI.pep
RGCRPPGARRWDSTTLFSEKTQQKPSLASLVRSPRCGASFGHGDTAAIPAMEYVNPLTGFRVDGRRPNEMRQLKGEVGVVARADGSALFEMGNTRVIAAVYGPREVQNKGQQVNSKEALVRCEYRMAEFSTGDRRRKPKGDRRSTEISLVIRQTMEASILTHLMPHSQIDIYVQVLQADGGTRSACINAATLALADAGIPMRDIATSCSAGYLCSTPLLDLNYLEDSAGGSDVTVGILAKMDKVTLLQMDAKLPIDTFENVMGLAIEGCKAIATYIREVLLENTKKLECQRG

SEQ ID NO: 49950 - protein, 278 aa, Zea mays
  Clone ID: LIB3357-050-B4_FLI.pep
FECSTRRPAATRSWFPAMSAQAGPGTYSPAAAAGDKRRERKEELRRHLAEDADWPRADGRSFHDCRPAFMQTGPTTAASGSAYAEFGKTKVIVSVFGPRESKKAMMYSDVGRLNCNVSYTTFATPVRGQGADNKEYSSMLHKALEGAVMLHTFPKTTVDVFALVLESGGSDLPIIISCASLALADAGIMMYDLVTSVSVSCFRKNIIIDPTSDEEAWQDGSLVVAFMPARKEITQLTLTGEWSDGRITNAVELCMDACIKLGDILRDRLKDTATLTCE

SEQ ID NO: 49951 - protein, 321 aa, Glycine max
  Clone ID: LIB3109-028-G5_FLI.pep
LEQLYFVIMTADKSYLTNGYLDTKVDWIPGMKNFKLKDLPTFIRTTDPNDFLLKFLIEEGDNMQRSSAIILNTFAELESDVLNALTSMFPSLYPIGPLPSFLNQSPQNHLASLGSNLWKEDTEYLEWLKSKEPKSVVYVNFGSITVMSPEQLLEFAWGLANSKRPFLWIIRPDLVVGGSMILSSEFVNETLDRGLIASWCPQEEVLNHPSIGGFLTHCGWNSTIEGICAGVPMLCWPLFADQPTNCRHICKEWGIGIEINTNAKREEVEKQVNELMEGEKGKKMRQKVMELKKKAEEGTKLGGLSHINLDKVIWEVLLKKN

SEQ ID NO: 49952 - protein, 490 aa, Glycine max
  Clone ID: LIB3109-052-H6_FLI.pep
SVMAKAVVGEETRLKLAEDRLSQSAVPSEVGLLIGKFSSALGRAFLFDLIPTPHNDSGEPACSLTEPDKKKGPKSKSKSELADSSSLFIDKDWVAEHVRQVSRMLVGGIKVVGLYVWVSDAAFKNSTIMLCQTVKGVADAAPGLDGNWDERLLLHISYSPRRWNCRNCSLSSNITSSSLRPCDFKMGKVLTSLQTFKCMHNFNLRLPILRDSASKFQTLSDVLRHAISIHAKELAGAKALIDGKLVVESESYSSDGVHEVELLLSFLNDSSIEACSQGDVVGILSFSGLICSFAYLNSKEPISQAITDIKGDIITSLQSRLDIICDEVDADSGNNHDVGSQVSDELSAETPVPQLVLHLLRKGCSLPFPRRVFAPWLAVVYVCDYLQPFETVEVLKDHCMELLSMKAPTDVSKILEPEKEELSFKTKSFWDVAVPSYSEIHLMEDKSKRDGGSESSSSKTVKPGHINVVAAGLILLLSVLVGFLLFALKG

SEQ ID NO: 49953 - protein, 463 aa, Glycine max
  Clone ID: LIB3139-006-D8_FLI.pep
EKEMKKKEIMVMVPYPAQGHVSPMQKLGWEFVRQGFEAVIVIPKFIHRQIAELQKNDENEMIKWVALPDHEEEEGSNPPEDFFAIESAMENSSITTHLEALLHSLAAEGGHVACLVVDLLASWAIQVSDRLAIPCAGFWPAMFATYLFISAIPHFLQTRLISNSGLPQHEGKFSLEPELPVISTEDLPWLVGTDAARKARFKFWKRTLERSSALKWLLVNSFPDESKLELANNKKFTACRRVLPIGPICNCRNDELRKSVSFWEEDMSCLKWLEKQKAKSVVYISFGSWVSPIGEAKLKNLALALEASGRPFIWVLRSTWRHGLPLGFMERVVKQGRGMMVSWAPQNQILQHNSVACYITHCGWNSILEALQFQKKLLCYPVAGDQSVNCAYVVQVWRVGLKLNGLEPKDVEEGLVRVIQDKEMDTRLRILNQRIMGTNNKTGALMLKTFLQDLKKASSTATT

SEQ ID NO: 49954 - protein, 479 aa, Glycine max
  Clone ID: LIB3139-022-A3_FLI.pep
ATELMDPRGVLILVAVLVAEIGSVANGNLVFPVERRKRSLSAVRAHDVRRRGRILSAVDLNLGGNGLPTETGLYFTKLGLGSPPRDYYVQVDTGSDILWVNCVECSRCPRKSDLGIDLTLYDPKGSETSEVVSCDQDFCSATFDGPIPGCKSEIPCPYSITYGDGSATTGYYVQDYLTYNRINGNLRTSPQNSSIIFGCGAVQSGTLGSSSEEALDGIIGFGQANSSVLSQLAASGKVKKIFSHCLDNVRGGGIFAIGEVVEPKISTTPLVPRMAHYNVVLKSIEVDTDILQLPSDIFDSVNGKGTVIDSGTTLAYLPAIVYDELIQKVLARQPGLKLYLVEQQFRCFLYTGNVDRGFPVVKLHFKDSLSLTVYPHDYLFQFKDGIWCIGWQRSVAQTKNGKDMTLLGDLVLSNKLVIYDLENMVIGWTDYNCSSSIKVKDEATGIVHTVVAHNISSASTLFIGRILTFFLLLTAMLNN

SEQ ID NO: 49955 - protein, 300 aa, Glycine max
  Clone ID: LIB3139-027-B1_FLI.pep
VSIMMHLLQRSRKLIMSRLELFTPIKILRILRPQKTFRDSMMDPTTVFGMIFGSEFFEEYIGQLALASLASIEIEEDSQDPEVLRQRIQEKMKAWQKEREQKLSTFLKDRLQPFVDGREDEFTAWAKSEARSLSKAAFGEAMLHTIGYIYTRKAARELGKDIRYMNVPFLAEWVRGKGHCIKSQVTAASGAVSLIQIQEELKKLNQGENKEESIVKAIEDKKDAMINSLWQINVIDIESTLSHVCQTVLKDPSASKDVLKSRAKALKKLGTIFQGAKIAYNRENSLRRESGKTPDAASSS

SEQ ID NO: 49956 - protein, 461 aa, Glycine max
  Clone ID: LIB3139-071-G5_FLI.pep
IRNCTFSSSHSSETLMAEVDQYTGGEHEVEETIEVEAEEEMHGGEEAVVVAEKKWPGWPGESVFRMLVPAQKVGGIIGRKGEFIKKIVEETRARVKILDGPPGTVQRAVMISAKEEPGSSVPPAVDGLLRVHKRIIDGLESDFTHAPSGVAGKVSTKLLVPASQAGSLIGKQGGTVKSIQEASNCIVRVLGAEDLPIFALQDDRVVEVVGDPTGVHKALELIASHLRKFLVDRGVIPIFEMNMQTANTHHAEHMPPHQSWGPPQGLPPNVGGGSGFGPPSQYMPPPRQLDSYYPPAEMPPPVDRQPHQGISAYGRDASIGVHASSNTQSAPSIVTQITQQMQIPLSYADAVIGTAGASISYIRRASGATVTIQEARGVPGEMTVEISGTASQVQTAQQLIQNFMAEAAAAAAAPAQPQTTVPAADQGYNSYPAHGSLYASPPSNPGHAGGYSSVYGANYGY

SEQ ID NO: 49957 - protein, 267 aa, Glycine max
  Clone ID: LIB4202-003-D12_FLI.pep
TMMPNTDQAFRLNWATFSAGERRSSDATSDLSIFVGDLAIDVTDAMLQETFAGRYSSIKGAKVVIDSNTGRSKGYGFVRFGDENERTRAMTEMNGVYCSSRPMRIGVATPKKTYGYQQQYSSQAVLLAGGHAANGAVAQGSHSEGDLNNTTIFVGGLDSDTSDEDLRQPFLQFGEVVSVKIPVGKGCGFVQFADRKNAEEAIHALNGTVIGKQTVRLSWGRSPGNKHWRSDSNGGYFGGQSYGGHGFAVRQNQDIAMQPATAIQGAS

SEQ ID NO: 49958 - protein, 238 aa, Zea mays
  Clone ID: LIB148-056-E7_FLI.pep
EATASIQWPSPSFHEQRNKCRPGTITQSLLNLTRNFNEFLNENQVLLMSKHSLHAARRHLTLECKHMPNCPRPHIYDSYHVCKRHAVVGHLAELLIELTHGVGDTGMGERTVTRVEVLDGELQHDLRGARVLERDGSLRRADGVLRVHVHRVAGSEGLCLRRWNSAGRHRDVLPRLRCALGERGHLHVQHGQMVDDRVLGCMAPGCGRANLWEWGARADAGNQRVDGTAAMHLALAVP

SEQ ID NO: 49959 - protein, 388 aa, Zea mays
  Clone ID: LIB189-016-B5_FLI.pep
GWMQKQRWYVADNGIYSKLISVMGRKGQIRMAMWLFSQMRNSGCKPDTSVYNSLIGAHLHSRDKSKALAKALGYFEKMKCIERCQPTIVTYNILLRAFAQAGDTKQVDMLFKDLDESVVSPDVYTYNGVLDAYGKNGMIKEMESVLVRMKSTQCRPDVITFNILIDSYGRKQTFDKMEQVFKSLLRSKERPTHPTFNSMITNYGRARLREKAESVVEKMEELGFKPNYVTQECLIIMYAHCDCVSKARQVFDELVTSQTKVHLSSLNSMLEAYCMNGLHTEADRLLDTALQQCVVPNGSTYKLLYKAYTKANDKLLVQKLLKRMNKQGIVPNKKFFLDALEAFGTSDRKPRTSPGINSASKPSTDSAGDSETATSDKPEVSVWHVAAT

SEQ ID NO: 49960 - protein, 263 aa, Zea mays
  Clone ID: 700071884_FLI.pep
APSSLAMATSTKLVALGFAVLLSIGFSDAARVVRLGSHASAGGGGGGGGGGSGSTGGGFGGGSGGGGGYGIGKGGGDWWNNFVSSIAGGGGGGQGGGGGTNGGSGSGGGSGYGSGSSSTAASGPSSGNYADAEGKGAGGGMGGGANGAYGSGAGGGVGKGEGVSGVALAPSSNGYYNGGAADATGGGSGAGGGHGGGAAGAPSYGTGGGLGGGKGEAGSDGSWGSGYAQGIGAGTGGGGGGGSQGGSGGGGGSGSGSGSGGIH

SEQ ID NO: 49961 - protein, 278 aa, Zea mays
  Clone ID: 700072783_FLI.pep
SSSSYGLHGPGHGVGGGGGERADDGGLDGAEERAVAREAALDEAEEEQRRERDGDGHGHGAPGLRHEHVGEQRHQPARDVGQRDGGGAHQRAPGLGLLQPQLELHHELQPRLGVVAEGGHHGAVLLRPQPVLRQDVGDLGGLDVGDRVDLVLLALQLPVVVISLALRRQIPSEPHGDGAGGDLGEPRGEHERGGGVGAGQAGGEREGYGEAVGDADDDVPDHLAGGEVLLGVLLQEQLLLLLVMHERLAAVQSHLFSRLNTLCLSLTHSRGKRRPHAY

SEQ ID NO: 49962 - protein, 373 aa, Zea mays
  Clone ID: 700073260_FLI.pep
IYNTTMSSVQEELNNTQDMLQGYVELYNYSLSYVKTMAIGCAIQLGIPSAIHRLGGAATISDIVTETGVDPSKLPYLRRLMRVLTVSSILGTTGTDESDDSTVYKLTPASRLLVSGAGAPTSCDISPMLDLLMRPTTSVATYFSLEEWFKDAGATATLFEVAHGMSPWSLTKNDALYNKTLNDGCAADSNFAMDTLLREPRAAGIFRGLGSLVDVGGGHGAAAMAIARAFPHIRCSVLDLEQVVSGAPADGTVKFIAGDMFESIPAADCVLLKYVLHCWDDESSVKILRQCKRAIPARDAGGKVVIMNMVVGYGSSDRFVKETQVMCDMWMMRYVGVEREEHEWKRIFLEAGFSDYRITPTALGFQSVIEVFP

SEQ ID NO: 49963 - protein, 552 aa, Zea mays
  Clone ID: 700073711_FLI.pep
ISRMARRAASSLVSRCLLARAPAGAPPAAPSAPRRTVPADGMHRLLPGVLQRFSTAAAVEEPITPSVHVNYTKLLINGNFVDSASGKTFPTLDPRTGEVIAHVAEGDAEDINRAVAAARKAFDEGPWPKMTAYERSRILLRFADLIEKHNDELAALETWDNGKPYEQAAQIEVPMVARLMRYYAGWADKIHGLIVPADGPHHVQILHEPIGVAGQIIPWNFPLLMYAWKVGPALACGNTLVLKTAEQTPLSALYISKLLHEAGLPEGVVNVVSGFGPTAGAALASHMDVDKIAFTGSTDTGKIILELAAKSNLKTVTLELGGKSPFIIMDDADVDHAVELAHFALFFNQGQCCCAGSRTFVHERVYDEFVEKAKARALKRVVGDPFRKGVEQGPQIDDEQFKKILRYIRYGVDGGATLVTGGDRLGDKGFYIQPTIFSDVQDGMKIAQEEIFGPVQSILKFKDLNEVIKRANASQYGLAAGVFTNSLDTANTLTRALRAGTVWVNCFDVFDAAIPFGGYKMSGMGREKGVDSLKNYLQVKAVVTPIKNAAWL

SEQ ID NO: 49964 - protein, 282 aa, Zea mays
  Clone ID: 700075768_FLI.pep
EITEEFMNTLFNKYSIDYIIHGDDPCLLPDGTDAYALAKKVGRYKQIKRTEGVSSTDIVGRILLTFRQKDADTDLSVVVAEKSGEKSNDEVKSQLSHFLPTSRRIMQFSNGQAPSPGARVVYVDGTFDLFHAGHVEFLRSARQLGDFLLVGIYDDESIRDRRGCRPIMHLHERTLGVLACRYVDEVIIGAPWEVSKDMITTFNISLVVHGTVAEGNSAGEIDPYAVPKSMGIFQTIRSPKSITTLSVATRIVDNHEAYKKRNLKKKASEDRYYTQKKFVSGD

SEQ ID NO: 49965 - protein, 186 aa, Zea mays
  Clone ID: 700075893_FLI.pep
SRVRSTRILRYMDNLSDIGELNYAEGGGATNGMGTPGIEGIGGSVNLGTAGIGGKAPTLGTTTTAGIGGGSVTVTFGNAGTAGIGGTAGILGNAGIGGTPSAGTVDVGTAGIGGRVAAGTVGTTGGFGMAGMAGMAVGAAVGAVVVSARCRAAWHVVLPSSMIMSVIITSAVAKKRDETAEAMATS

SEQ ID NO: 49966 - protein, 373 aa, Zea mays
  Clone ID: 700239581_FLI.pep
FPSQRTSILVVKMGGVRSYFFIIAAAVVAVVLALLPAGATGAGLKVGFYSKTCPSAESLVQAVAAAFKNNSGIAAGLIRLHFHDCFVRGCDGSVLIDSTANNTAEKDAVPNNPSLRGFEVIDAAKKAVEARCPKTVSCADILAFAARDSIALAGNNLTYKVPAGRRDGRVSRDTDANSNLPSPLSTAAELVGNFTRKNLTAEDMVVLSGAHTVGRSHCSSFTNRLYGFSNASDVDPTISSAYALLLRAICPSNTSQFFPNTTTDMDLITPALLDNRYYVGLANNLGLFTSDQALLTNATLKKSVDAFVKSESAWKTKFAKSMVKMGNIDVLTGTKGEIRLNCRVINSGSSSSGLFQLHTATASDEEFAHVATN

SEQ ID NO: 49967 - protein, 180 aa, Zea mays
  Clone ID: 700224187_FLI.pep
RCMQSATARLIESNLPDRCSLELLFGEEVVVHLGLPEHLLPARLLHGVGEVQQRGLRPRAADELEPHGEPSPVIPDGHGDRWQPQEVARDRVPHQRSSVDVVQLPRSQRVVLQRVRRHPCHRRDDGVGSLEDLLVEVHLPASTGVVFAEQTMALRCPCIRCVRMYVDVAAGDWPTGDAAR

SEQ ID NO: 49968 - protein, 420 aa, Zea mays
  Clone ID: 700257668_FLI.pep
PNSRELQSVWVSVVVSLLPAAGAMRRLLGHLHPHAQSLFASLPRKPSIATKLPFLLSRRLLSDAASPPAPSLPPPPPPSADVTNTELKKRLETYYGVDEEAELPSVAKAVLERNLTGAHSETDDDLIEELRSKPLPEVHDRDFESDFEEMHDTDEELNDLYNTREYVEKKIKSDEFFNMDDTKWDAMIKEATDKGHLTNMKECEEILEDMLYWDKLLPDEIKQKVETKFNELGDMCERGEMEPEQAYEMFKEFEDKMVAECTELIESKMPTDADELTESGGKKVELDDLPGEGPVLRWESRIVFVPSGDAYHPKNRKVKLSVTVKELGLSRHAFRRLREVVGKRYNSGKDELTIISERFEHREENRKDCLRTLYTLIKDAMKADKLVEDARNSYVKGRLKANPQFMERLKRKTDKLMAAA

SEQ ID NO: 49969 - protein, 284 aa, Zea mays
  Clone ID: 700260366_FLI.pep
ASFFLNAGASVGPDFGDDVGNGPHSFLQGNKPFHGLMQLPDLQGNGAGGPGGSGPSLFNLSFFANNGNSSGSSHEHASQGLMNNNDHFNGGAGGGGGGSEASEAGIFGGNFVGGGDQVPPPGLYSDQASMLPQMSATALLQKAAQMGATSSANGGAASMFRGFVGSSPHVRPATPHMEQSDANLNDLMNSLAGGGVGAGGMFGSSNGAGGPGMFDPRQLCDMAEHEVKFGHGGGDMTRDFLGVGGGGIVRGISTPRGDHQSSSDMSSLEAEMKSASSFNGGRMP

SEQ ID NO: 49970 - protein, 165 aa, Zea mays
  Clone ID: 700264138_FLI.pep
VRQPPSRPELLPWLSSPPSLGYCRARPALPHHTPAVLHSQPRRSLLTGARPCPLSSALPAPPLPMAACSSRPPSSPSRAFLWRPGCQPLYSMPLLGSWHVRRAIAQAQLIHGAGNNNPFLLMACCSPLHHAISCSPFLLQQVDAPSPPLFAHLPHGASSMPTVQR

SEQ ID NO: 49971 - protein, 251 aa, Zea mays
  Clone ID: 700610719_FLI.pep
AATAMRLPSAASASRLPSSLFLQPRARTRCIPSSSLACRASSSSAAGAGDGGSRKPWLFVGLGNPGKVYQGTRHNVGFEMIDVIAEAEGISLSSMQFKAMVGKGRIGDAPIMLAKPQTFMNASGESVGQLVSYFKIPLSQVVVMYDDLDLPFAKLRLLPKGGHGGHNGMRSIVNHLKQSRDFPRLRIGIGRPPGKMDPANFVLRPFNKKEQQELDFALHRGLEAVRIMVLEGFNKSATYVNTAQSSEMLNR

SEQ ID NO: 49972 - protein, 611 aa, Zea mays
  Clone ID: 700282210_FLI.pep
GSHQRECVTSPNALQTLVHSSCTLAAMPDLSTSYLPPFPELSLDAGALAVDHAGNAAAAASADAASAYASSSASVGSGVDDLVIPAECRWKGHVRTFDMAGAGAVTTCPAARRGGGKKLSLIPSLEPARTQASASAPTLEERVSEWAAKKAAAGVPTHHCVLPFLTGAPMAVECRLCSKIIYVGEEIKCSVKKCPQMFHLKCVAEDTSNFTVESFRCPQHGCMVCKQKMFFWRCGRCTVAAHTKCAPWPVVHLKNDQGSAICWRHPSDWLLQNKNADFTNSVEEVFCRLPLPYVNEDLNIDSIIRDYAEAVYKPPPYTSIRRNVYLIKKKRTGVRVDIGCTNCRADSTCKEDCECRGLSMSCSKNCRCSDLCTNRPFRKDKKIKIVKTKRCGWGAVALEPLERGDFVIEYVGEVIDDATCEQRLWDIRRRGDKNFYMCEISKDFTIDATFKGNVSRFLNHSCEPNCKLEKWQVDGETRVGVFASRSIEVGEPLTYDYRFVHFGEKVKCHCEAVNCQGYLGSQIKNPIQSILATVAPQVQLREYSPMHHEAPRLKPINHLLPWTNCIEVSFNLRSKRKIDRLCWARKKKRTSLVPSSTSMPASPSEVPAADF

SEQ ID NO: 49973 - protein, 722 aa, Zea mays
  Clone ID: 700351480_FLI.pep
YVMALTTRGGAGGGDPAKAPSASDPSLGFLTKRDTEVKLPRATRVKNKTPAPIQITAEQILREARERQEPEIRPPKQKITDPHELSDYRLRKRKEFEDVIRRVRWSVSAWVKYARWEEQQRDFARARSVYERALDVAHRDHTLWLKYAEFEMRNRFVNHARNVWDRAVSLLPRVDQLWYKYIHMEELLGAVANARQVFERWMSWRPDTAGWNSYIKFELRYGEVERARAIYERFVAEHPRPDTFIRYAKFEMKRGEVERARRVYERAADLLADDEDAEVLFVAFAEFEERCREVERARAIYKYALDRVPKGRAEELYRKFLAFEKQFGDREGIEDAIVGKRRFQYEDEVRKNPLNYDSWFDYIRLEESVGNKDRIREVYERAIANVPPAEEKRYWQRYIYLWINYALYEELDAQDRERTREVYKECLRLIPHKKFTFAKMWLMAAQFEIRQRNLKAARQILGNAIGMAPKGKIFKKYIEIELYLGNFDRCRTLYEKYIEWSPANCYAWRKYAELEKNLSETDRARSIYELAIAQPALDTPEVLWKEYLQFEIDENEFERTRQLYERLLDRTKHLKVWISYAEFEASAGLGGEDSEDKEKKNEVSYQEQQMERVQKCRAVFERAFDYFRTSAPELKEERAMLLEEWLNKEVNFGDLGDVSLVQKKAPRKVKRKRPIPTEDGSTIAYEEYIDYIFPDEVALAPNLKILEAAYKWKKQKTGDGDE

SEQ ID NO: 49974 - protein, 396 aa, Zea mays
  Clone ID: 700351593_FLI.pep
AALVSAHALDAVRAAADRDPALRKLFIRGLGWETTSDSLRAIFSAYGDLEEAVVITDKSTGRSKGYGFVTFRHADSAVLALKEPSKKIDGRMTVTQLAAAGSAGGPSVGAPGSGGAPVADVSLRKIFVGNVPADMSSERLLAHFASYGEIEEGPLGFDKQTGKFRGFALFVYKTPEGAQASLVDSVKVIDSHQLVCKLAIDGKKGKQGQSQQSGPGNQQQQQQQQMLPGGPQEIQGGLGLGSQMGAQYGGPGSGMPSFGFGGVGGGFGGPNPYANMPSSMGGGGAGGLGSVGGQVPTGLAGAGGFGPGGLGGGSFGGSSQFGAAGMGAYGGLGMGGGSMYRMQQGAGGLPAGAFGEGGNYPLPGSGFRGHDPQGGMSPPGPGGRAPPMYPNVPPYF

SEQ ID NO: 49975 - protein, 426 aa, Zea mays
  Clone ID: 700380914_FLI.pep
FVPLPPRPAVASSDDGDSDQMMDLRKSRPLHSDKLKPGSLHMKDEVIQLYLNNSAAVAAPREVCLLGALRCHGIGMIVGALGVSKEQLKDALLEGNVHGLGVEALQMLTQMVLSNEEELKIKYFKDDSLNRLCPVDVFLKAMLDVPFVFKRVDAMLYIASFYLEINRLRMSYATLEGACQEMRSSRLFHKVLEAVVNFGNFMSTNSGSPSSKGLEPNTVLKIADVKGADGKAALMQFIVQEIVKPEGYDVMQHGSGACKMSTNTLQCDAECRKHGLEVVAKLAAQLSNTKKAASIDIKRLSQSVSELGMGLGKVHDVVRLNSMVTSVDSARRFHNSMSTFLRHAEEEILKLQSQESICLSSVKEMAEWFIGESVNDEAHMFRIFAGVKEFLAMLDHICKEAGEVSSNNWVGATTASWMAAPMGMMP

SEQ ID NO: 49976 - protein, 432 aa, Zea mays
  Clone ID: 700443503_FLI.pep
TTQNGCEAACLGDCNCTAYSFSTDGKCSVWNGDLLNVDQADSTISSQGVLYLRLAKSDFQGLSRGNKRTPTAAIAAGAVGSGILVLAVLALVIWRCNNVPPPLHAGVGDGGGIMAFKHTDLCRATKNFSDRLGGGGFGSVFKGLLGDSTAVAVKRLDDARQGEKQFRAEVSSVGMIQHINLVRLIGFCCEGDKRLLVYEHVVNGSLDAHLFQQSSAAVVATALDWSKRYRIAVGVARGLCYLHQSCRECIIHCDIKPENILLDASFAPKIADFGMAAFVGRDFSRVLTTFRGTAGYLAPEWLSGVPITPKVDVYSFGMVVLEIVSGQRNTPPQALSRSGYYHAAAYFPVQAITKLHEGDLQGLVDPRLQGDLSLEEAERLFKVAFWCIQDDECDRPTMADVVRVLEGLQELDMPPVPRLLAAITARANADFM

SEQ ID NO: 49977 - protein, 151 aa, Zea mays
  Clone ID: 700445636_FLI.pep
PAPSTYRLPGPANLLAVPNMAALVINPPSKVQARATAPPIMRTLGMLFVQCFGFSTSAVLLLSLDELASALSSVTSSSASNLVVTCAMAACFEIGSPAVLATWYARRPGSILLTQPHIPCRTPSFAISHGIPISSWWNKSTSHAVIAPSPF

SEQ ID NO: 49978 - protein, 326 aa, Zea mays
  Clone ID: 700447078_FLI.pep
LHMIYIDGQSNPRDFVRPPCMLLLVLGSSLRTQVDRSSSSPISRRSGASSSPRRGGRTPPPPRRPPPRLWPPSCRGARGTRSRRCPGPPPPPRPPRSCAAARAPGPSSPRASRTGRRRRRRGRPSRRGAPCACAPSPPSCTSPSRPGRSRTLRPRPRRHRTACRTRHRRRRRTRRRQRACCRTRRRCHGRIRRRWWCPICCTRCRSRRCRTCCTRRRRCHGRSRRRRTFHTHRRRCGRSRRRRRTCCSHHRRCHGRSRRRRTCRTHRRRCGRSRHRRPTCCSHLRHGRSHQCRTCCCSRCRSRRRRRTCRSRCGRTRPPWFTLIVI

SEQ ID NO: 49979 - protein, 206 aa, Zea mays
  Clone ID: 700447781_FLI.pep
SRSKSSGSFRIGEVKRVTKETNVHVKINLDGTGVAECSTGIPFLDHMLDQLASHGLFDVYVKATGDTHIDDHHSNEDIALAIGTALLEALGDRKGINRFGHFTAPLDEAAVEVILDLSGRPHLSCGLDIPTQRVGTYDTQLVEHFFQSVVNTSGMTLHIRQLAGKNSHHIIEASFKAFARALRQATEYDLRRQGTVPSSKGVLSRS

SEQ ID NO: 49980 - protein, 164 aa, Zea mays
  Clone ID: 700624382_FLI.pep
QHTATIQYMAATTASMMARVDRLDLLLGYLEEMHRNGNGNASPPSATTASSPSTLAAGGVHLISSDDDVDVDSSAGPSTPTWRRPRPAKEVLEEAQAKGSLIDRIASLEHRVLKVILLFIQSSVVVVPPTYYIAMPCFCCCRWKRTWRSHQRTRRRLATNRQRR

SEQ ID NO: 49981 - protein, 372 aa, Zea mays
  Clone ID: 700801033_FLI.pep
VLETGPGWRLVSPHFSSLLDSAIFLALALNEKDIEEWEEDTDEYMQKNLPSELDDISGWTEDLFTARKSAINLLGVIALSKGPPVASAASKRKKGDKNKGKSEMSSIGELLVIPFLSKFPIPSHGEDASSVAVQNYFGVLMAYGGLQDFLTEKKDLTITLIRNRILPLYSLDPCSPYLISTANWVIGQLAICLPEDMSSSIYQSLMKALTMEYVEDITCYPVCASASGAIAELIENSYVPPDWLILLQVVLKRISTGDENESALLFKLLGTIVEGGQEKVLSHIPKIVSNIASTVMELLSPVPDPWPQVVVHLSSVWSIFWYFIMMTGGRNTGRVGVIKNREKYKRRVIKNREKHKGSFETIHVLLRAFCYV

SEQ ID NO: 49982 - protein, 139 aa, Zea mays
  Clone ID: 700805281_FLI.pep
PQLARAPCADLIFPMARHLLVLSFPRHSSAPAAPLLQIHGTQHLERPCRCSSTGISSSTRRPGLSHRGCPSSISSLPTRLPRFHGRRRPSHLPGGRPRPCPSHSSPFGPAAASTQPLPWHTPHLQHRRPPTRSFLALSF

SEQ ID NO: 49983 - protein, 210 aa, Zea mays
  Clone ID: 700422382_FLI.pep
APGSKYSRFLRQEFDLRVALPLGVLNGALNAGVAAGVIHPLERGSAGSVSPLVERFNLGGNRALVCRLGGPSSLLGFKTRGLRAATESRTQDPNTPGNGTSPSPELNGLGGEVAVTAFADLSFDLPLKPLRELGIHGHAFVCAGNLGRLTECDLRKFPVTEFLQTFRSCAGWGVVVPTRLFRVEMNYCYILKQLDHDGGKTGIQLNFSSS

SEQ ID NO: 49984 - protein, 428 aa, Zea mays
  Clone ID: 701176735_FLI.pep
LSQQLITCELTAFIMATKEEASAVPAASKTSWSSFLKSIASFNGDLSSLTAPPFILSTTSLTEYSAYWCEHPALFVAPAREPDPAKRALLVLKWFLSTLHQQYCSRSEKLGSEKKPLNPFLGELFLGKWIEDEDVGETRLISEQVSHHPPATAYSIVNEKHGVELQGYNAQKASFSSTIQVKQLGHAYLSLTPPGKDANNEDDREHYLITLPNLHIESLIYGTPFVELEKSCKIASSTGYISKIDFSGKGWLSGKKNTFSAVLYKESDGEKNPLYTADGQWSSSFTIRDARAKKDIETFTISNLKTTPLTVAPLDEQDEWETRRAWRDVAAAIERGDMEATSNAKTKIEVAQRELRKKEKEQGEEWERRFFKRVNEKDEPTFMRLAAMLDLTQGIESDRTGGVWRFDPSRAVDANPPYHKVGGEGLGL

SEQ ID NO: 49985 - protein, 215 aa, Glycine max
  Clone ID: LIB3106-116-A5_FLI.pep
RETERKMALSVSSPSCVRVPSCFWKPNGKSCKERTKVSCAAHNDNKNPLVGIGIGVVTSCVMGLTALDADATRIEYYATVAEPLCEYNYVKSGLGYCDIAEGFGDEAPLGELINVHYTARFADGIVFDSSYKRARPLTMRIGVGKVIKGLDQGILGGEGVPPMRIGGKRKLQIPPHLAYGPEPAGCFSGDCNIPANATLLYDINFVEVYSGNRSK

SEQ ID NO: 49986 - protein, 115 aa, Glycine max
  Clone ID: LIB3107-076-A3_FLI.pep
VKVKDEEELDADDDTACHLDSILDMNSEAFNWNIAESESPAQAQEDEVSKVRTNKKDIFLRLNYEEVITAWASQGSPWTTGTPPKFFNSDDCWLDLVTSLQPSLLMQQYLLVCLV

SEQ ID NO: 49987 - protein, 396 aa, Glycine max
  Clone ID: LIB3138-010-G7_FLI.pep
QPITSDSVSNNHRTTHRRDAGNNGLRHRLVRQESLRRNIEHVAAETYLVSRLAFTLLRYLGIGYRWITQLLALGCYAMLLMPGFLQVAYYYFFTSKVKRSIVYGDQPRNRLDLYLPANIGEPKPVLIFVTGGAWIIGYKAWGSLLGLQLAERGIMVACIDYRNFPQGTISDMVNDTSRGISFIINNIANYGGDPNRIYLMGQSAGAHISSCALLEQAARESEKEDSVSWSISQLKAYLGLSGGYNLLDLVDHFHNRGLDRSIFLSIMEGENSLKEFSPEIKIQDPCLKSSIPHFPPVYLVHGTADYSIPSVASERFAEALKKAGVRAELILYEGKTHTDLFLQDPLRGGKDDLFDLAVAIMHSNDSDALANDAIAPPRRRFVPEILLKLARKISPF

SEQ ID NO: 49988 - protein, 79 aa, Zea mays
  Clone ID: LIB189-001-G6_FLI.pep
SPAVHEPHKWPIFSAVYLHLCQLRSLRYRRPAIFWEMDLCLCLCLEDWYLVAEIFSIQVSCEQRAFSQTVQKFSGIPFL

SEQ ID NO: 49989 - protein, 361 aa, Zea mays
  Clone ID: LIB143-032-G10_FLI.pep
RNGEEQKGTGMGSTGALLWHPSPQVHSGGVLFRQSRRIVRQRNLPLLSLADAALELERRRGQRLRCAAGDGAGGPREAQKESPSGIGAALEDPSPGPPVENGAFRSPSQEEQSALYNFLYPSKDLLPDDKEMSIFDHLEELRERIFISVLAVGAAILGCFAFSKDLVLFLEAPVTVQGVRFLQLSPGEFFFTTLKVSGYCGLLLGSPIILYEIIAFVIPGLTRDERKFLGPIVLGSSVLFYLGIFFSYTVLSPAALNFFVNYADGAVESLWSIDQYFEFILVLMFSTGLSFQVPVIQLLLGQLGLVSSDQMLSIWRYVVVGAVVAAAVLTPSTDPLTQMLLAGPLLGLYLGGAWMVKLTGR

SEQ ID NO: 49990 - protein, 248 aa, Zea mays
  Clone ID: 700049830_FLI.pep
LTSCTWRIISSVIPFYTQSDMGNGPSLSPCLNPHLPESSATVRLVYWGGRARQLALTGGGDDAIVTAGDVAAELPPPATGYAVCPADAFFIGLPIPAMSPGEELLPGRTYFVLPAARLPCLKALTPATLAALSQSHGRKKQQPIFAVAGCPFEHVKGAHGGAPLIRVLPEFIEKLITACDAGANASANKDTAAKQAAELCSTPELKRHYAQLVGAGRSRPWSPRLETIAERGRSRWMRLAARTMLSSR

SEQ ID NO: 49991 - protein, 382 aa, Zea mays
  Clone ID: 700050836_FLI.pep
ADHTKLTTQTGSIEQRTMAALAPSIVVPTDAELLQAQADLWRNSLCYLKSMALKCATELGIPTAIYSLGGAASLPDLIASLSLPQAKLPFLGRLMRLLSSSGVFAVVESPEAVYSLTPLSYLLVDGIAADNNHMDHAPFLLTVTSAHYIDLAIDLADWFKKEAKTPPFDHKHAASLFEESMERKAPGFHKMSILGLLVHDNFATSIAVREYQDVFQGVKSVTDCCYHGDGTTGKALAKAFPLIKITVLDLPQEIRKIPADGVVNYVGGDMFKSIPRAQMVLLKMVLHHWSDEDCVKILANCRKAIPSREEGGKVVIADIILDPASGPVMFQTQLLMDVCMMLMKGGRQRDVNDWRDLIQKAGFSDYKLLKKFGARGVLEIYP

SEQ ID NO: 49992 - protein, 219 aa, Zea mays
  Clone ID: 700051819_FLI.pep
LGAESSGDGEDSEPQEAVQEPVQEHHHHRRRRRGHLRHGRRAREDRVGGAARRDAGAEAALDGGRRGGGRGVHPGESLHHRVAVARRLHRRHRNLRRPEGDAVAGDRAVAQGAEAAVQGQGEGRLRAPAHGGGPGQGQGAAPGGPGRQGEEAQVNHLGAAHGRALSLLHPSVERNPRGIFLAIFLPSRRRRSPICLRERRVSVQSNRVCSEPAEFHLRA

SEQ ID NO: 49993 - protein, 356 aa, Zea mays
  Clone ID: 700093807_FLI.pep
KRMLQAIQHFTKLTYLDLEDTGIQDAFPMEICCLVSLKHLNLSKNKILSLPMELGNLSQLEYFYLRDNYYIQITIPPGLISRLGKLQVLEVFTASIVSVADNYVAPVIDDLESSGARMASLGIWLDTTRDVERLARLAPGVRARSLHLRKLEGTRALPLLSAEHAPELAGVQESLRELVVYSSDVDEITADAHVPMLEVIKFGFLTKLRVMAWSHAAGSNLREVAMGACHSLTHLTWVQNLPCLESLNLSGCNGLTRLLGGAEDSGSATEEVIVFPRLKLLALLGLPKLEAVRVEGECAFPELRRLQTRGCPRLKRIPMRPARGQQGTVRIECDKHWWNALQWAGEDVKACFVPVL

SEQ ID NO: 49994 - protein, 672 aa, Zea mays
  Clone ID: 700096359_FLI.pep
EARSSRLIQRQLRMAAAPPPPPDGQEKVIAAAQHIVKSLANSKNAADDMIRILSRFDNRFSLMSDLFPPPPTAVDSILEADEGTSQGEGDEPDLDPEGDAAARAEAEWDAAAEVVERWESPTADALVFDSREGEEYLAAAACLTGAPGPRAEAALQTAMARLEDEFRHLLIRGAPPLAAEDLQVSLLRRLSLTVPSFNSSAVDLDCPSFAQHHAAVAAEGVNEQQGGRSSASDDEISPYLIAPDTVSVLRDIADVMLRAGYAPELCQVYGEVRRDTLMECLAVLGVDKMSLEEVQRVEWGVLDGKMRKWIQALKVVVRGLLAEERRICRQILSPDMNTEEECFTQAAKGCVLQMLNFGDAIAIGKRSTEKLFRILGMYEALAEVLPELEGLFSGDAKNFIKEEAEGILLRLGDAVCGTIEEFANDIQGDTSRRALPGGEIHPLTRYVMNYVWLLADYNASLNKLLECWDTELTGVDNPNMTPLGHCVLMLITHLQCKINEKSRLYEDEALQNIFLMNNLLYIVQKVKDSELKTLLGDNWIRKRRGQIRQYSTGYLRSSWTRVLACLRDDGLPHTMGSSSTLKAALKDRFKNFNLAFEELHRTQTSWRVVDPQLREELKISISEKVLPAYRSFVGRFRGQLEGGRGSARYIKYNPDDLENHVSEFFEGRKSNA

SEQ ID NO: 49995 - protein, 526 aa, Zea mays
  Clone ID: 700085854_FLI.pep
NDGIQKCIRVRLGSGPRCGRGRNRRGMDTSGWRDDKPFDSRGSTFWPYHLGKFLRFHLYKENKDTHEALGVIGKLAGVQPRSFGFAGTKDKRAVTTQQVTVFKVHASRLAALNSKLTGIRVGDFSYVKEGLVLGRLRGNHFAITLRNVIAESADVINAAVNGLSKNGFINYYGLQRFGSGSVPTHFVGAALLRGEWRHAVSLILGTRVHYKWHVDVDAALRGMPRHLTVERAILQRLKNYPGNYLQALMAIPKALRLMYVNSYQSYLWNHAASMRVEKYGISQVVEGDLVYKTGSSLGEAITTDTFDDDDSHVNSPEMEMSCETLTEEMIQSVKVVDSEDLLKAVYSFEDVVLPLPGSETLFPGNEVTMIYHEIAKKDGISLIESAHGIKDFSITSMKGGYRRVLQRPIDFEWDLMTYTDDNTPLVPTDLDVLSETQLSETNEPLSDGTCSCPSSDSRLQVLLDTSGPTIEASSVETKSIGISDLSPEKLAVKLEFTLPASSYATMAMRELTKTSTSVACQKTLNG

SEQ ID NO: 49996 - protein, 308 aa, Zea mays
  Clone ID: 700087661_FLI.pep
PNPSTDPRPSDAPAAMDMSSIAANLGLSGSRPVIRKAGELRRLCDVNFDSSVLGIGEVCKAIICLEIAASKLQVIFDRAEAVRMSGMSEKAYIRSFNSLQNGLGVKTTLDVRELGIQFGCVRLIPFVQKGLSLYKERFLAALPPSRRASTDFGRPVFTAAAFYLCARRHKLKVDKLKLIDLCGTSSAEFTTVSTSMTDLCFDVFGIAKEKKDPKSIKGNRELLDVLPSKRKHEDDSDSSASDESSDNDQDELDLPTHKRRKKMEREAYNDWKSSVLSSNKKTKPDPAKPRRQAQLNFKKPSEVTPAAN

SEQ ID NO: 49997 - protein, 339 aa, Zea mays
  Clone ID: 700208065_FLI.pep
LSSMAAEPKILELSNGKITARISNWGATITSLLVPDAQGSVADVVLGFDGLDPYVKGMSPYFGCIVGRVANRIKDGKFTLNGLEYSLPVNNGPNSLHGGLKGFDKVVWDVVEHKDGECPSITFQYHSKDGEEGYPGDVTIRATYSLPEATTLRLDMEATPENKATPISLAQHTYWNLAGHACGDILNHSLQIWGKHITPVDENTIPTGEIMPVDGTPFDFTTERRIGERIDGVPGGYDHNYVLDCGDEKDGLKRAARLKDPSSLRTLDLWTDAPGMQLYTANYVDGIGGKAGAVYAKHAGVCLETQGFPNAINQPEFPSVVVRPGEKYKHTMLFEFSGC

SEQ ID NO: 49998 - protein, 221 aa, Zea mays
  Clone ID: 700208952_FLI.pep
LHHLNRPLLDITSCMILMCTQKGHGKVQLVCLIFHFNSFIDNGDRSSLGHHDLDELLVVDLAVAVNIGLTDHLVDLLVSQLLAEVGHDMAELSSRDETILVLVEDAKGLLKLLLGVGVLHLPCHQVQELWEVNGPIAISINLVDHVLQLCFSGVLAKGAHHSSKLLGSDAAVAILIEEAEGLLELRDLLVRELVRHGRWLRRGHAMGKKGKRWMLVLASLC

SEQ ID NO: 49999 - protein, 239 aa, Zea mays
  Clone ID: 700209311_FLI.pep
EDQVHMEADRKAMSNQVNVPADLSFQSRTTYRIRNKVIYCLDGARIGIQYETFFAGEPCEIFHCVLESKSFLEKMIMIEHTLPFFLPVRELESDLLSSNSIKFIDHLEEILQAYIDRREQVRLIKELYGNQIGELFHSLPYNMIEFVLEDFECKVTISIRYSDLLQTLPSQARVLAWPLRSAKKISTRSSSASAAQPVPFHLSYAEEALKTLCLPEAYADIVLELPHALKRILSSRDSD

SEQ ID NO: 50000 - protein, 266 aa, Zea mays
  Clone ID: 700209344_FLI.pep
RGEPSGQPAATDMAEQHKEESGVTVLDKISDKLHGRGGGSSSSSDSDDERSSATAAVKAKIYRIFGREKPVHSVLGGGKPADLFLWRNKRISGGVLAGATAFWLLFEVMDYHLLTLLCHCLILTLAILFLWSNATIFINKSPPNIPEVKIPDDLAVNVARSLRYEINRGFATLREIGQGHDLKKFLIVIAGLWILSVLGSCCNFLTLSYIVFMVLYTVPVLYEKHEDKVDAFGEKAMVELKRYYAIFDEKCLSKIPKGPLKDKKQH

SEQ ID NO: 50001 - protein, 377 aa, Zea mays
  Clone ID: 700209501_FLI.pep
SDLPLAPPPTMFFLKDPPPTMSPPQPPHPVPRETVASAVASLTTWMKKRAAEARPNLLADERDDIVVLQLSLRRIPASRSTKPRLLPMPHPVVGHDGASVCVISDDRTKSRSPSASDLHASMSLHRFPVSEVIPLSTLRTDYRPYESRRRLAASHDLFVADRAILPLLPRVLGKAFYSTKKAPIGVDFTRIGWPEQVRRVLGSAFLYLRSGTCSGIKVGRLDMEEEDIVDNVMAAVEEAVEKVPKKWGNVRALHLKAVDSVALPIYQVVPELGMKIEVPEPDIVGSGEVIEKKANAGADGREVFANVSSKRKRNKKEQIEEGVVMQEEVQVDTEKKKKTKSIMVDDGHEVGKKGRVKGKRATEEGKKRKKSIKGDRL

SEQ ID NO: 50002 - protein, 171 aa, Zea mays
  Clone ID: 700378222_FLI.pep
FNEPLKLQNGWLLWSAIGLFVAIVAIALAGAAMTFLNGETPQRETDSLVLLLPLIGSSNISTACLLGITGILAPILEETVFRGFLMVSLTMWFPTPYAVLMTAAVFAFAHFTPGEFPQLFVLGVVLGFSYAQTRNLLTPIAIHAVWNSGVILLLTFLQMQGYDIREILQAS

SEQ ID NO: 50003 - protein, 42 aa, Zea mays
  Clone ID: 700337383_FLI.pep
LYMTYIIFVLLYVKIESSLHSLLVYMEFISAVQFCKLEVNPS

SEQ ID NO: 50004 - protein, 420 aa, Zea mays
  Clone ID: 700467428_FLI.pep
RRRMALLGEYSSQELLQGQLQLWHQSLGFFKSLALAVAMDLRIADAIHRLGGAATLPQILAEAGIKIDPCNNKLRDLRRVMRALTVSGIFTVVQRPASSSDGGGRRGAEAEGPVYKLTAASRLLVVGEKESSTTATTRQLPPPPSLTVYVQLLLETCRGSAFSRAVREWFQFQQPPQDDGQHQQPAGRLSSPFALACGGQTIWERAERDAHAFPFDDAMASDTAFLMPIVLRECGDEVFGRGLTSLVDVAGGLGGAAATIAAAFPDLSCTVLDLPHVVAKAAAGTTDSNVQYVAGDMFQCIPPADAVLLKWILHDWSDDECVRILKNCKQAIPPRAAGGKVIIIDMVVAGPGSGSADDEPSESDLRHVETQILFDLLMMCVNGVERDEQEWKKIFSEAGFQDYRIMPLLGVRSIIELYPN

SEQ ID NO: 50005 - protein, 494 aa, Zea mays
  Clone ID: 700468253_FLI.pep
QQQQQKWRTVLCGGGGCERGGTCKPTSMAAAFSAAILFHLLLLLFSPSAAQPGFISLDCGGARDHTDAIGIQWTSDASFVSGGQAAQLLVQNGLQQTQQQLTTVRYFPADNRKHCYTMNVRNRTRYLVRATFLYGNFDNSNVYPKFDISLGASPWSTIVVDDATTPVVEEAIILAAAPTLSVCLSNASTGQPFISTLELRQFNGSLYYTTDETRFFLGLSARINFGAGSNDSVRYPDDPFDRIWESDSVRRANYLVDVAPGTERISTTKPIFVGTNEEPPEKVMQTAVVGQDGSLNYRLDLEGFPANAWGVSYFAEIEDLAPNETRKFKLEVPGMPALSKPTVDVEENAQGKYRLYEPGYTNLSLPFVFSFGFRKTNDSSKGPILNALEIYKYVQITMGSQDANIMASMVSRYPQEGWAQEGGDPCLPASWSWVQCSSETSPRIFSITLSGKNITGSIPVELTKLSGLVELRLDGNSFSGQIPDFRECGNLQYM

SEQ ID NO: 50006 - protein, 663 aa, Zea mays
  Clone ID: 700476457_FLI.pep
KHEPSLPWSAIIISTAVAIIVLLVGHIIYATLNSLEKAEHDYRVMRELKGQAEAADIAKSQFLATVSHEIRTPMNGVLGMLQMLMDTELDTTQQDFVVTAQESGKVLINLINEVLDLAKIESGRIELEAVPFDVRDILDNVISLFYDKSQAKGIELAVLVSDQVPDVLIGDPWRFRQIITNLVGNSMKFTEQGHIFVQVHLVKELNRKGNNFCDVSAHNREILYDSDNSMLWNTLSGLEVADSWRSLENFTMFKNSNGETDTIRLAVRVEDTGIGITKDAQMRIFTPFMQADSSTSRTYGGTGIGLSITKRLVELMGGEIGFTSKSGVGSTFSFTAIFKENRGCPGDMKRYYSEPTPLDFQGMRALIIDGRSARAEVTMYHLRRLGIQCSLVATSESESASSALMKACTSSKNNPDMVLVDTEAWGKGSGLAFYHRFVDCQLKGAHKFSQPMPKTILLGSSISPVESDYLRLTGFGDCIRKPLRLSTIVACLRKTLGVGVTRQQSRDQSLVLQSVLTGKQILVVDDNAVNRKVAAGSLKKYGSKVTCVDSGSDAIDMLKPPHTFDACFMDVQMPEMDGFEATRLIRSIEKKINDMIMMGEISANNYGNKAHWHVPILAMTADVIQATFEKCMQCGMDGYVSKPFEEQQLYFAVAHFLETDETE

SEQ ID NO: 50007 - protein, 159 aa, Zea mays
  Clone ID: 700574163_FLI.pep
DDDLIARLLKLGCCKNKEIAVKTVKTIKFLGLHEETQIPKGCSSPFDVICQRMEQRMAYGHNEQDMVLLHHEVEVEYPDGQPAEKHQATLLEFGKVENGRSTTAMALTVGIPAAIGALLLLKNKVQTKGVIRPLQPEIYVPALEILESSGIKLVEKVET

SEQ ID NO: 50008 - protein, 579 aa, Zea mays
  Clone ID: 701161061_FLI.pep
IILLLLVIPLVVRIEGSVMGERSNSFSQDSNNSSPAENKLEPGEKSFASEAYAVNWNEPPDLQMQDSFERPELYRKQSVQGEKSFASEAYPVKWSISPSLGQQSQESFEPEAYPMKWKEPPPSGQQSQDSFEPEAYRVKWNKSPPPHQQSQDSFEPEAYRVKWNKSPPPLQQSQDSFEPEAYRVKWNKSPPPHQQSQDSFEPEAYRVKWNKSPPPLQQSQDSFEPEAYRVKWNKSPPPHQQSQDSFEPEAYRVKWNKSPPPLQQSQDSFEPEAYRVKWNKSPPPQQQSQAGSFEPEAYRVKWNKSPPPLQQSQDSFEPEAYWVGWKQHAQGETDVADGTTPARGHGLHVATGMLFTRKSLLPGTALPEGTRFSGHGFPDPQRFALRADADAIPFSYSQLDTILRMFRIPRGSKKAEQVADTLRACEAESSDAHACATSEQAAADFAASSLGVRASDLVSVVTAVHGGKDATRYVVAPDGVTRIGKAAGAATAVPCHPMPYPYMVHYCHRPTDVEALRVELTGLGDDGATIAIAMCHANTMSWDDRYFQMLNATRGEEICHFMPWNYVLWLPAADLLANN

SEQ ID NO: 50009 - protein, 244 aa, Zea mays; identical to SEQ ID NO: 36900
  Clone ID: LIB3154-014-A7_FLI.pep

SEQ ID NO: 50010 - protein, 529 aa, Zea mays
  Clone ID: LIB3180-002-B1_FLI.pep
HKLFSNKLRPQPSFGVRFPTMAASPTSSLAPPVVPMELHAGNRDRLVAALRGHISASARPLHGLVLLQGGEEKTRYCTDHLELFRQESYFAYLFGVQEPGFYGAIDIASGQSILFAPRLPADYAVWMGEIKPLSYFRDTYKVDMVFYVDEIARVVQDHFGNHGKPLLFLLHGRNTDSGNFSKPASFEGMEKFDTDLITLHPILTECRVIKSDLELALIRYANDVSSEAHIEVMRRARPGMKEYQLESIFLHHVYMYGGCRHCSYTCICATGDNSAVLHYGHAAAPNDRTLNDGDMALMDMGAEYHFYGSDITCSYPINGKFNRSQTIIYNAVLKAHNAVISDMRPGVNWMDMHKLAERAILESLRKEQIVQGDVDDMMAQRLGAVFMPHGLGHLLGIDTHDPGGYPEGLERPKDPGLSSLRTTRELKEGMVITVEPGCYFIDALLTKTRDDPISSKFFNWQEVEKYKSFGGVRIESDVYVTAQGCRNLTNCPRETWEIEAVMAGAPWPLPASSSMVVAAENSNDISKVS

SEQ ID NO: 50011 - protein, 111 aa, Zea mays
  Clone ID: LIB3279-004-C7_FLI.pep
KKNGLWDMIYTLDDATLKRASEMHTAIIINKCFRSNAYMSICYRITHFRHVFLLYSSQVTTDVLSKMFCNRTPRRRVVAQSSKDLPNSSDVLRSFKLHVKLAVVWMSCYIG

SEQ ID NO: 50012 - protein, 251 aa, Zea mays
  Clone ID: LIB3355-041-C8_FLI.pep
IIQAARNASSGPPSLSPSAVLLAMALDSVPPYPSDLGSSRAAAAARTQQRIRKEERTWTSDTYAPYDDGHQWRKYGEKKLSNSHFPRFYYRCTYKNDMKCPATKQVQQKDSSDPPLFSVTYFNQHTCSSSSALGSARDVASQSSSKKAVSICFSPHAPSEQTSFLTTTTVAPPVMHSYGANRQPDRSAYNQQPQWWTGGVPSPTSNGPAKMEVAESTQKPSGSYGSTTGNAPSRTLLPIGQSRCIEYFHFL

SEQ ID NO: 50013 - protein, 283 aa, Zea mays
  Clone ID: LIB3355-044-A9_FLI.pep
RMACSHLAAAGGSSPAAAAVVRSPTHSPAAAFARLRSTPRFSSAGLSVKGSRAAFPWVAAAGPAAAAPVADLDGRPATEKQPIIVIDNYDSFTYNLCQYMGELGLNFEVYRNDELTIEDVKRKNPRGILISPGPGEPQDSGISLQTVLELGPTIPIFGVCMGLQCIGEAFGGKIIRAPSGVMHGKSSPVYYDEELGKALFNGLPNPFTAARYHSLVIEKETFPHDALEATAWTEDGLIMAARHKKYKHIQGVQFHPESIITPDGKKIILNFVRFIEELEKQRS

SEQ ID NO: 50014 - protein, 210 aa, Zea mays; identical to SEQ ID NO: 42462
  Clone ID: LIB3356-045-D8_FLI.pep

SEQ ID NO: 50015 - protein, 240 aa, Zea mays
  Clone ID: LIB3061-067-A5_FLI.pep
VLDEEICLLVAQRIKYGVVRMRDLAMDVLTWDRFYLSGRLQKPVHVLVDNWDIRKVNSINLEMATSASLLLLPAEFTEYDLYAQICSLSYMGDLRMLFAEDKDKVKKIVEGSFQSFQLMYSPLLQEYIAEGLLKTSSHGQYKTFRQDCGPSTTNELFSVLPWTIQSQMQGRHTLHGKEVPPRTVVSSKEMAANCVRRALRHRVMVSSVRQAVCGLLASGGAVAAQYLGKKMAKAWRSRVA

SEQ ID NO: 50016 - protein, 303 aa, Zea mays
  Clone ID: LIB3591-066-D11_FLI.pep
RSTPPLHSALHSLQQQKSEQQTAAAAAMEAWRSLLASFVLAVLAAQALVAVVESRTGPVEQASEGDDVKKPDCVPGMDPRSFPGTGGGHGITPVTPSHGGSSSPTPSHGGGGGYVPTPSHGGTLPFPSHGGSGSGSSPTSPSTGGGAYGGSPSTPGGGAYGGSPPSTPSGGGAYGGSPSTPSGGGAYGGGSPSPAHGAGGAYGSSPTPAYGDSPLHGGIGTSSPTTFVPMDPHSFGAAAGSVGGADVMSIQDAVGNTRADGTGALLREGAAALLNSMTRAGFPYTTEQVRDAFAAAAAAGSDG

SEQ ID NO: 50017 - protein, 180 aa, Zea mays
  Clone ID: LIB3591-077-C4_FLI.pep
QEISSSMVSQSFGASDMAFNSIDSGMNDGGFVNRTSWPPAPPLKRMRTFTKVYKRGAVGRSIDISQFSGYDELKHALARMFSMEGQLEERQRIGWKLVYKDHEDDILLLGDDPWEEFVNCVKCIRILSPQEVQQISLDGDLGNNILPNQACSSSDGGNAWRARCDQNSGNPSTGSYDQFE

SEQ ID NO: 50018 - protein, 498 aa, Zea mays
  Clone ID: LIB3591-115-F3_FLI.pep
DRAPQPPPPPPPPAMTSAVLAGRNEVHQAHQHHRQWAGARVPLMPKPSSNPNPRRHRAGPNPIPSGSPPEPRAAPAVAAEPSPSPSGHLNFRPSEMTPAEARHLRARLTSELCRVRAFLSRIDSWQDGQRRRRGPEPPARGPSPPPALVEAMRKRCADILMRLRRSKKSVWFNSPVDVEGLKLHDYRAIIRSPMDLGTVKQNLTAGRYPSHEAFAGDVRLTFNNALRYNPPDHHVHRYAGNLLASFEGMYKEAVSWFEQQRQQLEPPMQPDLPPPPQLPVVSVPVQAPPRMGGGGRRPKPKAREPNKREMDEEEKQKLRVEIENLPEEKMLNVLQIVQKRNSDPAFTGEVVELDFDELDMETLWELDRFVVNWRKALKKSQRNSMVNGDAAAAVNGDAIDVTVVPDDDDMVEVAVNPSVAVEIGESADVPEKEMEAEMVDDYVDIGDEMPTVNYQSVEIERDSPAAASSSSGSGSGSSSSSDSDSDSDSDGDDASAPH

SEQ ID NO: 50019 - protein, 143 aa, Zea mays
  Clone ID: LIB3279-221-B4_FLI.pep
RRVGGADLVGSTKQHLLNKVKATIMTCSRKKYKKIPLPRLCTAVQPFLPSMLVFVTALCVGSPLTINIKVVLSPFGLTILLLLFSFHTSSSVAGYHLAGSWFLKSDDVKALQRTISFETGMQSSLLALALVDDEKVEVVRATV

SEQ ID NO: 50020 - protein, 402 aa, Zea mays
  Clone ID: LIB3279-222-E8_FLI.pep
PAATPAPAMAPLLLLPLPLRPIPAENSISRLAPRPRFPRPFSRRRLRLPALLQVQCLAATGPAAPAPRWHAALSAAAGLYPAYVAAGASVAFTRPEAFRWFVALAPGSYTATLGFIMLAMGLTLQLSDFAALLRDRPLAILFGCAAQYTIMPVFGAIISHALGLPPSLSAGLILLGCCPGGTASNVVTLVAQGDVPLSVVMTVCSTLAAVFLTPLLTKILAGAYIPVDAVKLSLSTLQVVVAPILLGSLIQTAFPSVAQFLSPFAPLMAVLASSLLASSVFSENFVRLRSTIADASPVNGMFFGDVGTVIFSVFLLHFAGFFVGYAAAAIGGFKEKQRRAISIEVGMQNSSLGVVLATAHFSSPLVALPPAVSAVVMNMMGSTLGLVWQYTSTSVSENETSA

SEQ ID NO: 50021 - protein, 306 aa, Zea mays
  Clone ID: LIB3060-063-A9_FLI.pep
LLPTRRRTMATAAACVRVASPFTGPPIWHPRHVISTRRGPRRAGLAVTAAAAAGGSPRTVLVTGAGGRTGQIVYKKLKEREGQFVGRGLVRTGESKGKIGGGDDVFVGDIRDPESIAPAIEGIDALIILTSAVPKMKPGFDPSKGGRPEFYFEEGSYPEQVDWIGQKNQIDAAKSIGAKHIVLVGSMGGTDINHPLNKLGNANILVWKRKAEQYLADSGLPYTIIRAGGLQDKDGGLRELIVGKDDEILKTETRTIARADVAEVCIQALLFEESKFKAFDLASKPEGEGTPTTDFRALFAQVNSRF

SEQ ID NO: 50022 - protein, 334 aa, Zea mays
  Clone ID: LIB3067-049-D9_FLI.pep
RLTYQTFPTPMDSQVFSKIKPGPNQTEHLRLLQLGPGPNDSNRIPWLKGTKLPLDADRQTSSAPGESACKCNHTNYSAGAESALVSVTLPESVDSDLPLPSDLPSLTVSFASNPAVEPPSSPSLPSFFVSDSAISSTNSLNFLQFSTEPNLMANISSLSSPSAKSAACQTHDLSLPACSCIFVVEATRWFAQILSVLAWRMTRRTLPVCLCLRSLTAPVPRSFHWLPSLSNRYSFAFMSSRTSSSSSPVVTATSSSRTMGATWAPVSSSSPAAAAAEASSSSSPASGRSTTGSLSAMRWVIAARFDSNFEEDATAGQGRNSPEALGAGLAAPAC

SEQ ID NO: 50023 - protein, 154 aa, Zea mays
  Clone ID: LIB3068-008-G8_FLI.pep
WCPVHLKMKKSTTVLAISILVLSLASQFSWCAEAAEGSAGISTEPDLQVQEQVHGDMKNRLEMQGRNRKLGHEVTTVELKHHRRITSGHKGGSAGGGAGAGAAGAGTGGHNVGGGGAVTRPHSSKNGAAALPVPVSSVLTLALACGVVLSVMSY

SEQ ID NO: 50024 - protein, 273 aa, Zea mays
  Clone ID: LIB3115-001-E3_FLI.pep
RRVSPVAYSLTPMAAPPAASLVARAALPPRLRPTTASPLGPAVLGPSSRRRYLRLRRSPSLAGTAAAAASSPSVPSSFPGPGPGIGDALGDVEIYSAATGEPVLFRDLWDQDEGVSVVALLRHFGCPCCWELASVLRDTKERFDSAGVKLIAVGVGTPAKARILAERLPFPLEYLYADPDRKAYNLLGLYFGVGRTFFNPASAKVFSRFDSLKEAVKNYTIEATPDDRAGVLQQGGMFVFKGKELLYARKDEGTGDHAPLDDVLNICCKVPVT

SEQ ID NO: 50025 - protein, 100 aa, Zea mays
  Clone ID: LIB3180-054-D2_FLI.pep
SLMCVLFTPVFFCSFVNNPNLCGPGTTKPCPDAPPFSPPPPYNPTTPMQSPGDLFRLSNKILEFNRTFPSLLFHLNDILIGKMYTSKTSIMLSRLESGKE

SEQ ID NO: 50026 - protein, 504 aa, Zea mays
  Clone ID: LIB3332-027-F4_FLI.pep
VEVAGEGKTGNETLLSAEGGERLGPSLNGTSEGIKGRLNNDGSVPHTSKVEREEGELSPNGDFEEDHFVPFEDGTSKGKEDSTSRPFHGRPGEVVPSSAEAAGENDADADDEGEESAQRSTEDSENASEAGEDASGSESGDGEECSREDHDEEEEDMDHDDQDAKAESEGEAEGTTETHDVEGGISLPLSERFLYSVKPLAKHVPTALHDREFSRVFYGNDSFYVLFRLHQILYERLLSAKTNSFTAEKKWRNSKDTNPPDLYAKFMSALYNLLDGSSDNTKFEDDCRAIIGTQSYVLFTLDKLIYKVVKQLQAIATDEMDNKLLQLYLYEKSRSPGRFFDLVYHENARVLLHDESIYRFECCSSPTRLSIQLMEYGHEKPEVTAVSIEPNFSSYLFSEYLCSTPDKKLSEGVYLGRNKRKYSNNDEPSDSLKAMDGINVVNGLECKISCKTSKVSYVLDTEDFLFRLRKRRKILRGGNVPDRLQISSISAAKVQRFNRFLSKP

SEQ ID NO: 50027 - protein, 415 aa, Zea mays
  Clone ID: LIB3354-002-E9_FLI.pep
PNQIRSDPLPLSTPKSLRSAATAMDDDDDVSPSSSPSPPSSSALPVDGPVTVAAAPPGASMAVALPIHRTAASLYASAGGDGGGGGGREDAWSDGATSALIDAWGERFVALGRGSLRHPQWQEVAEAVSSRDGYSKAPKSDIQCKNRIDTLKKKYKVERIKPVSGWQFFDRLDFLLAPTYGNKPGNGGGGHNSNSRSQMPAAPRVGFPQRSRTPLMPAAGSGAKRRAPSPEPSVSSDSSDGFPPMPALPAVNGKRKRTDDGRSDGGGDRAQGLRELAQAIRRLGEAYERVEATKLEQEAEMERRRMDFAQELESQRVRFFLDTQMELTQAKNHASPATAAVPAVGSSRRIPRMSLVTDAGGSSNHHSRYRISHVDRHRHAPRPHYQQYHDNNNAGAAAASDGEQSDEEDYEEESQ

SEQ ID NO: 50028 - protein, 166 aa, Zea mays
  Clone ID: LIB3357-056-B7_FLI.pep
GNKQLRRKISPKRQNSKSKLNNNIYLPIFQHNTGQRRSHPSLAEQRSCSGTSLCLVEHRPSRVAVQMHGPGLTAVVVLREGHHGAAARDRHRRRRHLQEHVVPDEEVTDVGPSVPQPARHPGARRAHQGPGRRRPLPQRARQGTPDSRPPQAPAPPPRHRKVVGPV

SEQ ID NO: 50029 - protein, 255 aa, Zea mays
  Clone ID: LIB3357-059-D1_FLI.pep
SCWACGTARTSTGSRSCSTSRASATSTWRRTSSTRASSSSIPTRCTRKCPCSSTPASRSPSRRPSFSTSTRLSPAARARRSSQPTPTHAPPPASGPPSSTTRSGLHGTRSCSRGSTGRRRTRRRGSSRRWRRWRARSRTAPAGGTTSAAAPSASWTWSSAATWAGSRCSRRWSASGSWTWRGRRSSPRGGSVSRRRKRPRTSCRMTLIRCSSSFRSSWTRLGARHHVLGALVSNPMFVCFGHFPCAVNGPRMFAS

SEQ ID NO: 50030 - protein, 489 aa, Zea mays
  Clone ID: LIB3593-005-H9_FLI.pep
QPPVRSPTPPAMSDPRGHAAGPDRDGDDPLAEDANSEEAWQTPEKEPVAVSKEAAARGGDTTPDAEPESDDGEGGVGSPDQMEPNADGERAPPVAAAEDPEGIVGSAKVETNGEDAISLDADGEEEDDDDDGDEEEEEEDDDDDDSTPDASPRAEVKVEGESSTGMTQSGAGHRVEVEPDPFLDGDDSGTEEEQGAFMAELERFHREHSLEFKPPKFYGKGLNCLKLWRQVAHLGGHEQVTVCKLWRQVGETFRPPKTCTTVSWSFRIFYEKALLEYEKHKVRTGQLQIPPPGLPQPSGADREVVVNQSSSARVRRDAAARAMQGWHAHRLLTNGTYGDNILKDKDTMPLPNRDKNLSFGVLKRKKASSPEYALKSSRSKTNKSQEDSMVVDVGEPADWVKINVRQTKDCFEVYALVPGLLREEVHVQSDPAGRLVITGDPEQPDNPWGITPFKKVVNLPSRIDPHQTSAVVTLHGQLFVRAPFGHPDM

SEQ ID NO: 50031 - protein, 329 aa, Zea mays
  Clone ID: LIB3354-077-A12_FLI.pep
LRPWYAHGRYTHQGMILIINESHDGAGVGGVLLADDPVAAAAGVAGVRLGHVLREVLRRGWGRGGGRGRLGGLAAGAAVAPAVAVVAAAVGRPRRVRVRVRPRVGDLHHLGRRRGGLLLLGRCRGGLLLLGRGWLLLGRLLLGWRGLLLGWLLLGRLHLRRRGRGGLLLLLRRRRGLLLLLRLLLGLGRRRGRGLDDLDLLDDLARLAAQLVGELVRVEGPRDLHLVVLLVEVDVIDAELALLCKPRRPSVVPGNLSVAINANRLETYLYKRKGKSEQQRGVASKREQTLDPVEHPLDLGAAAAAFQVHRDDDGRHRLCDCNWLDRAVK

SEQ ID NO: 50032 - protein, 477 aa, Zea mays
  Clone ID: LIB3587-209-F4_FLI.pep
RPLTPHEEAQSVGQLREVSNKAHNAELKLFLEVELGPELCPIRPPEKSKEDILLFFKLYNAEKEELHFVGRLFVKALGKPSEILTKLNAMAGFSPNEEIELYEEIKFEPNVMCEHIDKKLTFRSSQLEDGDIICFQKAPVPDGDAQVRYPDVPSFLEYVHNRQVVHFRCLDKPKDDDFSLELSKLHTYDDVVERVAHQLGLDDPSKIRLTSHNCYSQQPKPQPIRYRGVAHLLDMLVHYNQTSDILYYEVLDIPLPDLQRLKTLKVAFHHATKDEVVVHSIRLPRNSTISDVITDLKTKVELSNPDAELRLLEVFYHKIYKIFPPHEKIENINDQYWTLRAEEIPEEEKNLGPHDRLIHVYHFMKDPNQNQQIQNFGDPFLMVIREGETAAEVMERIQRKLRVPDDEFSKWKLAFISMNRPEYLQDTDVVSARFQRRDVYGAWEQYLGLEHTDTTSKRSYTSNQNRHTYEKPVKIYN

SEQ ID NO: 50033 - protein, 337 aa, Zea mays
  Clone ID: LIB3587-222-F4_FLI.pep
HETLGRPPPLRNLPLRSAMQASARLSYSVASRKVIAGVSIASPRSCYRTSRGKAHAAPLPAQEPPPKGQKRITKQERRVRIVEFVENYRASNEGKFPTVKNICQQIGGGYYAVRELLQEMKYNHAKLPLGNAKAAPLQTTVEVTEHPMPKDEARVVESQGILEVSEHSMPKDDAEVAQPQGTAEVFEHFLSKDEGKVAQCQGTFHFPEHSRPKDDSGKTARHDMDTSETCKTADAPALSDLTENEGILSDQTESEDKPDPGNQQREIEANKFDLKNFEKNLNANDLNASDQSGSDMVNEAKTHARGDNPKLEESANTGLLGSLRSFAYGIRNFWKNM

SEQ ID NO: 50034 - protein, 209 aa, Zea mays
  Clone ID: LIB3592-049-D7_FLI.pep
LITMYYVLWHLKSMHSPTSLKWCRTLLVANAGDCRAVLGKRGRAFELSRDHKPSCSVEKLRIENLGGTVFDGYLNGQLAVARAIGDWHMKGSKGSACPLTPEPEFREVRLTEEDEFLIIGCDGLWDVMSSQFAVSMVRKELMEHNDPQRCSRELVQEALRRDCCDNLTVVVVCFSDDPPPQIEVPRFRVRRSISMEGLHTLRGALDSNV

SEQ ID NO: 50035 - protein, 230 aa, Zea mays
  Clone ID: LIB3279-176-G2_FLI.pep
IKLRAIHDKLRPPLRSPPSYSDPKERTQGESTMTEGGRPNRPDQRDLGELSAVSDLDHLGGGAVAGAHLLDGLDDVHALDDLAEDDVLAVEPRGRDGADEELGAVGVGPGVGHGEHTGGGVLAHELLVGELLAVDGLAAGAVAAGEVAALAHELGDDAVEGGALVVERLPGLAHALLARAQRAEVLRGLGHLVGVQLHHDPARRGAADGHVEEDARVRHRDRELGFGDIF

SEQ ID NO: 50036 - protein, 391 aa, Zea mays
  Clone ID: LIB3279-177-D1_FLI.pep
LLLINSNCGRHVDPDPVLVPLGKEDENEQVDCAEHGEQPVQVVEPAHVDVLRQPRRPPLLIVPRRGVHRGVDRRRHKAAEPAGDGGVRGPDAAHRVGRLLVQELQERDEAEHLGHADEAVLDEQPVGAEVRHGREEEAEVSVADGIPAAVPLEEPRPGHGQDGEEEAQPDALQLGGAVRVARQAARQRGEGLVVERQDEEDGQAGEHRHARHGQVQRRHAGVQRVGLLHRQREELGEDHAQHHRARRHRQQPQQDLHLLHLRHRAQTPRVHRLLVLAAGEVTLQLQRGLVEPSEVVGVVDLGAATDGGLGAGDLVQADEVAAVEGRVPLPEGGDEHLRHPRERAAPRQPVAVQRRAHEEERVGGAHGQRQRAERRRPAVLHLDVDHGREGG

SEQ ID NO: 50037 - protein, 454 aa, Zea mays
  Clone ID: LIB3592-073-B8_FLI.pep
PPPTSPPAMAWLARSIANSLIATEEEPEATDRGPSASPGSSSPPRGVREGLSELTGALANRFQGIASFLAPAAPGGGGALRRPDPAEIAGRFRAGLARLPGRQAVADLARIASSLLPPEGDADWAEEAAGVTEEVVAFARDAASRPELWLDFPLLPDDADSDDFDMTDAQQDHALAVESLAPELADLRIELCPSHMSEDCFWKIYFVLLHPKLRKDDADILSTPQILEARDKLSQEVRYRTELQGSHGDTVPVALGDEGGVSGSLVEGLGVLKGQDDSAMLTSFSNTDYGKPQPIEQDKDIVSVHTIGETGAVSSDNTGSSGVPVQLVPVSRDTTTVAPLSRTEESTHDLSTEDEAAAEEEEEQGLQMSEIPLTDSSPPKDGQQKQPLAAISERSGADYQKSDNVEDGGDGVEDDDGDEWLEEEAWDPGNTQIPIADDEDVSFSDLEEEDDGAA

SEQ ID NO: 50038 - protein, 162 aa, Zea mays
  Clone ID: LIB3592-085-D2_FLI.pep
YESFYGDLVQGHFDILSLSGSFLLAEDGDTRSRTGGLSVALAGSDGRIVGGCVAGMLMAATPVQVVVGSFIAEAKKPKEEQPKREPTSVPPHTAVFGAASTASPPSDGTSSEHSDDPGSPMGPNGSAFTSAGLPLHSTYAAVGWSLSEDQSRYDPDLKMMTD

SEQ ID NO: 50039 - protein, 202 aa, Zea mays
  Clone ID: LIB3592-086-G9_FLI.pep
LVEGGLAGELDVDGVDVLADAAEVLADALPAGVDLLRVDAVLGVEVLHLAVGEDAVELVGDLVLGAQPGAERQALLLARQLQEVGALPHDGGAAGGHLEHLLLGGRPRDDVELLHLRLAEQPARAAAEDRGRRAGVQLRGHEPLGRLHRLLGGRAERGRPREDDDGSASCELSCRGFAAGAQAAASRWRVAAEACVDMAMGA

SEQ ID NO: 50040 - protein, 714 aa, Zea mays
  Clone ID: LIB3060-104-B6_FLI.pep
QRNATDRQINLSLSIPPIHSPTAMDAAQRRVGTHLQRPPPPAGGYGLTVNPTAAEYVHAQGYSVLLPEKLQTGRWNVYRSARSPLRLISRFPDTPDIGTLHDNFTYAVETFTDCKYLGTRIRADGTIGDYKWMTYGEASTSRTAVGSGLIYHGVREGACIGLYFVNRPEWIIVDHACSAYSYVSVPLYDTLGPDAVQFIVNHAAVEVIFCVPQTLSTLLSFIAQMPCVRLIVVVGGDDANLPSTPVTTGVQIITYSRLLIQGKASPQPFCLPKPEDVATICYTSGTTGTPKGAVLSHGNLIANVAGSSLNIKFYPSDVYISYLPLAHIYERVNQIAALHCGVAIGFYQGDNLKLMDDLAALRPTIFASVPRLYNRIYTAITNAVKESGGLKEKLFHTAYNAKRQAILKGKNPSPVWDKLVFNKIKARLGGRVRLMSSGASPLSADVMEFLRICFGGEVLEGYGMTETSCIISAMDIGDRSIGHVGSPTASCEVKLVDVPEMNYTSDDQPYPRGEICVRGPIIFQGYYKDEVQTKEVIDEDGWLHTGDIGLWLPGGRLKIIDRKKNIFKLAQGEYIAPEKIENVYAKCKFIAQCFIYGDSFNSSLVGIVAVEPEVMKAWAASEGIQCEDLRQLCADPRARAAVLADMDSVGKEAQLRGFEFAKAVRLVAEPFTVDNGLLTPTFKVKRQQAKTYFAKEISDMYAELREAEAPRSKL

SEQ ID NO: 50041 - protein, 489 aa, Zea mays
  Clone ID: LIB3060-107-H7_FLI.pep
HPHCAAPRPAPPRPRRRGNAMGKRSGGRKLPFFTRSSSSSSKRNRSARRLPSLPKQDNATRALLASPSAASPSATPGSAAAGQTAQLPPPLSVTAGGGVAVSGKVNKKKAGTRLWMRLDRWSASEIVELDKASIIRRAGLPPRDLRILGPVFSRSSSILAREKAMVINLEFIRAIVTAEEVLLLDPLMHEVLPFVDQLRQHLPLRSRVGENGECAPDGNGEKQKGSLNEATGAEHELPFEFHVLEVALEVVCSSLDLSVSDLERHATPVLDELTKNVSTRNLERVRNLKSHLTRLLARVQKVRDEIEHLLDDNEDMEHLYLTRKQVQNQQVEALMSSAASNSIVLAGTGVPRLNSSFRRSLSIATSMHLDNDVEDLEMLLEAYFMQLDGIRNRILSVREYIDDTEDYVNIQLDNQRNELIQLQLTLTIASFGIAANTFIAGAFAMNIPGSLFNTDGSLFWPFVGSTSSGCFVITVLLLGYAWWKKLLGP

SEQ ID NO: 50042 - protein, 337 aa, Zea mays
  Clone ID: LIB3060-108-A1_FLI.pep
LGNLHPRYAMAAASSPTFPPPATDVAAPGVPDLSIPYDLATRGQWQALFSHLSHPAHTPHPHHRLLLSALSALCLAKLRRFPDAAALLASLHPDPACPPPPFLIRLLHALLPLFLPDRPLALDRLYTLLSSVRVRPNAGHPEWRRRDALVASVLAADHLAHREFDVALALLADIAGREPGDPVLLSRLAYAHLQIGNLGAASAAFRHVESVAAASEDPTRHANLLARNRALECIVGKDYAAAVREYERCIEADPADAVALNNKALCLMYSRDLGDAIKVLEGALERVPTAALNETVVVNLCSMYELAFVNHGEVKRSLAEWIARVAPDDFDTSCTRM

SEQ ID NO: 50043 - protein, 176 aa, Zea mays
  Clone ID: LIB3060-109-D3_FLI.pep
ILESHRIQSVLHVIYIHGLAASRAQARTRSAGRDEADAEPERDAAQLLVVVPDNLHVDRVGARRSEAWQRLLVGQHEVAGRWAGSLSADVAGLRVHVEEEILDVDNQLPLLDGFISRSGDLESGGLAGFDRIGHDLHPAHLHRVVLLTAVVDVGGDRGGGQEEEACGEDEVLARHG

SEQ ID NO: 50044 - protein, 326 aa, Zea mays
  Clone ID: LIB3060-109-H10_FLI.pep
AGAASPLRSLLPPARSLTAMSAATSTAPSIGEYPSPVSPPYPATSKDLELRRAMTASARSAAFASADVVFEDEWLAVVDKPAGVYCDALLTSFPCSAVSENPATKPNLHLANRLDRDTSGLMVITKCNKVAGKLVKAFTDHKVKKTYLALCIGFPPAWEKIKICSGHGRSKHGAWRVYAMSDVGRSLPGGSVVRDMSTRFEVLGVNGKGQFREPYSLDTDDIEPITVQEKATDQTCGGDANSSVILVRAYPQSGRTHQIRLHCQYLGLPIRGDVKYGGVIEWDGVECEGHALHAESLSFVHPITGLPITLRSPLPPWAKDCISAME

SEQ ID NO: 50045 - protein, 174 aa, Zea mays
  Clone ID: LIB3066-005-B8_FLI.pep
NNSKCDHPLIHLANNPACPSFSSRSRRRSLRLRQTTSSRDGDEEGRLRRPRRRRLRHRGPRRRGPGARAHQRLLGCVPGRRRRAERLRALLLRLLPAVKLKEDRRERLLAAIACIRLDPVYIYIYIFKYFNLGLNMSIDPFILFALPFLPFLLISICKEGRMGDTIRLDMTIGN

SEQ ID NO: 50046 - protein, 345 aa, Zea mays
  Clone ID: LIB3066-012-E2_FLI.pep
CSPSVKTTEKSVNQVGHRMFPERSTRPWMGPEPWKKNGRALPLQEPWKLWLMRLLLLLLLQLRWLLLLLLLLRLLLLLLLLLPVHQAALLPYLALALADEHVKHPDLLHRLGKLLLPQWLVPGEVLHHRPRLRVLDEGVVRGEQAAAGEQLGVVRDVEPLPRLRVELHLGRLLGVVAGLPRRAHLAQPLGVLRVQRGVDVGVLGEVVDAVGEHEAVRAADGVRAGEQDEVLLGEPPLAEELGEARHVVARHGEVAREVVHVRAHAVAAPRRDLVSREARGHGGVARREGQDVCARDLAGAHALYGGLGDVDGSEPDQGEAVGGRLLLWDVAGGRLVQENGSVATR

SEQ ID NO: 50047 - protein, 179 aa, Zea mays; identical to SEQ ID NO: 45243
  Clone ID: LIB3079-022-E11_FLI.pep

SEQ ID NO: 50048 - protein, 228 aa, Zea mays
  Clone ID: LIB3332-015-F12_FLI.pep
PTELPPSCSPWPSALPSSNSPALGFLLAKSISLPSAVPPPAPPRRSVPARRLCNSPMAPISLAATSLLLLSPAAVFPALAQPSSSLRACSPASSRARETSLLTALPVCSAMVKPSLPWMPEFLCSFSWPPSSFRRAPISSAPPRASWDSPSRRSVPGRGRRTRPARIFAWSPAVYQYRGLARTRTVKIVPARTPWYPCSLLGRPSAASSAASRPPSCSAASNLCRSSY

SEQ ID NO: 50049 - protein, 85 aa, Zea mays
  Clone ID: LIB3354-039-B2_FLI.pep
RRLRAACWVPLWIRAWAWAWVPPWRAYGTSTSPWRPPTGTVGATTAAGRYLSEGPALHDCNSSARKPPRVLKLVWQRLLVMVWKL

SEQ ID NO: 50050 - protein, 178 aa, Zea mays
  Clone ID: LIB3357-032-D5_FLI.pep
AHLRALPPPPPPLDAHRAAMAEQTEKAFLKQPKVFLSSKKSGKGKKPGKGGNRFWKSIGLGFKTPREAIEGTYIDKKCPFTGTVSIRGRIIAGTCHSAKMNRTIIVRRNYLHFVKKYQRYEKRHSNIPAHISPCFRVKEGDHVIIGQCRPLSKTVRFNVVKVIPAGSAAAGKKAFTAA

SEQ ID NO: 50051 - protein, 176 aa, Zea mays
  Clone ID: LIB3591-011-F2_FLI.pep
PSRMDISEGSIAVRGRGENKRKWIPVEDDELIKALVDVSLDPRWRSDGSFKNGYTSVLEARLAEKLPDSRISATPHIDSRLRYFKTKYSALEQMLNKSGFTWDPTKKMIQCEKQQYETHCKNNPDAKGLYGVSFPYYDELSMVYSKDMATGEGAEDMTDAVQNLEEELVRVNANDE

SEQ ID NO: 50052 - protein, 268 aa, Zea mays
  Clone ID: LIB3591-089-G8_FLI.pep
NLAKTLRRSTMLIRRPLQILTLPLLRRHISAATVEAFVSPDQATDPLSPPYDYLPGHPRPDAKHNEVILAVPRASSGRHVAAKERKAGRVPAIVFEQENGQEGGNKRLISVRANQIRKLVDHLGRSFFLSRLFSLQVWSEHAGQGELIESVRVLPRKVHLHAGTDEPLNITFMRAPSSALLKIDVPLMFIGEDASPGLRKGAYFNTIKRTAKYLCPADIVPPYIEVDLSELDVGQKLMMRDLKVHPALKLLHSPDQPICNFTGSRSPE

SEQ ID NO: 50053 - protein, 392 aa, Zea mays
  Clone ID: LIB3591-090-F9_FLI.pep
FGLATVARRRGSPHAARCVVGTPEFMAPEVYAEGYDERADVYSFGMCVLEMVTLEYPYSECVHPVHIYKKVTSGIKPAALYKVKDPAVRRFIDRCLAPASRRPSAAELLSDPFLQLEDGCGLGYGDDADYSAMYNYLHQPACLDHHHHAGSIGSTASNGVVSNGGGGGGGRWDDESEDEDDDGSMFQGIDQLFNEHEDDELHVAGVDITIKGKRMQDGRIFLRLRIADKDGTGRVRNIYFPFDADADTALSVATEMVAELDITDHEVTHIAEMIDGEVGALLPHWRPGPGMDDDDGGGAGPDTSGATDRCKNCRSSASSAGSLDDYMSAAAAARRGCRCAELHGRFEEITFQADEEQVRFQGSGCSSDDGGGQAEQCAGDGGSTVTERSDQP

SEQ ID NO: 50054 - protein, 587 aa, Zea mays
  Clone ID: LIB3587-195-B2_FLI.pep
SDVTDEMESYSLQLQEPDDKSPLEVKKMSHNALAALVKYLQKKRSGIFERATAEVTEEVVSGAVHHSLKLSEPYKSKKLSKKRAQTHTSSIAREMATVLDTCLLQALILTGQSSGAIELLKGLNYCDLKICEEFLKERREYMVLLELYKSNEMHRDALQLLNQLVEESKSETENTYFNKKFNSQMILEYLRPLCRSDPMLVLESSLYVLERNPSETIQLFLSENVPADLVNSYLKQHAPNLQSTYLELMLSMNDTGINPNLQNELVQLYLSEVLDWYKILKEEGNWTEKTYSPTRKKLISTLESNSGYNTDVLLKRLPQDALFEERAILYGKINQHLRALSLYVHKLQMPERAVAYCDRVYEEREQQPSKSNIYFNLLQIHLNPRKAEKEFEQKIIPVASQYSGIQKASATKPKGGRIGKKVVEIEGADDIRFSPSGTDSGRSDGDGDDVNDRGPIMLNEALELLSQRWDRINGAQALRLLPRDTKLQDLVSFLEPLLRNSSEHRRNYLVIKNLILRANLQVKEDLYNRCQAVVKIDGDSTCSLCHKRVANSAFAIYPNGQTLVHFVCFKESQQIKAVRGANSVKRR

SEQ ID NO: 50055 - protein, 330 aa, Zea mays
  Clone ID: LIB3587-197-F10_FLI.pep
SRLHRRQLSSEEQIIVVCRAESTVDVSHIEQVKVATPRDAGGGRGAVVVILVLRRQPAGAVCAAHLVPEGGGGGCGGAAVGWRHVPGGRRGGGPVRGQRVALRRPVREHEAPSRLVLEWLLGERRRRWGRQRCMAAADVGVVLLAVRRRGAAAAAVVLDVVALVHGHGHGHGHGHGRQVGGGAHGGELGRALGAGVGRRALGLLHHPLLEVRVPVVLHLVVGPPRQMHRNLRPLVAQLGLEVDDDVLLLLGEHSTLQSRAQVVDPAQAAALAVSLETSLCRDSTPAAEAMLEDVVPEPLVLLRRPQPLAVVHLGLVTGPAPHCVLSPPPC

SEQ ID NO: 50056 - protein, 432 aa, Zea mays
  Clone ID: LIB3587-199-H2_FLI.pep
RRHAPAQPAMAFAARRSIATRLSHHLTRRLHPCVPHARTSDSLDEQASRPSPPLPLPLPPLHVQLKQRSREVQILGFLPFSLRLAGPTRRTFSSSAPAPNLEAAPAAEVDAAGVLADAAEAAASVPAPFPGEVAAAAADSFPPVAALQHIIDAIHTFTGLNWWVCIALTTFIIRSATVPLLVNQLKATTKLRAINPEMEVIKDQMNSMDPKSVQEGQAKMKALFKKHGVSPLTPMKGLLIQGPIFMSFFFAISNMVEKVPSFKGGGTLWFTDLTTPDSLYILPMLTGLTFLATVELNLQEGMEGNPMAGKMKYFSRGVAVLTVPFTMNFATAVFCYWTSSNIFTLLYGLVIRRPAVRKWFDLPALENTPSLTAKPVFNMFGGSKAIPAAQSPVAIAGAQQSGLGQPDASALGYKVKNLEKKVKSRGKSRKHR

SEQ ID NO: 50057 - protein, 200 aa, Zea mays
  Clone ID: LIB3354-123-C1_FLI.pep
DTETIKPIVYILRFPISTFVAFFFLQPPISTVARGASEREAARAGAHRREDRGRRRHQVRRGGRDRDAVEPPGRGRAGQVLGHDVLQRVGAPRRALPALAPPRRRRRLGARGAHGVGPRGDGCPVPRQRYVAAARHPHRRARRGCHARPAQRVRRRHACCRRLRPASACSGLFGRSGRPEAAAGADDGGGGGGGSRHLLV

SEQ ID NO: 50058 - protein, 380 aa, Zea mays
  Clone ID: LIB3592-063-F4_FLI.pep
LPPAGSSPRLRSHRDRPAMEQGQGPPPPKPPATERDIGFAERAVAAAGAAVVSAVLVNPLDVAKTRLQAQAAGVVYNPIWSDFRCYPSCSTGGINGLGPCSSCSPECFQYRGTMDVFSKVTRQEGIFRLWRGTGASLALAVPTVGIYLPSYDLLRNWIEEYSDRNCPKLRPYAPLISGSIARSLACITCCPIELARTRMQAFKESNVGGKPPGMWKTLIGVLSSRQSIKSPENVRGYHLLWTGLGAQLARDAPYSAICWTVLEPIRRHVTRLFGDQSNATVILGANFSAGFIAGVISAGATCPLDVAKTRRQIEKDPERVLSMNTRRILLEVWRKEGVEGLFRGAGPRMGRAGPSVGIVVSSYEVVKHLMHKNTSNAADL

SEQ ID NO: 50059 - protein, 359 aa, Zea mays
  Clone ID: LIB3592-065-B6_FLI.pep
DHEIHDRMKDMFWSPDKFVRAPGGSSSNVALALAAIGGRVAFMGKLGDDDYGQSLLYHLNINGVQTRAVYMDPSAPTAVSLMKVRTEGSLKTNCVKPCAEDRFLPSDINPAVLKEAKMFYYNSSALLEPTTESSLLKAIDVSKKFGGTIFFDLNLPLPLWSSSKETKSLIKEAWEAANIIEVTKQELEFLCGIKPSEKFDTNDNDKSKFTHYSSEVIMKLWHSNLKVLFVTNGTSKIHYYTETHNGWVRGTEDAPITPFTGDMSQSGDAIVAALMRMLVINPHLITDKVYLHKAVKHAIKCGVIDQWVLARERGFLPKERADPTGEQYEVRSITEREYRTLPDAMQSENSSTSELAYVE

SEQ ID NO: 50060 - protein, 458 aa, Zea mays
  Clone ID: LIB3592-069-B11_FLI.pep
RRMRTTRCMLMVAQALVVVVSALLAATATTTTTAAEYVRPPPGRIILTEHTEPAAHPQQVHVSAVGENHVRVSWVTDDMRAQSVVDYGKASRNYTASATGEHTSYRYFLYSSGKIHHVSIGPLEPSTVYYYRCGKAGKEFSLRTPPAALPIELALVGDLGQTEWTASTLAHASKTGHDMLLVPGDLSYADTQQALWDSFGRFVQRHASRRPWMVTQGNHEVEAPPLPVPAGSPPPFAAYGARWRMPHEESGSPSNLYYSFGAAGGAVHVVMLGSYAPFNASSDQYRWLARDLAAVDRRATPWLVVLLHAPWYNTNAAHQGEGEAMRKAMERLLFQARVDVVFAGHVHAYERFARVYDNEANPCGPVYITIGDGGNREGLAFNFDKNHRLAPLSMTREASFGHGRLRVVNTTSAHWAWHRNDDADSVVRDELWLESLATKASCRQHAGPAVVDSWDDEL

SEQ ID NO: 50061 - protein, 216 aa, Zea mays
  Clone ID: LIB3060-087-D12_FLI.pep
PASEAQQENHMPHLAATPPTSSAAAVPAAGRIAFRRPWNTPQPEALRLRLRLRARGVRREDGGGVRTEEQEQTAPRTFYDLLGISADGSPDDVRASYRRLALKYHPDVSPPGAAAENTRRFIEVQEAYETLSDPSRRASYDRALARGVCRLAFSGRRSQSHHAYYHYQEQEEGSGWRRSWEDQIAELKRRSVAKDSEENLSWGARMRRRAEASAAE

SEQ ID NO: 50062 - protein, 278 aa, Zea mays
  Clone ID: LIB3075-008-A1_FLI.pep
VRITQLSATMGSLANNIMVVGVVLAALVAGGSCGPPKVPPGPNITTNYNGKWLTARATWYGQPNGAGAPDNGGACGIKNVNLPPYSGMTACGNVPIFKDGKGCGSCYEVRCKEKPECSGNPVTVYITDMNYEPIAPYHFDLSGKAFGSLAKPGLNDKLRHCGIMDVEFRRVRCKYPAGQKIVFHIEKGCNPNYLAVLVKFVADDGDIVLMEIQDKLSAEWKPMKLSWGAIWRMDTAKALKGPFSIRLTSESGKKVIAKDVIPPNWRPDAVYTSNVQFY

SEQ ID NO: 50063 - protein, 395 aa, Zea mays
  Clone ID: LIB3075-008-E2_FLI.pep
RRPRWCRRPPRTSQPSTAAPTAAAPPKPGGGNQAHEASADDSALRLAITGQAFAFRELAAATDHFTPYNLVGEGGFFRVYKGRLEKSGQTVAIKQLDKHGFQDNKAFLTGVAKLSQLHHENLVDIIGYCADGDQRLLVYESVPAGTLEDHLFDLPADKKPMDWCTRMKVAHGAAQGLEYLHETANPPVVYGEFKASHILLDEKLTPKLSDFGLAQLGQAGGSMPVVASPMMGSFGCCAPEYDRTGQATMKSDAYSFGVVLVQLISGRRAVDTSKPVDEQNVVTWAMPMFKDQKRYHELVDPLIKKEYPAKALNQVVAMAAMCLQEEDSVRPLMADVVMTLGFLTAMPPDPPAPAAPPPAAAPEPKEDKESDHSDSSSSSSSDDDEDNEEEETEEQ

SEQ ID NO: 50064 - protein, 329 aa, Zea mays
  Clone ID: LIB3227-041-D12_FLI.pep
PRCRDSPTGGHSGRQAGVTPFRCLCLLAVTAGPGARRSSRRRRRGTPRHRPRTRGTGTGAGTAGPERTRRRRRRPCTTATNQSTPAPTGMPRSSRTARPPPRRHRHRRRSRRRGTAGAPCRAWRGGQRRRPRGSWRRPATPGPRRPAAGAAPPAPRRATHGRDHRARVAPPSLLERRAHPVRLDPHQRVDLHALVVQLRQDATGRRRPAAGGRRAAPVLHVVQQEPRHNACPLPREEHAVVTGGVASELAARLGAADRCVPEGGRRRRRRAPAEAELVQERGATDCRGTLQRPQGVADVVGQEGWCEQVLRLDGHRRRVCLGEWAGRGK

SEQ ID NO: 50065 - protein, 451 aa, Zea mays
  Clone ID: LIB3354-010-E4_FLI.pep
AEAKRLMRLAGPIVASCVLQNVVSMASIIFVGHLGELHLAGASLATSLANVTGYSLLTGMASALDTLCGQAFGARQHHLLGVYKQRAMVVLGLACVPIAVVWACAGRILLLLGQDPQIAAEAGAYARWLVPSLAAYVPLQCHVRFLQTQSVVLPVAASCGATALCHVLVCWALVYKAGMGSKGAALSNGVSYAVNLVVLALYVRLSGACRETWKGFSREAFKDLWRFAELAWPSAMMICLEWWSFEVLVLLSGLLPNPQLETSVLSICLNTGALLYMIPLGLTYSISTRVSNELGAGQPQAAKMAAKVVMYMAFSEGLVISLTMTLLRNIWGYVYSDEEEIVTYISKMLPILGISFFIDGLHSSLSGVLTGCGKQKIGAAVNLGAFYLLGIPVAVLLAFVFHLNGMGLWLGIVCGSATKLGFLLFVTCSVDWDKEAVKARYRVLGSSLPLA

SEQ ID NO: 50066 - protein, 283 aa, Zea mays
  Clone ID: LIB3354-011-D6_FLI.pep
PNPEPCDMPVQVGGSKVADPRPARVVDLSPVGDRSRASSKKNRRRHKKADAASSISPMQRLFDTSREVFANSYPGFVPPPDAVARLSGLLNELKPRDVRVAPSMSVFKHADPTSPPPVTYLHFYGSSEFSFGIFCLPKSAIIPLHNHPGMTVFSKILFGSMHLKSYDWAKSLPAGSNDNALENSDGAGARLAKVNTDAVFDASSETVVLYPENGGNLHCFTALTPCAVLDVMGPPYNRAQGRDCAYYSESPYSCAGDAQYSWLKEVHSTFEMEGIKMEPNFIV

SEQ ID NO: 50067 - protein, 473 aa, Zea mays
  Clone ID: LIB3354-066-C12_FLI.pep
KTQSSIVIKLRRNGTETSTTHHVIPPAHPCQLRSDAWTNKLSHCSVQDQAERVVGSRTARDEIEEHVRRHVVDDTVQQVELSRIVLRRDDDPVLIRHEVVVTLQEFVDRVLIRHQLGAPSAAATYQLALALVLHTADYVLQAVSVHVVIVVAVKGRDPERALEASAERLLLAEDLGPRLRLLGAHPLLQALGLPHELAHLVEARAHVLDHRAQQRDLPRLLEVVRLPVRRRALVRLDLALGAPPGLLPGRPPRRRQPALQREAPLRRHAVLDERREHGPQRAVLDVLEAVQAGRGPRRALAGGRRDERHGPGPVEADVVLPPAAQAVGGAQHGLAGLVDDAVHEPARVARLHHLEHVAEDAVLRAQHRLAPAPHLGGLHLLLLLLVLPVRARGRWPERPGRRRPRPAGGTEDVRAALQPVEQHLVPPHAALQVGDLDGLRVAELLLRQQLMSYLERFFACGDSAACTVRDVVL

SEQ ID NO: 50068 - protein, 477 aa, Zea mays
  Clone ID: LIB3587-001-A3_FLI.pep
IIPTALVPQMGGNNEDKAVVIQTLLFVAGINTLLQSFFGTMLPAVIGGSYTFVLPTISIILAGRYANEPNPHIKFLRIMRGTQGALIVASALQIIVGFSGLWRNVARYLSPLSAAPLVALVGFGLYELGFPSVAKCVEIGLPQLILLVIFTMYLPHAVHMLKSIFDRFAVLFTIPIVWLYAYLLTVGGAYRNAPPKTQFHCRTDRSGLIGGAPWIRVPYPFQWGAPTFDAGEAFAMMAASFVALVESTGALIAVSRYASATPIPPSVLSRGIGWQGIGILLDGLFGTGNGSSVSVENAGLLALTRVGSRRVVQISAGFMIFFSILGKFGAVFASIPAPIFAAMYCIFFAYAGSAGIGFLQFCNLNTFRTKFILGFSVFMGLSVPQYFNEYTSIAGYGPVHTHSRWFNDIVNVIFSSKAFVAGFVAYLLDNTIDRHEASVRRDRGYHWWDKFRSYRTDTRSEEFYSLPFNLNKFFPSV

SEQ ID NO: 50069 - protein, 172 aa, Zea mays
  Clone ID: LIB3354-108-B4_FLI.pep
RYPSLDPAQCGKSTTLGGVHAAMVGSLHPTPVATLPFLAPHSAVVPFCEGVYKYATAWDALRKDAAVLTQDVTLLAEDAAQKSGITIEQVRDRLRSVLSLTDVTRFPVPKNPQAVIFVGATDDGYIPRHSVMELQKAWPGSEVRWVTGGHVSSFFLHNDAFRKAIVDALDRL

SEQ ID NO: 50070 - protein, 401 aa, Zea mays
  Clone ID: LIB3354-112-F1_FLI.pep
CPSSPPAPAPAAMSMLLIQKQPLPLSVRPRTTLRQCRLPTTRFSAAAADSASRAAPFAVEDYLVAACHLTPAQALKASKVLSHLKSPSRPDAVLAFLSGLGLSDADIAAAVAYDPKLLCSEVERTLAPRLAELRDLGLSPSQIARLALVDPARFRRPTVVSKLQYYVPLFGSFENLLQALRNNAYLLSSDLERVVKPNVAFLVECGLDACDIAKLSIPVPRLITTNPERVRAMVERAEAVGVPRGTGMFRHALLAVAFLSEEKIKAKAEFLKTTFRWSDAEVGVAVSKLPLVLKHSKDRLRRMSEFLITKVGLEPEYIAHRPALLTYSLERRLMPRHYVVNYLKENGLLEQDRSYYTAVQMSESAFMDKFICPYKEAAPSLALDYAAACRGEVPTTFLANV

SEQ ID NO: 50071 - protein, 236 aa, Zea mays
  Clone ID: LIB3592-095-C5_FLI.pep
RGPRANAFKPISVAGERAAAEAMASPDPGHTPAQGEESASPSSWPPRKLQSFTPGLWSQYKAYEDAVVENIKGTIADALVLVREHQAEAIGCATVAGFILFRGPRRFLYRNTFGRLKTEKDLLNDAEQSMMEYQTSIQNLKKESKYTLDKVAIGESDVQRGRTDLRSTGKQIQSLIGSIYKAESTAAGLMDRLRTIPTRQSLELRAEVASMASDLKNQRCALQERINKISEYGVRV

SEQ ID NO: 50072 - protein, 307 aa, Zea mays
  Clone ID: LIB3594-013-A4_FLI.pep
VARQDVLGRRVPVRPHDTCRHVRLVALWPVLGQTEVGQLGVVVRVEQDVGSLEVAVDHRRVGVVEEGEALGRADGDLHPRHPWEGAVGTFEQVVLQAPEAHELVHQHPVLGLVAVADELHQVLVPQLPEEEHLSQPLLVPLRAALQVEVLDGDVLRAQARAEGLADGAPVHGAEPAAAEEVGAGEAGRGGAQLGVREGVQVGPGQRERQVLGGERLRRRAEARERHPRRRRPRAVLAAAAAAAAAPPPPPQRRAVVLDRRAAAHAAQVGPPGLGAGHVSRIERGVRSRSSRGRLRLAGGKVWERREI

SEQ ID NO: 50073 - protein, 527 aa, Zea mays
  Clone ID: LIB4730-018-H11_FLI.pep
ESPESRQLGMEIETEAPGSEKARSWRANAAAAQQVSNTTKPDGGDQPMKEPAWKRFLAHVGPGFMVSLAYLDPGNLETDLQAGANHRYELLWVILIGLIFALVIQSLAANLGVVTGRHLAEICKSEYPKFVRICLWILAEVAVIAADIPEVIGTAFAFNLLFHIPVWVGVLITGSSTLLLLGLQRYGVRKLEFLISMLVFVMAACFFGELSFVKPPAVDVVKGLFIPRLKGDGATADAIALLGALVMPHNLFLHSALVLSRKTPSSVRGIKDACRFFLYESGFALFVALLINIAVISVSGTVCFSGNLSPEDADKCSDLSLDSSSFLLKNVLGRSSSIVYGVALLASGQSSTITGTYSGQYIMQGFLDIRMKKWLRNLMTRCIAIAPSLVVSIIGGSSGAGRLIIIASMILSFELPFALIPLLKFSSSSSKMGPHKNSIYIMVFSWLLGLMIIGINMYFLSTSFVGWLVHNSLPKYANVLVGLLVFPLMLVYVVAVIYLTFRKDTVVTFVADSAQLAVVDAEKAKAA

SEQ ID NO: 50074 - protein, 126 aa, Zea mays
  Clone ID: LIB4740-001-B3_FLI.pep
IGEQRERDDRRGRRGIKPERSRPDCEQASKLLPLPPAGDMSSGGRRGRISDDEINELISKLQALLPESSRRRNASRSSASKLLKETCAYVKSLHREVDDLSERLSGLMATMDNDSPQAEIIRSLLR

SEQ ID NO: 50075 - protein, 271 aa, Zea mays
  Clone ID: LIB4744-016-C3_FLI.pep
SASSPVRAQFSARYPLYTPPAALALDAQAVTRAHTDGLGSCSSAIQIVAPPFPRHRPRPCRAAGMGRHAASGGGVQQKLRKGLWSPEEDEKLYSHIIHYGVGCWSSVPKLSGLQRCGKSCRLRWINYLRPDLKRGSFSQQEEDAIVGLHEILGNRWSQIASHLPGRTDNEIKNFWNSCLKKKLRQRGIDPSTHKPISADAAALEQPASRDRKPSLATAAAGGGFDVKQQQQQQQVFDPFPLTDSFGGGFDDAAGAAMYGHMGGGGGKQQDA

SEQ ID NO: 50076 - protein, 152 aa, Glycine max
  Clone ID: 700830872_FLI.pep
FPGRLTAKSDVYSFGVVLLELLSGRRAVDKTITGMEQNLVDWAKPYLSDKRRLFRIMDTKLEGQYPQKGAFTAATLALQCLNSEAKARPPMTEVLATLEQIEAPKTAGRNSHSEHHRVQTPVRKSPARNRSPLNLTPTASPLPAHRQSPRVH

SEQ ID NO: 50077 - protein, 509 aa, Zea mays
  Clone ID: 700343353_FLI.pep
VRSVRLSQSQSEGVNLTARAMSDESPPPAPAAEKSQPAEQAAGGWGGWGLSIFSEISRNAVEVAKSAIADIQQPPEQDTVPGSGEKDQEKEPEGEEEEEERRKAALDKLEKAGEDSILGQGLKAFDSSVETITTGTWQALGTAWRSGSLFVQKLENSASSLAETIQQGELPAKASAIAPTILETGKSFTAKGMEVLERVGKETMEFIVEETGMEVDKGSTGEGDQQTEEEQFEEVSFDRCFYIYGGPDQLEELEALSSHYALLFNRKKGKLNSDQKTYYDGKLKEIEQIFSLSTNADEDGPESDKGKKTESADTDTDAEMKKLCESSVRKAAKMAAGFTTALGGLSPNEIMKRTTSRLETIHSEGVHRLSEMCCLAVSQLLVLGKSVISSANKSKNEDGENDVKIDWPEDAISKAKIIRWKAQSISVDMEKVSTSFATGISDVAEAYAAAMQSALADKQDDLPNQKSLQEKVKSISIHLNSDQTSAVSKLQDALRYLAYVVVCASMPSV

SEQ ID NO: 50078 - protein, 387 aa, Glycine max
  Clone ID: 700790392_FLI.pep
EEIRNAQRSHGPATILAFGTATPSNCVSQADYPDYYFRITNSEHMTDLKEKFKRMCEKSMIKKRYMHLTEEFLKENPNMCEYMAPSLDVRQDVVVMEVPKLGKQAATKAIKEWGQPKSKITHLVFCTTSGVDMPGADYQLTKLLGLRPSVKRLMMYQQGCFAGGTVLRLAKDLAENNKGARVLVVCSEITAVTFRGPSDTHLDSLVGQALFGDGAAALIIGSDPDPAVERPIFEMISAAQTILPDSDGAIDGHLREVGLTFHLLKDVPGIISKNIEKSLVEAFEPIGISDWNSIFWIAHPGGPAILDQVEEKLRLKPEKLQSTRHVLSEYGNMSSACVLFILDEMRKKSKEEGKSTTGEGLEWGVLFGFGPGLTVETVVLHSVPLEG

SEQ ID NO: 50079 - protein, 255 aa, Glycine max
  Clone ID: 700739601_FLI.pep
PIPKAYIQKFEAMKNVVIDTDLQYMEISISYGRNKYSDSVIITTKAITMTMDKIPKGFVSIDLSKNGFQGEIPNAIGELHALKGMNLSHNRLIGPIPQSMGNLTNLESLDLSSNMLTGGIPTELTNLNFLEVLNLSNNHLAGEIPGGQQFNTFPNDSYKGNSGLCGLPLTIKCSKDPEQHSPPSTTLRKEGGFGFGWKPVAIGYGCGMVFGVGMGCCVLLIGKPQWLVRMVGGQLNKKVKRKTRMRSNENGSRMN

SEQ ID NO: 50080 - protein, 739 aa, Zea mays
  Clone ID: 700336269_FLI.pep
IIESKFKDLAVKLESAERSNSSHRYEVCMLQKQLEIRSEERKFSLKSADAAHKQHLENVRKITKLESECQRLRSMVRKRLPGPAAIAKMRSEVETVGIDTGITRMRKSNSVTSQNPCALVQNSHDTSHGNSPLLARLHAIEDENKVIKESLSRKDGELQFSRTMLARTTSKLSQVEAQLEDLSKGRSTAELVKGSPTVVENPLSSISEDGFNEDNVSCSGSWASALLSELEHFKKGKHTAHSSKSTGVSDMSFMDDFAEIEKLASLCNDKHVEQYGSKREATESSGKELVPVDVSTGTADQIRQPRIEKAVRKLIELIEGVIQRSSKDCSSTVVLSGGDEENGQGTLSGYVARAFLWNTSELTSVLQNFVFACNELLYGSTDVESFVHDLQVTLDWIMNHCFSLRDVSDMKEAIMKHLELNNSDGLEIVAVGSHTGIHTTDEPKTPENVQTSLLTDSSCVDIKPDVSKQRTCNEVAISKFEGIEEKASHLRAELNELKESRKVMVHVDGKSTMTECITHESIFISGQNTGKQEGVSCLEPKHQLERCSAKQGSKSVTENEDKDLQVELEISTASEKLIECRETIINLGKQLKALASPKDAILFDQVLQTAVRSERKPRSQSLSEMLSMEDGGFYYSGSPKTKEIICTEPSAPGEGNRPADDEGDGGSAAACSSSHPMPVAPHVKQACRVNRTCKGEADVKVVTLAVVPRKQKGNGGLLKRILTGRRKEAMAKQQVVLSS

SEQ ID NO: 50081 - protein, 398 aa, Zea mays
  Clone ID: 700343735_FLI.pep
VIEIPGDTSVIDAVRTLSEQNIRAAPVLNPEPGAPTDWQGRYLGVIDYSAIILWVLENAELAAVALSAASATAAGVGMGAVGAVGVAALGTTGPAAVAGLTAAAIGASVAGGLTAEKGVAKDGLTAADHLGEDFYKVLLQQEPFRSTTVRSIVESYRWSPFVPITLDTSMLTVLLLLSKYRLRNVPVIEPEKPIIRNFITQTGVVKGLQQCKGRDWFDYISALPLSDLGLPFMSIDEVITVNSDDLILEAFKCMKDNKIGGVPVVEGPKRKLVGSVSIRDIRFLLLRPNLFSNFRQLTVIEFMKTLGSTLPDSESNCLVKPPPTCTPDASLGSVIDSIASRITHRIYVVDDDLEVVGVVTLRDVISCFIHEPPGYCDNYLASAMEKLEGKGVRSVEKI

SEQ ID NO: 50082 - protein, 77 aa, Zea mays
  Clone ID: 700345539_FLI.pep
FVIQLATSCHVQKFESTTIATAMLSTNRRKSNSPLSLPVLSLHIADPSASLVGVEDVFVLPDPVALFSSLLHDDDQH

SEQ ID NO: 50083 - protein, 148 aa, Zea mays
  Clone ID: 700355817_FLI.pep
CDHHSSVDVVVGGHPVPVSEPDAVGDDLGAVLVAVPGVVCVCPVPDLQGGVAEAGLPEGRVARLRLREVVRDALDVAAIAYRDVDGRVPCPDGRAPGVDDIVGDVGHAVAALVRVDVAGDDEVGLGGDDPALELHPHRLALHVVVAVA

SEQ ID NO: 50084 - protein, 332 aa, Zea mays
  Clone ID: 700356833_FLI.pep
GSKLVGCGSAIPTLGVSNDDLSKIVETSDEWIAARTGIRNRRVLSGDETLRGLSIKAAQRALEMAKVKAEDVDLVLLCTSTPDDLFGGATQVLTDVGCTKAFGFDITAACSGFIVGLITATRFIKGGGFQNILVVGADALSKYVDWTDRGTCILFGDAAGAVLVQACSADEDGLLGFCVQSDGNGQKHLNAATANDESILSNTNGVPGFPPKKATYSCIQMNGKEVFRFAVRCVPQSIEKALQEAGLPASSIDWLLLHQANQRIIDAAASRLDIPSDKVISNLANYGNTSAASIPLALDEAVRSGKVKAGDIIAASGFGAGLTWGSAIVKWG

SEQ ID NO: 50085 - protein, 192 aa, Zea mays
  Clone ID: 700381984_FLI.pep
SRGGPTSVVIYDIHALQERFYFGDDVLPCFETGIPLLLQRLRQLPDAENITIAFPDDGAWKRFHKLLQHFPMIVCNKVREGDKRIVRIKEGLPEGRHVVIVDDLVQSGGTLRECQKVLALHGAAKVSAYVTHAVFPKQSYERFMASSSAGPGDRFAYFWITDSCPHTVKAIGQRPPFEVLSLAGSIADALQI

SEQ ID NO: 50086 - protein, 98 aa, Zea mays
  Clone ID: 700421751_FLI.pep
STPTTLSPFATTVIQAANSTHRGVQEIKHVTLRNLTRGPLHLPSTKYMQVQMIDRLASFSTIVDDNTVPTRYTFLFCHYFRCVKEPAQDFCMPWLSLV

SEQ ID NO: 50087 - protein, 111 aa, Zea mays
  Clone ID: 700423113_FLI.pep
SQEYRSHDQRDCGEHLDKNMQRRSSSVFEWVSNRVASNRSLVGLAALATKSASLNVLLCIIPGAASSVQEECHENPSDRRKHQHGGYNFSSKKRLTSVVAQNPEDNANGHG

SEQ ID NO: 50088 - protein, 303 aa, Zea mays
  Clone ID: 700456081_FLI.pep
QNKTMATASEIAAVGVIGAGQMGSGIAQLAAAGGCAVLLLDADPTALSRAVISISASLRRLAAKGQLSQAACEDSIKRIRCVSAVQDLRDADLVIEAVVENEAVKKKLFVELDKVTKPSAILASNTSSISITRLASATKRPSQVIGMHFFNPPPVMKLIEIIRGADTSDEVFAAVRSFSERLGKSVICSQDYPGFIVNRILMPMINEAFWALYTGVATKEDIDAGMKLGTNHPMGPLQLADFIGLDVCLSVLRVLHSGLGDSKYSPCPLLVQYVDAGRLGKKRGVGVYSYGHRPSSVRPKSSL

SEQ ID NO: 50089 - protein, 413 aa, Zea mays
  Clone ID: 700467207_FLI.pep
TTHWSQQTTTSPFRLLPVAPRFRRRYPAISATATRCRRRRSRREDRYRCRRQINWTCKTRACATCGVPEALFCQDSASLVAHMATSTSQHALSSIKLLSTGCLHPDKRNCRVLSVSVGRRCPSARNLGLLCASNSQSSVIQPVQLPRSPKSGVAPKKSGESALILIRHGESLWNEKNLFTGCVDVPLTPKGVDEAIEAGKRICNIPVDVIYTSSLIRAQMTAMLAMMQHRRKKVPIILHNESEQAHMWSQIYSEETKKQSIPVITAWQLNERMYGELQGLNKQETADRFGKEQVHEWRRSYDIPPPNGESLEMCAERAVAYFKDQIIPKLVDGKHVMIAAHGNSLRSIIMHLDKLTSQEVISLELSTGIPMLYIFKEGKFIRRGSPAGPSEAGVYAYTKNLAQYRQKLDGIVQ

SEQ ID NO: 50090 - protein, 281 aa, Zea mays
  Clone ID: 700467103_FLI.pep
AAERLADIKVAAGIPKDLDGDVVTVPKERNSGEMQVWKDLILSPTPAIRRILLSAVGLHFFQQASGCDSVVLYSPSVFRGAGITGDNKLLGVTCAVGVTKTLFILVATFLLDRVGRRPLLLTSTGGMVISLISLGTALTVVGHHPDAKIPSVVALCIASTLAFVAFFSIGLGPITGVYNSEIFPLQLRALGFAVGVACNRVTSAVISMTFLSLSKAITIGGSFFLYSGIAAVGWVFFFTCLPETRGRTLEEMGKLFGMPDTDMAEADDTAAKEKVVEMSTK

SEQ ID NO: 50091 - protein, 905 aa, Zea mays
  Clone ID: 700468220_FLI.pep
VHRKIIIVSVLSMPPWWGKSSSKEVKKSAKENLIDTFQRLISSNEQKGSRKSRSSRRHGKDTAGDKGCWSTAQSRSTSPSKEVSRCQSFAADRPHAQPLPLPKSRAKVTRTSSDITNSKSTLEKHGKGQLLPLPPIQPKKRPEATEPVTEVATASVSSNCSIDSDDPGDSQLQSPVGNEAENATRITATSSSSVVRKECSSAITRKNTKEVAKPNSAILSNQILSTSPRGTFADGYQSNLQSPRQIALESAPNSLMSSPSRSPRNICPVQIPTSAFWAIKPHTDVTFLGSGQCSSPGSGQTSGHNSVGGDMLGPIFWQPSRGSPECSPIPSPRMTSPGPSSRVHSGSVSPLHPRAGGVTPESPTNRHAEGNKKQTHRLPLPPLSIANSSTFLPNSSNPTSPISRSPGRTENPPSPGSRWKKGKLIGRGTFGHVYVGFNSDRGEMCAMKEVTLFSDDPKSKESAKQLCQEISLLSRLQHPNIVRYYGSETVDDKLYIYLEYVSGGSIHKLLQEYGQFGEQAICSYTKQILLGLAYLHAKNTVHRDIKGANILVDPNGRVKLADFGMAKHINGQQCPFSFKGSPYWMAPEVIKNASGCNLAVDIWSLGCTVLEMATSKPPWSQYEGIAAMFKIGNSKELPPIPDHLSEEGKDFIRQCLQRDPSSRPTAVDLLQHPFVQNAPPLEKSSASHPLEQLTAISCRTNSKVVEHARNMSSLGLEGQSILQRRAAKFSLPNSDIHIRSNISCPVSPCGSPLLRSRSPQHQNGRMSPSPICSPRTTSGASTPLTGGSGAVPLNHVRQPAYRNEGFTVTSRGFDDHMPSRPVDPVHGRFIRVQQFSVGRQERVVSEVDILSSQYGKMRHANVWDPHDRPLPSERSSQQCFGNHAKLKPSLDLRSGPRHPGRNHGH

SEQ ID NO: 50092 - protein, 371 aa, Glycine max
  Clone ID: 700554168_FLI.pep
LDYLGRNGDSMGGTGWKMTEFGWDVKYAGVQTLVAKFLMQGKAGHHAPVFERYQQKAESFMCSCLGKGDRNVQKTPGGLIFRQRWNNMQFVTSASFLATVYSDYLASSGRNLRCSSGNVPPAELISLAKSQVDYLLGDNPRATSYMVGYGSNFPQRVHHRGSSIVSIKVNPSFVSCRGGYATWFSSKRSDPNLLTGALVGGPDAYDDFADERDNYEQTEPATYNNAPLIGILARLGGGHGGYNQLLPVVVPAPKPVVTKPQPTPSPKTTPPPASWSGPISIEQKMTTSWIAHGITYYRYSTVVTNKSNKSLNSLNLSISKLYGPIWGVTKSGDSYTFPSWLSSLSAGKSLEFVYIHSASAADVSVTNYVLA

SEQ ID NO: 50093 - protein, 495 aa, Glycine max
  Clone ID: 700553993_FLI.pep
ISFNNFSGSIPPAFQNLRRLTWLYLQNNSISGAIPDFNLPSLKHLNLSNNNLNGSIPNSIKTFPYTSFVGNSLLCGPPLNHCSTISPSPSPATDYQPLTPPTTQNQNATHHKKNFGLATILALVIGVIAFISLIVVVICVFCLKKKKNSKSSGILKGKASCAGKTEVSKSFGSGVQGAEKNKLFFFEGSSHSFDLEDLLKASAEVLGKGSYGTAYKAVLEEGTTVVVKRLKEVVVGKKEFEQQLEIVGRVGSHPNVMPLRAYYYSKDEKLLVYNYMPGGSLFFLLHGNRGAGRTPLDWDSRVKILLGAAKGIAFIHSEGGPKFAHGNIKSTNVLINQELDGCISDVGLPPLMNTPATMSRANGYRAPEVTDSKKITHKSDVYSFGVLLLEMLTGKTPLRYPGYEDVVDLPRWVRSVVREEWTAEVFDEELLRGQYVEEEMVQMLQIALACVAKGPDQRPRMDQVVRMLEEIKHPELKNYHRQSSESESNVQTPTP

SEQ ID NO: 50094 - protein, 210 aa, Glycine max; identical to SEQ ID NO: 44100
  Clone ID: 700554545_FLI.pep

SEQ ID NO: 50095 - protein, 360 aa, Glycine max
  Clone ID: 700555826_FLI.pep
WKCLMVNNMIVQIHHGRLSENDSRRYFQQLIDGVDYCHSKGVYHRDLKPENLLLDSLGNIKISDFGLSAFPEQGVSILRTTCGTPNYVAPEVLSHKGYNGAVADVWSCGVILYVLLAGYLPFDELDLTTLYSKIERAEFSCPPWFPVGAKMLIHRILDPNPETRITIEQIRNDEWFQRSYVPVSLLEYEDVNLDDVNAAFDDAEEPRADQQCDNDDMGPLMLNAFDLIILSQGLNLATIFDRGQDSVKYQTRFISQKPAKVVLSSMEVVAQSMGFKTHIRNYKMRVEGVSANKTSYFSVILEIFEVAPTFYMVDIQKAAGDTGEYLKFYKNFCSNLEDIIWKPPHEASKSRISKTKSKRR

SEQ ID NO: 50096 - protein, 553 aa, Glycine max
  Clone ID: 700555654_FLI.pep
VEAVVHACELAAEWRQTFHSDVVVDLVCYRRFGHNEIDEPSFTQPKMYKVIRSHPSTLEIYEKKLLESGELTQEEIDRIHKKVTSILNEEFLASKEYIPKRRDWLSAYWLGFKSPEQLSRIRNTGVKPEILKNVGKAITTIPENFTPHRAVKRIYEQRAQMIETGEDIDWGFAEALAYATLLIEGNHVRLSGQDVERGTFSHRHAVVHDQTTGEKYCPLDNVIMNQDEEMFTVSNSSLSEFGVLGFELGYSMENPNSLIIWEAQFGDFANGAHVIFDNFLASGEAKWLRQTGLVVLLPHGYDGQGPEHSSARLERFLQMADDNPHVIPEMDPTLRKQIQECNLQIVNVTTPANFFHVLRRQVHREFRKPLIVMSPKNLLRSKACRSNLSEFDDVQGHPGFDKQGTRFKRLIKDQNEHKDVEEGIRRLVLCSGKVYYELDEHRTKVDAKDVAICRVEQLCPFPYDLVQRELKRYPNAEVVWCQEEPMNMGGYTYILPRLISSMKAVNRGGYDDVKYVGRAPSAATATGFLKVHQKEQTEIAEKALQQEPIDFPF

SEQ ID NO: 50097 - protein, 361 aa, Glycine max
  Clone ID: 700555881_FLI.pep
LFFIFEYMDCNLYQLIKEREKPFSEEEIRCFMRQVLQGLSHMHKKGFFHRDLKPENMLVTNDVLKIADFGLAREVSSMPPYTQYVSTRWYRAPEVLLRAPCYTPAVDMWAVGAILAELFTLTPIFPGESEIDQLYKIYGILGMPDSTAFTIGASNSQLLDIVAHEVVPPVKLSNIIPNASLEAIDLITQLLHWDPSRRPDADQSLQHPFFHVDAWVPCPPSDPLELKLSSKRAKPNLELKLQDFGPDPDDCFLGLTLGVKPSVSNSDVVQNVSQGVRENVLFCSDFNDHSDQSVFWTLLSPDQNGIHNSAETSLSLSFSPVQHPPIGVPQSVGFSFQPLQPNILTSPFLALSSPFQRGHCL

SEQ ID NO: 50098 - protein, 615 aa, Glycine max
  Clone ID: 700556046_FLI.pep
RTLPVRDELLRALLNSDLIGFHTFDYARHFLSCCSRMLGISYQSKRGYIGLEYYGRTVSIKILPVGIHIGQLQSVMSHPETESKVAELKKQFRDQTVLLGVDDMDIFKGISLKLLAMEQLLLQHPDKRGRVVLVQIANPARGRGKDVQEVQSETYATMKRINNAFGRPGYTPVVLIDTPLQSYERIAYYVIAECCLVTAVRDGMNLIPYEYIICRQGNEKIDEILGTDLLTQKKSMLVVSEFIGCSPSLSGAIRVNPWNIDSVAEAMDSALMVPEAEKQMRHEKHYRYVSTHDVAYWARSFLQDLERACRDHLRRRCWGIGFGLGFRVIALDPNFRKLSVEHIVSAYKRTKHRAILLDYDGTMVQPGSMSLTPNAEAVSILNILCRDTKNCVFIVSGRERKTLTEWFSSCERMGIAAEHGYFVRTNRNAEWDTCIPVPDFEWKQIAEPVMQLYMETTDGSNIEAKESALVWNYEYADRDFGSCQAKELFDHLESVLANEPVSVKSSPNIVEVKPQGVSKGIVAERLLLTMQQKGVFPDFVLCIGDDRSDEDMFGVIMNAKATLSPVAEVFPCTVGQKPSKAKYYLEDTSEILRMLQGLANASEHSTRTSLQPASH

SEQ ID NO: 50099 - protein, 464 aa, Glycine max
  Clone ID: 700556612_FLI.pep
SSLAARVLAQLLLDLRKMGKEKVHISIVVIGHVDSGKSTTTGHLIYKLGGIDKRVIERFEKEAAEMNKRSFKYAWVLDKLKAERERGITIDIALWKFETTKYYCTVIDAPGHRDFIKNMITGTSQADCAVLIIDSTTGGFEAGISKDGQTREHALLSFTLGVKQMICCCNKMDATTPKYSKARYDEIVKEVSSYLKKVGYNPDKIPFVPISGFEGDNMIERSTNLDWYKGPTLLDALDQISEPKRPSDKPLRLPLQDVYKIGGIGTVPVGRVETGVLKPGMVVTFAPTGLTTEVKSVEMHHESLTEAHPGDNVGFNVKNVAVKDLKRGYVASNSKDDPAKEAANFTAQVIIMNHPGQIGNGYAPVLDCHTSHIAVKFAELMTKIDRRSGKELEKEPKFLKNGDAGFVKMIPTKPMVVETFSEYPPLGRFAVRDMRQTVAVGVIKNVEKKDPTGAKVTKAAQKKK

SEQ ID NO: 50100 - protein, 416 aa, Glycine max
  Clone ID: 700556361_FLI.pep
LSKRKSYATRTIFFLTPRGTLKPVAIELSLPHAGPNSRSKRVVTPPVDATTNWMWQLAKAHVCSNDAGVHQLVNHWLRTHANLEPFILAAHRQLSAMHPIFKLLDPHMRYTLEINALARQSLINADGIIENCFTPGRYAMEISSAAYKNFWRFDMDSLPADLIRRGMAVPDPTQPHGLKLILEDYPYAADGILIWSAIEDWVRTYVNHYYPHSSLICNDKELQSWYSESINVGHADLRHESWWPTLNNSEDLVSILSTLIWNASAQHAALNFGQYPYGGYVPNRPPLMRRLIPEEGDPEYASFHADPQKYFLNALPSLLQATKFMAVVDTLSTHSPDEEYLGERQQPSIWSGDAEIVEAFYDFSAKVRQIEKVIDSRNLDRTLRNRCGAGVLPYELLAPSSEPGVTCRGVPNSVST

SEQ ID NO: 50101 - protein, 698 aa, Glycine max
  Clone ID: 700557225_FLI.pep
SFPIFSFRDLSSNMLTGSIPDSFQDLGNLNYLFLTNNSLSGPIPDWILSIKQQIDLSLNNFTKTSANNCQRPDLNLASSLSRTASTSISCLKMGQPCSGKPQFHSLFINCGGPETKFEGNEYEADLSPLGISNYVPGNSGKWAYSSTGVYLGNAKADYIATNQLSLDINGPDYYHTARIAPLYLNYYGLCMLNGNYKVKLHFAEIAFSDDQSYCNLGKRVFDVSIQGFKYLKDFNIAKEAGGVGKGITREFNVNVTESTLEIHLSWAGKGTNAIPIIGVYGPLISAITVTPNFKVYAHGFSTGTIVGIVAGACVIVILMLFALWKMGFLCQKDQTDQELLGLKTGYFSLRQIKAATNNFDPANKIGEGGFGPVFKGVLSDGAVIAVKQLSSKSKQGNREFINEIGMISALQHPNLVKLYGCCIEGNQLLLVYQYMENNSLARALFGKEHERMQLDWPRRMQICLGIAKGLAYLHEESRLKIVHRDIKATNVLLDKHLHAKISDFGLAKLDEEENTHISTRIAGTIGYMAPEYAMRGYLTDKADVYSFGIVALEIVSGKSNTNYRPKEEFVYLLDWAYVLQEQGNLLELVDPSLGSKYSSEEAMRMLLLALLCTNPSPTLRPCMSSVVSMLEGKTPIQAPIIKRGDSAEDVRFKAFEMLSQDSQTHVSSAFSEESIEQRSKSMGGPWLDSSISLPSRID

SEQ ID NO: 50102 - protein, 408 aa, Glycine max
  Clone ID: 700557849_FLI.pep
FHTFFLLLEMALQAASLVPASFSVLKEGKSGVSLKDSTLFGLSFSEPIKANFSSSALRCKREFEQKLCAVRAETVATASPAVTKSTPEGKKTLRKGSVVITGASSGLGLATAKALAETGKWHVIMACRDYLKAARAAKSAGMAKENYTIMHLDLASLDSVRQFVDNFRRSEMPLDVLVCNAAVYLPTAKEPTFTAEGFELSVGTNHLGHFLLSRLLLEDLEKSDYPSKRLIIVGSITGNTNTLAGNVPPKANLGDLRGLQGGLNGLNSSAMIDGGDFDGAKAYKDSKVCNMLTMQEFHRRFHEETGITFASLYPGCIATTGLFREHIPLFRTLFPPFQKYITKGYVSEDEAGKRLAQVVSDPSLTKSGVYWSWNKASASFENQLSQEASDTEKARKIWEISEKLVGFA

SEQ ID NO: 50103 - protein, 646 aa, Glycine max
  Clone ID: 700561685_FLI.pep
TTTATTTTTLQCVVMFLSALFFGIKEVKSMDSDYGIPRELSDLQKIRSLYQPELPPCLQGTTVRVEFGDATTTADPTDALTISRAFPNTYGHPLAHFLRATAKVPDAQIITEFPPIRVGIVFCGRQSPGGHNVIWGLHNALKIHNPNSVLLGFLGGSEGLFAQKTLEITEDILSTYKNQGGYDLLGRTKDQIRTTEQVNAALAACNNLKLDGLVIIGGVTSNTDAAQLAETFAVAKCPTKVVGVPVTLNGDLKNQFVETNVGFDTICKVNSQLISNVCTDALSAEKYYYFIRLMGRKASHVALECTLQSHPNMVILGEEVAASKLTLSEIAKQITDAVQARAEQDKYHGVILLPEGLIESIPEVYALLKEIHGLLRQGVAVDKISSQLTPWASALFEFLPPFIRRQLLLYPESDDSAQLSQIETEKLLAYLVEVEINKRLKEGTYKGKKFNAICHFFGYQARGSLPSKFDCDYAYVLGHICYHILAAGLNGYMATVTNLKNPVNKWRCGAAPIASMMTVKRWSPNPGATSIGKPAIHPATVDLRGKAYELLRQKAQSFLMDDIYRNPGPLQFDGPGAGAKVITLSVEDQDYMGRIKKLQEYLEQVRTIVKPGCPQEVLKAALSVMASVTEVLAAMSTSSTNTLSAM

SEQ ID NO: 50104 - protein, 454 aa, Glycine max
  Clone ID: 700563109_FLI.pep
VLSHESTVAEEVRKPMPETESAAAAAVEEENNTALFGKYEVGRLLGCGAFAKVYHARNTETGQSVAVKVISKKKLNSSGLASNVKREISIMSRLHHPNIVKLHEVLATKTKIYFILEFAKGGELFARIAKSRFSEDLARRYFQQLISAVGYCHARGVFHRDLKPENLLLDEQGNLKVSDFGLSAVKDQIGVDGLLHTLCGTPAYVAPEILAKKGYDGAKVDVWSCGIILFVLVAGYLPFNDPNLMVMYKKIYKGEFRCPRWFSMELRRILTRLLDTNPDTRITVDEIMKDTWFKKGYKEVKFGDLGLEWKSEGEGVKDLNAFDIISFSTGLNLSGLFDSSCGVEEGERFLLRESPEKVVEMLVAAAEKEGVVVRMRKECGVELEGCGGNFAALVEVYRLPGELVVVEVRRRDGDGGVFRDVWRNKLRPCLCAASSSTTSDRDGTTLAQPVAGDS

SEQ ID NO: 50105 - protein, 389 aa, Glycine max
  Clone ID: 700563354_FLI.pep
VVELYEVMASKTKIYFVMEHAKGGELFNKVVKGRLKVDVARKYFQQLISAVDYCHSRGVCHRDLKPENLLLDENENLKVSDFGLSALAESKCQDGLLHTTCGTPAYVAPEVINRKGYDGIKADIWSCGVILYVLLAGHLPFQDTNLMEMYRKIGRGEFKFPKWFAPDVRRFLSRILDPNPKARISMAKIMESSWFKKGLEKPAITVTENEELAPLDADGIFEACENDGPIAEPKQEQAKPCNLNAFDIISFSTGFDLSGLFEDTFLKKETRFMSKKPASIIVLKLEEICKRLCLKVKKKDGGLLKLEGSKEGRKGTLGVDAEIFEITPHFHMVELRKSNGDTMEYQKLFKQDIRPALKDIVWTWQGEKPQQEQEQHEVVQEEHQPSHTA

SEQ ID NO: 50106 - protein, 541 aa, Glycine max
  Clone ID: 700563530_FLI.pep
RTSGGPFIATSYDYDAPIDEYGIIRQPKWGHLKEVHKAIKLCEEALIATDPTITSLGPNLEAAVYKTGSVCAAFLANVDTKSDVTVNFSGNSYHLPAWSVSILPDCKNVVLNTAKINSASAISSFTTESLKEDIGSSEASSTGWSWISEPVGISKADSFPQTGLLEQINTTADKSDYLWYSLSIDYKGDAGSQTVLHIESLGHALHAFINGKLAGSQTGNSGKYKFTVDIPVTLVAGKNTIDLLSLTVGLQNYGAFFDTWGAGITGPVILKGLANGNTLDLSYQKWTYQVGLKGEDLGLSSGSSGQWNSQSTFPKNQPLIWYKTTFAAPSCSDPVAIDFTGMGKGEAWVNGQSIGRYWPTYVASDAGCTDSCNYRGPYSASKCRRNCGKPSQTLYHVPRSWLKPSGNILVLFEEKGGDPTQISFVTKQTESLCAHVSDSHPPPVDLWNSDTESGRKVGPVLSLTCPHDNQVISSIKFASYGTPLGTCGNFYHGRCSSNKALSIVQKACIGSSSCSVGVSSETFGNPCRGVAKSLAVEATCA

SEQ ID NO: 50107 - protein, 525 aa, Glycine max
  Clone ID: 700564288_FLI.pep
DMAFDAYFLLGLIALVLVSTSKVTCELEADTVSPVIDISLNRNSFPEGFIFGAGSSSYQFEGAANDGGRGPSVWDTFTHNYPGKIIDRSNGDVAIDSYHHYKEDVGMMKDMNLDSYRFSISWSRILPKGKLSGGINQEGINYYNNLINELMANGIQPLVTLFHWDLPQALEDEYGGFLSPRIVKDFRDYADLCFKEFGDRVKHWVTLNEPWSYSQNGYANGRMAPGRCSAWMNLNCTGGDSSTEPYLVTHHQLLAHATAVRVYKTKYQASQKGLIGITLVANWFLPLRDTKSDQKATERAIDFMYGWFMDPLISGDYPKSMRSLVRTRLPKFTTEQSKLLISSFDFIGLNYYSTTYASDSPQLSNARPSYLTDSLVTPAYERDGKPIGIKIASDWLYVYPRGIRDLLLYTKEKYNNPLIYITENGINEYDEPILSLEESLMDTFRIDYHYRHLFYLQSAIRNGANVKGYYVWSLFDNFEWSSGYTSRFGMIFVDYKNELKRYQKLSALWFKNFLKRKTRLYASSK

SEQ ID NO: 50108 - protein, 551 aa, Glycine max
  Clone ID: 700564796_FLI.pep
LGSNSQKMETDRERPHRSTSELFVCFTSRLSSSSMKLSSKSILSPSRSRDPPQISLSSSLSRRLKSNGSIKGGGGGQASPMFPTGGGGKRRGCGFENPEPSSPKVTCIGQVRVKTKKQGKKHEELVGEEEEQARVSICIPPKNALLLMRCRSDPVKMAALANRFWESPVHKDKCQEEQQDDEEESGDEEEEQEDDKEQHHKMKDEQQEEALEQVEREAIEDSICERETETAVVATENDEEEQDGKESYEIVCRENLESQVFTEVVKEEEKVDEEEAANGGNAIEEGETLTHPEAYSDLENLKTEEKEANLEEGKEERENNDSSELSSTPETFAASEKENDGAEAETEPVTVETSEGSTEEEEEKVIEPKEQPQQPGPTREPNSDPESMERENGSKREERDREALPECLLLMMCEPKLSMEVSKETWVCSTDFIRWLPERTAAGGGNRVAAETLAKSKPKPKPMMQPPRSSCSFPAARGGAGVSMAAMIEQKLMGSKSGNGYEPFVLTRCKSEPMRSSAKLAPEACFWNNRKLEPHPPAAQLGVGAPAGIGF

SEQ ID NO: 50109 - protein, 593 aa, Glycine max
  Clone ID: 700565777_FLI.pep
EYLGTVPPETPYSEFEHKFQEIGLERGWGDNAERVLESIQLLLDLLEAPDPCTLETFLGRIPMVFNVVILSPHGYFAQDNVLGYPDTGGQVVYILDQVRALENEMLHRIKQQGLDIVPRILIITRLLPDAVGTTCGQRLEKVFGTEHSHILRVPFRTEKGIVRKWISRFEVWPYLETYTEDVAHELAKELQGKPDLIVGNYSDGNIVASLLAHKLGVTQCTIAHALEKTKYPESDIYWKKLEERYHFSCQFTADLFAMNHTDFIITSTFQEIAGSKDTVGQYESHTAFTLPGLYRVVHGIDVFDPKFNIVSPGADQTIYFPHTETSRRLTSFHPEIEELLYSSVENEEHICVLKDRSKPIIFTMARLDRVKNITGLVEWYGKNAKLRELVNLVVVAGDRRKESKDLEEKAEMKKMYGLIETYKLNGQFRWISSQMNRVRNGELYRVICDTRGAFVQPAVYEAFGLTVVEAMTCGLPTFATCNGGPAEIIVHGKSGFHIDPYHGDRAADLLVDFFEKCKLDPTHWDKISKAGLQRIEEKYTWQIYSQRLLTLTGVYGFWKHVSNLDRRESRRYLEMFYALKYRKLAESVPLAAE

SEQ ID NO: 50110 - protein, 373 aa, Glycine max
  Clone ID: 700566155_FLI.pep
VNLMKTEMMTNVTEYEAIAKEKLPKMVYDYYASGAEDQWTLKENRNAFSRILFRPRILVDVSKIDLTATVLGFKISMPIMIAPTAMQKMAHPEGELATARAASAAGTIMTLSSWATSSVEEVASTGPDIRFFQLYVFKDRNVVAQLVRRAERAGFKAIALTVDSPILGRREADIKNRFTLPPNLVLKNLEGLDLGKLDKTSDSSLASYVAEQIDQSLNWKDIKWLQSITSLPIVVKGVLTAEDTRIAIQAGAAGIIVSNHGARQLDYVPATIMALEEVVKAAQGKIPVFLDGGIRRGTDVFKALALGAAGVFIGRPVVFSLAADGETGVRKVLQMLRDEFELTMALSGCRSLKEITRDHVITEWDHPRFSPKL

SEQ ID NO: 50111 - protein, 122 aa, Zea mays
  Clone ID: 700577561_FLI.pep
FFQGTIGAWKRCNQDILYNQNVQSVVPYHSRLAAKGYRALIYSGDHDRIVPFVGTQAWIRYLNLTVVDDWRPWYVGGQVAGFTRNSGNLTYATVKGAGHTAPEYKPTECQTMFRKWVSRDPL

SEQ ID NO: 50112 - protein, 109 aa, Zea mays
  Clone ID: 700579611_FLI.pep
RGRWCGGGGEGPAGGVRRVRRQQGRAHLRRGARHRAALARLHRQGRRRLPRHDTPRYKGPFFGGIRLSLSSPSVTRPAALSRSRTSRRRRTCTHAKGWESERGIRGGQR

SEQ ID NO: 50113 - protein, 238 aa, Zea mays
  Clone ID: 700581401_FLI.pep
WPEGVPTAASVQEILFFQAQTMEMMYKIIADELKATDNKDMHPEDYLNFFCLGNREEPPSNGSPESEKSTDKSAAALASKYRRFMIYVHAKGMIVDDEYVILGSANINQRSLAGSRDTEIAMGAYQPHYAWSTKNGHPHGQVYGYRTSLWAEHLGTVDDRFKDPSSLECVRFVNQIAVENWQRFTAEEMSTLQGHLLKYPVKVEADGKISPLSDQECFPDVGGKILGAPTSLPDSLTM

SEQ ID NO: 50114 - protein, 111 aa, Glycine max
  Clone ID: 700676275_FLI.pep
ECGQSEELQVANHLDRMVSTLRRNPLKVLVQVNTSGEESKSGIDPSNCVDLINTKRCETQKEKKKIIEKYFKKFMIYSLTQPIQKLVGISTKHNNIRTLLVLHAAKEGTYR

SEQ ID NO: 50115 - protein, 421 aa, Glycine max
  Clone ID: 700676565_FLI.pep
NHKCSSSVNTQTLFLFQSTVPLPRTHQTMEGDGYCGSFFQRCKPYIAMISLQFGFAGMNIITKVSLNRGMSHYVLVVYRHAFATAAIAPFAIVLERKVRPKITFLMFMQIFVLGLLGPVIDQNLYYAGLKFTSPTYSCAISNMLPAMTFVMAAIFRMEKLNVRKVRCQAKVIGTVVTVAGAMLMTLYKGQVISFLGSKYMHHPRNYVPENNTDSGEKDWFKGSVLLVLATLSWASFFILQAVTLRKYPAQLSLTALVCALGTLQSIAVTFVMEHKPSVWTIGWDMNLLAAAYAGIISSGITYYVQGIVMQKKGPVFVTAFSPLMMIIVAIMGTFILAEKIYLGGVIGAILIVMGLYSVLWGKHKENKEKEAEITIEVLKCCSENGMRLETVVEDAETNNDIEMQKGEASRELRVAIGVPKV

SEQ ID NO: 50116 - protein, 150 aa, Glycine max
  Clone ID: 700676705_FLI.pep
VNLLEQNFGNERKLESERKDRLAMELGLDPRQVAVWFQNRRARWKNKKLEEEYSSLKKNHEATLLEKCCLESEVLKLKEQLSEAEKEIQRLLESAERVPSNSSSSSQSQSMEAVDPPFFGEFGVDGYEDDVFYVPETHYINGMEWINLYM

SEQ ID NO: 50117 - protein, 489 aa, Glycine max; identical to SEQ ID NO: 43983
  Clone ID: 700676766_FLI.pep

SEQ ID NO: 50118 - protein, 106 aa, Glycine max
  Clone ID: 700677410_FLI.pep
GEMIDVLLIMGRRFPFLDEDVIRLLLNIPLWEVANLDQPSGIGDKRILREVAELLGLYEAAVLPKRAIQFGSRIARESNRKNFGSNRAANQASAGSVTIHRKSNFC

SEQ ID NO: 50119 - protein, 227 aa, Glycine max
  Clone ID: 700677709_FLI.pep
GNYGQDHQALQHSSSSAPLVRDDCLTQAPQLELVGHSIGYAPFIGMPHARMALPLEMAQEPVYVNAKQYQGILRRRQARAKAELEKKLIKVRKPYLHESRHQHAIRRARGNGGRFAKKTEVEASNHMNEEKDMGTGQVPLSRSISSSGFGSLPSDSAETWNSPSVQQGARGSQVHERFEERNYANVLQSSSTSCLHSGERAEEGDCSGQQRGSISSEHTSQRRLAIQ

SEQ ID NO: 50120 - protein, 110 aa, Glycine max
  Clone ID: 700678221_FLI.pep
KLLTSDFCFITQVLELDSRNVKALYRRAQAYLHLVDLDLAEMDIKKALEIEPNNRDVKMEYKILKQKVREHNKKDAQFYGSIFAKMNKLEQARTATAKQEPVPMTIDSKA

SEQ ID NO: 50121 - protein, 385 aa, Glycine max
  Clone ID: 700678487_FLI.pep
KFFHQVMGFLVLLLFSLLGLSSSSSISTHRSILDLDLTKFTTQKQVSSLFQLWKSEHGRVYHNHEEEAKRLEIFKNNLNYIRDMNANRKSPHSHRLGLNKFADITPQEFSKKYLQAPKDVSQQIKMANKKMKKEQYSCDHPPASWDWRKKGVITQVKYQGGCGSGWAFSATGAIEAAHAIATGDLVSLSEQELVDCVEESEGCYNGWHYQSFEWVLEHGGIATDDDYPYRAKEGRCKANKIQDKVTIDGYETLIMSDESTESETEQAFLSAILEQPISVSIDAKDFHLYTGGIYDGENCTSPYGINHFVLLVGYGSADGVDYWIAKNSWGEDWGEDGYIWIQRNTGNLLGVCGMNYFASYPTKEESETLVSARVKGHRRVDHSPL

SEQ ID NO: 50122 - protein, 266 aa, Glycine max
  Clone ID: 700678490_FLI.pep
VSLRTFGSPDISDTYSLLVLNITFRTTADDLFPLFDKYGKVVDIFIPKDRRTGESRGFAFVRYKYADEAQKAVERLDGRMVDGREITVQFAKYGPNAERIHKGRIIETSPRSRRSRSRSPRKRHRDDYRDRDYRRRSRSRSYDRYERDRHRGRDKDYRRRSRSRSASLDYKGRGRGRYDDERNSRSRSRSVDSRSPARRSPSPRRSPSPQRSTSPQRSTSPRKSPRGESPANRSCEERSPTPRSVSPRGRPDASRSPSPRNSNGDE

SEQ ID NO: 50123 - protein, 170 aa, Glycine max
  Clone ID: 700680406_FLI.pep
VSNFPSSVRRLSQSAKLINPSIISISTSPIGNHSGEGHSAHRLHNSRRVLRRQWCIPPVLVFSRRSLEQLSDPLLLLFFLLVAAALLCNVVQIQRRDPVLHHAVRGKTVREVSEFTVVLVVRTPTVFHGGDRLVVLRRVIRIRVRVAPVSVFFDKIKGATVHFCDLKLMS

SEQ ID NO: 50124 - protein, 246 aa, Glycine max
  Clone ID: 700680464_FLI.pep
RTMKVHISKTKRSHFPLFKESQSMARSTLPPETTIPIWLQSFHAGFFWKVSDRTAARPIAPLGSTTTLRISKHSFMAFIISLSSTVIISSTRSRTTGHVKSPRNARSPSAIVLVSGNRIILPAALDCAASSAPLGSAAKIRIAGLMDLAANAIPDIKPPPAVSFVGKSRSRFWNLCDFYNILVHNLSEKKVNKPLMGTTSVSICGACSRISKDMVPWPLNMRPSLYGCIKIAPLSCHTLLAISSLD

SEQ ID NO: 50125 - protein, 61 aa, Glycine max
  Clone ID: 700680759_FLI.pep
LMLDPKVKERAIELAKAMENEDGVTGAVKAFFKQLPQKKSELVADLHQTGFFSVRRCFGCS

SEQ ID NO: 50126 - protein, 71 aa, Glycine max
  Clone ID: 700681442_FLI.pep
PKSGVSPTAFESGTTKTSSYREKTSGLRICIRLWFFLRKLFKKCFHSSCHSILIFHGLSKFNCTFLYLELY

SEQ ID NO: 50127 - protein, 277 aa, Glycine max
  Clone ID: 700681379_FLI.pep
REGRAKPKGISLCCVPPPALEMSSADTVNASSAESVKEPVIGSSLEAKQDDTEIKSQVDAMWEQMNKGVSNKTLNRFTSKPNSAPKKTAKKTSSNWMSYLALAPKATESLGQGASKNGPGILQSSTSDEAKKLAAAALAAVKDDAAMAASSRGKLVITEVRDFAGQEIEVKKLVDSDSKEAMERAKAPPPSAVDTVLEQIKKKQKLSVLDKTKKDWGEFKEEKRLEEELDAYKKSSNQYLDKVSFLQRADYREFERERDARLALQSRKRPDNMQEDD

SEQ ID NO: 50128 - protein, 311 aa, Glycine max
  Clone ID: 700682056_FLI.pep
EMAGDSKSKILFIGGTGYIGKFIVEASAKAGHPTFLLVRESTLSNPAKSPLIDNFKGLGVNLVLGDLYDHQSLVSAIKQVDVVISTVGHLQLADQDKIISAIKEAGNVKKFYPSEFGNDVDRTHAVEPAKSAFATKAKVRRAIEAEGIPFTYVSSNFFAGYFLPNLSQPGATAAPRDRVIILGDGNPKAVFNKEEDIGTYTINSVDDPRTLNKILYIRPPANTLSFNELVTLWEGKIGKTLERIYVPEEQLLKQIEESAPPVNVILSINHSSYVKGDHTNFEIESSFGVEASALYPDVKYITVDEYLNQFV

SEQ ID NO: 50129 - protein, 320 aa, Glycine max
  Clone ID: 700681962_FLI.pep
ELTTYAPLTIVCDGCFSNLRRSLCNPKVDIPSCFVGLVLENCELPCANHGHVILGDPSPILFYPISSTEIRCLVDVPGQKVPSISNGEMEKYLKTMVAPQIPPQLYDAFIAAVDKGNIRTMPNRSMPADPHPTPGALLMGDAFNMRHPLTGGGMTVALSDIVVLRNLLSPLSDLNDAPTLCKYLESFYTLRKPVASTINTLAGALYKVFCASPDLARKEMRQACFDYLSLGGLFSEGPVSLLSGLNPRPLSLVLHFFAVAIYGVGRLLLPFPSPKRVWIGARLISGASAIILPIIKAEGIRQMFFPATVPAYYRTPPVAQ

SEQ ID NO: 50130 - protein, 230 aa, Glycine max
  Clone ID: 700682513_FLI.pep
EKIMLARQTGLTRNQVANWFINARVRLWKPMVEEMYKEEFGDSEMNCNLSSENNTVKCKKDDLVQESDNINNNNKWEETQDNLVTVDSVQVQPQAELDRGVNVENVVMDSGTGKLQGDQNQQRLGMNNNNNFYSISTNQNDGGLMGCSTHATYDLSELGNFTVGSHVSLALELRNCESDGFAMSDDAIRKRRNQALASSPETDLLDYHFTDSGKQQHRFGNPHLLHEFVV

SEQ ID NO: 50131 - protein, 97 aa, Glycine max
  Clone ID: 700682749_FLI.pep
STMADCSLPSFLSGNYGESVDLGEICLGLLQVQTWMISWCGAVMKRGPVIVLGILTAAKIHPECSKQVSMVQSNMPQGTDPRKAAFTELPNLENGEA

SEQ ID NO: 50132 - protein, 165 aa, Glycine max
  Clone ID: 700683072_FLI.pep
FRTTVTFPSSLKTVSCSSPQHEQQQSPRKKNENKLAKLAIVALAAGVLTLGSVHDASAAKTGGRIGGQAFKSAAPRSSPRINNSRTNIYINPRVAPPLVGGYGYGYGVPFYGGWGWSPFSFFAPGPSVAVGVGGGFDTILLFMFLGAAAAVVRRFFGSRNEDDDY

SEQ ID NO: 50133 - protein, 83 aa, Glycine max
  Clone ID: 700682988_FLI.pep
GSAPMQDNSGSSVTISSPQVSPTHARINYKDGAFFLIDLRSEHGPGSLTTKESSTGYLLIILLASVHLMLFSLVLRRFRSVLR

SEQ ID NO: 50134 - protein, 227 aa, Glycine max
  Clone ID: 700683196_FLI.pep
RHRNLLPLLAHVSRPGCHYLVYEFMKNGSLHDTLSKVEVGEFELDWLSRHKIALGVAAGLEYLHLNHNPRIIHRDLKPANILLDDDMEARIADFGLAKAMPDYKTHITTSNVAGTVGYIAPEYHQILKFTDKCDIYSFGVILGVLVIGKLPSHEFFQHTEEMSLVKWMRKILSSENPKEAIDTKLLGNGYEDQMLLVLKIACFCTMDDPKERPNSKDVWCMLSQIKH

SEQ ID NO: 50135 - protein, 398 aa, Glycine max
  Clone ID: 700725908_FLI.pep
PASSGNSNTGAIAGGVAAGAALLFAAPAIALAYWRRRKPQDHFFDVPAEEDPEVHLGQLKRFSLRELQVATDNFSNKHILGRGGFGKVYKGRLADGSLVAVKRLKEERTQGGELQFQTEVEMISMAVHRNLLRLRGFCMTPTERLLVYPYMANGSVASCLRERQESQPPLGWPERKRIALGSARGLAYLHDHCDPKIIHRDVKAANILLDEEFEAVVGDFGLAKLMDYKDTHVTTAVRGTIGHIAPEYLSTGKSSEKTDVFGYGVMLLELITGQRAFDLARLANDDDVMLLDWVKGLLKDRKLETLVDADLQGSYNDEEVEQLIQVALLCTQGSPMERPKMSEVVRMLEGDGLAEKWEQWQKDETFRQDFNNNIHHPNANWIVDSTSHIQADELSGPR

SEQ ID NO: 50136 - protein, 243 aa, Glycine max
  Clone ID: 700726094_FLI.pep
NVFDANHDTLVWALQKNGFGNMPIIVGEVGWPTDGDRNANLQYAQRFNQGFMSRYIAGKGTPMRPGPMDAYLFSLIDEDFKSIQPGNFERHWGLFYYDGQPKYMLNIGSRANGLVAATGVAYLPKKWCILKTSANLNSDQVAPSVSYACQNADCTSLGYQTSCGGLDARGNLSYAFNSYFQVNDQIDSACKFPGLSVVTDKDPSTGDCKFKIMIQTDSAGLHGNGRIWSLRIVLFVLLFFTLM

SEQ ID NO: 50137 - protein, 254 aa, Glycine max
  Clone ID: 700726640_FLI.pep
SKRIPKCATTTAPLSATPIHQVYVNDQFLNWDPEHRIKVRIVSARAYHSLFMHNMCIRPTPKELEEFGTPDFTIYNAGLFPCNRYTHYMTSSTSIDINIARKEMVILGTQYAGEMKKGLFGLMHYLMPKRYILSLHSGSNMGKDGDVALFFGLSGTGKTTLSTYQNRYLIGDDEHCWSENGVSNIEGGCYAKCVDLSKDKEPDIWNAIKFGTVLENVVFDEHTRERTLVQHILLSTYPMLRYRVLLPMQRMSSY

SEQ ID NO: 50138 - protein, 460 aa, Glycine max
  Clone ID: 700728416_FLI.pep
TLSFSSHHSKPILKPLTLFPPTMLRIASKLSSRFSSSSTALTANPLFPTRLSPIPSSSFRPFTNGLELEANMVVPDAIKMINYALRHWRTDRSLGAYRMGLSVLKICITNELTEGKEPKRENSKGMAMLAMSTLLFERGEYAEAIEKLEGVQELTNSYLGVRVAALETQAGLHLLMRQDDLAAVVADKCMKMVENQEKPLEYEERFVDYEAQFVRAKALKGLIELVNGNADSAEDFFDKSLREKYCDGTAGLSYAEFLHKIGNYPMAKEVYRNVVQGAIEVKNAGRPYLGAGNMSVDELIVGSMFALGQLELLMGNYSNAECHLTQALSRAEEAYGDSKHPTVGVALTSIALLYRRKAIQEHSSSLLVQEGLYRKVIDILKVPTMETESEDAAPLVDRSDIAALATGAYAEVLSVQEKRQAEGEKMKNLAESLWKHRWLSLANAIDSDKNIIDSRICRIL

SEQ ID NO: 50139 - protein, 474 aa, Glycine max
  Clone ID: 700731392_FLI.pep
PICETMKWPTWKSKSNTMAISVVFLHLSFSMEVFCHPSHADTIAALPGQPHVGFQQFSGYVTVDDKKQKSLFYYFAEAETDPASKPLVLWLNGGPGCSSLGVGAFSENGPFRPNGEFLIKNYYSWNKEANMLYLETPVGVGFSYAKGSSSYMTVNDEATARDNLIFLLRWFNKFPQYRSRDLFLTGESYAGHYVPQLAKLIIEMNTKNKIFNLKGIALGNPVLEYATDFNSRAEFFWSHGLISDSTYNMFTTVCNYSRYVSEYYRDSVSPLCSKVMGQVSRETSKFVDKYDVTLDVCISSVLSQSKVICPQSQEANESIDVCVDDKVTNYLNRRDVQEALHAKLVGIRKWDVCSNILDYDMLNLEVPTLPVVGSLIKAGVKVLIYSGDQDSVIPLTGSRTLVQKLARQLGLNSTVPYRVWFEGQQVGGWTQVYGNILSFATVRGASHEAPFSQPERSLVLFKSFLEGRPLPDAF

SEQ ID NO: 50140 - protein, 640 aa, Glycine max
  Clone ID: 700733055_FLI.pep
FMANPETDEVFAKLSLLPLRNSELGADSDGAGGDDVAEPSCCEKPASFAKTLTQSDANNGGGFSVPRYCAETIFPRLDYTAEPPVQTVVAKDVHGETWRFRHIYRGTPRRHLLTTGWSSFVNQKKLVAGDSVVFLRAENGDLCVGIRRAKKGISEGSGSGSSSVWSSASGSGNGNCGIGPYGPFSFFLKEENKMLRNGCGGNLSGRVKVRAEDVVEAVTLAASNKPFEVVYYPRASTPEFCVKASAVRAAMRIQWCSGMRFKMAFETEDASRISWFMGTIASVQVVDPIRWPNSPWRLLQVTWDEPDLLQNVKRVSPWLVELVSNIPLINFTPFSPPRKKLRPQHPDFPLDVQFPIPMFSGNQLGPNSPLCGFSDNAPAGIQGARHAQFGKSLSDLHLNNKLQLGMLPTNIHQLGVYNEISNGNMMTNHDKSKESLSCFLTMGKSTKSLEKSDDVKKHQFLLFGQPILTEQQISSCSGDVLSHRKRSVSDDKDKAKCLMDDSQSTLSQQFSPGKASSAEFSWQLGLDTGHCKVFLESEDVGRTLDLSLFGSYEDLYRRLAIMFGIERSEILNHVLYHDAAGAAKKTGEEPFSDFMKTAKRLTILTDSSSKNIKRAFITGTRNGEHGLDASNKTGPLSIFA

SEQ ID NO: 50141 - protein, 87 aa, Glycine max
  Clone ID: 700898068_FLI.pep
EIAERLGKTPAQVALRWGLQAGHSVLPKSTNESRIKGNFDIFDWSIPQDLMTKISEIKQERLVKASFFVHETYGAYRSIEDFWDGEL

SEQ ID NO: 50142 - protein, 222 aa, Glycine max
  Clone ID: 700898616_FLI.pep
SSSNLSNRKPSLKNITIPSITSGLATAMSQTTATTTTIATTMYNNNQVSSSSFSSDETNNTKDDKHYRGVRRRPWGKYAAEIRDPNRKGSRVWLGTFDTAIEAAKAYDKAAFKMRGSKAILNFPLEIGSDQSKEESSSSSSSVSSSSIVIKVGVKREREEESERKNNYEKSEFNNNSNSNKHVKKEECPLTPSCWKGFWDTDVMGTIFSVPPLSPLSPLMVV

SEQ ID NO: 50143 - protein, 341 aa, Glycine max
  Clone ID: 700898910_FLI.pep
TSSGQSHDLKKEDCKETRSLVVCFGEMLIDFVPTVGGVSLAEAPAFKKAPGGAPANVAVGISRLGGSSAFIGKVGADEFGYMLGNILKQNNVETSGMRFDSNARTALAFVTLRADGEREFLFFRNPSADMLLQESELDKDILKQARIFHYGSISLIDEPCKSAHLAAMSIAKNSGCILSYDPNLRLALWPSADSARKGIMDIWDQADVIKISEDEITFLTGGDDPYDDNVVLKKLFHPNLKLLIVTEGSQGCRYYTKAFKGRVAGVKVKPVDTTGAGDAFVSGILYCIASDQTIFQDEKRLRKALYFANVCGALTVTERGAIPALPTKEAILQFLLEAAVI

SEQ ID NO: 50144 - protein, 278 aa, Glycine max
  Clone ID: 700899520_FLI.pep
ANILVDPNGEIKLADFGMAKHINSSASMLSFKGSPYWMAPEVVMNTNGYSLPVDIWSLGCTIIEMATSKPPWNQYEGVAAIFKIGNSKDMPEIPEHLSNDAKNFIKLCLQRDPLARPTAHKLLDHPFIRDQSATKAANVSITRDAFPCMFDGSRTPPVLESHSNRTSITSLDGDFASKPALAAPRALRSPRDNTRMITSLPVSPSSSPLRRYGPTHQSCFFSPPHPAYTIMGQSSYTLNDISSYPMTSNATFALDPWHETSRYRANTPPGGSPRMRLI

SEQ ID NO: 50145 - protein, 86 aa, Glycine max
  Clone ID: 700899596_FLI.pep
GGTAEEDAAALIKDSGTEKPVVAFIAGLTAPPGRRMGHAGAIVSGGKGTAQDKIKTLREAGVMVVESPAKIGAAMLDVFKQRGLVQ

SEQ ID NO: 50146 - protein, 479 aa, Glycine max
  Clone ID: 700900608_FLI.pep
NFSLLVCMLCKLSMAPLAFSFFFILITFFSSSSEAGSVGINYGRVANDLPTPAKVVELLKAQGLNRVKLYDTDATVLTAFANSGIKVVVAMPNELLANAAADQSFTDAWVQANISTYYPATQIEAIAVGNEVFVDPNNTTKFLVPAMKNVHASLTKYNLDKNIKISSPIALSALQNSFPASSGSFKTELVEPVIKPMLDLLRQTGSYLMVNAYPFFAYAANSDKISLDYALFKENPGVVDSGNGLKYTNLFDAQIDAVFAAMSALKYDDVKIAVSETGWPSAGDSNEIGASPDNAASYNGNLVKRVLSGSGTPLKQNESLDVFLFALFNENQKTGPTSERNYGLFYPTEKKVYDIPLTAEEIKEAPPSGVGKSQVPVSGEVSTTTSKGQTWCVASGGSSEKKLQNALNYACGEGGADCTPIQPGATCYNPNTLEAHASYAFNSYYQKKARASGTCDFGGTAYVVTQPPKYGNCEFPTGY

SEQ ID NO: 50147 - protein, 317 aa, Glycine max
  Clone ID: 700901538_FLI.pep
LAGAISGGISRTVTSPLDVIKIRFQVQLEPTSSWALLRKDLASATAAASKYTGMLQATKDILREEGVQGFWRGNVPALLMVMPYTAIQFTVLHKLKTFASGSSKTENHINLSPYLSYISGALAGCAATVGSYPFDLLRTILASQGEPKVYPNMRSAFMDIVHTRGFQGLYSGLSPTLVEIIPYAGLQFGTYDTFKRWGMAWNHRYSNTAAEDNLSSFQLFLCGLAAGTCAKLVCHPLDVVKKRFQIEGLQRHPRYGARVEHRAYRNMLDAMQRILQLEGWAGLYKGIIPSTVKAAPAGAVTFVAYELTSDWLESTFN

SEQ ID NO: 50148 - protein, 519 aa, Glycine max
  Clone ID: 700904279_FLI.pep
LPSEDKASDFAGFVRICFSAVMGKVAVGAAVVCAAAVCAAAALVVRHRMISSRKWSRAMAILKEFEEKCGTPIVKLRQVADAMDVEMHAGLASEGGSKLNMLISFVDNLPTGDEEGLYYALDLGGTNFRVLRVHLGGKDKGVIGQEFEEVSIPPNLMTGSSDALFDFIAAALAKFVGSEPEGFHPPPGRQRELGFTFSFPVRQTSIASGTLIKWTKGFNIEDAVGEDVVGELTKSMEKIGLDMRVAALVNDTIGTLAGGRFYNQDVIAAVILGTGTNAAYVERAHAIPKWHGLIPKSGDMVINMEWGNFRSSHLPLTEYDLALDAQSLNPGEQIFEKLISGMYLGEVVRRALLKMAEEADFFGDTVPPKLKVPFILRTPDMSAMHHDTSSDLKVVGNKLKDILEISNTSLKMRKIVVELCDIVATRGARLAAAGILGILKKIGRDTVKVGEKQKSVIALDGGLFEHYTKFRECLESALKELLGDEAAETIVIEHANDGSGIGAALLAASHSQYLGVEES

SEQ ID NO: 50149 - protein, 223 aa, Glycine max
  Clone ID: 700905283_FLI.pep
ILQLVLLKELYLHHQATPHIIHRDIKASNVLLDSDFRARVADFGFAKLIPDGATHVTTKVKGTLGYLAPEYAMLGKANESCDVYSFGILLLELASGKRPIEKLNSTVRRSIVDWALPLVCEKKFSEIADPRLNGNYVEGELKRVVLVALMCAQDLPEKRPTMLDVVELLKGESKDKFYHIENSEMLRSLLAVESNDETSVAEEDSLDYISEEKELERPLKEYT

SEQ ID NO: 50150 - protein, 141 aa, Glycine max
  Clone ID: 700905726_FLI.pep
EKMPHTKQIFNECQPTPRFWGAGFAHGRCQPSLYLLPPPSSIPIFFSLFMSLSDGLLIRILVSDTSLSVLWPVHWTIVDISLLDLLYFMWLLTSCPAAIADMSDSSPARTEPATMVASSLEFAPGDSLLAPLTPSKLRHAD

SEQ ID NO: 50151 - protein, 796 aa, Glycine max
  Clone ID: 700905872_FLI.pep
IPPSYGKMWQLNFLSLAGNDLRGFIPSELGNLTNLTHLYLGYYNQFDGGIPPQFGKLTNLVHLDIANCGLTGPIPIELGNLYKLDTLFLQTNQLSGSIPPQLGNLTMLKALDLSFNMLTGGIPYEFSALHELTLLNLFINKLHGEIPHFIAELPKLETLKLWQNNFTGVIPSNLGQNGRLIELDLSTNKLTGLVPKSLCVGKRLKILILLKNFLFGSLPDDLGQCHTLQRVRLGQNYLTGPLPHEFLYLPELLLVELQNNYLSGGFPQSTSNTSSKLAQLNLSNNRFSGTLPASISNFPNLQILLLSGNRFTGEIPPDIGRLKSILKLDISANSFSGTIPPGIGNCVLLTYLDLSQNQLSGPIPVQVAQIHILNYLNVSWNHLNQSLPKELRAMKGLTSADFSYNNFSGSIPEGGQFSLFNSTSFVGNPQLCGYDSKPCNLSSTAVLESQQKSSAKPGVPGKFKFLFALALLGCSLIFATLAIIKSRKTRRHSNSWKLTAFQKLEYGSEDITGCIKESNVIGRGGSGVVYRGTMPKGEEVAVKKLLGINKGSSHDNGLSAEIKTLGRIRHRYIVRLLAFCSNRETNLLVYDYMPNGSLGEVLHGKRGEFLKWDTRLKIAIEAAKGLCYLHHDCSPLIIHRDVKSNNILLNSDFEAHVADFGLAKFMQDNGGSECMSSIAGSYGYIAPEYAYTLKVDEKSDVYSFGVVLLELITGRRPVGDFGEEGLDIVQWTKMQTNWNKEMVMKILDERLDHIPLAEAMQVFFVAMLCVHEHSVERPTMREVVEMLAQAKQPNTF

SEQ ID NO: 50152 - protein, 355 aa, Glycine max
  Clone ID: 700906084_FLI.pep
NTWVCSRIAVKLEKYSNMERYEILKDIGSGNFAVAKLVRDNYTNELFAVKFIERGQKIDEHVQREIMNHRSLKHPNIIRFKEVLLTPTHLAIVMEYASGGELFERICNAGRFSEDEARFFFQQLISGVSYCHSMQICHRDLKLENTLLDGSTAPRVKICDFGYSKSSVLHSQPKSTVGTPAYIAPEVLTRKEYDGKIADVWSCGVTLYVMLVGAYPFEDPADPRNFKKTIGKILSVQYSVPDYVRVSMECRHLLSQIFVASPEKRITIPEIKNHPWFLRNLPMELTEGGSWQMNDVNNPSQNVEEVLSIIQEARKSLNVPKVGGLLTGGSMDLDDFDADEDLEDLETSGEFVCPI

SEQ ID NO: 50153 - protein, 172 aa, Glycine max
  Clone ID: 700906621_FLI.pep
NAMDEILNKVGSYWFSKKASKEFNSVGDDINSLSTSIEGGTKWLVNKLKGKMQKALTELLKEYDLPIGIFPRDATNYEFNEETGKLVVYIPQVCEVGYRDSSVLRFSTSVSGYLEKGKLAEIEGIKTKVLIWVKVTAISSEGPKLHFTAGMKKTRKREAYEVTRDGVTVDKF

SEQ ID NO: 50154 - protein, 378 aa, Glycine max
  Clone ID: 700907558_FLI.pep
EKVGVLLLNLGGPETLNDVQPFLFNLFADPDIIRLPRLFRFLQRPLAKLISVLRSPKSKEGYAAIGGGSPLRKITDDQALAIKMALEAKGISSNVYVGMRYWYPFTEEAIQQIKRDRITRLVVLPLYPQFSISTTGSSIRILEHIFREDAYLSKLPVSIINSWYQREGYIKSMGNLIQKELQSFSEPKEVMIFFSAHGVPVSYVEDAGDPYRDQMEECIFLIMQELKARGISNEHTLAYQSRVGPVQWLKPYTDEVLVELGQKGVKSLLAVPVSFVSEHIETLEEIDMEYKELAIESGIKNWARVPALGVTPSFITDLADAVIEALPSATAMYAPTSISEDVDHDPVSYFIKIFCGSILAFILFLSPKMIMAFRNQVI

SEQ ID NO: 50155 - protein, 550 aa, Glycine max
  Clone ID: 700908011_FLI.pep
KLYEGGVTLPTNFLSKIAPIPVVKEIFRTDGEQFLKYPPPKVMQVDKSAWMTDEEFARETIAGVNPNVIKILEEFPPRSKLDSQAYGDHTSIITKQHLEPNLGGLTVEQAIQSKKLFILDHHDYLIPYLRKINATTTKTYATRTIFFLKSDGTLTPLAIELSKPHPQGEGYGPVSEVYVPSSEGVEAYIWLLAKAYVVVNDSCYHQLVSHWLNTHAVVEPFVIATNRHLSVVHPIYKLLFPHYRDTMNINSLARKSLVNADGIIEKTFLWGRYSLEMSAVIYKDWVFTDQALPNDLVKRGVAVKDPSAPHGVRLLIEDYPYASDGLEIWDAIKSWVHEYVSFYYKSDAAIQQDPELQAWWKELVQVGHGDLKDKPWWQKMQTREELIEASATLVWIASALHAAVNFGQYPYGGLILNRPTISRRFMPEKGSAEYAALAKNPEKEFLKTITGKKETLIDLTIIEILSRHTSDEFYLGERDGGDYWTSDAGPLEAFKRFGKKLQEIEQKLIQKNKDETLRNRSGPAKMPYTLLYPSSEEGLTFRGIPNSISI

SEQ ID NO: 50156 - protein, 386 aa, Glycine max
  Clone ID: 700908207_FLI.pep
WLLHLCDAHQEMQSWAEAAQCAVAVAGVVMQALVARNDGVWSKDHVSALRKICPMVSNEITSEASAAEVEGYGASKLTVDSAVKYLQLANKLFSQAELFHFCASILELVIPVYKSRRAYGQLAKCHTLLTNIYESILEQESSPIPFTNATYYRVGFYGVRFGKLDKKEYVYREPRDVRLGDIMEKLSHTYESRMDGNHTLHIIPDSRQVKAEELQPGVCYLQITAVDPVMEDEDLGSRRERIFSLSTGSVRARVFDRFLFDTPFTKNGKTQGGLEDQWKRRTVLRTEGSFPALVNRLLVIKSESLEFSPVENAIGMIETRTAALRNELEEPRSSEGDQLPRLQSLQRILQGSVAVQVCFTVGSYYIMHFLIVVTSCVLKTRPGLPV

SEQ ID NO: 50157 - protein, 271 aa, Glycine max
  Clone ID: 700910022_FLI.pep
VSTVHAMSVLRDSEPPSAGRFHPEYDTVLQGLLSFNNATGSPFTINPYPYFAYRSDPGRADNLAFCLFQPNAGRVDSNTNLKYMNMFDAQVDAVRSALDAMGFKNVEIVVAETGWPYKGDSNEAGPSLENAKAYNGNLIAHLRSMVGTPLMPGKSVDTYLFALYDEDLKPGPASERAFGLYNPDQSMIYDAGLSKQQETSSPVPTVAPTPDVSKSPVIPAPTDPGQQTQKSPVIPAPIGPGPTPNKAELLIGHEATILKSLIMFTVLILML

SEQ ID NO: 50158 - protein, 225 aa, Glycine max
  Clone ID: 700910085_FLI.pep
GKQVIAMALTVHLIILMHVCTLVVVRSDPLPKPNFSSILVFGDSSADSGNNNYIMGSLAKANHLPYGKDFPGHVPTGRFSNGKLVIDFLASILNIKDGVPPYLNPNLPNKELLTGVCFASGGSGFDDCTAASANAISMTKQIEYFKAYVAKLNRITGENETKQILGDALVIIGAGSNDFLLKFYDRPHARVMFNINMYQDYLLDRLQILIKVCQSYSLKLHYALF

SEQ ID NO: 50159 - protein, 498 aa, Glycine max
  Clone ID: 700847407_FLI.pep
LKLLAMEQLLIQHPEYREKVVLVQIANPARGRGKDVKEVQAETKATVKRINETFGKPGFDPVILIEEPLKFYERVAYYVVAECCLVTAVRDGMNLIPYEYIISRQGNEMLDAVLGLASSPKKKSMLVVSEFIGCSPSLSGAIRVNPWNIDAVADAMDSALEMADSEKELRHEKHYRYVSTHDVGYWARSFLQDLERTCSHHVRRRWWGIGFGLSFRVVALDPNFKKLSMEHIVSAYKRTATRAILLDYDGTLMPQSSTIDKSPSSKSIEILSSLCRDKNNMVFLVSARSRKMLSEWFSPCENLGVAAEHGYFLRMKRDEEWETHVAATDTSWKQIAEPVMKLYTETTDGSTIEDKETALVWCYEDADPDFGSCQAKELLDHLESVLANEPVTVKSDQNNVEVKPQGVSKGLVATRLLSAMQEKGMCPDFVLCIGDDRSDEDMFEVITSSMGGLIAPKAEVFACTVCRKPSKAKYYLDDTTEIVRLLQGLACVSEQIDK

SEQ ID NO: 50160 - protein, 541 aa, Glycine max
  Clone ID: 700853396_FLI.pep
RNEFISLLSRYVAGGKGILQPHDLLYEVEKLLEEDEGMQKLKDSPFVKELESAKEAIVLPPFVSIALRPRPGVWEYVRVDAFELSVDNLSVAEYLRLKEELVDGQCTDKYVLELDFEPFNVTLPRPTRSSSIGDGVQFLNRHLSSFMFRSKESLEPLLAFLRTHRYDGHAMMLNDRIYNLSKLQSSLAKAEELLSRLLPNAPYSDFEYELQGLGFERGWGDTAERVSEMVHLLLEILQAPDPNTLESFLGRIPMVFNVVVVSPHGYFGQANILGLPDTGGQLVYILDQVRALENEMLIKIQKQGLDVSPKILIVTRLIPEAKGTTCNQRLERVSGTAHSYILRVPFRTKNGILRKWISRFDMWPYLETFAEDASHEIAGELQGIPDLIIGNCSDGNLVATLLSYKLGITQCNIAHALEKTKHPDSDIYWKKYEDKYHFTCQFTADLIAMNNADFIITSTYQEIAGSKNNVGQYESYTAFTLPGLYRVVHGIDVFDPKFNIVSPGADMCIYFPYSDRERRLTSLHGSIEKLVYGAEQNEEHM

SEQ ID NO: 50161 - protein, 218 aa, Zea mays
  Clone ID: LIB3078-006-E10_FLI.pep
CCCSKEGRRGSSDKLLYFKAVELMLVDALVEANDYLGISLHAHDPEEFWKLDDTIIKTIETAPNNELKKAKEIIQRIRRRELYKFCNQYSVPKDKLEHFKNITAQDIVCSQKSSEVLLKEEDVAVCNVKIDLTRGKYNPLESIKFFMDFGCNEKFPIIDDRVSHLLPAYNEDRIVRVYAKNPELVDVVSEAFENLQMRMYGEKTQVHETPKKKKIRSN

SEQ ID NO: 50162 - protein, 315 aa, Zea mays
  Clone ID: LIB3067-028-E4_FLI.pep
PLATVCWVWVQILLARLFTHSPPAASSPEADEREEERDVVEAVDAPEHSDLGLVPRRVAEHELDEEAPLEHRLLVAEHVKRVLAVVLAEPAVPHATERDAVQAILHDGVVERDAPRRRLVYDALLQLLVPGEGVDRQRLGLGPEELDAVFDLLHRDDREQRAEYLLRHDVGVERRVQQKRGLHAQRLGVEVAAVDHGRRHPAVGQEAAQPLELLLVQDARHVLWLGEEPLQRRLEHLDQNRSKLLLHQQVVDGDAGLAGTGGPFRSDDAIHSYLAVPVAVKPVDDAGALGAELQRHRGEVLGGLGHDKAPNAAAA

SEQ ID NO: 50163 - protein, 415 aa, Zea mays
  Clone ID: 700553382_FLI.pep
VIHVSEIEEWNMVKSLHIKTVDELGLPRSVIQDMLDELEQLLKGIAMMKELTPRTSDYLVSFGECMSTRIFSAYLNKIRVKARQYDAFDIGFITTDEFGNADILEATYPAVAKRLHGDWIQDPAIPVVTGFLGKGWKSGAVTTLGRGGSDLTATTIGKALGLREIQVWKDVDGVLTCDPNIYPHAKTVPYLTFEEATELAYFGAQVLHPQSMRPAREGDIPVRVKNSYNPKAPGTLITRQRDMDKVVLTSIVLKSNVTMLDIVSTRMLGQYGFLARVFAIFEDLCISVDCVATSEVSVSVSLDPSKIWSRELIQQELDHVVEELEKIAIVRLLQQRAIISLIGNVEQSSLILEKTGRVLRKSGVNVQMISQGASKVNMSLIVHDSDAKALVEALHQAFFEDDVLSQVEAENLLVG

SEQ ID NO: 50164 - protein, 332 aa, Glycine max
  Clone ID: 700553863_FLI.pep
LTVEQAIQNKKLFILDHHDYLIPYLRKINANTTKTYATRTIFFLKNDGTLTPLAIELSKPHPQGEAYGPVSEVYVPSSEGVEAYIWLLAKAYVVVNDACYHQIISHWLNTHAVVEPFVIATNRHLSVVHPIYKLLFPHYRDTMNINSLARKSLVNADGIIEKTFLWGRYSLEMSAVIYKDWVFTDQALPNDLVKRGVAVKDPSAPHGVRLLIEDYPYASDGLEIWDAIKSWVEEYVSFYYKSDEELQKDPELQAWWKELVEVGHGDLKDKPWWQKMQTREELVEASATLIWIASALHAAVNFGQYPYGGLILNRPTISRRFMPEKGLLNMMR

SEQ ID NO: 50165 - protein, 237 aa, Glycine max
  Clone ID: 700890413_FLI.pep
RRMLAYSTVGTPDYIAPEVLLKKGYGVECDWWSLGAIMYEMLVGYPPFYSDEPMLTCRKIVTWRTTLKFPEEAKLSAEAKDLICRLLCNVEQRLGTKGADEIKAHPWFKGVEWDKLYQMQAAFIPEVNDELDTQNFEKFEEGDKQTVPSSKAGPWRKMLPSKDINFVGYTYKNFEIVNDHEIPGIAELKKKNTKPKRPSIKALFDDESATAANQPVRGSFLNLLPPQMEVPEKSESQ

SEQ ID NO: 50166 - protein, 541 aa, Glycine max
  Clone ID: 700890310_FLI.pep
ISSLPSILAETVGRSIEEVYRGSDKGILKDVELLRQITEASRGAITSFVQRTTNKKGQVVDVADKLTSILGFGINEPWVEYLSNTKFYRADREKLRTLFDFLGECLKLVVADNELGSLKQALEGKYVEPGPGGDPIRNPKVLPTGKNIHALDPQAIPTTAAMQSAKIVVDRLIERQKAENGGKYPETVALVLWGTDNIKTYGESLAQVLWMIGVNPVADTFGRVNRVEPVSLEELGRPRIDVVVNCSGVFRDLFINQMNLLDRAVKMVAELDEPAEQNFVRKHALEQAQALGIDVREAATRVFSNASGSYSSNINLAVENSSWNDEKQLQDMYLSRKSFAFDCDAPGAGMTEKRKVFEMALSTADATFQNLDSSEISLTDVSHYFDSDPTNLVQSLRKDGKKPSAYVADTTTANAQVRTLAETVRLDARTKLLNPKWYEGMLSTGYEGVREIEKRLTNTVGWSATSGQVDNWVYEEANTTFIQDEEMLKKLMNTNPNSFRKLVQTFLEANGRGYWETSEDNIDKLRQLYSEVEDKIEGIDR

SEQ ID NO: 50167 - protein, 392 aa, Glycine max
  Clone ID: 700835214_FLI.pep
LFDRIVAQDRYSETEAAGVVRQIASGLEAIHKANIVHRDLKPENCLFLDVRRDSPLKIMDFGLSSVEEFTDPIVGLFGSIDYVSPEALSQGKITTKSDMWSLGVILYILLSGYPPFIAQNNRQKQQMIMNGNFSFYEKTWKGITNSAKQLISDLLTVDPSRRPSAQDLLSHPWVVGDKAKDDAMDPEIVSRLQSFNARRKLRAAAIASVWSTAIFLRTKKLKSLVGTHDLTEEEIENLRMSFKKICVSGDNATLSEFEEVLRAMKLSSLIPLAPRIFDLFDNNRDGTVDMREILCGFSSFKNSKGDDALRLCFQMYDTDRSGCITKEEVASMLRALPEDCLPADITEPGKLDEIFDLMDANSDGKVTFDEFKAAMQRDSSLQDVVLSSLRPQ

SEQ ID NO: 50168 - protein, 69 aa, Glycine max
  Clone ID: 700868431_FLI.pep
TSFFWRKNRNDIMSPTKPMVQYFILRQDFIYHPNINIPNHTTCYITLSQKIGPAARISSVRLLLPLPIL

SEQ ID NO: 50169 - protein, 484 aa, Glycine max
  Clone ID: 700868215_FLI.pep
LSSNDFTGEIPASLSNCTYLNTIRLDQNQLTGQIPANLSQLPRLKLFSVANNLLTGQVPIFANGVASANSYANNSGLCGKPLLDACQAKASKSNTAVIAGAAVGGVTVAALGLGIGMFFYVRRISYRKKEEDPEGNKWARSLKGTKTIKVSMFEKSISKMNLNDLMKATDNFGKSNIIGTGRSGTVYKAVLHDGTSLMVKRLQESQHSEKEFLSEMNILGSVKHRNLVPLLGFCVAKKERFLVYKNMPNGTLHDQLHPDAGACTMDWPLRLKIAIGAAKGLAWLHHSCNPRIIHRNISSKCILLDADFEPKISDFGLARLMNPIDTHLSTFVNGEFGDLGYVAPEYTKTLVATPKGDIYSFGTVLLELVTGERPTHVSKAPETFKGNLVEWIQQQSSNAKLHEAIDESLVGKGVDQELFQFLKVACNCVTAMPKERPTMFEVYQLLRAIGINYNFTTEDEIMLPMDTGDADNLEELIVAREGHD

SEQ ID NO: 50170 - protein, 317 aa, Zea mays
  Clone ID: LIB3076-035-H4_FLI.pep
VIIMHAHILLLHNTNDIYISLIILNYITLHMEGDGAVGRVVELDGPAVERLRGACVVPGQRRLEQLQLLLADLPHLAEDAPDDVLGAGRHGEGARVPEVAAGALLQRAQVDEGDALVRLLLAEAAPVLGHLAQLPLQLVVEGVRGAQLVEDPDDGQRAVGAPVDQVQLQREPLAVDGVVGRRVPVHLLEAVRLAVHHYRPDLALERHRDVVAVVDERGGGGGVGAVEGVEVGVGDGLLGDDVDRGLLLPLPAQLVRGAQLAPVLRPVGAPRRVPVRRPTAIGGSDGEGGRGDEEADDDDDSTGGRHHYCLGRARIVG

SEQ ID NO: 50171 - protein, 472 aa, Glycine max
  Clone ID: 700757393_FLI.pep
ICLSSMAATRPVQCLLRRVCRGSRTIGVATEVNASSSSQKIIDKEYEHSAHNYHPLPIVFAQAKGTSVWDPEGNKYLDFLSGYSAVNQGHCHPKILKALQEQAERLTVSSRAFYNDRFPDFAEYVTNMFGYDMVLPMNTGAEGVETALKLARKWGYEKKRIPKDEAIIVSCCGCFHGRTLGVISLSCDNEATRGFGPLLPGNLKVDFGDAEALEQIFKEKGEHIAAFILEPVQGEAGVIFPPDGYLKAVRDLCSKYNVLMIADEIQTGLARTGKMLACEWEEVRPDVLILGKALGGGVIPVSAVLADKDVMLCIQPGQHGSTFGGNPMASAVAIASLEVIKNERLVERSAQMGEELTGQLLKIQQQYPDYVKEVRGRGLFIGVEFNSKKLFPVSGYELCKKLKYRGVLAKPTHDAIIRFTPPLCISVDEIQQGSKALADVLEIDLPKLQKTKPIDAAPVATSACDRCGRVLY

SEQ ID NO: 50172 - protein, 229 aa, Glycine max
  Clone ID: 700873411_FLI.pep
LRMKIALGAAKGLAFLHSTEHKVIYRDFKTSNILLDTNYNAKLSDFGLARDGPTGDKSHVSTRVMGTRGYAAPEYLATGHLTTKSDVYSFGVVLLEMISGRRAIDKNQPTGEHNLVEWAKPYLSNKRRVFRVMDPRLEGQYSQNRAQAAAALAMQCFSVEPKCRPNMDEVVKALEELQESKNMQRKGADHKQHHVRNSGPGRTNGGDGGSDAPRKASAYPRPSASLLRG

SEQ ID NO: 50173 - protein, 401 aa, Glycine max
  Clone ID: 700893040_FLI.pep
FNIVGYGCTTCIGNSGDINEAVASAITENDIVAAAVLSGNRNFEGRVHPLTRANYLASPPLVVAYALAGTVDIDFDTEPIGIGKDGTKIFFRDIWPSSEEIANVVQSSVLPAMFRDTYNAITQGNPMWNNLSVPTGTLYAWDPTSTYIHEPPYFRDMSMSPPGSHGVKDAYCLLNFGDSITTDHISPAGSIHKDSPAARYLIERGVDRRDFNSYGSRRGNDEVMARGTFANIRIVNKFLNGEVGPKTIHIPSGEKLSVFDAAEKYKSEGHDMIILAGAEYGSGSSRDWAAKGPMLLGVKAVIAKSFERIHRSNLVGMGIIPLCFKPGDDADSLGLTGHERYTIDLPSNVNEIRPGQDVTVVTDAGKSFVSTLRFDTEVELAYFNHGGILQYVIRNMVNAKH

SEQ ID NO: 50174 - protein, 400 aa, Glycine max
  Clone ID: 700786894_FLI.pep
GRWIPRESWGETEIRLMATAGLRMLDAAAQERILASCRKVLRDSGFMFRDEWASVITGSDEGVYAWVVANYALDTLGGDPLETTGIIELGGASAQVTFVSREAVLPSFSRTVKFGNTTYNLYSHSFLHFGLNAAQDSLKEALVLGEFNLASQSLQKGLRIDPCTPTGYSYNVESWKFPPSSESEKNQYQSTVQARGNFSECRSVALTLLQKGKESCSYQHCDIGSTFIPKLQGKFLATENFFYTSKFFGLTPRAYLSKLMNAGKEFCGKDWLRLKKKYVSHDEEDLLRYCFSSAYIVALLHDSLGIALDDERVKVANQVGSIPLDWALGAFILQTAADADIKNHNWIATIFSDESHTLLSIIGIFIVLLTAWSISRWRKPQLKTIYDLEKGRYIITRVGR

SEQ ID NO: 50175 - protein, 492 aa, Glycine max
  Clone ID: 700787858_FLI.pep
SLDTVIIKMASCVSTIFAPSNTRNTPRVFTVGGRNLTCNYPGRACFTKMYDRRNGFSGGIQMSGLLQVKCSANSHSVSPYNSQGPFLDLHPEVSMLRGEGSSTVNSPRKDSSGGDLSESLGTTSIQSDYNEAKIKVIGVGGGGSNAVNRMTESEMHGVEFWIVNTDVQAMRMSPVYPENRLQIGQELTRGLGAGGNPETGMNAAKESKESIEEAVYGADMVFVTAGMGGGTGTGGAPIIASIAKSMGILTVGIVTTPFSFEGRKRSIQAQEGITALRDNVDTLIVIPNDKLLTAVSQSTPVTEAFNLADDILRQGVRGISDIITIPGLVNVDFADVRAIMANAGSSLMGIGTATGKSRARDAALNAIQSPLLDIGIERATGIVWNITGGTDLTLFEVNTAAEVIYDLVDPTANLIFGAVIDPSLSGQVSITLIATGFKRQEESEGRPLQASQLTQADTTFGTNWRSSSFTDGGLFEIPEFLKKRGGSRYPRA

SEQ ID NO: 50176 - protein, 811 aa, Glycine max
  Clone ID: 700852649_FLI.pep
GSSEEMANHPLTHSHSFRERFDETLTGHRNEILALLSRLEAKGKGILQHHQVVAEFEEIPEESRKKLQGGVFGEVLRSTQEAIVLPPFVALAVRPRPGVWEYLRVNVHMLVVDELLPAEYLRFKEELVEGSSNGNFVLELDFEPFNASFPRPTLNKSIGNGVEFLNRHLSAKLFHDKESMQPLLEFLRLHSYKGKTMMLNDKVQSLDSLQHVLRKAEEYLTSVAPETPYSEFENKFREIGLERGWGDIAERVLEMIQLLLDLLEAPDPCTLETFLGRVPMVFNVVILSPHGYFAQDNVLGYPDTGGQVVYILDQVRALENEMLNRIKKQGLDITPRILIITRLLPDAVGTTCGQRLERVYDTEYCDILRVPFRTEKGIVRKWISRFEVWPYLETYTEDVALELAKELQAKPDLIVGNYSDGNIVASLLAHKLGVTQCTIAHALEKTKYPESDIYWKKFEEKYHFSCQFTADLFAMNHTDFIITSTFQEIAGSKDTVGQYESHTAFTLPGLYRVVHGIDPFDPKFNIVSPGADMSIYFPYTETERRLTEFHPDIEELLYSSVENEEHICVLKDRNKPIIFTMARLDRVKNITGLVEWYGKNARLRELVNLVVVAGDRRKESKDLEEKAEMKKMYGLIETYKLNGQFRWISSQMNRVRNGELYRVICDTRGAFVQPAVYEAFGLTVVEAMTCGLPTFATCNGGPAEIIVHGKSGYHIDPYHGDRAAEILVEFFEKSKADPSHWDKISQGGLKRIHEKYTWQIYSDRLLTLTGVYGFWKHVTNLERRESKRYLEMFYALKYRKLAESVPLAIEE

SEQ ID NO: 50177 - protein, 284 aa, Glycine max
  Clone ID: 700852828_FLI.pep
NLSTKIRMAIQVVDKISMTINKIRDEELWPQLKELIQGLTRMWKSMLECHHDQCEAIREARILGSIGSRKKSGDSHLQATKQLEQELINWTFQFSGWISAQKGYVRALNNWLLKCLLYEPEETPDGIVPFSPGRIGAPQIFVICNQWSQALDRISEKEVVDSMHVFTMSVLQIWEQDKLEMHRQVMKNKDLERKVRNMDRDDQKLQKQIQALERKVVLVSGEGKGLSVSENIIYQSDKSSSLQASLQRIFEAMERFTDESVRAYEELLQRSEEESAARNHERVS

SEQ ID NO: 50178 - protein, 330 aa, Glycine max
  Clone ID: 700849240_FLI.pep
YFLDFYNKGSCSCLREQGGLYLPQGLESLSNELRYLRWTHYPLESLPSKFSAENLVELNLPYSRVKKLWQAVPDLVNMRILILHSSTQLKELPDLSKATNLKVMDLRFCVGLTSVHPSVFSLKKLEKLYLGGCFSLRSLRSNIHLDSLRYLSLYGCMSLKYFSVTSKNMVRLNLELTSIKQLPSSIGLQSKLEKLRLAYTYIENLPTSIKHLTKLRHLDVRHCRELRTLPELPPSLETLDARGCVSLETVMFPSTAGEQLKENKKRVAFWNCLKLDEHSLKAIELNAQINMMKFAHQHCPHLVMPIKVPMCTREAKFQNGWCIRQYSVIT

SEQ ID NO: 50179 - protein, 820 aa, Glycine max
  Clone ID: 700852080_FLI.pep
VRYTPEQVEALERLYHDCPKPSSIRRQQLIRECPILSNIEPKQIKVWFQNRRCREKQRKESSRLQAVNRKLTAMNKLLMEENDRLQKQVSQLVYENGYFRQHTQITTQATKDTNCESVVTSGQQHNLITQHPPRDASPAGLLSIAEETLAEFLSKATGTAVEWVQMPGMKPGPDSIGIVAISHGCTGVAARACGLVGLEPTRVAEILKDQPLWFRDCRAVDVLNVLPTASGGTIELLYMQLYAPTTLAPARDFWLLRYTSVLEDGSLVICERSLKNTQNGPSMPPVQHFVRAEMLPSGYLIRPCEGGGSIIHIVDHMDLEPWSVPEVLRPLYESSTVLAQKTTMAALRHLRQISHEVSQSNVTGWGRRPAALRALSQRLSRGFNEALNGFTDEGWTTIGNDGVDDVTILVNSSPDKLMGLNLSFANGFPSVSNAVLCAKASMLLQNVPPAILLRFLREHRSEWADNNMDAYTAAAIKVGPCSLSGSRVGNYGGQVILPLAHTIEHEEFLEVIKLEGIAHSPEDTIMPREMFLLQLCSGMDENAVGTCAELISAPIDASFADDAPLLPSGFRIIPLESGKEASSPNRTLDLASALDVGPSGNRASNGCANSSCMRSVMTIAFEFAFESHMQEHVASMARQYVRSIISSVQRVALALSPSHLSSHAGLRSPLGTPEAQTLAHWICNSYRCYLGVELLKSNNEGNESLLKSLWHHSDAILCCTLKALPVFTFSNQAGLDMLETTLVALQDITLEKIFDDHGRKILFSEFPQIIQQGFACLQGGICLSSMGRPVSYERVVAWKVLNEEENAHCICFMFVNWSFV

SEQ ID NO: 50180 - protein, 420 aa, Glycine max
  Clone ID: 700849362_FLI.pep
EYPSLNNTLVPPPAVTPPQSSSGNGNRAIVIIAGGVAVGAALLFAAPVIVLVYWKRRKPRDFFFDVAAEEDPEVHLGQLKRFSLRELQVATDTFNNKNILGKGGFGKVYKGRLTNGDLVAVKRLKEERTQGGEMQFQTEVEMISMAVHRNLLRLRGFCMTPTERLLVYPFMSNGSVASCLRDRPESQPPLEWPKRKNIALGAARGLAYLHDHCDPKIIHRDVKAANILLDDDFEAVVGDFGLAKLMDYKDTHVTTAVRGTIGHIAPEYLSTGKSSEKTDVFGYGVMLLELITGQRAFDLARLANDDDVMLLDWVKALLKDKRLETLVDTDLEGKYEEAEVEELIQVALLCTQSSPMERPKMSEVVRMLDGEGLAEKWDKWWQKEDMIQPNFDPSNLHNGYWRPLLDSTSNIAPDELSGPR

SEQ ID NO: 50181 - protein, 281 aa, Zea mays
  Clone ID: LIB3067-039-H2_FLI.pep
NEAADVWSAGVILYILLSGIPPFWGKTKSKIFDCIRSMELRFPSDPWDRVSDSAKELVTGMLRRDPRLRLTAKQVLEHPWMQEHADPQDSCGQCHETGLQREGAGSCSFSTPLASRSRDVSFDTRGPIAWRGGGEDEATCCSPTFAAVCRSSFSAFITDPAPPPCSASSALGGSGFSFGEPCEPLDGGGGGGFPMPMASMPSFSFFCARDSSEPAEPQPVAASSTPRTARGSTPRGVNGRRNHTIGGGGREHLDVAVESVIRWASCTNFSTAPSLRASLVC

SEQ ID NO: 50182 - protein, 246 aa, Glycine max
  Clone ID: 700795921_FLI.pep
KLNMGRGRVVLERIENKINRQVTFSKRRSGLLKKAFELSVLCDAEVGLIIFSSRGKLFQYSSTDITKIIERYRQCRYSKSHTGDSLEHDSQSAYHEFLKLRAKYESLERTQRHFQGEDLEPLSFKDLQSLEKQLDITLALTRQHQTKKLMARADELREKVHKLEDLNKQLESKVFSLNNHEKDEFSSLILDNNNYIQMHATQVDQFESETALNTWFQHQEVVSKEKAIDTRTEHSQSSHNKNNGWL

SEQ ID NO: 50183 - protein, 274 aa, Zea mays
  Clone ID: LIB3070-014-A5_FLI.pep
QIPFQSGSVDIVTFKGSKLKTIKEVWIGLESGSWRLDGLSLKVIHGPVGQPKEINGTPEQKFSGLQYTFENVNVFLGDDGASVAEARPTAITDLSGVGLSDLQQGLLSSRSKALSIKEVREDGLREYADLKQSLLLYDASIVITGFSTFILASNDSAAYSFLIGGIGGFLYLLLLQRSVDGLPVIGSPSEAGGAQPSVKSFSGVRRPWLILSLVLVAGAVALKYGAGGDSFALTPTDLFVGTAGFLANKVAVLLAAFMPMLSDSKSEDGSGDNS

SEQ ID NO: 50184 - protein, 160 aa, Glycine max
  Clone ID: 700895271_FLI.pep
NVIIHRDLKPRNVLLVNSSADHLKVGDFGLSKLITVQSSHDVYKMTGETGSYRYMAPEVFKHRRYDKKVDVYSFAMILYEMLEGEPPFASREPYEGAKYAAEGHRPHFRAKGYTPELQELTEQCWAHDMSQRPSFIEILKRLEKIKENLPTENHWHLFTS

SEQ ID NO: 50185 - protein, 480 aa, Glycine max
  Clone ID: 700869958_FLI.pep
FFSNPFSPKISLFSFHMANTLYNGATCRIPLRNQSLAFSRHVSRSLSFLPITRAAKQPNAIAVKASSHSDFDVDPSLSPRVNAVKPSKTVAISDHATALVQAGVPVIRLAAGEPDFDTPAPIAEAGINAIREGYTRYTPNAGTMELRQAICHKLKEENGITYTPDQVVVSNGAKQSIAQAVLAVSSPGDEVIIPAPFWVSYPEMARLADATPVILPTLISDNFLLDPKLLESKITERSRLLILCSPSNPTGSVYPKELLEEIARIVAKHPRLLVLSDEIYEHIIYAPATHTSFASLPGMWDRTLTVNGFSKAFAMTGWRLGYIAGPKHFVAACGKIQSQFTSGASSIAQKAAVAALGLGHAGGEAVSTMVKAFRERRDFLVQSFREIDGIKISEPQGAFYLFLDLSFYYGREAEGFGKIVDSESLCQYLLEVGQVALVPGSAFGDDTCIRISYAESLTTLQAAVERIKKALVPLSSAALV

SEQ ID NO: 50186 - protein, 264 aa, Zea mays
  Clone ID: LIB3069-049-F5_FLI.pep
QTLPRFNCRGRLVPVQSTFPSSSPTPPPAEPQPARMGNIFVKKPKITEVDRAILTLKTQRRKLAQFQQQLEKVIEAEKEAARQLVQQKKRDRALIALKKKKAQEELLKQVDTWQMNVEQQLSDIELASKQKAVFESLKAGNAALKSIQNEINIDDVQKLMDDTAEAKAYQDEINAVLGEQLSAEDEEAVMAEFENLEAQLAVESLPDAPVTEVRPEEKMKAPADTEAVPEDIDEAIELPDVPTKAPERPEAPEKTKVLEEPLPA

SEQ ID NO: 50187 - protein, 298 aa, Zea mays
  Clone ID: LIB3069-040-F2_FLI.pep
YDRKALHNDLETLCFVLLYFCFPSVYIVFLCWCSSAERQGLAVPLLEALEQRVDVLALVDGHEHLVQLLAGRPRLLAGQVLGADLLAHEPVQRVGPALLDPVGDQRAAVLHGRARGLHLLGQRRADLLLELGHLGEDGRVHVALGVAVGQRVLDQHRAELLHQRVVGAARVVRVREHRLAVDRRLQVLLAEARVVEPAPGVQAQGLLGHLRHAVLHRGLHVLLEVPQVDGLAQGDQERGRHQLQDVDGLGGLPGGDEAQGVHVLVVLLSALDVVGHRVAQELELGAVGGMAISAPLKP

SEQ ID NO: 50188 - protein, 211 aa, Zea mays
  Clone ID: LIB3069-039-B10_FLI.pep
ELTSMKRMRVELEKLRLLCERIIKREKVKRETVLCDHEILAKTKDTVIFSYLACGASSESATTSVNNRSYSGAAQRSDDVTVDSTISGKKTIRFSLNNRGADRNTADSSRTLLSFKRKLSERGPRAGKQLPQRPTIAAEKLEDEDKKTTDKKITMQQREMFQKELIMTSDQASTQNLRLPKGYAYVPRDSLSKEKLWKQNTQPHNPQEPGG

SEQ ID NO: 50189 - protein, 259 aa, Glycine max
  Clone ID: 700847975_FLI.pep
LECEHCKTDQENYCEKLQFVYNGVFWDGSITYGGYSQIFVADYRYVVHIPENLAMDAAAPLLCAGITVFNPLKDHDLVASPGKKIGVVGLGGLGHIAVKFGKAFGHHVTVISTSPSKEAEAKQRLGADDFIVSSNPKQLQAARRSIDFILDTVSAEHSLLPILELLKVNGTLFLVGAPDKPLQLPAFPLIFGKRSVKGGIIGGIKETQEMLEVCAKYNITSDIELITPDRINEAMERLAKNDVRYRFVIDIANAAASNN

SEQ ID NO: 50190 - protein, 310 aa, Glycine max
  Clone ID: 700848323_FLI.pep
QGNVVIGGIMEHIEQAGIHSGDSACSIPTRTVPASCLETIRSWTVNLAKQLNVCGLMNCQYAITPSGDVFLLEANPRASRTVPFVSKAIGHPLAKYASLVMSGKTLYDLQFTKEVIPKYVSVKEAVLPFSKFPGCDVFLSPEMRSTGEVMGIDPSYNIAFAKAQIAAGQKLPLSGTVFLSLNDLTKPHLEKIAKAFVENGFKIAATSGTAHVLNLAKIPAERVLKLHEGRPHAGDMIANGDIQLMVVTSSDDALDRIDGLALRRMALDYKVPIVTTVNGALATAEAINSLKANSIKMIALQDFIDGEFNE

SEQ ID NO: 50191 - protein, 423 aa, Glycine max
  Clone ID: 700845880_FLI.pep
MNSSPSSSQLPSSSADFDKFNSLPRFRPLECLQGNPVPAFLSKTFELVDDPSLDPIISWGSTGVSFVVWDPTLFARHVLPRNFKHNNFSSFVRQLNTYGFRKIDTEKWEFFNEAFQRGKRHLLKNIRRRGPPQSHQVGGNIVPYSDADKAGLEFELESLRKERSVLMQEVVELQQQQRTTLQRARQVNQRLQSAELIQKQMVSFLARLFEKPAFLTSLQHAKEQRDLGCPKVRRRFIKQHQGQTEISDFLNEGQIVRYQPDWRNVTTSSEIQEMYPVSLEESPNYLSQALAKEFSEGTENLISDEVMSIADTMGFKSSSFGLDGNLFKGKNVMSSNEGLLAEEFVSFPEDLTKETGFPEFSPLGTEGIIKREDKRNTNFDVSGADSSSGNEQWGNPINYEVPEFVVTSGMTDMWDINYLTHSK

SEQ ID NO: 50192 - protein, 225 aa, Glycine max
  Clone ID: 700557008_FLI.pep
IMVFWVFGYGSLVWNPGFDYNEKIIGFIKDYRRVFDLACIDHRGTPENPARTCTLEEKEGAICWGAAYCVRGGPEKEKLAMQYLERRECEYDRKTLVNFFKEGDSLHPTLTDVIVFTSTPDKVNNKYYLGPAPLEDMARQIATAYGPCGNNRDYIFLLEKAMYDIGHEDDLVIELANEVRKVLGMGNVVPKEKKLVGAAQLPHPPHVTIPTLQLHPLPEPIAMDI

SEQ ID NO: 50193 - protein, 377 aa, Glycine max
  Clone ID: 700680718_FLI.pep
KMAGYQAFDHVTFYVGNALQAATFYIARFGMTPVAYSGLETNSRQVCTHVVRQGSINFAFSSALNPEGKETDEIGHHVWKHGDGCKDVAFKVNDCRAIYEKAIERGATSVSAPKELKDENGTVIMATIQAFGDTTHSFVQHVDYKGPFLPGFRAYTDVDPLTKMTPPIGLDFIDHIVSNHPDQQMETIVQWYEKILGWHRFWSVDDKQIHTEYSSLRSIVVADDTEKVKCPVNEPAKGKKKSQIQEYVEYYGGSGVQHMALHTNDIIHAVHHMKERGCKFLTIPASYYANVRERLQHSSTKVKEDMDTLQKLNILIDFDETGYLLQIFTKPSQDRPTLFFEVIQRHGHQGFGAGNFKSLFEAIERDQNDRGNLTDTA

SEQ ID NO: 50194 - protein, 392 aa, Glycine max
  Clone ID: 700683113_FLI.pep
LKHKMAEQIRREVATMKLIKHPNVVRLCEVMGSKTKIYIVLEFVTGGELFDKIVNHGRMSENEARRYFQQLINAVDYCHSRGVYHRDLKPENLLLDAYGNLKVSDFGLSALSQQVRDDGLLHTTCGTPNYVAPEVLNDRGYDGVTADLWSCGVILFVLVAGYLPFDDPNLMNLYKKISVAEFTCPPWLSFSARKLITRILDPDPTTRITIPEILDDEWFKKDYKPPVFEENGETNLDDVEAVFKDSEEHHVTEKKEEQPTAMNAFELISMSKGLNLENLFDTEQGFKRETRFTSKSPADEIINKIEEAAKPLGFDVQKKNYKMRLANVKAGRKGNLNVATEIFQVAPSLHMVEVRKAKGDTLEFHKFYKKLSTSLDDVVWKTEDDMQMRETK

SEQ ID NO: 50195 - protein, 140 aa, Glycine max
  Clone ID: 700683437_FLI.pep
TGKNCCFNESRVEFYLEQEPHPSSSKNLKHLFQMIRKGTYSKYDYGKLKNLIEYGKFNPPKFDLSRIPKSLPLWMAYGGNDALADITDFQHTLKELPSTPEVVYLENYGHVDFILSLQAKQDLYDPMISFFKSSGKFSSV

SEQ ID NO: 50196 - protein, 390 aa, Glycine max
  Clone ID: 700684110_FLI.pep
SCPRTSGCQLGKRPEDLWAIHSQPVFPRPHKKENPSWIAIQKVAARGEKIGLQHFVPIRPLGCGDTGSVHLVELKGTGELYAMKAMEKSVMLNRNKVHRSCIEREIISLLDHPFLPTLYTSFQTPTHVCLITDFFPGGELFALLDKQPMKIFKEESARFYAAEVVIGLEYLHCLGIIYRDLKPENILLQKDGHVVLADFDLSYMTSCKPQVVKQAIPGKRRSRSEPPPTFVAEPVTQSNSFVGTEEYIAPEIITGAGHTSGIDWWTLGILLYEMLYGRTPFRGKNRQKTFSNILHKDLTFPSSIPASLAARQLINALLQRDPTSRIGSTTGANEIKQHPFFRGINWPLIRNMTPPPLDVPLKLIGNDPVAKDIKWEDDGVLVSSIDMDIF

SEQ ID NO: 50197 - protein, 211 aa, Glycine max
  Clone ID: 700725317_FLI.pep
RGRHNPDWVRIKDWLDTQESSSVVYIGFGSELKLSQEDLTELAHGIELSNLPFFWALKNLKEGVLELPEGFEERTKERGIVWKTWAPQLKILAHGAIGGCMSHCGSGSVIEKVHFGHVLVTLPYLLDQCLFSRVLEEKQVAVEVPRSEKDGSFTRVDVAKTLRFAIVDEEGSALRENAKEMGKVFSSEELHNKYIQDFIDALQKYRIPSAS

SEQ ID NO: 50198 - protein, 466 aa, Glycine max
  Clone ID: 700673810_FLI.pep
NFSHMTMLPHSLTMIATLIIIFLAQTLVGVSSLPEADKITNLPGQPRVEFQQYSGYVTVDDQNQRALFYYFVEAEENPSSKPLVLWLNGGPGCSSIGVGAFAEHGPFRPSDNNVLEINDKSWNKVANVLYLESPAGVGFSYSSNESFYALVTDEITARDNLVFLQRWFTKFPEYSNNDFFISGESYGGHYVPQLAQLIVQTKTNFNLKGIAIGNPLLEFNTDFNSRSEYLWSHGLISDSTYEVLTRVCNFSSIRRQMQNGNLRGVCGKANKLLDSEISNYVDEYDVTLDVCLSSVNQQAYVLNQLQETQKIDVCIGDKTTTYLNTKEVQEALHANLVGVAKWSTCSSVLHYDYQNLEIPTIPILGSLVNSGIRVLVYSGDQDSVLPLLGSRSLVNGLAKEIGLDTTVAYRAWFEGKQVAGWTQVYGNILSYATIRGASHEAPFSQPQRSLGLLKAFLEGKPLPGVK

SEQ ID NO: 50199 - protein, 225 aa, Zea mays
  Clone ID: 700342648_FLI.pep
LARGAVRNPNILLEGRPKRQTKLHTDNTDAPTLPIHPFATRDLGGPPPHVQFGEHNPAPRVSRDKLADGFAGRPRRHAQGQEGRQAEGLLLLFQRVLLARAPPKGEHSDKLANTERTPSLPSSDALRLKPCPAGQVPGIHSPHPEERKCSRTLFCFLLLIKVSCIADMLMTYTSRVKRRVNLLTPDSNGGNSLPPLCFLAHHGVTELLERDYRLPSCLPVSPDIV

SEQ ID NO: 50200 - protein, 529 aa, Zea mays
  Clone ID: 700336085_FLI.pep
FGVIADRWSPESVESGAFTGDAVASLMPPAPAGFHKNAPEMYNLLDSMDVDVKPPPLVSSDSTGEMPLYGDKVHRSTSLPRVSKGVGFFAVDRDDDDDKSSGCTHPSTTTNKDFRSNCTAEYSRVRKLLTSKYRKVAPARVYKSDLSYSDVDRKPSFRNKKMHYTRQRTQRSTFKRRKLFDRHSVLASEFGTAHGKGNTKKVTGRDSHAVSLEANKGTSSTPFQKSRGSNDCHVKLKIKSFKVPELLVEIPESATVGSLKKTVLEAVTAILGGGLRVGVLHHGKKVRDDNKTLIQAGIGQEDMLDNLGFSLEPNCTQNPQVQAPEDISFLETIDTAEPLARIAPADSSSKHGEVDLSQEFALTPLAMNYQGSDHDSVHSPGGVSSPDKVSTNSRALVPVPAADPNAGAIVPANKSKRSPEQGQRRIRRPFSVAEVEALVLAVEKLGTGRWRDVKLRAFDNAKHRTYVDLKDKWKTLVHTASISPQQRRGEPVPQELLDRVLAAQAYWSQQQAKLQPKTPPLLAEARLLT

SEQ ID NO: 50201 - protein, 156 aa, Glycine max
  Clone ID: 700853030_FLI.pep
MQGEINIHQLFTGYTNGRSDWLAWPQILKLKDWPPSNLFEEQLPRHCAEFISSLPFKEYTDPHKGSLNLAVKLPNGSLKPDLGPKTYIAYGFPQELGRGDSVTKLHCDMSDAVNALTHIAEVKLDSDQLTVIEKLKQKHLEQEKRELLGDDQGWRN

SEQ ID NO: 50202 - protein, 477 aa, Zea mays
  Clone ID: 700799332_FLI.pep
GARVWSVVSPASRPPALLASSLALGFPVAMVLQRFSWPYGGRSATFCGSFTGWRECPMGLVGAVFQVVFDLPPGVYQYRFLVDGVWRCDETKPFVRDEYGLISNEVLVENNVQPVVQPEPSIRGTNMDKGTILKTMPPEPSSQNPSMQIAVIRHVVSGILLHNTIYDVVPLSSKLTVLDTQLPVKQAFKIMHDEGLALVPLWDDRQGTITGMLTASDFVLILRKLQRNIQVIGNEEPISAWKEAKLQFYGGPDGAAMQRRPLIHVKDSDNLVDVALTIIRNEISSVPIFKCMADSSGVPFLNLATLQGILKFLCSKLQEEAEGCSLLHNQLLSIPIGTWSPHTGRSSSRQLRTLLLSSPLNTCLDILLQDRVSSIPIVDDNGSLRDVYSLSDIMALAKNDVYARIELEQVTVQNALDVQYQVHGRRQCHTCLQTSTLLEVLEGLSIPGVRRLVVIEQSTRFVEGIISLRDVFTFLLG

SEQ ID NO: 50203 - protein, 205 aa, Glycine max
  Clone ID: 700864578_FLI.pep
LFQTIDENQDDNLTHNELRALVIGIQFEEIDLDHDDAVKRIMDDFDTSGNERVDREEFVNGVSRWLQRAQRARVASGDAGPHTMKFLSDFHTETKREHDLLDVGGQVNEEAEGIENAKWISIKAVLLLLLGTIIAAAFADPLVDAVDNFSEATSIPAFFISFIFLPLATNSSEAVSAIIFASRDKRQTASLTFSEVCFLVFTLSL

SEQ ID NO: 50204 - protein, 447 aa, Glycine max
  Clone ID: 700865409_FLI.pep
QELQDTTLGSLLSALMQHCDPPQRRYPLEKGVPPPWWPNGNEEWWPQIGLPKDQGPPPYKKPHDLKKAWKVGVLTAVIKHMSPDIAKIRKLVRQSKCLQDKMTAKESATWLAIINQEEALARELYPDYCPPLAASSGGSGSMVINDCNEYDVEGGDDEPNFDVEDRKPENLHAPNLGMDRMMGRLPSFPIKGEAVTNLDFIRKRKISGDFNMIMDQKIYTCEQPQCPYSEIHHGFADRNSRDNHRLSCPYRGSASTDYGGSNFHVNEAKPVIFPQQSFVQPKPTTTPSVVNLVPSVIDLTGLGVPEDGKKMITDLMSIYDTNVQSNKNLSSSNHVSAENPNLPQPGIQQQHDNFFRSQGISMEGNFFDEANMSNNNHHMFAREEGQFDRFKALNAPPFETNHNNNNFHLMFGSPCDLASFDFKEDMQGGVVGMDALQKQPDISIWYQ

SEQ ID NO: 50205 - protein, 637 aa, Glycine max
  Clone ID: 700742139_FLI.pep
MLFPTSGVRMNSAMDDMNLIQQTQRHHLVVREIGEEIDLEIGAGEDDPSFGSTTLIGAPMRESSVEEHGESKQMGMISQLPNDAQDMSKTQQGKRKKKVVKRWREEWADTYKWAYVDVKDGTPRIFCSVCREYGRKHRRNPYGNEGSRNMQMSALEEHNNSLLHKEALRLQMASKDKIVVDKPVYVKVAMSKTAGSILEATLKRDPHEVEFIQAVQEAVQALERVIAKNSRYINIMERLLEPERMIVFRVSWVDDRGGTCVNRGFRVQFNQSMGPCRGGIRFHPSMNLSVAKFLGFEQTLKNALSPYKLGGAAGGSDFDPKGKSDNEIMRFCQSFMSEMYRYLGPDKDLPSEEMGVGTREMGYLFGQYRRLAGHFQGSFTGPRIFWSGSSLRPEATGYGLVFFAQLMLADMNKELKGLRCAVSGSGKIAMHVLEKLIAYGALPISVSDSRGYLVDEDGFDYMKISFLRDIKAQQRSLRDYSKTYARSKYYDEAKPWSERCDVAFACTSQNEIDQSDAINLVNSGCRILVEGSNMPCTPEAVQILRKASVLIAPAMAAGAGGVVAGELELNHECSLMHWSPEDFESKLQEAMKQTYQRAMKAATDFGYQKESPEALVHGAVISAFLTIAQAMTDQGSI

SEQ ID NO: 50206 - protein, 249 aa, Glycine max
  Clone ID: 700905713_FLI.pep
VKTAGLLGDGFGSTPEMCKKNLIWVVTKMQVVVDKYPTWGDVVQVDTWVSASGKNGMRRDWLVRDAKTGEILTRASSVWVMMNKVTRRLSKIPEEVRAEISSYFVDSAPVVPEDNRKLTKLDDSANFIRTGLSPRWHDLDVNQHVNNVKYVGWILESAPQPLLESHELCAMTLEYRRECGRNSVLDSLSDLSGADVGNLADDGFFECKHLLRLDDGAEIVRGRTEWRPKPLNRNFGHVLSQVPVPAEST

SEQ ID NO: 50207 - protein, 489 aa, Glycine max; identical to SEQ ID NO: 43983
  Clone ID: 700678616_FLI.pep

SEQ ID NO: 50208 - protein, 282 aa, Glycine max
  Clone ID: 700897220_FLI.pep
WASIDWNTRMKIAICAAQGLTFLHEEGPFQAMYNEFSTANIQIDKDFSAKLSGYGCVGHIPEEEISSSSSAVGNLSMETLEKGMLTPKSNVWSFGIFLLELLTGRKNLDSRHPKEERNLVKWSRPFLADNYRLSLIMDPQLKGRFPSKAARTIADIAQRCLQKEPSDRPTMRTVVEHLKMIQDLKYSCRFPLQEPASNSGKHMSRSPSLNGIICPAPRLSFSPSPPSGIPVSVSPPRWSGGGPILLLPPRACASSLSLEELDRQESRKSSSSASRRASVEGF

SEQ ID NO: 50209 - protein, 189 aa, Glycine max
  Clone ID: 700895371_FLI.pep
DEIASQYNAGGYIPQQDGAGDADSQIFEIEVYGGGISIDAGHSTSNGKMPAHSDRPASQIPQFDGPIPYDDDVVSTPNMYNYGVFNEDYNIANTPASSDVPASTPAPVAQNEVDEEDDDDDEPLNENDDDDDLDDLDQGEDQNTHHLVLAQFDKVTRTKSRWKCTLKDGIMHINNKDILFNKATGEFEF

SEQ ID NO: 50210 - protein, 199 aa, Zea mays
  Clone ID: LIB143-001-A1_FLI.pep
THVTSLISAVQDQVVLLHSGIPSISIHQNSQSPQQQGARPAPAAGNKRHSSDGVRAGVRAVRDAEQPVPVQGGRADAGVRRVRGGRGHRVAAGGRRVPVPPPQGTTHHGAPGHRRVPARYQGHPDLIGRPISQVAVSCPGLCRQRTEMSSVQICESFYTRLPFFLNKSRKCVWFQFAYICTPIVSIAVNVRNTMYVISV

SEQ ID NO: 50211 - protein, 107 aa, Zea mays
  Clone ID: LIB143-032-D4_FLI.pep
PAQLQLQQEQPQLVPQLQVLQSQPPPSVAASKPPALALVVGAARTVVLMLLAAAVSTLGDMQLHELPQEQLEPQSHLPLLQDMITGEGEQALAVLGGGGRRRRGVVP

SEQ ID NO: 50212 - protein, 289 aa, Zea mays
  Clone ID: LIB143-044-G12_FLI.pep
RPFVTSMGDFVGHVLPGTLLLAVGLWRVWASVARFAADPAAFRVRAWNPVPAAGPRLLELHVVAGGAFLDMCVELYYANPLRVLTGGGVDPGHLGGLEHASMLLMFFLFGALALVSEKTRYLPLSDGALSLVFASAFTAEFLLFYFHSTTHAGLEGYYHRLLLAVLALCIAALVAGALLPASFPADLGAGVLIAVQGLWFYQAALALYGPMLPAGCVRHFDSPHSDARIECHGGTAQERAEQLANFQLFGLVFLAFVYALGCYAVAAARYGNNLELTTVHHTHVAATAM

SEQ ID NO: 50213 - protein, 107 aa, Zea mays
  Clone ID: LIB148-036-F8_FLI.pep
SISLQITTHHQPARSDDPHEMMTYNIYNTKTTTYVGSRIDEPNELRRRRGRASERGVSCTIIPLRPTFYTRTIGCDDHPRMHRSSANSSPSLRSPLSNIRTILRRSS

SEQ ID NO: 50214 - protein, 445 aa, Zea mays
  Clone ID: LIB148-036-F9_FLI.pep
STEDQSAKEASPSSQSELRRELGRGRLRRGLGRRRLVKVLEVAPHVEPFDVREVLVGRRRDVRRPGHLREHVPRDAGEERVGPDLVGAAGVPEPPPRVPLQQARDEIRELRRPPPGVPRELELLLQHVPERLLAVLALERRPPERHLVGEHADGPPVDGEAVALAAHHLWRHVLLRADEGVGLAPRGGGGAAAEARGLPAQRRHPRRLALPAHPGPVAAPHDVADQALELLPRRRRRGPGLVRGPGVVGVGVRLDLLAENRVAPRGDARPAVVVAAGRSWPRGRRRLRGRPAVVEEAGQVEVGERDVAVGAEEHVLGLEVAVHDARGVELGDRGDDLGNVEADGRGGEDAVGERVAELVEVAAGAVGDGPREKVVRLGEAEERGEVRVRKAGEHADLPPRAAVGVRLPAAGGGALVEDLEGVAAGAQGRGPLRDEEHGAHGAAAE

SEQ ID NO: 50215 - protein, 123 aa, Zea mays
  Clone ID: LIB148-061-C9_FLI.pep
IYRERSARSNDLETALYHESALFFLCASSSFGRKTVVFSLCKPAKTFSLVQTPAANPAAYAAPRAVVSMSAGLTTGLPNKSAWICIRRLLTVAPPSTRNKNSPSALFTSPASPASLCMELRTS

SEQ ID NO: 50216 - protein, 160 aa, Zea mays
  Clone ID: LIB189-003-E1_FLI.pep
KSAVKRKKADAAARHAALLLMMGHDGFTSPEVCLHYLFASGNVDSVVLGAALVELDGGEVVRLMRYLNKWIRKYWSFSEAHTCPEAVGNLRLEQCDSVPSFGAVARALGVLLDNHFSHLVLNADVREDLRAADLMVRELAAEAESSGPILDLLHRFQLDK

SEQ ID NO: 50217 - protein, 116 aa, Zea mays
  Clone ID: LIB143-020-F2_FLI.pep
NLTTSSKKLISGPILASGSVTDGSRKGSKSAKHVQTQHEPGDPEARAIHIYSRHTQAATIHEKQGEKTPLLGLEHVADQVDDAVAVAPLVVVPRDELDEVVVQSDPGLGVEDARPA

SEQ ID NO: 50218 - protein, 216 aa, Zea mays
  Clone ID: LIB143-021-D3_FLI.pep
KTKSDSTGRMHACRRRTVVLSVSLPQDGGVGDHAGDDVGVHVGSRPAVLEVSLALLLGVAADADGRAAVRHAPFEGVDVGGLVAAREAALVALAVRGDVLPVPPPQLLDRLLDHLVATGLPHRLGAVVGVSAGAVPVTLDRLRVEGENDPGHLSDPLENVAGDPYLVAGRDPNGRPDLELPLFDKEGTRPVVQNRTSSSDQQHASSTTTTCPGMTS

SEQ ID NO: 50219 - protein, 242 aa, Zea mays
  Clone ID: LIB148-009-A3_FLI.pep
AFPCLALPPPIYRPRRPPPHAFPPPRLPLPACSPTPGGPTTIRPRPRAVTASRDMARGGIARLLATLLLFLLLATPLADGASEAEAAGLAQGASEAAAPDAGADAQQQHLLPRPLVIELPSSRAEDEDEPGADAVPPDVRCASWRLAAEANNLAPWRAVPPECAPHVRDYVTGVAYRSDLDLVARESAAYARAAAPLGADGRDAWVFDVDETLLSNLPYYAEHGYGAELFDHHKFDEWVERG

SEQ ID NO: 50220 - protein, 92 aa, Zea mays
  Clone ID: LIB148-011-F5_FLI.pep
RWSPWAGTAGRSPSRRAAASTTASSSALAPALTPRRRRGWGGRWTSPRRRPSHSSAHTTSSATRGSSHRPSSDACHTIYLFEYEAKARDTNL

SEQ ID NO: 50221 - protein, 545 aa, Zea mays
  Clone ID: LIB148-012-B5_FLI.pep
TVSSPHDPVMVGGFLRRGHSLDRLLSRRRRAVSPSPSFSSSSSTPSSPRGSSVRSGMMAEDDDDAPTTVAAPPLQRRVLSRSHGSRATPGRSQDLPPVPSRTVRDSGPPSDLDLMKDKFAKLLLGEDMSGTGKGVSSALALSNAITNLAASIFGEQRRLEPMSAERRARWNKEIDWLLSVADHIVEFAPSQQVSEDGTNIEVMGTQQRGDLLVNIPALRKLDAMLLEYLDSFGEAQEFWYVAKDADGGEDDDDSTCDKWWIPTVRVPAEGLSDASRKWLQHQKDLVGQVLKAAMAINADVIAEMEIPEEYIESLPKNGRSILGDSMYKIITDDVFDPNELLQSVDLSTEHKIVDLKDRIEASVVIWHRKISNKLSWGPAGVSLEKREEFEERAQTALLILKHRFPGIPQSALDISKIQYNTDVGYAILESYSRTLESLAFAVLSRIEDVLHADAVACDPKRTKSRRRPSLECDAAAEAEAEAETAHHSGSVHWQDHQDAEDDGGEKHPDGNGRKLKKLHRVATKKFLHTQKIDGVAGGLKSFAHR

SEQ ID NO: 50222 - protein, 106 aa, Zea mays
  Clone ID: LIB143-030-G4_FLI.pep
RSWSTVVVQLALTGRRLLWQKFQRAPTSNFRRKAAFKQASQRTVRLVWTLHWRRWMPVTRTSLCRSYTQSGQLRLRAQRCRKERQFSWKGCLAQARPRPRKMLRTL

SEQ ID NO: 50223 - protein, 169 aa, Zea mays
  Clone ID: LIB143-030-H3_FLI.pep
EIKEMKEQMTELVGILRHSESRRREMEKQLKQREQTTPMATTPPKSGNGTTKHSADDPNTPLSPVAVPAQKQLKYSAGIVNSPSKGVAAIKKEQLKMVPIAQLSAGKRVSIAGHSGKLWRWKRSHHQWLMQFKWKWQKPWKLSEVIRHSDETITRIRPRPPLLPHKPHN

SEQ ID NO: 50224 - protein, 116 aa, Zea mays
  Clone ID: LIB143-044-C11_FLI.pep
RTVIIEKWKEKKYTSLSMLRIIGNAAQRGEKEFFLLSGRLLRFPTIVTSTTLFEPGLGRAASRDPGRYQVQEGMGIVVIIPPHSLGGANKKSSSSIAVYVIGTTMSRFFCSCQLVG

SEQ ID NO: 50225 - protein, 486 aa, Zea mays
  Clone ID: LIB143-061-G5_FLI.pep
PDPDSKEPWSLPASLTTTMAEGDGPTPARGARVVLFPLPSQGHLSPMLHLASALHARGLAVTVLHTAYNAPDPAHHPGLAFVAVPDVIPEAVAATTNGIAKILALNAAMEASGHVRGALASLLAEEAGGQRLACLIFDSTLFAAQKAAAGLGLPTLVLHTGSAAGFRLFRSDTYDMLHDRGYLPATESNLHMPVKELPPLQVRDLFDPSKLPNKEIVQKILGRATESTTNSSGAILNTFEDLESRELEMIRDELADRGIPPFAVGPLHKLTAVSNDGADETSLLSQDRVCMEWLDARAPGSVLYVSFGSVVHVTPDELVEIAWGLANSGVPFLLVVRRGLVVGVDKQELPDGFMAAVEGRGKVIEWAPQQEVLAHPAVGGFWTHNGWNSTLESIYEGVPMLSRPIFGDQLPTARYVCDVWRIGVLLEGVLERREVEKAIKKLMEEDEGVGIRGRAKDFKEKVRMCLESNGSSQLAVDKLVDHILSL

SEQ ID NO: 50226 - protein, 156 aa, Zea mays
  Clone ID: LIB143-061-H10_FLI.pep
LCKVIKEVLGDKVEKVVVSDRVVDSPCCLVTGEYGWTANMERIMKAQALRDSSMAGYMSSKKTMEINPENPIMDELRKRAEADKNDKSVKDLVMLLFETALLTSGFSLDDPNTFGNRIHRMLKLGLSIDEDEPVEAEAEMPQLEDDAGESKMEEVD

SEQ ID NO: 50227 - protein, 165 aa, Zea mays
  Clone ID: LIB148-024-E6_FLI.pep
SQACPLFIESTRQKITANAYLRDVTLIGLLYMCMKQSTKLYIVGHQIGRYTHACMHQIVIASHACMYDVSVIQCHASRQKTTTGGRALRSGRRRGAGPPAVLAEQRLLLLGAGGVAGLGDLSRLDHVVLVARLLAHLHLRRGDALLLGALALALDPAVQHQVGAL

SEQ ID NO: 50228 - protein, 99 aa, Zea mays
  Clone ID: LIB148-025-G11_FLI.pep
EVNRPVGSAARGASCAAKETQGGHRGDAENRTCGGSGRDLNSMPLEGGTEKQSRRTLDKLSHVHVPLCAVRFIHTHTKELLFTLYSRCCAKVGHLLCRR

SEQ ID NO: 50229 - protein, 148 aa, Zea mays
  Clone ID: LIB148-034-F12_FLI.pep
PVHMPRSAPRHASADRLHYLKPLKPHAHTLPLPSAAGVAAVVRQGHGPHRAALRLHLPRLRGGGSRGTVRGVQHHPSRDCPESAPAVSVPRSHAYIRLVATQDPGPPAPARRRRRTQDQRPQEATDAYHLMAAGSTTRLPRCRGRAPR

SEQ ID NO: 50230 - protein, 149 aa, Zea mays
  Clone ID: LIB148-035-C6_FLI.pep
TYVRIFWLTTIAEEFEGPNEKLLRGVNVYPTVPASHHTRSAGNAGGGGHDDEAGGAGGATVGLPRRLPGGLLLRGEAARVHHAQAGHHQAPLPPPPRQRLIWRRSTARPSACLHSPVGVTTIDDVLPHFVAPILVSNAKENVVRLSLRA

SEQ ID NO: 50231 - protein, 105 aa, Zea mays
  Clone ID: LIB148-057-A10_FLI.pep
KNSYSFVISRASRCTSQGINSSKRRKRGRFVGTAGGLNTLLTWLSFSSRLSFLSSDRRCWSSSTFDAHMWCSAVQCMLFVTSPAQSTLKATRTQSPAVLPPHVQL

SEQ ID NO: 50232 - protein, 99 aa, Zea mays
  Clone ID: LIB148-057-E3_FLI.pep
SIHQLQEEQDTTTVAPHAGTKKATNMARLALVAAVVLCLLLATGPQGAISAEGMVSFDNLISCKVLGNCDKNLGPEASRPGKPANDYTRGCNPITGCRG

SEQ ID NO: 50233 - protein, 175 aa, Zea mays
  Clone ID: LIB148-059-G3_FLI.pep
SSTGQKQPPVLVIVLQFITAMVVMDTWQYFMHRYMHINKFLYKHIHSKHHTLVVPYSFGALYNHPLEGLILDTIGGALSFLVSGMTPRTSIFFFSFATIKTVDDHCGLWLPGNILQALFSNNSAYHDIHHQLYGNKYNFSQPFFVMWDKILGTYMPYSIEQRKGGGIESKPAKLD

SEQ ID NO: 50234 - protein, 239 aa, Zea mays
  Clone ID: LIB148-064-H6_FLI.pep
GGRARAVHVPGVRQGAGARQAGVVRHSGAQRGAQGGGPGHGPLPRPQPPRRDLHPGPADHERVPERPGGHREDDRRPRLAPHRRHRLRRRRRRGLHRRPRQGAHQVQGLPGAAGRARGSARRPPVHRRRGRRPAKGRSRRRGPRRLRGPRRRRRHRGGRHQGVHLQAGGILQEATQGVLHPLHPQVGVREDPEEGAARQARGSRDRLRSLTLRFHALLRATRLVVAFTANPVYGYRRET

SEQ ID NO: 50235 - protein, 211 aa, Zea mays
  Clone ID: LIB143-017-A6_FLI.pep
GFLHAQMKRQPPHPRGGGGAAVGESGSGGGFHKGEGKGKGRWGGGCRRRNEQRLGVGGGGGALSLAAFASAKSRTTGYNPAVIKKQKEFYKNAKLISKYKRTKKQQSQSNDHPQIPIHEDGGDNAQYVPKPRYQGKKRTAHSLKEEYEKKRAEDEKAKKEQDAAVQAKREHREKSEAKRRELREKMFKKTRSGQPVMRYRIEHLLETALSK

SEQ ID NO: 50236 - protein, 107 aa, Zea mays
  Clone ID: LIB143-017-F1_FLI.pep
MMVVMRDQMTMRMRKMTMEMMMILQPMAKGEAMTTKMMVERMKRMMTTTTMMGTMAMRKRRKNLKRMMMMMKSPNHLLKRGNDQRLRRVVAYTQECCLFVPAQQFTV

SEQ ID NO: 50237 - protein, 148 aa, Zea mays
  Clone ID: LIB143-029-E8_FLI.pep
QERRSPLHSRRHPPLPLLFLEMTMTTMKKQQQLLLLLSLMFLVAVTAAAVAADPHPQQVQVQQQQQAQMRINRATRSLLPQPPPKLDCPSTCSVRCGNNWKNQMCNKMCNVCCNKCSCVPPGTGQDTRHLCPCYDTMLNPHTGKLKCP

SEQ ID NO: 50238 - protein, 304 aa, Zea mays
  Clone ID: LIB143-029-H4_FLI.pep
ARVVAALGYDDGRFAPGRCTGCEAGGDSGTEPYVVAHHLILSHAAAVQRYRRRHQPTQRGRVGILLDFVWYEPLTADSAADRAAAQRSRDFHVGWFLHPIVYGEYPKSVRRSVKGRLPKFTAEEAGLVRGSIDYVGVNQYTAYYVRDRRPNATAAPPSYSSDWHAEFVYERDGVPIGPRANSDWLYIVPWGLYKAVTYVKEKYGNPTMLLSENGMDDPGNVTVGQGVRDAARVAYYRSYVAELKAAIDGGANCVGYFAWSLLDNFEWKLGYTSRFGLVYVDFRTLRRYPKSSAYWFRDVIAGTN

SEQ ID NO: 50239 - protein, 115 aa, Zea mays
  Clone ID: LIB148-004-B9_FLI.pep
QSRVVDWNMVKKGEDEEEKKLNATYIISVARKLGCTVFLLPEDIMEVNPKMILTLTASIMYWSLQNQGPYKSSGPQDALLEEEEGEEEEEEEEEEEEEEEDFEGGVEDGVSETTT

SEQ ID NO: 50240 - protein, 162 aa, Zea mays
  Clone ID: LIB148-015-H9_FLI.pep
PWPRAWTSSPARRRSRGSPAARCWLESCRPTPAASAWSWTAPPRPSASPSTRPGHWSSPASARSRRRRSASAQACHVSGHRSNANHCQFLLPLRILVRTWSQASLRHLHRRLPTNQQRQRRKKPTQLQMPLQQMEPQAPQTQRMQRAYCFSSAHCCMPSNKW

SEQ ID NO: 50241 - protein, 510 aa, Glycine max
  Clone ID: 700986053_FLI.pep
STLISKEGMEKMLGRNCGKLKTKIVCTLGPSSRSVEMLEKLLKAGMNVARFNFSHGTHSYHQETLDNLRTAMNNTGILCAVMLDTKGPEIRTGFLNEGKPIQIHRGQEITITTDYSIKGDENMISMSYKKLAHHLSPGSNILCADGTISFTVLECDKENGLVRCHCENSAVLGERKNVNLPGVVVDLPTLTEKDKEDILEWGVPNKIDIIALSFVRKGSDLVEVRNLLGKHAKSILLMSKVENQEGVANFDEILENSDAFMVARGDLGMEIPIEKIFLAQKVMIHKSNIKGKPVVTATQMLESMIKSPRPTRAEATDVANAVLDGTDCVMLSGETAAGAYPDIAVQTMARICSEAESFIDYGDLFKRVMETAPTPMSPLESMASAAVRTANCINAALILVLTRGGTTSKLVAKYRPSMPILSLVVPEITTDSFEWFCSQEAPARHSLIYRGLIPVLGTGSFGDSMTESTEETIQLALSYAKKNDLCKPGDSVVALHRLESGTVIKILDVC

SEQ ID NO: 50242 - protein, 443 aa, Glycine max
  Clone ID: 700670512_FLI.pep
IFKPCSILHSTHTRRIMASILHYFLALSLSCSFLFFLSDSVTPTKPINLVVLPVQNDGSTGLHWANLQKRTPLMQVPVLVDLNGNHLWVNCEQQYSSKTYQAPFCHSTQCSRANTHQCLSCPAASRPGCHKNTCGLMSTNPITQQTGLGELGEDVLAIHATQGSTQQLGPLVTVPQFLFSCAPSFLVQKGLPRNTQGVAGLGHAPISLPNQLASHFGLQRQFTTCLSRYPTSKGAIIFGDAPNNMRQFQNQDIFHDLAFTPLTITLQGEYNVRVNSIRINQHSVFPLNKISSTIVGSTSGGTMISTSTPHMVLQQSVYQAFTQVFAQQLPKQAQVKSVAPFGLCFNSNKINAYPSVDLVMDKPNGPVWRISGEDLMVQAQPGVTCLGVMNGGMQPRAEITLGARQLEENLVVFDLARSRVGFSTSSLHSHGVKCADLFNFANA

SEQ ID NO: 50243 - protein, 474 aa, Glycine max
  Clone ID: 700752221_FLI.pep
FESLEIEMANENEPAKLLLPYLQRADELQKHEPLVAYYCRLYAMERGLKIPQSERTKTTNALLVSLMKQLEKDKKSIQLGPEDNLYLEGFALNVFGKADKQDRAGRADLTTAKTFYAASIFFEILNQFGAVQPDLEQKQKYAVWKAAEIRKALKEGRKPTAGPPDGDEDLSVPLSSSSDRYDLGTTENTVSSPGPESDSSRSYHNPANYQNLPSIHPAAPKFHDTVNDQHSANIPSSMPFHDRVDNNKHSSVVSPSSHSFTPGVYPSQDYHSPPPSRDYHSPPPSQDYHSPPSSQDYHPPPPSQDYHPPPSQDYHPPPARSEGSYSELYNHQQYSPENSQHLGPNYPSHETSSYSYPHFQSYPSFTESSLPSVPSNYTHYQGSDVSYSSQSAPLTTNHSSSAQHSSRNETVEPKPTTTQAYQYDSNYQPAPEKIAEAHKAARFAVGALAFDDVSVAVDFLKKSLELLTNPSAGQ

SEQ ID NO: 50244 - protein, 117 aa, Glycine max
  Clone ID: 700790029_FLI.pep
IAIWKAGNMPVQYRRIKCRKEGGMRFTVTGSGIFISVLISNVAGHGDVVEVKVKGSRTGWLSMGRNWGQNWHVNALLQNQPLSFEVKASDGKTVTSYNVAPKDWTFGQTFEGKQFET

SEQ ID NO: 50245 - protein, 174 aa, Glycine max
  Clone ID: 700830011_FLI.pep
EVVRRALLKMAEEADFFGDTVPPKLKVPFILRTPDMSAMHHDTSSDLKVVGNKLKDILEISNTSLKMRKIVVELCDIVATRGARLAAAGILGILKKIGRDTVKVGEKQKSVIALDGGLFEHYTKFRECLESALKELLGDEAAETIVIEHANDGSGIGAALLAASHSQYLGVEES

SEQ ID NO: 50246 - protein, 513 aa, Glycine max
  Clone ID: 700667058_FLI.pep
HSHESFGPLQRSSRVANMATQSPPPPTPTATDQNQGSEVVQATTVDQQNAREEPAKQSSTTSVFVNSQLMREEQIQNAVKFLSHPKVRGSPVMYRRSFLEKKGLTKEEIDEAFQRVPDSAPTVQTGGVNQDGQLKSSSNIQQQAQHQTLQPGLPASTGVNTSPGTLSRSKFHWSHTLIAVGLLAASGAGTAIIIKNSVLPRLKSWIRKVVLDNDDEQLKKTDNKPTLMEEAAQAAKSAAAAAADVAKASQEMLASKGEERRYFVEVVSLLDKQVQEMKSMTNAIRRLEGQEDLQISQTSSKQLIVNGKADYDLHSVRFSSPPTSVEPSSGLHPKAYAEIMAMVQRGEKSSNIRPWEVSQVQSTSTQMLQSQVNGEDLNTKAQDTPLVNGDDSLPWWQRKNVRIREIDNENESNGVPYASASNQQPVQRVWVPPQPPPIAMPEAAEAIRRPKPAAQKEQVSDNQSVAHSLDSSDDVHMAPKLLESEGAVEGSSVSSVPTSSEIQEEHEVKYDEK

SEQ ID NO: 50247 - protein, 228 aa, Glycine max
  Clone ID: 700673793_FLI.pep
SSRSCGCGCCCHCCSLYISRLHLCIPCISCSCFPCISCISCSCFPCILCLALNILPNFLGFLPYFFGLLPHVLRRLRQMVLRRSGQILRRRLGLPDVVQDPGEGRQRREPKDSRRQEPGHGQANCDRGRNQHRAEDDEERCCHHQPGESSSQGQSCQEQEDAADRKAGDNCENLRGRRTSLGMVNGRGRLDAGFVTRRLKTSRRDDAGFVAVCCCVHLDTVWWHCGHG

SEQ ID NO: 50248 - protein, 222 aa, Glycine max
  Clone ID: 700674328_FLI.pep
AGKPAVLTRVVDSMTDNLRPTRAEATDVANAVLDGSDAILLGAETLRGLYPIETISTVGRICSEAEKVFNQDLYFKRTVKYVGEPMTHLESIASSAVRAAIKVKASIIICFTSSGRAARLIAKYRPTMPVLSVVIPRLKTNQLKWSFSGAFEARQSLIVRGLFPMLADPRHPAESTSATNESILKVALDHGKSLGVIKSHDRVVVCQKLGDASVVKIIELED

SEQ ID NO: 50249 - protein, 122 aa, Glycine max
  Clone ID: 700852469_FLI.pep
VVLVCMASFTKLAWVVLVCMVVMGAHNTVQGITCGQVQGNLAPCLGFLHNGGAVTRGCCNGVRSIVSNARTTADRRGVCNCLMVAAGAVRRFNTYNAQALPGKCGVYIPYKISTSTNCNSIR

SEQ ID NO: 50250 - protein, 249 aa, Glycine max
  Clone ID: 700853788_FLI.pep
PKPTTTMASYQKHYDDQGRKVDEYGNVERQTDEYGNPVHATSVTYVATKSVGGYNDDTNKQHDTTGVYPEKDTGRHHFGRGYDGDTNKQQHDAIGVYPGIDIGRDHETTGVYGLNTDRHHGTTGVNPGIDTHNQQHGTTGGYAGDTGRQHGNTGGLYYGTDTADTGTGPRSGNTGGTGYGGTGGTDYGTAGGTGYGSGTGYGINTGGAHTEAGYGKEHRQHEQSHGGQHEKKGILDKIKEKLPGGHSDK

SEQ ID NO: 50251 - protein, 113 aa, Glycine max
  Clone ID: 700787360_FLI.pep
LKYIDPTYMIRAIPSNASDNVYCTLLAQSAVHGAMAGYTGFTVGPVNGRNCYIPFHLINEGEKRVVITDRMWARLLSSTHQPCFLNPKEITGEREERTENQTTEGQNHSEIAD

SEQ ID NO: 50252 - protein, 68 aa, Glycine max
  Clone ID: 700791582_FLI.pep
TLSILFMQSCEVYCNLKRHFFFTVSRFAGLSQQNSLVRILLELAQGHQTLNFQQQCSLPLLMRPHLWL

SEQ ID NO: 50253 - protein, 591 aa, Glycine max
  Clone ID: 700743672_FLI.pep
LVVGKVYAKIMEIESRLLPCGLHVIGEPPSALEAVATLVNIAALDRPEDGISSLPSILAETVGRSIEEVYRGSDKGILKDVELLRQITEASRGAITSFVQRTTNKKGQVVDVADKLTSILGFGINEPWVEYLSNTKFYRADREKLRTLFDFLGECLKLVVADNELGSLKQALEGKYVEPGPGGDPIRNPKVLPTGKNIHALDPQAIPTTAAMQSAKIVVDRLIERQKAENGGKYPETVALVLWGTDNIKTYGESLAQVLWMIGVNPVADTFGRVNRVEPVSLEELGRPRIDVVVNCSGVFRDLFINQMNLLDRAVKMVAELDEPAEQNFVRKHALEQAQALGIDVREAATRVFSNASGSYSSNINLAVENSSWNDEKQLQDMYLSRKSFAFDCDAPGAGMTEKRKVFEMALSTADATFQNLDSSEISLTDVSHYFDSDPTNLVQSLRKDGKKPSAYVADTTTANAQVRTLAETVRLDARTKLLNPKWYEGMLSTGYEGVREIEKRLTNTVGWSATSGQVDNWVYEEANTTFIQDEEMLKKLMNTNPNSFRKLVQTFLEANGRGYWETSEDNIDKLRQLYSEVEDKIEGIDR

SEQ ID NO: 50254 - protein, 352 aa, Glycine max
  Clone ID: 700741257_FLI.pep
VCIIKNTATLAGSLFTLHASQIHIDLPTLTEKDKEVISTWGVKNKIDFLSLSYTRHAKDVRQAREFLSKLGDLSQTQIFAKIENVEGLTHFDEILQEADGIILSRGNLGIDLPPEKVFLFQKSALYKCNMAGKPAVLTRVVDSMTDNLRPTRAEATDVANAVLDGSDAILLGAETLRGLYPIETISTVGRICSEAEKVFNQDLYFKRTVKYVGEPMTHLESIASSAVRAAIKVKASIIICFTSSGRAARLIAKYRPTMPVLSVVIPRLKTNQLKWSFSGAFEARQSLIVRGLFPMLADPRHPAESTSATNESILKVALDHGKSLGVIKSHDRVVVCQKLGDASVVKIIELED

SEQ ID NO: 50255 - protein, 317 aa, Glycine max
  Clone ID: 700741294_FLI.pep
IIAYIFQGILLDGSQIAVKRLSKSSKQGSNEFKNEVLLIAKLQHRNLVTLIGFCFQEEEKILIYEYVPNKSLDYFLFDSQPQKLSWSERYNIIGGIAQGILYLHEHSRLKVIHRDLKPSNVLLDECMIPKISDFGLARIVEINQDKGNTSVIVGTYGYMSPEYAMFGQFSEKSDVFSFGVMVLEIISGKKNFSSYESHRITNGLLSYVWKQWSDHTPLNTLDPDITENYSEIEVIKCIQIGLLCVQQDPDARPTMVTVASYLTSHPIELPTPQEPAFFLHGRMHENPVANESSSNQSINTSTPFSNNQMSISQFLPR

SEQ ID NO: 50256 - protein, 190 aa, Glycine max
  Clone ID: 700746240_FLI.pep
SISLIDEPCKSAHLAAMSIAKNSGCILSYDPNLRLALWPSADSARKGIMDIWDQADVIKISEDEITFLTGGDDPYDDNVVLKKLFHPNLKLLIVTEGSQGCRYYTKAFKGRVAGVKVKPVDTTGAGDAFVSGILYCIASDQTIFQDEKRLRKALYFANVCGALTVTERGAIPALPTKEAILQFLLEAAVI

SEQ ID NO: 50257 - protein, 384 aa, Glycine max
  Clone ID: 700747514_FLI.pep
GQTEQKPNTPHSCNQSMAEPSSSKPAVPLLKDELDIVIPTIRNLDFLEMWRPFFEPYHLIIVQDGDPNRTIKVPDGFDYELYNRNDINRILGPKASCISFKDSACRCFGYMVSKKKYIYTIDDDCFVAKDPSGKDINALEQHIKNLLCPSTPFFFNTLYDPYRAGADFVRGYPFSLREGAPTAVSHGLWLNIPDYDAPTQLVKPLERNTRYVDAVLTIPKGTLFPMCGMNLAFDRQLIGPAMYFGLMGDGQPIGRYDDMWAGWCVKVICDHLGLGVKTGLPYIWHSKASNPFVNLKKEYKGIFWQEEIIPFFQSATIPKECTSVQKCYIELSKQVKEKLGAVDPYFTKLADAMVTWIEAWDELNSTTSEEASSKSANGAAAATK

SEQ ID NO: 50258 - protein, 609 aa, Glycine max
  Clone ID: 700747557_FLI.pep
QAWIARVREMDVFQSTTNQTLQAELRERTEQYNQLWMGFQRQFAEMERVHLHAIQQLQLELADARERSGTFNDDSRMSQINSKNNVTQFGQENGSQFDLNGSNASGGNNGLLPSESTANDGPFVSTGNASIQTEHVAGVPIAPSSLIVPPSYLPHSQVTALHPFVMHQQGVPNSVASHVPQSHVGHFHPVPSMSPVQQWQNHQSVSEGSQVPVQEHSSPSQTDQHLMRSDAKFSYEMSVNGKTLHRDYLDAHIQQGEEAQTMIFSATSETQVSQSVDKGQLVASHQDQSMQQISSQFSDALQLNSFEPNGEIKEQNSVTLSNNGPDDQVLLAEQASSAAIASSVTSHSVNHNEMIQNNSTDSVLSEVFTSSALTASTIAKTSEITLLDGKSLLACIVRTIPAGGRIRISSTLPNRLGKMLAPLHWHDYKRKYGKLDDFVASHPELFLIEGDYIQLREGAQKMVAATAAVAKVAAAAAAASTPYSSYMSTVAVTPMAQSHRMKKAPSNLGDDPLKMSVMQRQQTNGALSVAGGLSNVKILSKSKVSREMDGPESRVVQSSVQLPVGNGGSIDKSSMSSAQISGSANGRLVSSFASKQQTRATGAVYPSQR

SEQ ID NO: 50259 - protein, 149 aa, Glycine max
  Clone ID: 700748236_FLI.pep
ILSYIEHGKREGATLLTGGNTVGNKGYYIEPTIFSNVKEDMLIARDEIFGPVLALMKFKTMEEAIKSANNTKYGLAAGIVTKNLDTANTMSRSIRAGIVWINCYFTVGSDVPFGGYKMSGFGRDLGLQALHKYLQVKSVVTPIHNSPWL

SEQ ID NO: 50260 - protein, 387 aa, Glycine max
  Clone ID: 700749069_FLI.pep
LCILHQKQALLSHSMEAKSSNQIKEESNDSNYDRKAEIKAFDDSKTGVKGLVDSGVKKIPRMFLSGIDITENVASDSNLSIPVIDLQDIHNNPALHNEVVTKIRSACQEWGFFQVINHGIPISVMDQMIDGIRRFHEQDTDVRKQFYSRDLKKTILYNSNTSLYLDKFANWRDSLGCSMAPNPPKPENLPTVFRDIIIEYSKEIMALGCTIFELLSEALGLNPSYLKEMNCAEGLFIQGHYYPPCPEPELTLGTSKHTDSSFMTIVLQGQLGGLQVLHEKLWFNVPPVHGALVVNVGDILQLITNDNFVSVYHRVLSNHGGPRVSVASFFSNSHDPAKGASMVYSPIKELLSEENPAIYRDTTIGEIMAHHFAKGLDGNSALQPFRL

SEQ ID NO: 50261 - protein, 57 aa, Glycine max
  Clone ID: 700751422_FLI.pep
MAATRKSYDWRLLKKCDFLFQKFYWSLRMKSPYYFFFTGFAVEFLGNIYLLFLPPDS

SEQ ID NO: 50262 - protein, 113 aa, Glycine max
  Clone ID: 700752365_FLI.pep
FNLSPLFEEKRKEEMRFATAGTPSSVISRLEEVAKAGKFDVKSSETKVRLQGQERGRKGKLAIAADIYAVTPSFMVVEVKKDNGDTLEYNQFCSKQLRPALKDIFWNSAPASA

SEQ ID NO: 50263 - protein, 207 aa, Glycine max
  Clone ID: 700754245_FLI.pep
SVLAVAGADPLEMAEDWNRTALLVIDMQKDFIEDGGPMLVKGGKDIVPNVIKAVDVARQRGILIVWVVREHDPLGRDVELFRRHLYAAGKVGPTSKGSEGAELVDGLVIKEGDYKLVKTRFSAFFATHLHSVLQGAGINSLVVTGVQTPNCIRQTVYDAVALDYQPVTVIVDATAAATPDIHLANVFDMENIGVATPTLQEWSEPKA

SEQ ID NO: 50264 - protein, 137 aa, Glycine max
  Clone ID: 700786047_FLI.pep
SNNALDSNGSVVGFPPKQSSYSCIQMNGKEVFRFAVRCVPQSIESALQKAGLPASSIDWLLLHQANQRIIDAVATRLELPSERVISNLANYGNTSAASIPLALDEAVRSGKVKAGQTIATAGFGAGLTWGSAILRWG

SEQ ID NO: 50265 - protein, 429 aa, Glycine max
  Clone ID: 700844360_FLI.pep
SLSSPSLPWRMPIFRGSIAPSKTTIGVSQVASPRLPDSTRSIPRLNSTRRTLTPSFGWVPMIQALPFLASSNGNENGVSLKAWISENPDVLGHKVLHKWGSDLPFLFKVLSVGKALSIQAHPDKELARTLHKLHPDLYKDGNHKPEMALALTNFEALCGFITLKELKGVLHTVPEIVELVGATNTNLVLQTNDQDGEEKVKPVLQAVFTDLMSASKDRVTDAVNRLKSRLLKESEVRQLTDKEQLVLRLEKQYPADVGVIAAFFLNHVKLNPGEALFLGANEPHAYLSGECVECMATSDNVVRAGLTPKHRDVQTLCSMLTYKQGSPEILRGVSVNPYVNKYTPPFEEFEIDRCILPQGETVVFPAVPGPSIFLVTVGEGTMNTGLPKGHVVTEGDVLFAAANTEISVTSASELNLYRTGVNSKFFQAS

SEQ ID NO: 50266 - protein, 85 aa, Glycine max
  Clone ID: 700855209_FLI.pep
NVKVVVSESGWPSEGGVGATVQNAGTYYRNLINHAKGGTPKRPSGPIETYLFAMFDENQKDGPEIERHFGLFRPDKSPKYQLSFN

SEQ ID NO: 50267 - protein, 81 aa, Glycine max
  Clone ID: 700830969_FLI.pep
LNNEISEERTGLFLAWFLLWLWWPQCNLYCSIKNCLHILLCFGAALNISDCTNHFLQFFTLSSCYSCGSRMINQKLLVISQ

SEQ ID NO: 50268 - protein, 516 aa, Glycine max
  Clone ID: 700831516_FLI.pep
LPPSKREFKDIYVVFELMESDLHQVIKANDDLTREHHQFFLYQMLRAMKYMHTANVYHRDLKPKNILANANCKLKVCDFGLARVAFSDAPTTTFWTDYVATRWYRAPELCGSFFSKYTPAIDIWSIGCIFAEVLTGKPLFPGKSVVHQLDLITDLLGTPPPETIAGVRNDKARKYLMEMRKKSPVPFEQKFPNADPLALRLLQRLLAFDPKDRPTAQEALADPFFKGLAKVEREPSCQPISRLEFEFERRRVTKDDVRELIYREILEYHPQLLKDYMNGTEGTHFLYPSAIDQFRKHFAYLEENHGKSGPVIPPERKHVSLPRSTVHSSTIPPSTQPSFTSYENKHMAEEASKVTRSVESNSGSQLRSSRPPPRVPAAKPGRIVGPVLHYDNGRTLKDTYDQRIFYRNTLPQAVSPHCFHRVQQPTITKTTSETYKNIPQGKHQLPSQQCSMPARPTIDLNTNPYYQQGKSDHLNDPVASIDAKLLQAQSQFGGVGAAAVAVAAHRHSGSFQYGLS

SEQ ID NO: 50269 - protein, 234 aa, Glycine max
  Clone ID: 700839035_FLI.pep
VKMATPPVVRFPIFTAVRAVGVAVTVLLLTWAVHFRGGLALVSDNKDLIFNVHPVLMVIGLVLINGEGMLAYKTLSGTKNFKKSVHLALQFAALILSLIGVWAAWKFHIDKGIDNFYSLHSWLGLACLFLFTIQWGAGFATFWYPGGSRNSRAALLPWHVFFGIYIYCLAIATTATGILEKATFLQVNNIISRYSNEALLVNSLGILIVILGGFVILGIVTPVYGKADVIRGNE

SEQ ID NO: 50270 - protein, 336 aa, Glycine max
  Clone ID: 700838409_FLI.pep
VVTRNAAMPAYASSALPHSQLGHSGEPHGWFYCLPRFRQGFTTPAQTFNAEEKLPAGHANGLGVEVAPNRESGFPQKQLLVIDQTGDQTTLVYSSRFGGPVDCHVSWDSKLHGSINLNNGNELLNLRRDVNHVVGLGPTLDDKVHENTGTDDDIESEMHEDTEEINALLYSDSDGYSTEDDDDDEVTSTGHSPSTMTTHDDNQEEPHRRTAEEVASSVGETKKRKLLDGAYDDDNLQFMDTASSLNGKKRPFEVEDDAESRCSSGGNSSSRGSGGMGSLSGNKKMRKEKIQDVLSILQCIVPGGKDKDPIELLDEAIRCLKSLKLKAIELGLDATI

SEQ ID NO: 50271 - protein, 137 aa, Glycine max
  Clone ID: 700672582_FLI.pep
ARGTYIIYLISPYKPHHNNTLMLPLISELLIMRLRLLLSLLFSLHPLPPPLHPLQQLPLHPLQLPPLHPLQLPPLYPVPCSEYPAQPPWSSAPLPSSSAPRTPPPRRGDASRRRRGSPRLAGSPGCSSGSRRRKTAP

SEQ ID NO: 50272 - protein, 55 aa, Zea mays
  Clone ID: 700624316_FLI.pep
KIDCIYTYKLYVLRGTGHEPKLRTTFVACVHNYPPWTLILKPQHGHGHPNLQRCT

SEQ ID NO: 50273 - protein, 602 aa, Zea mays
  Clone ID: LIB148-016-C3_FLI.pep
IPTTLHSDYIYCVCVLYAVCVCELAQIGHLGRAYPAMKGAVIGASTVLVVAVVATICVVSFKGSGDGGRAEEGEMSTSVKSIKSFCQPVDYRETCEKALEAAAGNATSPTELAKAIFKVTSDRIAKAVRESALLNELKHDRRTSGALHNCGELLDYAIDDLRTTFDRLGGFEMTNFKSAVDDLRTWLSSALTYQETCLDGFENTTTPAAGKMRKALNSSQELTENILALVDEFSETLANLGLPSFHRRLLAEHARGAPSWMPDAKRRLLLVSPGEKGFRPDVTVAKDGSGDFRTINAALAKVPLKSATTYVMYVKAGKYKEYVSVARNVTNLVMVGDGATKTVIMGHKSFMMNITTKDTATMEAIGNGFLMRGIGVKNTAGAKNHQAVALRVQSDMSAFYECRFDGYQDTLYTHTSRQYYRDCVITGTIDFIFGNAQVVFQNCLIQVRKCMDNQQNIVTAQGRKERRSVGGTVIHNCTVAPHPEFEKSVGRFRTFLGRPWKEHSRTLYIQSEIGGFIDPQGWLPWLGDFGLSTCYYAEVENHGPGANMSERVKWRGIKNITYQHALQKYTVESFIQGQHWLPQLGVPFIPGLLPQQQSGRIH

SEQ ID NO: 50274 - protein, 272 aa, Zea mays
  Clone ID: LIB189-001-G2_FLI.pep
THIIATMPITVPQATELKDLFSLKGKVVIVTGASGPTGIGTEAARGCAEYGADLAITYNSRAEGAEKNAKEMSEKYGVKVKAYKCQVNEYAQCEKLVQDVIKDFGKVDVFIANAGKTADNGILDATVEQWNEVIQTDLTGTFNCARAVGLHFRERKTGSLVITSSMSGHIANFPQEQASYNVAKAGCIHLAKSLANEWRDFARVNSISPGYIDTGLSDFVPQDIQKLWHSMIPMGRDAKATELKGAYVYFASDASSYCTGSDLLIDGGYCVR

SEQ ID NO: 50275 - protein, 288 aa, Zea mays; identical to SEQ ID NO: 47549
  Clone ID: LIB143-038-F10_FLI.pep

SEQ ID NO: 50276 - protein, 255 aa, Zea mays
  Clone ID: LIB143-050-C5_FLI.pep
SDVAIKRINDRCFAGKASEQERMRTDFWNEADKLASLHHPNVVAFYGVVVDGPGGSVATVTEYMANGSLRQALQRHEKIFDRRRRLLIAMDVAFGMEYLHGKNIVHFDLKSDNLLVNLRDPQRPICKVGDLGLSKVKCQTLISGGVRGTLPWMAPELLNGSSSLVSEKVDVFSFGIVMWELLTGEEPYAELHYGAIIGGIVNNTLRPPVPESCDPQWRSLMERCWSAEPSERPSFTEVGKSLRAMASPTKAQQSK

SEQ ID NO: 50277 - protein, 147 aa, Zea mays
  Clone ID: LIB143-050-E5_FLI.pep
EMLRHFFEDTFVVTRLDPDGKKFDRVSRVEARSEQLDMYMQLDVATDVYPMHAGEKFNMVIAPTLNLDGTPDTGYYTQAGRKTLADNYEYVMQGKLYKISEDTSSSQNAKVEMYASFGGLLMLLRGDPSTAASFELDQRLFLLIRKV

SEQ ID NO: 50278 - protein, 133 aa, Zea mays
  Clone ID: LIB143-052-A1_FLI.pep
VYNLMKSMKGQIQLDEVHDLVGLQIDLDGVVGLDERVGVADGAVVVGVQVGDDFLAKLDRPHLAELELHTNQYISVVLERQLILERQLTATAISSIISCHSRLWEIGGYMLYRILGSTIQIDTFLLCSGDRSN

SEQ ID NO: 50279 - protein, 172 aa, Zea mays
  Clone ID: LIB143-068-D2_FLI.pep
SLSSEDVGQVLAVTGASLLVYQLFLYPRINKVLGPIKSSRIAAILCIPILFAYPYMTYISEPGLSIILNIASAIKNNLAVTIITGTFILQNNAVPQDQRGAANGLSMTGMSFFKALAPAGAGIVFSWAQKRQHAFFFPGDQMVFFLLNVVELVGLILTFKPFLAVPERCDSR

SEQ ID NO: 50280 - protein, 218 aa, Zea mays
  Clone ID: LIB148-020-C10_FLI.pep
LTRTNQDWKITANDCKCSMDGWMDEPCVCVRVFYKLRIPYSAAWSWLRGCGSRRRRMFASLSADQVVPSGSDEGQATEPKPSGSLFRLSNLGRIVCLGRRDFAPVAQLTRRRSDPDGVIGVGGVGVGHDPVDGRRLLLAVVPEAGRAGHRRQRGGPLLRRLLGLRRHLAPSPPAPGRRLRRLLRRRRRRRQTRGGRLAVPPHPRPRPPPPPGPGPVGG

SEQ ID NO: 50281 - protein, 293 aa, Zea mays
  Clone ID: LIB148-032-B4_FLI.pep
PTRVQHAADDADLQGLPVAIKQLDRNGFQGNNEFMVEVLMLSMLHHPNLVSLVGYCAEGEQRLLVYEYMALGSLEDHLLLLRDDGHGSPLPWRTRMKIALGAARGLEYLHESAVIYRDLKSSNILLDQDYAPKLSDFGLAKLLPAPRTTDSSSSSSSSSSSGGGKVMGTYGYCAPEYLRTGKLSVKSDVYSFGVLLLELITGRRAIDASRPDGEQSLVGWAAGMFGDSTRFHELLDPRLVMAIRGRPTASQLKQAVGVASMCLQEHHALRPVMADVVVALSFIANDSPASPPC

SEQ ID NO: 50282 - protein, 216 aa, Zea mays
  Clone ID: LIB148-032-D6_FLI.pep
WVYFKLASVASRHHRSRHKRRIQSPKQSQTLSTHDTSRDSTSSNSNRIRKDASHYQASCQETRRYFSSRQIVARLHRGSGIRSRREPPGKIPVLPQPSTPKKRGRKKRDPRTRAGLGGAGGGGEDPRPDEVGEEAGEDEQERVVHRDEQRRGPVAPALGRLLPRSGAELIGLVHLALLPLPSPVPATPRAAGWEKRPARVEDDPRDLPRAPVYHQI

SEQ ID NO: 50283 - protein, 323 aa, Zea mays
  Clone ID: LIB148-038-F12_FLI.pep
HRSDQDACVPPRYHHSCSRSSALPRGRRWRWYAGAISWGIRRRGAVGGGASRRAVPSGRRRRIRRRQCDLGRHGAGSLGDEVQRDAQQLLKLEALGYADVLDVADGGVLAGVLAGGGAAERGGEPGLDLEEPGVGEVAGEGAEVRHGFLDVLGAGVDALVQDVVVLDGVELVVRERGHGHAHLGRHVHEQLGQPARRDRRLRLALWVVLERVHAHLGEQRLVARLLEVSGAAGGVGDGPHGGRGGDKEDGKEEVRDGASHSHGASRRAGGDGVCVCVSPPLWSVVPGDGDERKGTTRTGLYTCYLASLLELQAVKLGRFSPWS

SEQ ID NO: 50284 - protein, 295 aa, Zea mays
  Clone ID: LIB148-039-B2_FLI.pep
HLPLIAKVEVFQHALQNTEGNDLAKVLWLKSRTSEVWLERRTNYARSLAVMSMVGYLLGLGDRHPSNLMLDRYSGKILHIDFGDCFEASMNREKFPEKVPFRLTRMLVKAMEVSGIEGTFRTTCENVMQVLRTNRDSVMAMMEAFVHDPLINWRLFNFNEVPQVSNYGNVHAHTVVSSEEAVANRELMQPQRGARERELLQAVNQLGDANEVLNERAVAVMARMSDKLTGRDFSSGSALAGAGSSIQHGSEHLASGDARDAQPGLSVKVQVQKLILQATSHENLCQNYVGWCPFW

SEQ ID NO: 50285 - protein, 210 aa, Zea mays
  Clone ID: LIB148-040-D5_FLI.pep
MKNECKHSLHAMAPHAGVACVVHIMFARAMQLLAIWLSSLSNFPMGLGTPAWVKGRSHESKSWTASCSMILAVPVSLNVMARCAAPMVSCVFMYMVSQNVSACVCCGGMVRADLATCLRACAVRLANASTCMFSTARLSMTGYLDACRPAVDVHTSGNGVREQMPATCGLTAPPCPLPPLPLPSACGRRPADSSATTARRTSREACPMMF

SEQ ID NO: 50286 - protein, 92 aa, Zea mays
  Clone ID: LIB148-041-E5_FLI.pep
LFFKNCLYKTRPGRERPPSWSRPRKSPNLGPPSLAGRHRPLCNGPAGGWRAGRNPGAGGAQRGDFFNQAINSPPRGIEPRTWRCYSKALTIT

SEQ ID NO: 50287 - protein, 152 aa, Zea mays; identical to SEQ ID NO: 41539
  Clone ID: LIB148-046-F11_FLI.pep

SEQ ID NO: 50288 - protein, 530 aa, Zea mays
  Clone ID: LIB148-047-F12_FLI.pep
LAREIYNDDRMTENFPICVWVDMSKNLSELDFLKTIIRGAGANVGVTENKEELLILLASALSKRFLLVLDDLESPSIWDNLLKDSLGDGVVRGRILITTRNEEVATSMKATIHHVDKMDPESAWALLCNQVDAECNSEELATLKDVGIKIAEKCDGHPLAIKVIAGILRSRGNSKAEWEMVLNNDSWSMCPILPEVPQAVYVSYVDLSSQLKECFLHCSLYPEEFPIQRFALVRRWIAEGIVNARDKKLLEESAQEYYVELISRNLLQPDPESVERCWITHHLLRSLARALIADESILIYGQQKLNTSLSKPRHLTLCSMENSLDGPISLKQQMGLRSLMLFKSPNVRAIDLLMESASCLRVLDLSKTAVEAIPKSIGNLVHLRYLNLDGAQVRDIPSSIGFLINLQTLSLQGCQSLQRLPRSIRALLELRCLCLYGTSLSYVPKGVGKLKHLNHLDGLIIGHDNNAPEGCDLDDLKALSELRHLHIESLDRATSGASALANKPFLEDLYLSEQAPAIENQEDLEDKDET

SEQ ID NO: 50289 - protein, 303 aa, Zea mays
  Clone ID: LIB148-047-H12_FLI.pep
KPFPGRPDLLPLYNARTVPVPMAQTLSAASELATLKRPFGNDGFGDGSNNGSATGEKPKARRREADPAAAMAAARHEFGEHGGVNMSIEASATFTVMEPDTMRRLFAGELGPDRGDMYIYSRHFNPTVLALGRQMAALEGTEAGYCTASGMSAISSVLMQLVGAGGHVVASRCLYGGTHALLARFLPRASGVRATFVDADDEAAVRAAVVPGETRVVYVETMSNPTLAVADIPMLARVAHEAGAKLVVDNTFTPVVVSPARLGADVVVHSVSKFISGGADIIAGKKREGRKAQRQLQWPRVDS

SEQ ID NO: 50290 - protein, 266 aa, Zea mays
  Clone ID: LIB148-049-G12_FLI.pep
TMGDIENHNNPIQFNDRPWIESPNSWRSLCVVTQSDCHALSHNADICNLLERKKVSKSLESDFSNKMNQLLLTALQKQRQQRMMDDFGGYYDERMYWRQNDEIRDADKEASAPCSLAPVAHLGAHQQESWQHSSFGSQHQHHDNQNLLEMEVRVRGEMSQIHQEIYQLRKLVESCIASQVKMQHSIKEEVCSALREAGLMRSQPDTAAAKRGNCCICHRMQVDSLLYRCGHVCTCFDCADQLKSSGMSCPICQSPIDDVVLARLNF

SEQ ID NO: 50291 - protein, 124 aa, Zea mays
  Clone ID: LIB143-054-A9_FLI.pep
PHQTWRMRALACQALASHGPKQYIFLLPCLISRGRGTWSTSTFLYMMIAKRLEKKILALPDLQEAAGAGAAAGGRCRVRRASPLSTCIQADLPPTINSMAASPTYLSAVTEPHEMSTTKGEKIQ

SEQ ID NO: 50292 - protein, 406 aa, Zea mays
  Clone ID: LIB189-004-H11_FLI.pep
PPFFSLYLSLHLWTSPVLFDEMPALAVDAATPVAHAFASCDAARFPAPPVVGPAAAAEAAPWSADLSAALYNVDGWGAPYFFVNDDGDVAVRPHGAATLPGQEIDLAKVVAKAAGPRAGGGLGLPLPLLVRFPDVLRHRVETLNAAFGYAVRSTGYGSRYQGVYPVKCNQDRYVVEDIVEFGAPFGFGLEAGSKPELLLAMSCLAARGGLDALLICNGYKDDGYVSLALMARSMGLNTVIVLEQEEELDIVVEASRRLGVRPVVGMRAKLRTKHAGHFGSTSGEKGKFGLSAAQILSVVTKLKAIGMLDCLQLLHFHIGSQIPTTALLSDGVGEAAQIYCELARLGADMRVIDVGGGLGIDYDGTHSAQTDMSVAYSLEEYAGAVVAAVGRVCDRKGVQHPIICSE

SEQ ID NO: 50293 - protein, 309 aa, Zea mays
  Clone ID: LIB189-005-C1_FLI.pep
DDEDLLYCVPVFDPMLAEFYNPVADEGEQKPACLMLPLVETSPEFASGGLAEADGLSGFDVPDMDLASFAADMESLLMGVDDGFDDLGFLDEQNPQVNADVDLEAMAAPEPEREDKKRKRDGFDYLGFLDEEKPQVNADVDLEAMVAPEPEREDKKRKRTDVILKLNYEGVIASWVRDGGSPWYHGERPHLDDPYELWLEFPATGSRGLFGGTMTAVTGGEREARVSRYREKRRRRLFAKKIRYEVRKLNAEKRPRMKGRFVKRTTLPPLPRPPPPSQQQQKKKQLPRALPHVGMVLAPPPGADGRFRF

SEQ ID NO: 50294 - protein, 238 aa, Zea mays
  Clone ID: LIB189-005-E10_FLI.pep
LLKAKLCYKQARSVSIWQIIERSSFLPEGNSVRLFRDLRHALLLLLHLLEQSLQLSLRQALQPFLHDLLLVVPELVRVGHVLVGHPEHVGGDPPHRHPEHHQQLHDVAGLQGVNSQELEPVLEADAEGGDAEADQQHVFPRVPERRLVLFQGLGVIRAALRGAAPCRQAPPLPGGSEQGGPWWQQHDFGGRVERVQGGYPGGADGAGGGERSCRAGDRSHGSGHRCRSHCLTRYFCSA

SEQ ID NO: 50295 - protein, 287 aa, Zea mays
  Clone ID: LIB189-006-F4_FLI.pep
RGLALSPPSLTSTTAMAMALASATAAALFRSALSAPHGAGARVRPQRRQPFLAPLHAAKGPGSAPVVLEGKAKGKKKKGPSSGNLPAALDVEIREAQEYLDSDQQEPVPENFPFELIDEEGMSVVILRRDYKDEKVEVTVSMPNLEGGPEFGDEDGEGDGESAAKDDGEAEEDDESAGESSISLKVVVSKDSGPELEFTCTAFREEITIDDMLIVEKTDDDDGEEKFPYEGPEFTELPVNVQKGLFKYLEQRGVTLSATNYMHDYMVTKQAQEYIRWMTKLKDFVAQ

SEQ ID NO: 50296 - protein, 73 aa, Zea mays
  Clone ID: LIB189-007-D7_FLI.pep
TTVAFKFVYFQMTFILRMMNNKSRLSVSENRDQDSTNTTQILMFSGSLLPVMFLSGLLGCGAGILAWTNALGV

SEQ ID NO: 50297 - protein, 205 aa, Zea mays
  Clone ID: LIB189-012-E6_FLI.pep
NFPMPKKDSSAGGASKLPKEYAEPWDYSHDYPVTLPLRKPYSGNPEILDEEEFGESSASRTQDDELSAAEQLGLMDMSSESQFLFFQLPSSLPLPRQPQSGADPNEVRDEKREDMRPSSHNGSKLKEVPEGYMGKMLVYKSGKVKMKIGDTLFDVSFGSNCMFSQEVAAINIREKHCCTVGEISKRAIITPDINYMLGSVDKMEE

SEQ ID NO: 50298 - protein, 190 aa, Zea mays
  Clone ID: LIB189-012-E9_FLI.pep
APVRELRQVRAAVRRRRPAAPHRQRRPAALGRVRHPGPALPLHRRLDRVGRQELPHRHQRREEARHEGDHHRRRARHPPPPQGVHLARRRLPRAHQRGPRRRRQGHRLLLAALVHLLALCIYIAAAELGAWIVRGETWMAFGVGAACFARAIWSCRKWKLCCTLRNLMKPLYNSTVPLSIPCVYLRTISE

SEQ ID NO: 50299 - protein, 99 aa, Zea mays
  Clone ID: LIB3059-015-A1_FLI.pep
ARANNQANFSNLPSPLPLQDRSASHCPPYLHESRHQHALKRARGAGGRFLNSKSDDKEENSDSSQKEIQNGVAPQKGGQPSTPPSPNGASSAYQAPSRE

SEQ ID NO: 50300 - protein, 157 aa, Zea mays
  Clone ID: LIB3059-027-B8_FLI.pep
TQNRDSLIVGADPLILYLCYPLCCCRLCCYCIAHLPFVEGQRTGLRAMRLIALGTLPVVVPHGWELCGLHTAHGLRQMPLLERASVRVVVQHEVVWSLLMVPVAAATGIQRLQWWVVASPAPTRTLRLSEEEGDLIWRCHGPNLLDCLKPALSTRFE

SEQ ID NO: 50301 - protein, 238 aa, Zea mays
  Clone ID: LIB3059-028-D1_FLI.pep
EMLARFVVDSHARSQPKGANLEDRVSTDVDDDPLAAARQADPDVLSQDMLKKYITYAKLNVFPKIHDADLDKISHVYAELRRESSHGQGVPIAVRHIESIIRMSEAHARMHLRSYVSQEDVDMAIRVLLDSFISTQKFGVQKALQKNFRKYMTFKKDYNELLLLLLRTLVKDAVHFEEIMAGSASRLTHVEVKLEDLRNKAQEYEIYDLKPFFSSACFRDNGFLLDEGRGIIRHPLAE

SEQ ID NO: 50302 - protein, 169 aa, Zea mays
  Clone ID: LIB3059-037-H12_FLI.pep
IKIKTRARNVLPPPARRRKWWWWLVGVSRRLGLRFAVDRQREVDQYRCPHARQRCEQEENLPRVDGREPANESFAPPFPRINKNRCAMWSDQRLVLTQGLLLQLRRHNFDDKFFRQILLLLLAAAAAPPLHPVRTLTRQGPDHLRTPRAAFIRRLRKALDIQYRIIGSS

SEQ ID NO: 50303 - protein, 48 aa, Zea mays
  Clone ID: LIB3059-038-A1_FLI.pep
QQLLSFYLHAAPNVGTLLQLQQLLPFNQLALTNPAAFYQQPIIGGALF

SEQ ID NO: 50304 - protein, 127 aa, Zea mays
  Clone ID: LIB3059-039-C1_FLI.pep
GTRGRKARRLSAVSTARLRRSHPVAGGSRPQRLGRGSGCSAMAAQVRGPLSGRARSPAALAVRALTRRSQCGFVPAGAWYRPWCPVEARARTWYSHGGNQTVERIIMVQNTPCIGVGRKVNLVVETN

SEQ ID NO: 50305 - protein, 441 aa, Zea mays
  Clone ID: LIB3059-040-E8_FLI.pep
EVLSEIEEEKLESEEVEAEEESSEDELDPFVKSDPKLPRVVRMANLCVVGGHSVNGVAEIHSEIVKQDVFNSFYEMWPTKFQNKTNGVTPRRWIRFCNPALSALISKWIGSDDWVLNTDKLAELKKFADNEDLHSEWRAAKKANKMKVVSLIREKTGYIVSPDAMFDVQVKRIHEYKRQLLNILGIVYRYKKMKEMSTEERAKSFVPRVCIFGGKAFATYIQAKRIVKFITDVAATVNHDSDIGDLLKVVFVPDYNVSVAEALIPASELSQHISTAGMEASGTSNMKFAMNGCILIGTLDGANVEIREEVGEENFFLFGAEAHEIAGLRKERAEGKFVPDPRFEEVKEFVRSGVFGTYSYDELMGSLEGNEGYGRADYFLVGKDFPSYIECQEKVDEAYRDQKLWTRMSILNTAGSSKFSSDRTIHEYAKDIWDISPAILP

SEQ ID NO: 50306 - protein, 364 aa, Zea mays
  Clone ID: LIB3059-040-G3_FLI.pep
IIGISEVDPIHWPGSKWKSLLIKWDGATKYSHQNRVSPWDIEGVGSSVLVTHRLSSSVSKRTKLCFPPSDLDTPILDGNGRPDSVETERFHRVLQGQELVHPSIHGAACSHSSDSPRCQGSYGRRFSADVWNCKMNDVMSGPRHLNATGFAYQPLGFSESVKFSEVLQGQEMSQAVPSFMRSAFNSGTQNGRVRPFDYVQRSDATQGYALQQFNLPATEVHSPSSVLMFNQTMVPHAELDGATNREEVHGSRYLSSNAIGREAEPWPSMQQQRASVNGSEPLDTTEASAPARNAESGSVGRGAGRSNCKLFGFSLTEKILGTDGGGVKEGNYEVDRQTPRVLDLFGHGSTPGALHALCAAPLGI

SEQ ID NO: 50307 - protein, 105 aa, Zea mays
  Clone ID: LIB3059-059-B3_FLI.pep
LRSGSPRLVELNDFVRQRHNKGFLDVLSFSETQVTPIVEGYGGWALRMEIVPIESAYPGFGELVVLPSTDHINSCKPVNKNDPSYAETLAFLEKNFKLCLERAES

SEQ ID NO: 50308 - protein, 244 aa, Zea mays
  Clone ID: LIB3060-003-A9_FLI.pep
AETKKKTGRNLQNSRHSSSRRSLKREVVLDEAAVVEAPQRHVLVRRRGGVALHGVGAEQAVQRLVRAGVEEGELVAEEERVEQRVRLGVGGPGRRLVRGALRPRLEVEGRARRGGLVVGRRHALPREVRERVGSGALGGLVLQGRRGRALLLFLEVDDGVGGAGALAAGGGPGGGGGVLVELPERGLEVVRLPPLALAGGPRRAAAAGRRSRDELGEDRTTTHLCSLPLCNLYSISFSSRAARV

SEQ ID NO: 50309 - protein, 486 aa, Zea mays; identical to SEQ ID NO: 39247
  Clone ID: LIB3060-015-H1_FLI.pep

SEQ ID NO: 50310 - protein, 461 aa, Zea mays
  Clone ID: LIB3060-024-F12_FLI.pep
SLSGHTAPTDDNSRQQLGQPATAAHSRLTTNRLVHLLDLGARAAAAGRGVLVHAASAAHVFTRALVHLGDDGVAEALQLLHLVLELVRLGELVGVQPADGRVDGVLDLLLVIGRQLGRNLLVLDRVAHVVGVVLQRVLGLHLLLVLLILRLVLLSVLNHLLDLLLGETALVVGDCDLVLLPRCLVLGRHVQDAVGVDVKAHGDLWHTTGCRGDAGELELAQQVVVACPGPLTLVDLDQDTGLVVRVGGEYLLLLGGDGGVPRDQHCHNSSSSLQTQGQRGDVQQKQVLHLLIALTAQDGSLDSSTIGDSLIGVDVLAQLLAVEEVLEQLLHPGDPSGATNKYNVMDGALVHLGIPQALLNRLHALPEQVHVELLKPGTGDGGVEVDALIQRVNLNRGLGSGRQSPLRPLTSGPQPPESPGVASDILLVLPLELLDEVVDHPVVKVLTTKMGVTSCGLDLKD

SEQ ID NO: 50311 - protein, 285 aa, Zea mays
  Clone ID: LIB3060-025-D1_FLI.pep
RGARDPVRLHRCRNSPPPRRPARPPTMAVAAAAHHLPVVPHRLVPVRHTSSSPPPHPASRCSAAGKPPVQLHAAQARASGFAARVAFNPSGNYDLSLSMGEDETPQVQPPPPPTQGRFEIVINNDNIRTLDLSPVEAALGDLSSLTPAASRTLLDQTVGFTISYEREDEYDTRELSEFPDIRLWFVRLDAAYPWFPVVLDWRAGELARYAAMLVPHQMSMRMGVVFNPEALELFVMKKVFAVDAWLKQQSHPKPRLKTADMARMLGFGVGDELFDLIEKYPVHRS

SEQ ID NO: 50312 - protein, 191 aa, Zea mays
  Clone ID: LIB3060-039-F11_FLI.pep
HTCLHLHMRLEQQLIKYSCRSSPITYVDRTRADGLVIPAGDLLGDERLEVPLRRAAFDAAARAFSLHTAALARTMSEVARSIHLRSSPASSTPSLSLTAALTPVPILSTSHALVPWSVHCGTHTTGTPHAVLSSVEFQPQCVTKQPTAGCDNTRTWSHHPTTMPRPPPASVAASASAPSLLRLSSRSTHRN

SEQ ID NO: 50313 - protein, 213 aa, Zea mays
  Clone ID: LIB3060-041-B7_FLI.pep
LFCAAVVVFLYKTPTTHVLGACRGQDIEASPGRATARSADMAVEAHSLLLAGGHKQLTSAGWPWTTGDEARCATARPSHQQAFQLQQASCVGVGVGLPAAAPVSSAAAAPPAPMIAQQYAAGGRLFVGDAAESGVTFGGGGAVQQEAPRKRKRAEQGQTPPPVLGTGAADVAAQFQQQLVDVDRLVLQHVSLPLMSPAVPANASICACGAGVV

SEQ ID NO: 50314 - protein, 482 aa, Zea mays
  Clone ID: LIB3060-042-E1_FLI.pep
VKRSRLASVLHAGGDALHGEDERVFQAGRVLARRVQLDQSGGLVLVGELLGQRRLGRHLEVGVPYPLQRVGLEHVQGGDVGVAQHQPLLQEWIAFKNILVPSDLEEKLLCLHVFVPELLPKGLEFFRHKQLVIQAGNAGVSLGENHLQQVQGDPEEWPLVVHLFEDLEVPDVLVDGELKGGADSQPHGKVEPGLSPREDPGDGAQGRDAAAGPPLGWPAADVHPPVLGLRCSRSEVLDEARLLDDDGAVLLRGHDRHLVHELAPLGLGRDRRVHAVLQRGGREALQSLEAQVLLPEAELDDLALHRHTDGPVDGVRRLGQDGKVRGPATPAHGASAAVEQGELDAVALGHLRHLLLRPVQLPRRGQAAGVLAGVGVADHDLLLALDPVHVPVHREEALHGRGRRLQVGQPLEQRHHGQRLAHAALALQELHGEHVRGGRRHGDDVGAEAVGRELREDVERADDVGDLVGLGKVRGQQRALAS

SEQ ID NO: 50315 - protein, 249 aa, Zea mays
  Clone ID: LIB3060-052-A9_FLI.pep
GIQECSAHGEGGATTPCYRRRRQEGARAGAAEAELVVAGHRARRGVGAPAQGHAPRGHGAAPRPQRHGRRPRRAPRLHRPGLRLRAGARRRVRVRLRLRREEPPPGDAARARPLLRRPRRGGGGAAVLVRRRVGGVLVRGVAARQPHVHTLSRRHAGDGEDAAEAVGAGGCAVHAEPPLSSPGHGRRYLVALGVERKNHSRCTQQQKEGISGGRLKQKKDEEKKKSVRVWSFGGPPPPSTLLVLSWTAS

SEQ ID NO: 50316 - protein, 350 aa, Zea mays
  Clone ID: LIB3061-021-D3_FLI.pep
LAATQMPEEPAGWFQGTADSIRKFIWVLEDYYSHKSIDNIVILSGDQLYRMNYMELVQKHVEDDADITISCAPVDESRASKNGLVKIDHTGRVLQFFEKPKGADLNSMRVETNFLSYAIDDAQKYPYLASMGIYVFKKDALLDLLKSKYTQLHDFGSEILPRAVLDHSVQACIFTGYWEDVGTIKSFFDANLALTEQPSKFDFYDPKTPFFTAPRCLPPTQLDKCKMKYAFISDGCLLRECNIEHSVIGVCSRVSSGCELKDSVMMGADIYETEEEASKLLLAGKVPVGIGRNTKIRNCIIDMNARIGKNVVITNSKGIQEADHPEEGYYIRSGIVVILKNATINDGSVI

SEQ ID NO: 50317 - protein, 508 aa, Zea mays
  Clone ID: LIB3061-025-G5_FLI.pep
FAVRADLGATVGTFKAIVADSCDVPAPQQRLIYKGRILKDEQTLASYGVETDHTIHMVRGAAPPPASTAPAANQEPTTAAPASSPAAGLGGLLQNLGATGAAANSGGLGLFGSGLPELDHMQQQLAENPNLMREIMNMPLMQNLMNSPELIRSIIMNNPQMRELIDRNPDLAHVLNDPSIMRQTFEAVRNPELMREMMRNTDRAMSNIESSPEGFNMLRRMYETVQEPFLNATTMGSEGDRNSNPFAALLGNQGSNQARDSAANGTTTASDTTSGAPAPNTNPLPNPWGPNAGSAQGAARSPPATNTRSTTAGGPGGLGSADFGSTLGASGGGSDATFLTQVLQNPTMMQMMQNIMSNPQSMNQLLNMNPNVRNMMESNTQMREMIQNPEFIRQLTSPETLQQLISFQQSLMSQLGQQQTGQERTQSASGAGNVNLNTLMNMFSGLGAGGGLGVPNAPNVPPEELYATQLAQLQEMGFFDTQENIRALAATAGNVHAAVERLLGNMGQ

SEQ ID NO: 50318 - protein, 138 aa, Zea mays
  Clone ID: LIB3061-052-C9_FLI.pep
CILTCAFPPATTSPRRQEAQDFSFPRVFPPSSSRLAAQPLGTMNPSTPLSSRRPGASLQLSRRLLTVVEASDTANYMHDQTGKPLKRVASLDVSTAGPACFRAGGHGYPCMLCSATSNSIDLQQNVWPGGAKKPDLKE

SEQ ID NO: 50319 - protein, 210 aa, Zea mays
  Clone ID: LIB189-018-A12_FLI.pep
VKETHTIMSTQEIYGASLSIGGGGGRCRGAGGDGLDLEAVPGAARDDLAGPHPELAGALHGRRTVVVDVAKQVAAGVAADARALPLDAPVVEGLEEGADAVLGREPQARLVHPREGQRALVPGLEVEVRRVQVRRRQVQERAARRAPVGIGRRRCHRSRKHGALLASSCGLARGRRKPGDGSLWRRRVGPERPARREAASFAPFWKRSSL

SEQ ID NO: 50320 - protein, 445 aa, Zea mays
  Clone ID: LIB189-027-E2_FLI.pep
DSKAAQVMLGDQCIIQALDSVSSSSSAPDSTLSGELPSVSRNCVIGNLQVARAQKGGHVEGLVNCCHSKKKKKNRTGSGLWDSATKSWASGMGGDDENSEANMSELIGGIGRELAISCLLRLPRSYYYDVACVNRSFYSLVRSGNLYRLRRAAGIAEQMIYCSCNVLEWEGFEPCRQRWFGIPSMPPIECFMLADKESLAVGTSILVFGKRVEAHVVLRYSLLTNSWTTGEMMNIPRCLFGSASFGKKAIVAGGIGQSGPLSSAELYDSEMQTWTTLPSMSRARQMCSGFFMDGKFYVIGGKAERHNEVLSCAEEFDLENGSWRLIPDMAQGLNGGSGAPPLVAVVNNELYAADYATKEVRKYDKENNAWITLGLLPGRYTSVHGWGIAFRSCGDMLIVIGAMSSGGSGVIEICSWVPNNELPDWKIIGTRRSGSFVYNCAVMSC

SEQ ID NO: 50321 - protein, 216 aa, Zea mays
  Clone ID: LIB3059-007-G3_FLI.pep
FTQQTAAGTSLLLQWTQQRCRGHVVSIYSKEFQQQQQQQKIRRNSPVTELRVTGAPTSVAVQATLLQERAVALGEERVDADPQEREDRGQQDGPDDDDGRRPVLPPHQTLEERVQVDDHPEREEELPEQRAPRLVPVVDRVRDPGHHPDEVQQEERGRGYQQGGPLERVQLRELLVVPGLRRHGEARVDAGEHLQQALEHREQMRRNASDDPELLV

SEQ ID NO: 50322 - protein, 274 aa, Zea mays
  Clone ID: LIB3059-020-C6_FLI.pep
QHRKHNSVPTMAAKIFCLLMLLGLSASAATATIFPQCSQAPIASLLPPYLSPVLSSVCENPILQPYRIQHAIASGILPLSPLFLQQSSALLQQLPLVHLLAQNIRAQQLVLANLAAYSQQQQLPLVHLLAQNIRAQQLQQLVLANLAAYSQQQQFLPFNQLAALNSAAYLQQQLVLPFSQPAAAYPQQFLPFNQLAALNSPAYVQQQQLLPFSQLAAVSPAAFLTQQQLLSFYLHAAPNVGTLLQLQQLLPFNQLALTNPAAFYQQPIIGGALF

SEQ ID NO: 50323 - protein, 152 aa, Zea mays
  Clone ID: LIB3059-033-B1_FLI.pep
LRRPCRAPAPQRLAQPPGGAGARHGARVVLRAFHLPRALLGRVLHALLPRAGAVLRRPCRAPAPQRLAQPPGRPPVAARRQLLLLILLIGFDAPRTKCNDASSSLARTRKRSLQIGFEAGEANISFRSPRIGYQLYRLLIVNLLIQSRSSSS

SEQ ID NO: 50324 - protein, 310 aa, Zea mays
  Clone ID: LIB3059-033-E6_FLI.pep
RAGGPIRGSPPPYPSSLLGPAGDPSGMGYLSSVIGHPTDGSSVSGGGLSQNGRFSYGYASSPGKRASMEDFYETKIDCVDGQIVGLFGVFDGHGGAKVAEYVKENLFNNLVSHPKFISDTKVAIDDAYKSTDSEFLESDSSQNQCGSTASTAVLVGDRLFVANVGDSRAIICREGNAIAVSKDHKPDQTDERQRIEDAGGFVMWAGTWRVGGVLAVSRAFGDKLLKQYVVVDPEIREEVVDDTLEFLILASDGLWDVVSNEEAVAMTRSIKDPEEAAKMLLQEAYKRESSDNITCVVVHFLHGQGSSGYA

SEQ ID NO: 50325 - protein, 261 aa, Zea mays
  Clone ID: LIB3059-035-E7_FLI.pep
AVFNRSSRFGKLQGIQCALAGRNLYMRFTCSTGDAMGMNMVSKGVEDVLGYLQNDFPDMDLISLSGNYCSDKKAAAVNWIEGRGKSVVCEATVKGGVVQSVLKTSVQKLIELNIVKNLAGSAVAGALGGFNAHASNIVTALFIATGQDPAQNVESSQCITMMEAVNDGSDLHVSVTMPSIEVGTVGGGTCLASQAACLNLLGVRGPNRDSPGANAKLLATIVAGSVLAGELSLLSALAAGQLVKSHMKYNRSSKDVPGAAS

SEQ ID NO: 50326 - protein, 93 aa, Zea mays
  Clone ID: LIB3059-047-C1_FLI.pep
QAMAVLLWIRRPFSLLIDELLTTCVSDSVTNKFMVVWSCVINVCFRSDCGCSFTSFVVKRLLHVEEHVCLRSPDGMLLNSGYPGIITFVPMIV

SEQ ID NO: 50327 - protein, 167 aa, Zea mays
  Clone ID: LIB3059-048-G11_FLI.pep
PRSAHSAGAVLVPQSKGLLGIGNSFFIPELCEDPEEEVYIAGYTVCHYRRERLDKCVHAKNSLQKPAVPLEGVAQLGVDLVLLEVVDGEVEVLALAPGHAHGGRLPGVAGDADLPLSAHPCRVLVLRRLPRPPWSRRQQLLPLPPHPRRLSFPLRLRLDGRRKRMRR

SEQ ID NO: 50328 - protein, 118 aa, Zea mays
  Clone ID: LIB3059-049-D12_FLI.pep
PPGPDRSFVIMVEAGESRLGMFSLINHGTTLCYSIRQIGSEKSNQLEMDSVIPLPEGYIYFRIHGSYEGHILIFGYAFSEDACFALEIKTMKIERVCRKWRGFCPYFVFLPSMSQRRI

SEQ ID NO: 50329 - protein, 412 aa, Zea mays
  Clone ID: LIB3060-007-C10_FLI.pep
PQQQQQHRRRPRQQRRQRRGRGVRSASAERAARLRNPVAGRRARPDIAELHVGHHVEAQGRHLQPPRRVPQHAGHGARQRDGDHARVPLDRAYVPLQRVVHGVGHRGAGRHERLHRQRVPRGGLRPHRAPRRHQHGRRAHGAQHARERAGGGSEAAAEEGPHLHGRRAAAAAGAGQDGRARLRRRARVRAHRDVRPGDDVRVEARVGRAAARGARPDEGAAGRRSRHGPGGRHQGPGEHETLPSDGRAVGEVMLRGNTVMGGYYKDAGATEEAMRGGWLRTGDLGVRHPNGYIQLKDRSKDIIISGGENISSIEVESVLFGHPAVLDAAVVARPDDHWGEAPCAFVTLRDGARATADDIIRFCRARLPHYMAPRTVVFSDLPKTSTGKTQKYLLREKARAMGGLRKPDRSRL

SEQ ID NO: 50330 - protein, 291 aa, Zea mays
  Clone ID: LIB3060-008-H4_FLI.pep
HDVAMDYYGKRLATSSSDNTIKIIGVSGTSHQQLATLSGHQGPVWQVAWAHPKFGSMLASCSYDGRVIIWKEGSKPDEWALVHTFAEHKSSVNSIAWAPHELGLCLACGSSDGNISVFTARSDGGWDTTRIDQAHPVGVTSVSWAPAMAPGALISAGSSGQFEYVQKLASGGCDNTVKVWKLNNGSWRMDCFPALQMHKDWVRDVAWAPNLGLPKSTIASASQDGTVVIWTAAKEGEQWEGRLLYDFRTPVWRLSWSLTGNILAVSDGNNNVTLWKEAVDGEWQQVTTVEP

SEQ ID NO: 50331 - protein, 630 aa, Zea mays
  Clone ID: LIB3060-019-D2_FLI.pep
PTSIIAASATARHGDQQVATALLGAAGALCHDSDAVSVPGVLPPRSHHHLHRTHCPLSPLLPHSSCPPHLPAPLPPPHLTSVSARIAGVVLLPRGVFPLLPPRSRYVMGSPLLATPACGAYDVLWGFAAGRFLSILAASDEDQGSSEQEAAASNPEGVDRVCAAIADVVASGADANLEAALSALSPPLCEAVVLAVLHRFKHAHRPSYRFFRWATVSGGFTHTTITYCKMLHILGKTRQFESMVAMIQEMGKAGALSMDAFKVAIKSFAAAGEIKNAVGVFELMRKNGFDDGVESFNCLLVALAKEGLGREARQVFDKMHGQYSPDLRSYTALMLAWCNARNLVEAGRVWNEMLEKGMDPDVVVHNTMIEGLLRGQRRPEAVKMFELMKAKGPPPNVWTYTMLIRDHCKQGKMDMAMECFEEMQEAKCQPDVATYTCLLVGYGNAKQMDRVTAVLEEMTQKGCPPDARTYNALIKLLTNRNMPDDAARIYKKMIKKGLEPTIHTYNMMMKSYFVGDSNYAMGCAVWEEMHQRGICPDVNSYTVFINGHIRHGRPEEAYKYIEEMINKGMKAPQIDYNKFAADFSKAGKPDILFELAQKVKFAGKLDVSNVFYQWADRMKSRVKRNVPSDW

SEQ ID NO: 50332 - protein, 266 aa, Zea mays
  Clone ID: LIB3060-019-G6_FLI.pep
PPSGPHHSPARAVRSPPAPALTLAALRKSKANAFSSSSSPPRSRRALAVTMAASLLVLAVAFLVGAGHGGIDGGAAAHVEVEGSEVTYGSVIKLLHEKTKHRLHSHDVPYGSGSGQQSVTGFPEGDDSNSYWIIKPTPDSSSKQGDSIETGGIIKLQHMKTRRWLHSHLHASPLSGNLEVSCFGGDELSDTGDYWRLEIEGSGKVWKRDQKVRLRHVDTGGYLHSHSKKYNRLGGGQQEVCGVREKRAENIWLAAEGVYLPVNGSK

SEQ ID NO: 50333 - protein, 118 aa, Zea mays
  Clone ID: LIB3060-030-D12_FLI.pep
SSRSPSRWPAACTRRTSSAPRSTAASRSPGLPWAGNQGGELLSSPVAAGIGDDTDTTATHHRTVLSSWSPRLQHDRQKDSGGRRRRCRCCINFRRMDGWMDDDTELLLLFIIIFSCFC

SEQ ID NO: 50334 - protein, 291 aa, Zea mays
  Clone ID: LIB3060-045-E1_FLI.pep
KLKITSHIAAVGADDLAVDPLGGVGAQEADHRRDVTGLAEPLHRVCLHGVSHHGLALALEEHVRGRGPGRDAVGRDAGAPELLGHGPHQRLHRRLGRRVGPEPRREAPHHGRRHGDDAPAAAAAEAVGRLPEAQERAAQVHGEHAVEGLGGGAGHGGVRVVQHPGAGHQDVRAAEGLVRRVEERPRAGLVRDVRPHGHRARERRRQRARLVGARRVAQHQARAEGGQVRGDGAADAPRRARHDRHAPRQRLGAAAARRSRRGLGGGGDVTGVRHRTASGCCGFLGPLARAG

SEQ ID NO: 50335 - protein, 326 aa, Zea mays
  Clone ID: LIB3060-046-B12_FLI.pep
TSLHTLHLPLPSSNQAYNIINMGVIEKLSRKAGVIVGDDVLRLFEYAQEKQFAIPAINVTSSSTVVAALEAARDQKSPIALQVSQGGAAFFAGKGVSNDGQAASIAGAIAAAHYIRAIAPTYGVPVVLHTDHCAKKLLPWLDGMMDEDERYFKLHGEPLFSSHMIDLSEEPVDWNISTTAAYLKRAAPMKQWLEMEIGITGGEEDGVNNEDVDNNSLYTQPRISWPSTTPSPPSPPTSLSPLASVTSTVSTSPATSACTPSSSRSTRPTSRSRPSPRRRSPSSLSSTAAPAPPRRSTRRLSATVSSRSTSTPTCSTLTSAVSVTTF

SEQ ID NO: 50336 - protein, 245 aa, Zea mays
  Clone ID: LIB3060-046-C10_FLI.pep
VGTWTKCLQSSSRRRRLGLSLSWCLLPRFPAGRRWPISPPLVPPALVLGRPPLLRLVRRVRAGDYLAVHVLVTSVVLVLHVDVGIREHPQHPRQTLELLRRLLVHGALEPGVGGRAECVHVLLGFLHAAEDGGECVEVGVDHLLAGGRGVLGELHDDQPVVVVAPGEQYRLPLLAPGPGRHRPRRAARAQGRRRDGDCREGGGTREGGGGGSLGRPVGEGRGREARGGGREGGGHCCAQGFAARG

SEQ ID NO: 50337 - protein, 151 aa, Zea mays
  Clone ID: LIB3061-004-E11_FLI.pep
ARREERRRASTMASGSMKREISETHDTLRFGLNAGVKADLAPPHPLQSSIQSEAKFWADKKKFGTEAIYGSALNIRKDLDAQILSRFQRPPGALPSSLLGYEALTGSLDDFGFEDYLNMPQDSEGFRQPDMHHGMEVRLGLSKGPICPSFS

SEQ ID NO: 50338 - protein, 326 aa, Zea mays
  Clone ID: LIB3061-005-A9_FLI.pep
RDVKPENLLLTSDGHIKIADFGSVKPTRDTPIKVLPNSTTERACTFVGTAAYVPPEVLNSAPATFGNDLWALGCTLYQMLSGSSPFKDASEWLIFQRIIARDLKFPEYFSAEARDLVDKLLDVDPGKRPGAGPDGYSSLKEHPFFRGIDWKNLRKTRPPKLAIDANANEDEDSQDSNWLAHMGSVAVNQQSNTVGNNGAPSSSEVRSHISKLASIDSFDSKWQEFLDPGESVVLISKLKKINKLANKKIQLILTDKPQLICVDPSKMVAKGNIIWSDDPSELSVQVSDSSHFRICTPKKVSTFEDAKQRAWQWKKAIEDLQRCQRN

SEQ ID NO: 50339 - protein, 177 aa, Zea mays
  Clone ID: LIB3061-006-E2_FLI.pep
RTKPKARSTWPSTPVTFRWLLGFQSALGSDGSRWWTPARRHHMTSSPMACQIVLSPSTSSLISSTPISILCSATPPSSLYCALMSERSRYNRVYYSGCSLGCSMQWKLENVGVALLSVVYMRMSVCVAKAGGSQFSDRTRDGENHCPVGWFSEVLFGVKKWWSIIYSNFFLFFNEIS

SEQ ID NO: 50340 - protein, 214 aa, Zea mays
  Clone ID: LIB3061-007-C9_FLI.pep
PISVYQSTNNCGRSIRSVRSVGPPAALPDLAVGAGEDVERGELVERVAEHGGEEVGGGEELDHPRGGAAVAEGLVHGQHAVALHDLGVVAPVDEQDAGGVVEVDDVVEGLAPGARVRRQDPHVHRVHGRVRRPGAVEVEQPVVDHRAVRHPHRVRAHEADHLEAVEALPREQIDGGGDVDVGARQNARHGRLRHHAVPSAQLHLVARPPALDLH

SEQ ID NO: 50341 - protein, 252 aa, Zea mays
  Clone ID: LIB3061-037-E12_FLI.pep
IVKYTSNILAPMAAKIFAILALLALSASVATATIIPQCSQQYLSPVTAARFEYPTIQSYRLQEAIAASILRSLALTVQQPYALLQQPSLMNLYLQRIAAQQLQQQLLPTINQVVAANLAAYLQQQQFLPFNQLAGVNPAAYLQAQQLLPFNQLVRSPAAFLLQQQLLPFHLQVVANIAAFLQQQQQLLPFYPQVVGNINAFLQQQQLLPFYPQDVANNVAFLQQQQLLPFNQLALTNPTTLLQQPTIGGAIF

SEQ ID NO: 50342 - protein, 460 aa, Zea mays
  Clone ID: LIB189-022-C9_FLI.pep
PAAWGKPSVSPLPLLWYKGGRLIRRRTESRRREDCSVAAVSRPRRWPTRWKGAGRGREGILLRRQSLLCPSIFGRLSVLPFAVRGGISRPAAAAAALLDRATSGGGLRTCVADLCVAVHLFAGIARRARRAVWIACGEECGGEVLIQAAGGRAAARQVFDEGPRPGQPAMRDFPSCFGESGVQIADASSSSSSAGKGAAQNLVTCLYQTQFSGRPCVISLTWSRSLMGQGLSVGVDDLSGHCLCKADIKPWLFSKKKGSKSLDVEDGKIDIFWDLSGAKFGAGPEPVEGFYVAVVFDLELVLLLGDMKKDAYRKTGANRSMLNAAFVARREHIYGKKTYSAKAQFCDNGQFHDIVIDCDTVDLKDPCLEIRVDKKPVMQVKRLAWKFRGNQTILVDGLPVEVFWDVHSWLFGSTASNAVFMFQTCQAPEKSLPWSYSQIFRESQLQGLGFSLILHAWKLE

SEQ ID NO: 50343 - protein, 339 aa, Zea mays
  Clone ID: LIB189-023-D1_FLI.pep
PLRSNHPRAAAARRGYVSGNRRLPGSLPLVIQLGPFISSFRGDMRAAPTDPPTAPAKSMLRRLFDRQLLRISPAERLPSAGAGEKDEAEPSSVCLDGMVRSFMEDDVGSEKAAHGGRYCNCFHGGDNSDDEEDDEAAAAASDVAETIKGLVHCATLRERNLLADVCAHLERHREAGARRRDLLRLVASSLRGAGHDASVCVSRWDKSPSHPVGEHAYIDVLLPAASDRGARERVLVDVDFRSAFEVARPTKAYRALLQRLPAVFVGKDDRLRLLVAAAADAARASLKKRGLHLPPWRKPEYMRAKWLSPYHREAPVAEEAASASADEDDGFGPGTGTAA

SEQ ID NO: 50344 - protein, 279 aa, Zea mays
  Clone ID: LIB189-024-A4_FLI.pep
ALTLAVGDEDTDMLADVKQMAAAAAAAGQASSSFENQLRPIDRYAMRFMELWDPVIDKAALNHQVNVEEEEWELDRIEKFKEDLEAEIDEDQEPLSYESWDVDFATTAYRQHVEALTQKQLLEEQERQAQEATKELEEKNDNMSSHHRKSKKNKKKTGKLKPLKRVRLSPESEVILEETSVDNAPSPELTSDESPHHYCNKRKKITVATEENSNSRSLKKLKKTTKSSFISEALSPRLKEDLNDSDSKSVGRTKSDGRFFIPCMPVKRVIVIKPERLKR

SEQ ID NO: 50345 - protein, 112 aa, Zea mays
  Clone ID: LIB3059-010-F9_FLI.pep
IKNCKINHSVVGLRSCISEGAIIEDSLLMGADYYETEADKKLLAEKGGIPIGIGKNSCIRRAIIDKNARIGDNVKVFQTDVPTVKNINLDFSLGYYIILDMPFCPLIFNIYF

SEQ ID NO: 50346 - protein, 146 aa, Zea mays
  Clone ID: LIB3059-021-B11_FLI.pep
SARRPSAAGSARRSGAPSTSTATALPRTAPPRAPRAAARRSTSRTGARSPGPRPPTSSPCRRAAAPRGSSRSSSARRPSSHAAAKQSAPSSPTARQIEPSSSIRLQAPLNPYSNCHAFFCSMCLLALASTRVYSGGFILEISSEAK

SEQ ID NO: 50347 - protein, 166 aa, Zea mays
  Clone ID: LIB3059-022-F3_FLI.pep
FDTHNKKVSMKYDGYFRSINHSSCWYKNDTFILAAQATKVFYLQDIKNSGSWKIVQKFTHRHLWCVAENDIDERPSSSGLSYQDDTCVGSEVQVNEGDMEITGHQDADESINVSASVVDEFRVQREEEVEEYETSDNEDETGWQYASDNEESITIVNDDDDFSDNE

SEQ ID NO: 50348 - protein, 172 aa, Zea mays
  Clone ID: LIB3059-024-F4_FLI.pep
AYNMSMNQSICFAGVHGRRARRQLGGGVVERERGGDAGAQVAAGEPPLLRRGGAGGHPPRRRRQRLRGHQPQGLHLLGHRLLRRQPRRVAAPGPAPHPPGLRPRQGVPRHPRRERRLPQPARQARPRRRPGRRRDGAHRGGGQTTAPLRQDHLGELPAPRPLMITSPSLFIN

SEQ ID NO: 50349 - protein, 187 aa, Zea mays
  Clone ID: LIB3059-055-D4_FLI.pep
PDFEAEAVFDQEFINVKLSDYIGKKYVILFFYPLDFTFVCPTEITAFSDRYEEFEKLNTEVLGVSIDSVFSHLAWVQTDRKSGGLGDLKYPLVSDVTKSISKAFGVLIPDQGIALRGLFIIDKEGVIQHSTINNLAIGRSVDETMRTLQALQYVQENPDEVCPAGWKPGERSMKPDPKGSKEYFAAI

SEQ ID NO: 50350 - protein, 119 aa, Zea mays
  Clone ID: LIB3059-056-D3_FLI.pep
LSRLHTASQAQVARQELNYYVARAKGVGLQPAATTLHPGAAVPQSWPDATATATTATRPILVTGLSLKVSIWTSLDPRLKNLADQIVPTRKYIPFRFAPHATYEYSCIWQGRLSQLLRC

SEQ ID NO: 50351 - protein, 232 aa, Zea mays
  Clone ID: LIB3060-012-F5_FLI.pep
FVKRRGLKPAIRAYDKLVLIGCEPGQVTYASVINVYCRLGRSDRAEAIFSEMIERGFDRCVVAYGNMISMYGKIRRASEATRLLALMKQKGCEPNVLVYNSLLDMHGRLGNSKQAEKIWKEMVRRKVRPDRISYTAIILANNRAGELDRCMELYQEFRETGRKVDMVMAGLMVGVLSKTSRFNELIELLKEMNGTKLDRRLYMSVLRSLRDAGLEVHVKWLQSNFTFMEEKT

SEQ ID NO: 50352 - protein, 136 aa, Zea mays
  Clone ID: LIB3060-014-G6_FLI.pep
HTYMNVHERETLSKENTQERHQSSRACTRCRRSRTRSRRTATGSFRSSRGSAPSWPATGRTPGRGRRASTQAGRRRPPRASPHSCCGRRPPRTECPGLRAPCLPPPLPRRLCRRQPTAVPPGRWSPPAACSSPPSA

SEQ ID NO: 50353 - protein, 474 aa, Zea mays
  Clone ID: LIB3060-022-C8_FLI.pep
YDVVKAHNSNSKIIGFLGGTDGLFAQKTIEITDEALPSYKNQGGYDMLGRTRDQIRTTEQVKATIGTCQALKLDALVIIGGVTSNTDAAQLAETFAQLKCPTKVVGVPVTLNGDLKNQFVETTVGFDTICKVNSQLISNACIDALSAEKYYYFIRMMGRKASHVALECALQSHPNMVILGEEVSVSKLTIFDITKQICDAVQARAEKDKYHGVVLIPEGLVESIPELYALLQEIHGLHNKGVSVENISSHLSPWASALFEFLPPFIRKQLLLHPGSDDSAQLSQIEIEKLLAQLVETEMDKRLVLGHVCYHIVAAGLNGYMATVTNLKSPVNKWKCGAAPITSMMTVKRWSRGAATSQIGKPAVHMASVDLKGKAYELLRQNSSSFMMEDIYRNPGPLQFEGSGADTKPISLCVEDQDYMGRIKKLQEYLEKVKSIVKPGCSQDVLKAAVSAMASVTEMLTIMSSLSFSGQATI

SEQ ID NO: 50354 - protein, 344 aa, Zea mays
  Clone ID: LIB3060-023-B11_FLI.pep
TLESLELSVPDPLDLDILGRLGPEVGVGRLHALEDADDLAGLRVALGDAQRDVAGGGGGVLDVLLLELLLVTSAPGGERDGVVVAGGAAAALGVEEGGAAVAGHEEGPAEALGLAGGDELLDGEEERHALAPRELHGDGGVVDAVLLLELERAVGADLERALDLVQRVREAGHELGLLELGRGVLGDALRLDGEGRRLQAQLLHLVLAGLERERLHAAVDGRALVRRARALHLHVRFALDLVVGQPLGRALRARARDEERRGGEREAGELRGVDAPAGDVLQGARDPGGAGVDAERPAGELRRRAGRQRGKGRPAADLGRLHQGGRGLERGCHRRRGGDAFWLL

SEQ ID NO: 50355 - protein, 125 aa, Zea mays
  Clone ID: LIB3060-047-A8_FLI.pep
HVSWTWNGEDLPPPDTKAIRDICVLPGGHVVIASLSRKFPFQVYKESVQVLFFTVFLLHLLKYDLCSYDLLVILRPFNFTKLATIFMLCILPKVYIVFLLLRPGYEQVCCISILSTTYTCTALCI

SEQ ID NO: 50356 - protein, 367 aa, Zea mays
  Clone ID: LIB3060-047-C10_FLI.pep
WSGLPVPSNWQMHGFDRPIYTNVTYPFPLNPPFVPADNPTGCYRTVFHIPKEWKGRRILLHFEAVDSAFFAWVNGVLVGYSQDSRLPAEFEITDCCHPCDSDKENVLAVQVMRWSDGSYLEDQDHWRLSGIHRDVLLLSKPQIFITDYFFKATLDENFSLADIEVEVEIDSHKQDQEHVPTLSIEATLIDNSGLSNSIDADLSSANAVNLKPKPKRTRSPCLGFHGYVLGGKIENPKLWSSEHPNLYTLVVLLKDANGKLIDCESCQVGIRNVVMAHKQMLVNGCPVVLRGVNRHEHHPRLGKTNLEACMIKDLILMRQNNINAVRNSHYPQHPRWYELCDIFGLYVIDEANIETHGFDESNTFKHP

SEQ ID NO: 50357 - protein, 426 aa, Zea mays
  Clone ID: LIB3061-007-F11_FLI.pep
MADLTDIGCCSCFSFLRKPSVPVRQHQDADGMLSEDLLKRQSAEDPDGSFYTGDDPDVSFYNGDDLDRSFYNGDDPDRSFYDRDDTDYIEGSDDGPPRKSSEDIVQLRTQNGFACREISVKETKKVFRSEDENGNKMVNQYVHLGKIGSGSYGKVVLYRNIKDGKLYAIKVLNKPYMMKVRVVRTETAMTDVLREVSIMKMLNHPNIVNLVEVIDDPNIDKFYMVLDYVEGKMVCDNGLEEGTARNYLRDIISGLMYLHSHNVIHGDIKPDNLLVTSAGNVKIGDFSVSQVFEDDDDMLWRSPGTPVFTAPECCQGSAYHGRASDTWAVGVTLYCMVSGHYPFLGDTLQETYDKIANDPVQIPGDMNPQLADLLLRLLCKDPGDRITLQAAAEHPWVAGDEGPVPEFICRCGFGRRKRNDVREEVQ

SEQ ID NO: 50358 - protein, 386 aa, Zea mays
  Clone ID: LIB3061-008-C9_FLI.pep
GTEPESGSPEFLHEMRIKASAKLTLLHSMLKILHKEGHRVLIFSQMTKLLDILEDYLTLEFGPKTFERVDGSVSVAERQAAIARFNQDKTRFVFLLSTRSCGLGINLATADTVIIYDSDFNPHADIQAMNRAHRIGQSNRLLVYRLVVRASVEERILQLAKKKLMLDQLFVNKSESQKEVEDIIRWGTEELFGSSDSVDGKDSNEASGSVADVEFKHRRKTGGLGDVYEDKCIGGSTKLVWDENAILKLLDRSNLPSSVAESTDGDLDNDMLGTVKSIDWNDELNDHPGTNEDIAPIDNDGSELASESKQGATNRLEENEWDKLLRVRWEQYQIEEEASLGRGKRLRKAVSYRETFATLPNEALSEGSDEGDEPKREYTAAGLVLK

SEQ ID NO: 50359 - protein, 253 aa, Zea mays
  Clone ID: LIB3061-010-B9_FLI.pep
PDSWLDASKNLWQIRDKLPCPDELIAFEKVICNVSTILTEKTSIGSDQKEVEGKYCLIAKDVVKLRRCGNGWHMTEDDESSCACFEDEHCLVPVLNPGFSWIEVSYARPYSLRCLQKGGNLLSSHTANSNFGQSPCEGSFVYVGDLSSAARSVRLSRYRPRWALLLFIADIPYILENGLSSLLHASAALAVINCLPVYFLDGEAILETTLSYVAWFTPRLQRRILKVCSVVWTGLLVITFSSICYSTVLHYGV

SEQ ID NO: 50360 - protein, 242 aa, Zea mays
  Clone ID: LIB3061-045-G8_FLI.pep
PQCSLAPSSIIPQFLPPVTSMAFEHPAVQAYRLQQAIAASVLQQPIAQLQQQSLAHLTIQTIATQQQQQFLPALSHLAMVNPVAYLQQQLLASNPLALANVVANQQQQQLQQFLPALSQLAMVNPAAYLQQQQLLSSSPLAVANAPTYLQQELLQQIVPALTQLAVANPVAYLQQLLPFNQLTMSNSVAYLQQRQQLLNPLAVANPLVAAFLQQQQLLPYNRFSLMNPVLSRQQPIVGGAIF

SEQ ID NO: 50361 - protein, 175 aa, Zea mays
  Clone ID: LIB189-025-F4_FLI.pep
EYNQDASGFPRPTEDENAASATGDNSGFQENNTGSHMDLDMMNDYEVKECNDFGSAIHGVDTDFLNYGDDDNDDDFDDDFEPNPSEFQSLDNSGWSSRTRGVARYLKTLFDEDSGLGRKSVAIDHLVRGKTRKEASRMFFETLVLTTKDYISVDQPNPFDFVSVKPGPKLLMSEF

SEQ ID NO: 50362 - protein, 195 aa, Zea mays
  Clone ID: LIB189-026-D8_FLI.pep
TKVIHKDKEQTNRLARPKLELVWMRTIAVAPGGRRQVAGANRVGITSHHHLVLLSSTCRRRPPLYHLGQRGGGGAPVAEPLGGGLLQLGHLGPDRGALPFPAHHLAHRVRDNLPPLGRLGHPERSADAVGEQHGVLPLLGVERPRHHGHAVDEALEHGVPAAVGEEGARGGVRQHLGLRRPGRDHQPHAGGAGAV

SEQ ID NO: 50363 - protein, 86 aa, Zea mays
  Clone ID: LIB3059-003-E5_FLI.pep
ICQTSPKIHEKCQRQRSKIQYRCCCENSELATNVVVLFTVQRSPPPPPPPLFGSTSATVASPASPFSTLTHCLLLETSASSSSSSS

SEQ ID NO: 50364 - protein, 111 aa, Zea mays; identical to SEQ ID NO: 45032
  Clone ID: LIB3059-016-H11_FLI.pep

SEQ ID NO: 50365 - protein, 191 aa, Zea mays
  Clone ID: LIB3059-017-C11_FLI.pep
TTRKNFRADRRRRRRHCRNARDRSTGSSLGVGRPAVGGGDPGPPLEELLARVVLVHDYLDEAEAVFLVARRHGDRLLELLLRPNLHGPAVALGVMDGVDQARVVPVLDHVVRAIVDLHLDGVAAVVDEEDDALLPAPEHRGHVLRRHLEASVADARDDTLVLGRLGVPERRADRPPDGAVLHLELVAAALG

SEQ ID NO: 50366 - protein, 93 aa, Zea mays
  Clone ID: LIB3059-028-E8_FLI.pep
RAALGGRRRGRWWGSCWRRRRCQAGWEEIPPRPLNLIAVLVSALPCRDQGKSFRRVDVISSFSLIIWEESCSSRHSYILLTSICWYYICQRTI

SEQ ID NO: 50367 - protein, 80 aa, Zea mays
  Clone ID: LIB3059-029-H8_FLI.pep
RRLSCGCKKHSHSYTSAADYRVPRWVQDSGRMLIVTNLQQRHIYPFFTVFSKSFCPLYLFSLQQCSLSRSLYINTYVLYT

SEQ ID NO: 50368 - protein, 311 aa, Zea mays
  Clone ID: LIB3059-041-E3_FLI.pep
NRKFEVYEKQMKAARKSGSKAAQDKVKGQALSKAAKEAAKNKGKGKSAADDDDDQKQVAVPRKWRDYSVEFHFPEPTELTPPLLQLIEVGFSYPGRPDFKLSGVDVGIDMGTRVAIVGPNGAGKSTLLNLLAGDLIPTEGEARRSQKLRIGRYSQHFVDLLTMEENAVQYLLRLHPDQEGMSKAEAVRAKLGKFGLPGHNHLTPIVKLSGGQKARVVFTSISMSQPHILLLDEPTNHLDMQSIDALADALDEFTGGVVLVSHDSRLISRVCEDEQRSEIWVVEDGTVNRYDGTFEDYKDELMEEIKKEVEE

SEQ ID NO: 50369 - protein, 114 aa, Zea mays
  Clone ID: LIB3059-044-A5_FLI.pep
AVGFSGPGRRAGEDARYCGCARGVVGRPTRTSGIGACMALTNFILTVVGVGAAVMLLRKDVKQSATVFRRNVRHIRNWLEEESAAAAKSTEQSSVKELESQAAKKDAVPKDDKH

SEQ ID NO: 50370 - protein, 186 aa, Zea mays
  Clone ID: LIB3059-044-H7_FLI.pep
APSLKRSRASASASASEAEQQHGSGHSSRHNQPSEAVPPSRSHSSRSERDPRHGGSRDQHLQDGAAGLLHPSDMFIVKKKRQERARSGIGSPSSSGRGAGPLSPANPGRPGPAPSPRGARTPFQRDPPPHPSQQSMHSAGSGWGSGGAHSDHQAGASSSAPGIGDIQWAKPAKRLRTDRAGRGGRA

SEQ ID NO: 50371 - protein, 224 aa, Zea mays
  Clone ID: LIB3060-016-D7_FLI.pep
SVAWMEDSDFHNLRTESLKQQYNLVKDRTAVQDTFSYGSHVMQYGSLELNVKHLFSYIGTNPANDDNTFIEDNSLPSFSKAVNQRDADLVYFWQKYRKLADSSPEKNEARRELLEVMAHRSHVDSSVELIGSLLFGSEDGPRVLKAVRAAGEPLVDDWSCLKSTVRTFEAQCGSLAQYGMKHMRSFANICNAGILPEAVSKVAAQACTSIPSNPWSSIHKGFSA

SEQ ID NO: 50372 - protein, 99 aa, Zea mays
  Clone ID: LIB3060-016-H9_FLI.pep
PPSGTWDLTWTIKEAIHNEVFYQRAIPGSMDHKSLEIFGKPRLKSLEISSIPTLSLPPNKLLSVASQLISVFLAWFLSWKQNDFHYHTLFEPINLFFLL

SEQ ID NO: 50373 - protein, 172 aa, Zea mays
  Clone ID: LIB3060-017-A11_FLI.pep
MYPFMCSLLTGHANLLCSCSLTGGTGIAGLTTPVAIPTVSVLGAAPAAAPLLHPTVPGLAIPGATLPITTPSIDLAPPSQCLLLKNMFDPALETDPDFDLDIRDDVQEECSKFGQLKHIFVDKSTAGFVYLRFDSITAAMSAQKALHGRWFAGKMITATFMTPQQYEMKFPS

SEQ ID NO: 50374 - protein, 115 aa, Zea mays; identical to SEQ ID NO: 47798
  Clone ID: LIB3060-026-C1_FLI.pep

SEQ ID NO: 50375 - protein, 193 aa, Zea mays
  Clone ID: LIB3060-026-H7_FLI.pep
LADDHGVPLLCRHHRPFLHGRARSRSGQQEVLHRACLSPQGHCHRRRGRCRQRPACRRRRHGPGGAAGRRRRRARLRAQPVHRQGRRHHHLQEQRRLPAQRRVRRRRGAERRRRLQDLAGGVPQRARRDLLRHPHRAGHLRLLLRAAPRSRNGRQDHSQLKLAIHSMHLDLYVLRPSMDDASISTCFPHMYNN

SEQ ID NO: 50376 - protein, 178 aa, Zea mays; identical to SEQ ID NO: 41250
  Clone ID: LIB3060-043-B3_FLI.pep

SEQ ID NO: 50377 - protein, 458 aa, Zea mays
  Clone ID: LIB3060-044-A8_FLI.pep
PLLARLHPRPPPPCGPRRLLASTAPRVTPFMHRLVLEHGRTSMSWFGPSPKVTIVDPDLAKDVLSNKFGHFEKLKVPALSKMLGSGVASHEGEKWVKHRRILNHAFHLEKLKRMLPAFSTCCEELVSRWAAESLGSDGSCELDVWPELQNLTGDIISRTVFSSSYSEGRRIFQLQVEQASLVMTNIRKIMIPGYMYLPTANNRKMRRNNREVESILREIIGKRIQAMEQGEGTKDDLVGLLLETNMRDDMGMTIEDVIEECKVFYFVGMETTLVLLMWTMVVLSMHPEWQDRAREEVTALFGRDDKPEYDGLSRLKVVTMVLYEVLRLYPPATSVVRQTYKEMEVGGVTYPAGVILELPVLLIHHDPDIWGGDAREFRPDRFSEGVSRASKDPGAFLPFGWSPRICIGQNFALLEAKMALCMILQRFEFGLAPSYAHAPHTMITLHPMHGAQLKLRAI

SEQ ID NO: 50378 - protein, 334 aa, Zea mays
  Clone ID: LIB3060-054-B1_FLI.pep
FPSIAVAGASYNFKMAATATAMAIATISPAAPIPSAPFPSLPLPLGLRLRSQPLLFAASRRRFLHVPKAASWDESVPEDGGDAEESVAAGDDEDEDEKPRPEPVSSSEFQFAAPPEGYVEPAAFDELPPESPEDVAAAYESLYGPAFSGETLLGNNVFEVKVVDPIDMDREQRPNDDFTERVVQVNRVTKVVKGGRQLSYRAIVVVGDMKGHVGVGVGKAKEVTEAITKAAMNGRRNLVTVPLTKYSTFPHRADADYGAAKVMLRPACPGSGVIAGGAVRVVLEMAGVENALGKQLRSKNPLNNARATIKATQMMKQFKDVAEERGIPMEELWK

SEQ ID NO: 50379 - protein, 193 aa, Zea mays
  Clone ID: LIB3060-054-G2_FLI.pep
KRRGFSSFSRPETVCSRVSFLTASSDSVDAWFSTMALVTAGSRAWCQRSSQCPMCWQHISMKDPMSQELLEAVEQERNIRSNPSRNTAVFHHPMLGDFEVKKLHQEKQLGMMVDKGLVATRTGLSQYHLSHWPRMFEVIRMLEGDMLTERWEVSQNVDMPEFVSSELLLQKYMDFAADECSLGVEAMELSGLR

SEQ ID NO: 50380 - protein, 248 aa, Zea mays
  Clone ID: LIB3061-034-E1_FLI.pep
ESSSNNRATMATKILSLLMLLALSACVANATIFPQCSQAPIASLLPPYLPSMIASVCENPALQPYRLQQAIAASNIPLSPLFQQSPALSLVQSLVQTIKAQQLQQLVLPVINQVALANLSPYYQQQQFLPFNQLSTLNPAAYLQQQLLPFSQLATAYSHQQQLLPFNQLAALNLAAYLQQQILLPFSQLAAASRASFLTQQQLLPFYQQFAANPATLLQLQQLLPFVQLALTNPAASYQQHIIGGALF

SEQ ID NO: 50381 - protein, 299 aa, Zea mays
  Clone ID: LIB189-019-H1_FLI.pep
IPALISNFSATKSKKRSKKKSKHKQAKSAIHEDSGRHESSYHLSSDFDNEKRNITSRSKRKKANCSDSSYSDSEIDARKGKSKSKHKHTKKYQLESSDSEFDVREDTRRRLKRDHMKEKRDESPLPFSKDQGDTEGKRHSRCSREKHNYSYSSSSSERGRRRSREKRHYSYSPSSSERGRHSLRHKEKQYYSDSSSDRSHRHSRRSREKRHDRDSSSPDAIRRSSRSTEKQRRPDTSPRHANGHSKKSSGKQDYTERSRYETSRHSRRSQEKRHYPDSSVSDYSDSDQHKKHRHHHRRK

SEQ ID NO: 50382 - protein, 144 aa, Zea mays
  Clone ID: LIB189-020-E2_FLI.pep
QIGGSLVPRRVAASEKRQRKLKSGQKLRRFQESSYMDPNQSLCLGALFNIAATNGLDMGRRLCIFGFCRSIEMLSDVVEDTVLEHGGEVVTAEKASSNGLQEKLTMSVAVPLLWGIPPASETLHVAVRSGGGIVDKIYWQWDLF

SEQ ID NO: 50383 - protein, 160 aa, Zea mays
  Clone ID: LIB189-028-H1_FLI.pep
SASYRSLTDFFLVWVASQIAREKYIIHGYGYLIIHHRSVVAGRRRRRRLLVLDGEPCRERSARAGAAAAAAGHPPRPSAGPAAGVAVGPAVADALHAAGAAARGAARARVPPGGRREPVPEGPVGHRHAGQHAQPGRRNHHRRHHPALLLESSSQRVAAS

SEQ ID NO: 50384 - protein, 290 aa, Zea mays
  Clone ID: LIB3062-001-B10_FLI.pep
PRGARAVRARQRRGHRLRLLRQGPGRQPGHAPRHGGGIRALHGCPPRRLRRRRRVSRRRHARRRRGKLRRLPRDDHAQGPHNHRGHQLRPPRRRRRSAAHRRRSDNCLEAHTRADRRDLCILSVILESDRLLVSQNFFNNRARTACLVLRPTQHNTPQSVFVVCCFITGVRHVGGDMFKSIPSGDAIFMKWVLTTWTDDECTAILRNCHAALPDGGKLVACEPVVPEETDSSTRTRALLENDIFVMTTYRTQGRERSEEEFRHLGVDAAGFTAFRAIYLDPFYAVLEYTK

SEQ ID NO: 50385 - protein, 339 aa, Zea mays
  Clone ID: LIB3062-002-C7_FLI.pep
LRHTPRPSPGRKEGGGKMMMTRAPMGPMEGAAVDEMVRRLVEGGRGGRQVQLSEAEIRQLCVEGKRVLLSQPNLLRIHAPVKICGDIHGQFVDLLRLFDLGGYPPASTYVFLGDYVDRGKQSLETICLLLAYKIRYPENIFLLRGNHEDAKINRVYGFYDECKRRFNVRLWKIFSDCFNCLPIAALIDDKILCMHGGLSPELTSLDQIKDIERPAEIPDYGLLCDLLWSDPSPDGEGWGESDRGVSCTFGADKLVEFLEKNDLDLICRAHQVVEDGYEFFAQRRLVTIFSAPNYCGEFDNVGALLSIDESLMCSFQILKPTDMGPPHARKQIPNKPTRG

SEQ ID NO: 50386 - protein, 275 aa, Zea mays; identical to SEQ ID NO: 48274
  Clone ID: LIB3062-004-E12_FLI.pep

SEQ ID NO: 50387 - protein, 352 aa, Zea mays
  Clone ID: LIB3062-005-G5_FLI.pep
SPAPPSDPPNPELTNPKPSPRMEWTAPKRAASPPSPPLLWDWGGDHAGATGSGSGSSGDAPARRGGREREAKRARADDGEVRCQVEGCGLDLSRVKEYHRKHRVCEAHTKSPRVVVAGQERRFCQQCSRFHALSEFDQKKRSCRRRLSDHNARRRKPQPDAFAFASARLPSSSFDDRRQISFVWNKAPVSHPFTSPWDSSSELPHAKEIREVSTKVGTITGQVHLDKSYVSNAVPSLTHGKDEPWPMKGPDMSIAASKFDGAPDLQRALSLLSVGACGLPDPVHQTSCVIQFTSASENSGDLHLSHGANSGLASCGDGQHIASQPQAQLVRFTMDTSNSVYEPSFFSVNQIN

SEQ ID NO: 50388 - protein, 294 aa, Zea mays
  Clone ID: LIB3062-006-C7_FLI.pep
KPSPLPDSWKLAEIFTTGVVLGYSHDGTIMTISKDRVKPSPLPDSWKLAEIFTTGVVLGGYQAMMTVIFFWAAYKTNFFPKIFHVESLEKTAQDDFQKLASAVYLQVSTISQALIFVTRSRSWSFVERPGFLLVFAFLVAQLIATLIAVYADWAFTSIKGIGWGWAGIVWLYNIIFYFPLDIIKFLIRYALSGKAWDLVIEQRIAFTRKKDFGREERELKWAHAQRTLHGLQAPDAKMFPEKAGYNELNQMAEEAKRRAEIARLRELHTLKGHVESVVKLKGLDIETIQQSYTV

SEQ ID NO: 50389 - protein, 49 aa, Zea mays
  Clone ID: LIB3062-018-F9_FLI.pep
LAVTAIFVILCHLWTMVKFQLFVFFHLPELLARAFWTRMLEHNWLYVHL

SEQ ID NO: 50390 - protein, 158 aa, Zea mays
  Clone ID: LIB3062-019-A11_FLI.pep
RLKPSPPSFGSSPLVHARRRVGKHSVHPKTREAMVDAWWPLLGAAIPALVAGQFVRIKRRRDEEQRLKAARGREKSSDEVFVCERVCTSKRMLKKVGAFSKDPIPETCVTVCGVSELDACADACARTVCVNQHQVPNWNDVCLKRCQSECLKLSSNLM

SEQ ID NO: 50391 - protein, 216 aa, Zea mays
  Clone ID: LIB3062-038-F11_FLI.pep
PKGRGSRAHTASPETDTFLENQPNRYCNEPRTRNEAAEDDSGWETVSQVEENGSCNSPGGSEPSVNGFCGENDASVSGTDWDENCDNDQAHSEISEVCSTAAGRSRNKRSFAGLWRSSNTVDQKKMGSNTLNGRSSNARMSNATESADLKNSEVCDSPHITGQWRPDLLNPDIVRAIKGCIDWPRGVQKQSLRSKVLEARIDGSKVQLRQALKQKI

SEQ ID NO: 50392 - protein, 81 aa, Zea mays
  Clone ID: LIB3066-016-F5_FLI.pep
RNTCRGNKTPNLGVWDMRNIIAAYQTILDTYAAFCYHAISYPMALIHRLLCGHLVLQNLLKSNWRTLHVSRTSLDTEYISP

SEQ ID NO: 50393 - protein, 192 aa, Zea mays
  Clone ID: LIB3067-002-B7_FLI.pep
SRADAAAMDPVATWGLTPLAGADPEIYDLLEREKRRQRRGIELIASENFTSFAVMEALGSALTNKYSEGMPGARYYGGNDVIDEIENLCRSRALAAFRLDAASWGVNVQPYSGSPANFAAYTALLNPHDRIMGLDLPSGGHLTHGYYTAGGKKISATSIYFESLPYKVSAATGYGGGNRGGGYGNNDGNWRN

SEQ ID NO: 50394 - protein, 311 aa, Zea mays
  Clone ID: LIB3062-012-F4_FLI.pep
PCVRRDDAIKDLNRAMEIGDENAIEKFSKRTVKVTGRHNDDCKRLLRLMGVPVVEAPGEAEAQCAALCENHQVYAVASEDMDTLTFGARRFLRHLTDLGYKKSPVTEFDVSKVLEELGLTMDQFIDLCILSGCDYCENIRGIGGQRALKLIRQHGCIEEVLQNLNQTRFSVPEDWPYQEVRTLFKEPNVCAGIPDFTWTSPDPEGLMDFLSTENSFSPDRVTKAVEKIKVARDRYSPGRMKHLTPVASLRGSHTEKEPQCILGSPGQTLKVMSSPQVCKSPSSGFRYGSSKPFMLGRQSGFHGMPYALSFI

SEQ ID NO: 50395 - protein, 279 aa, Zea mays
  Clone ID: LIB3062-022-A7_FLI.pep
SYYLIHMYISYYEKEKSFLFNSSRPSFFNVIFESRSISDVYDAGCCALELEVAEPPTGVGAVASLSVVDGEQRGAAHPEVVVAGDEGPGLPADPAVDADGDEQVPRRLVLCERGGEVGRQRDVGGGEEGRPDGGVVGRLEEGRQRGGHRDLHRPVLGVHVGAVVVDADAVVGVARRQRGLHGDGEVGGGADVDAHDAHVVEEEARLGGAEDEPDDEHDEEDEHDDAHQGGAEATVQTLPLAVLVLVAVLDRHFVMLVADCCLLLVVGVFFFCCCFFFFV

SEQ ID NO: 50396 - protein, 371 aa, Zea mays
  Clone ID: LIB3062-030-D10_FLI.pep
FRTEATSAGRRRYLAVVDEFMEAVHARWPKAVVQFEDFQMKWAFETLQRYRNRFCMFNDDVQGTAGVALAGLLGAVRAQGRPLQDFTNQKIVVVGAGSAGIGVLSMAKQAMLRMPGIHRTGEGHNQFWVLDKDGLITKARKDLDSAVARFARGFGPDEVPDLYEGASLVEVVKKVKPHVLLGLSGVGGIFNEEVLKAMKESDSPRPAVFAMSNPTTKAECTPDDVFKHVGDKAIFASGSPFSNVSLGNGKSGYANQANNMYLFPGIGLGALLSGARHVSDGMLQAAAECLASYITDDEIRKGILFPSVSSIRHITARVGAAVVRAAVAEDLAEGCCDVGPRELGSMSESEAVDYVARKMWYPIYSPLVSDK

SEQ ID NO: 50397 - protein, 126 aa, Zea mays
  Clone ID: LIB3062-057-C5_FLI.pep
NAGQDSIESDGNAVGDALGGDAGVIALVGGVGEEQGVGELGRAVAVLEARVLVHGLHAFLDLGQPRAEPLERLLRLGVRRPLLGVALAEVHLVGGVAGQDLQQRDADDGLELGGDGAHEELLRVLL

SEQ ID NO: 50398 - protein, 211 aa, Zea mays
  Clone ID: LIB3066-022-A11_FLI.pep
ATICYTSGTTGTPKGAVLSHENLIANVAGSSLGIKFYPSDVYISYLPLAHIYERANQVALLHYGVAIGFYQGDNLKLMDDLAVLRPTIFASVPRLYNKIYAAITNAVKQSGGLRERLYHTAYNAKRHAMINGRNPSPMWDKLVFNKIKARLGGRMRLMTSGASPLSPDVMEFLRICFGEVLEGYGMTETSCVISTMNIGDRSIGYGWSSEV

SEQ ID NO: 50399 - protein, 200 aa, Zea mays
  Clone ID: LIB3066-031-F1_FLI.pep
EKGPAAPYQSSSYLTQQLSSNMAQRTAAAASSSASGYGVQRPPGLSLTTAQTKFTSLRPLPPSVVPSHAYGAPPHGPVTVFHPSAPPVPYPASNSGGPGSSDAVLEIESVRWSVVGSKPEGSERLRSCKRAAEMDADVSVALLKKPLTVAAAAAARQGLDMLLPVAETGSEFRGSTRPEPEAQPRPSGTSTTPICVDDEP

SEQ ID NO: 50400 - protein, 79 aa, Zea mays
  Clone ID: LIB3067-010-F10_FLI.pep
INQNTRPDPLSLSSKTSSNLCPCSLVMWFSQSPTLPSLKNVDLPMTKSFPKATPPVWFFSRPLSTSKLHSLATCSGTPP

SEQ ID NO: 50401 - protein, 372 aa, Zea mays; identical to SEQ ID NO: 46355
  Clone ID: LIB3062-032-F7_FLI.pep

SEQ ID NO: 50402 - protein, 217 aa, Zea mays
  Clone ID: LIB3062-043-H9_FLI.pep
KSSSSTDAQTRATFSLIIGYLADHCNLPTRELLSRRFCQNIKKHRLRQLIDDTIGSVPADSSLINSVLEVCFGPSLLPKSISDVKYLVDFVETVMEALPANYRLGLAVGGFVAKHFTGYGAASTGTRFWASSVLINAIFRAVPVAPESVWLEGAGLLEKLHATEILKRFYQQAASVYPFSFKLWHAHLNYCKASGSNTESILESARQRGIELNLTPT

SEQ ID NO: 50403 - protein, 177 aa, Zea mays
  Clone ID: LIB3062-045-C4_FLI.pep
SRVRSTRILRYMDNLSDIGELNYAEGGGATNGMGTPGIEGIGGSVSLGTAGIGGKAPTLGMTTAGIGGGSVTVTFGNAGTAGIGGIAGILGNAGIGGTPSAGTVDVGTAGIGGRVAAGTVGTTGGFGMAGMAGMAVGAAVGAVVVSARCRAAWHVVLPSSMIMSVIITSAVAKKRDE

SEQ ID NO: 50404 - protein, 169 aa, Zea mays
  Clone ID: LIB3062-045-D3_FLI.pep
GYENSSAARPVRDTVHVRGFPPGAGAAGGHGAHRVPGGGAGAGGGRERHGGAHRVGPRHGDRRHVRQRHLREAAAGPGRRRGGRRAVRLVRGRHRAAAGAAAEQRGSRRAAVHVRRPADAAAPARHVRAVGARGCDAPTADVVLASARCTCTSCDLHRPPARRIPSPPF

SEQ ID NO: 50405 - protein, 190 aa, Zea mays
  Clone ID: LIB3062-046-G6_FLI.pep
QLIFGVEKENTESSVQGISSFYLLHEMAVILGLVADDIVLTNTCCSHPLYRESELIEENCAGVRNAAQRKLFDELGIVADELPVDQFIPLGRMLYKAPSDGKWGEHELDYLLFMVRDVKLDPNPEEVADVKYMNRHQLKELLRKADAGEDGVKLSPWFRLVVDNFLMGWWDHVEQGTLQGAADMKTIHKL

SEQ ID NO: 50406 - protein, 184 aa, Zea mays
  Clone ID: LIB3066-005-B12_FLI.pep
TYKMRTPFIWMYSNGVNQGISEFHAGDDGFDRGSFSARISHLRPGFWVGKRAAPDPLVMEVRSQVDRGVIGGAQRICHVHGVTERVEEVGVPHVRHWYLRQGVQYAVEYLVTLWHDREHTSFCCDGACIVMERLWSWQCGRDVHVFMDLRYSGGLLISCLLCSYDKAVVLVVLVDHDEVSLLKV

SEQ ID NO: 50407 - protein, 129 aa, Zea mays
  Clone ID: LIB3066-014-F2_FLI.pep
WNRLDCGPRPANQSRTPSPRLGCVGPAMGDRPAPIEKVAVPEKMALFLHAAVTSPGHQQQHGASSHEAPAANITPRTTARNKQQHLPVSPGACLCSPTVHEGSFRCRLHRGSGSGSGLHEMKMSKKAGV

SEQ ID NO: 50408 - protein, 166 aa, Zea mays
  Clone ID: LIB3066-016-C12_FLI.pep
RSTILRRPLCYLGTLAAAHGYRRRPAPVAIRKRSGTFFDLVYCCARGVWRGGSRKERGRTEGEGGRGRDVGADQGGCRPVREGAAGGAGRGHPRPRHEGARDAELHRGARARGRRAGGRLEGRAIPPRGRDRTARSQAEDGKGEFREGKKRPHGNSIEPRQPRWSP

SEQ ID NO: 50409 - protein, 210 aa, Zea mays
  Clone ID: LIB3066-016-D10_FLI.pep
NEQWVTIARIQHSEFGTATQLHFCFPFLSQLHICNPGEEDLWFSASQSAVVDDVLLLIVVVVRVQLLEQRGADGQRHVLEVAERVGGAQVVADADVPGEQDAGAVPVRLHLVAVLARALHQDHLADVLLVAVLELDRVRAVRVGHPVDGALELAGAEVLALQPHLGARDVLGDIGHEPGAAGVAVDAALDDVVGEVVVDGGASRGTEEDG

SEQ ID NO: 50410 - protein, 327 aa, Zea mays
  Clone ID: LIB3066-032-C7_FLI.pep
RLASLSKSMAFTALSLLYHLSITVSLVLARGIIIAGVVDIAPRPTPLPLPPQPLLAPSPTPRPPGLGAPTRTPPLPLPLPSPRPPRTPPTTTPLPRPWLGAPSPARVPRPPRLGAPPRTPVLPSPRVGAPSPAPPPVRPPQLGAPLPTPVAPTPQLEDPSRGPILPRPPLKGVPPSTPPLVAPRLGAPLPSPPVPSARKGTPPPPPQFRVPIRSPVIPPPQKGIPPSAPLIPAPRLGVPLPSPPVQQPPRTPILPPSRKGAPPSIPPLSPPKLGAPLPSPLLPPPRLGAPPRTPILAPPPQVRAVFPSPRSPPPRLGAPLPTPLLPP

SEQ ID NO: 50411 - protein, 428 aa, Zea mays
  Clone ID: LIB3066-032-E12_FLI.pep
IAKQSYQLRIWLSAVIANMETCVDGFPDDEFKAKVKESFNDGKELTSNALALIEKGSSLLSVLKGGSKRRLLEEEGEPAQAGPALDKDGIPEWVPDSERRVLKGGGFKSTLTPNVVVAKDGSGKFKTINEALAAMPKTYDGRYVIQVKEGVYEEYVTITKTMKNVTFLGDGSKKSIVTGKKSFADGITTFKTATFTAQGDGFMAIGMGFQNTAGAEKHQAVALLVQSDKSIFLNCKMDGFQDTLYAHSKAQFYRNCIISGTVDFIFGDAAAVFQNCILVLRRPMDNQQNIATAQGRADAREATGFVLQKCEFQAEAALRDSGRPPIRNYLGRPWRECSRTIVMESELPDFIDKAGYLPWNGDFGLKTLWYAEFGNTGPGANTAGRVSWPGFKKVISKADATKFTVENFLHAQPWIDPTGTPVKYDLFT

SEQ ID NO: 50412 - protein, 98 aa, Zea mays
  Clone ID: LIB3066-033-F12_FLI.pep
HCLVQMQRRRKVLHLPAKKPSPRHTLAQLSAIMHAPTNRSLYFSHSLACAISVDTMSRRSRMTAGWNLRDDSITFILAGIYICTLQGFTNYLFPIISN

SEQ ID NO: 50413 - protein, 52 aa, Zea mays
  Clone ID: LIB3066-043-H12_FLI.pep
FIYFTCNIIYHLTDTLYNFFIWLLTAFVFILDPQRIRCSSDRYTHNYSKCIL

SEQ ID NO: 50414 - protein, 319 aa, Zea mays
  Clone ID: LIB3066-053-E4_FLI.pep
LGARYHAADNEDLPESVDWRAKGAVAEVKDQGSCGSCWAFSTIAAVEGINQIVTGDLISLSEQELVDCDTSYNQGCNGGLMDYAFEFIINNGGIDTEKDYPYKGTDGRCDVNRKNAKVVTIDSYEDIPANDEKSLQKAVANQPVSVAIEAAGTAFQLYSSGIFTGSCGTALDHGVTAVGYGTENGKDYWIVKNSWGSSWGESGYVRMERNIKASSGKCGIAVEPSYPLKEAPTRRTLAPARRPRPRRPPCATTTTRALTAPPAAVSTSTVSTASPGAAARSRAPPAATITTAAAPMTTPSATSGREPASWARTAHCHCQ

SEQ ID NO: 50415 - protein, 212 aa, Zea mays
  Clone ID: LIB3066-054-E2_FLI.pep
SITLEVESSDTIDNVKEGIPPDQQRLIFAGKQLEDGRTLADYNIQKESTLHLVLRLRGGMQIFVKTLTGKTITLEVESSDTIDNVKAKIQDKEGIPPDQQRLIFAGKQLEDGRTLADYNIQKESTLHLVLRLRGGMQIFVKTLTGKTITLEVESSDTIDNVKAKIQDKEGIPPDQQRLIFAGKQLEDGRTLADYNIQKESTLHLVLRLRGGQ

SEQ ID NO: 50416 - protein, 59 aa, Zea mays
  Clone ID: LIB3067-019-B6_FLI.pep
AYLFLPSSSRTPTAEFPISFHFLLPPSSFNLFWLRYPSILAGMVFPSFGQKKPSLVVLY

SEQ ID NO: 50417 - protein, 115 aa, Zea mays
  Clone ID: LIB3062-019-C1_FLI.pep
RPVGRGVPSIGMALPGFVSQQQLGLNNNSEMTWLPILTGASGALGAPYGSPYIAMDGSYYSRQSEQASSSVSIREPSANNASSLLKSQEITEVASDEITQRQNKPRRYSEMNFGQ

SEQ ID NO: 50418 - protein, 533 aa, Zea mays
  Clone ID: LIB3062-039-F3_FLI.pep
SMPMRAGLVLFVDLCSWRRHACVFIIIQHKHDASHVWLHVEPGGNLHPQRRVALGEEVYPDGPELLADLWVSERVGESLHESVLSVGVPGAVPLPWLLEVVGLAYGCLLPPPRDRPGRQWRGRRRLPQRRVPGRVVVHLLVAVHEVHGAVVVVVVVRAARRVDGQHQVVGPQPVALRVGVGEHPALQHLVVRVVDPWHHQPRAERQLLVLVEEVVHVPVQHQPPHGAERQQVLRPRLGVVQRVEVVLLLRVRLHHLHVQRPLREAPRRDGVVQVLRRVAVVPSPDQRRLLVRQDAPHAARRLPVELDVLRLPRRAHERVRVHAEPFHVAVVGRHAHVVEEEEEGVQALGEVRQEVEHPPVLLHVRPRVGLERVDHVGELDAVADEEDGEVVAQQVPVALAGVELHGEPARVADRLRGPPLVDHRREAHDHGRPHAGRAQEVGARQRRHVVGALEEALGGGPARVHHALRDALAREVRHLLDQVVVLQQDGTARPHSQRLVVVPHRSARVRRRHRRVVATGRTELGRIHCDSAS

SEQ ID NO: 50419 - protein, 69 aa, Zea mays
  Clone ID: LIB3062-052-D6_FLI.pep
FCSLHTPYSGAAVVHVDVAVQFFQVTQVKLLPQFRTSLPYRCCNFSLFILKNGNGTPPMIHVIVDNLEV

SEQ ID NO: 50420 - protein, 102 aa, Zea mays
  Clone ID: LIB3066-009-H6_FLI.pep
GYSRKDLGVSYVKEKQLRVNMGISKLREKVKEHQEKFHSAAKIAGTNPVEWMENADRWIVGFLEKFEEGCHMMETAIKGRIQEGLKRQGRSESNLSGEDSDS

SEQ ID NO: 50421 - protein, 90 aa, Zea mays
  Clone ID: LIB3066-010-B3_FLI.pep
LQIKMSIDQSALTLSIGLPLGLAHIVSQIFLPSGVLKFWVHSLTQETFKSSAPSATHTDDDVATTRKRRATTTMICLFWAIKSVFLLLFL

SEQ ID NO: 50422 - protein, 126 aa, Zea mays
  Clone ID: LIB3066-037-F6_FLI.pep
STFNSTKTEHRCLVHYCNAMRFCEHVNQRRPSARQRPPLSHVIPGAVERLEALRHRPRTILSLPLHRHEVEAHGAAQGANPEDALRPPVSHHAPASQPHTPVAAAGKIGSLRLGLCRLRRRPVRRF

SEQ ID NO: 50423 - protein, 322 aa, Zea mays
  Clone ID: LIB3066-048-H6_FLI.pep
GVAPPLPLLVMPRFRFASMTPGGVLTATARRAWMPQEVDADCVGSSDAWLVGARQAGGECFLVNAFSHEVHHLPRLGDSDLSHSACSLRKVVLSGSPQSGPECIVAAFAFCRSKPELALWRPGMKSWCVWQHSLIAGHIDMAFYQGRLYMLWRFTPSLFVFEIAEDGHGVKFSRMKDCLLEKLLATPLGSSHVLSCNMVEWHGRLLLIIRYYGGYQVRHRVLKVQVFAIDLNTKPNSLTEIHSFGGDCVFVGSGGCKSFPAGQYRGVEGDLIYFVPDHYNPHDAFVYNMMDGKTRFIAEPLPCSISAPEQSSGFPVWLFPPE

SEQ ID NO: 50424 - protein, 95 aa, Zea mays
  Clone ID: LIB3066-050-H10_FLI.pep
ACCHQIEMIDTPNDESSFYSSVEYCGVKKVPNRLIGKKFCGVKKRFRRLTRRKPCEVKKKMFDETHTDAIPDISSQAQGWIVDELCVSLSAQTTK

SEQ ID NO: 50425 - protein, 132 aa, Zea mays
  Clone ID: LIB3079-035-G10_FLI.pep
PWLVLPSKGFHVQKPPHTHRERETSGAGNKALIVKHKLTGLPKIQARHHVTVSPSPRYRQSLAFFCPILIAAYLQIQLCAHQYSPYYYTTMQKCLFTDSVILLCAQYSRYWAAQQRHAAPFAVGSVTSQSGS

SEQ ID NO: 50426 - protein, 179 aa, Zea mays
  Clone ID: LIB3079-056-E12_FLI.pep
TTLAALGREATAAMEAVEAQQQQVTYERLLAMVDAERTYHQNAADILNKLHDEMLYAKHHNESANHYDEQSSEPESDAGPAQVHSRSTSEDPVLTKPSESTGNSQEVQFLGEVIHPFDAQADGELSLAVGEYVVVRQVAANGWSEGECKGKAGWFPSAYVEQRDRAPASKVIEPGLLTT

SEQ ID NO: 50427 - protein, 120 aa, Zea mays
  Clone ID: LIB3088-006-D7_FLI.pep
GWESNDLHNGERNGPAWKLDPRPVPARRHEGAVLQELHRPAEEGHRPGSERGWLLRLVSPRQLRVAGRVLVQVRHRLRGLQHARTPPEGVGLLVQGHASEALRSPEPSLSTEGTILFSFA

SEQ ID NO: 50428 - protein, 83 aa, Zea mays
  Clone ID: LIB3115-001-E8_FLI.pep
RRLCYLGDRATWEPNAHAWGQKGRAFFGHQTKCQAWKLTSSSPKETEELNLVVALSQRSRLQRIYCEQQSAHKLPRLNPPPPH

SEQ ID NO: 50429 - protein, 86 aa, Zea mays
  Clone ID: LIB3116-012-C2_FLI.pep
ERQSLLTRSAYRKSKRSWLIISSRATVFNCYTNTWKRTYGTVEGFFQKPISWQVYDVRFFYGKIGSVNMWRWKLPGNMSLAWILPF

SEQ ID NO: 50430 - protein, 113 aa, Zea mays
  Clone ID: LIB3115-013-C11_FLI.pep
NDCQRTAFYEGIGLDTKEFDMHVIIETNRTTARIFPAVLDVENPEFKRKLDRMVEINQKIIAVGESDEIPLVKNLKRIPLVASLVSEIIAAYLMPPIESGSVDFAEFEPRLVY

SEQ ID NO: 50431 - protein, 177 aa, Zea mays
  Clone ID: LIB3136-003-D10_FLI.pep
VLSRKISNIEYHLKGAKIFDKKAKTLITREAVNGTSTDSKTTITLKYSVIKGKLWDSSKSMKLGVTTTIEAGVPVVLPATIEVQSEFNSTYSWGESIIEKEEYSNAYEVVVPAYSVVTVSVLATQGICQVPFSYTQEDVLTTGERKVFKFDDGIFRGVNSFGFKSEVTERKLSKDDD

SEQ ID NO: 50432 - protein, 108 aa, Zea mays
  Clone ID: LIB3115-015-A1_FLI.pep
SSPIYAAKQISGPTATGKVENSRNSYPISFSEKQQISKDEYKRTQQPTFTRGMGKSDIMHGICGAQDILQKQQYFMQGCFEKHFIFFAKRILSKRSRKFFSIEKSPLD

SEQ ID NO: 50433 - protein, 131 aa, Zea mays
  Clone ID: LIB3079-018-G10_FLI.pep
LLCLSLPSSPLVHSFVQSFEMAQQQKVVVRVPTMTDDKIKQKAIEAVADIYGIDSIAADLKENKMTIIGEMDAVAIAKKLKKIGKIDIVSVGPAKEEKKEEKKEEKKEEKKEEKKEEKKEEKKEEKKEEKK

SEQ ID NO: 50434 - protein, 216 aa, Zea mays
  Clone ID: LIB3079-021-A2_FLI.pep
RECKPSFHLPIPVVPRTNFPQLPAPAQLPRARQPAAGRAMDDDATVGSRQRQQQPASPAAADSRAMMAELDAPLHALGFEMEELSPSRLTGRLPITPICCQPFKVLHGGVSALVAEALASMGAHMASGYRRVAGVQLSINHFRSAALGDTVLAQAVPVHVGRSTQVWEVKLWKMDPSTGAKGPQIAESRVTLLSNLPLPEEHKRAGDALKKYSSKL

SEQ ID NO: 50435 - protein, 246 aa, Zea mays
  Clone ID: LIB3079-028-D1_FLI.pep
ILNDPFPGAHQGYGGDAWRITKLEGPCVGRAGAGHHHAREVLEADEAVAVSVDAADHAAAVVEAAPAAEDGVQDGAELLGGDAAVAVRVEHAERLHEVAVGVGVGVARRGLRGERGHGVELGVGRLRVAQAPQHGLQLPPRDLQRRRRRRRQHGPRRRGGGGGGGGGRRGRERRRLAARQRALLLLLPVLDDAAAAPLRGRQGQLPGERLDGQLHLRLRLLWRRCVANGTRRRPDPIRGALAWVED

SEQ ID NO: 50436 - protein, 290 aa, Zea mays
  Clone ID: LIB3079-038-D3_FLI.pep
RSHFVKALEVALLLIVYIAYGYTKGGSSSFILITISSWFLVMSWLFAPYIFNPSGFEWQKTVEDFDDWTNWLLYKGGVGVKGDNSWESWWDEEQAHIQTFRGRILETILSLRFLMFQYGIVYKLKITDHNTSLAVYGFSWIVLFVMVLLFKLFTATPRKSTALPTFVRFLQGVLAIGIIAGIALLIVLTSFTVADLFASALAFIATGWCVLCLAVTWKRVVKVLGLWDSVREIARMYDAGMGAIIFVPIVVFSWFPFVSTFQSRFLFNQAFSRGLEISLILAGNKANQQI

SEQ ID NO: 50437 - protein, 114 aa, Zea mays
  Clone ID: LIB3079-040-A2_FLI.pep
RGAMMLGDDAAAVDLHVGLGVAEPLGLQPDADAVLDAAPEGAGHHLLALGVVPCHHLSRSHSQAWSIGGRGTGGNGKCYDDYGDGGECKRQGRRRRHCPRRHRHHFFSDLAPFL

SEQ ID NO: 50438 - protein, 109 aa, Zea mays
  Clone ID: LIB3088-035-E4_FLI.pep
SKKYEKTADNQAERANWWRIASGKPNVLTLDYVNISPFSLPARRTKELRALIGWRYYFSLFLELSDIAMPFIRVAISKVSSAVSYFWVSMIGRSLGLIFSGIRQSLGWK

SEQ ID NO: 50439 - protein, 134 aa, Zea mays
  Clone ID: LIB3088-049-G3_FLI.pep
AKRVYCLVASRRMYCLVLLSCNKVSSNHLHSNFSHKRTSPLLWRRNHIYLPGGWIVIFVFRYIISSAYDIHIACMPNKLTSHPWPRLSKFLPVHIPHLLVKTALFPFLPEFSKCCSPSLGAIACFVRRWCARCR

SEQ ID NO: 50440 - protein, 101 aa, Zea mays
  Clone ID: LIB3079-021-H8_FLI.pep
CHQYVQCEICGEKHLKKNIKRHLQSHDKVPSDGRMKCTFDGCEHFFSNKSNLTKHVKACHDQLKPFKCGIVGCGKAFTYKHVRDNHETSGAHVYMEVSCAT

SEQ ID NO: 50441 - protein, 113 aa, Zea mays
  Clone ID: LIB3079-022-B2_FLI.pep
TPVLEKASKAVWELILDNGGLGKEITETVEKVFCRLSGIDMMPPPPSGAGAHREKDDMSFDEKFVKSKEVDAFEPSSSRKRPFSDVNRKGAGALPNGSATDQHDESEDSDQKI

SEQ ID NO: 50442 - protein, 68 aa, Zea mays
  Clone ID: LIB3079-033-E12_FLI.pep
VGKRWLWSSCQCDNFSLLDSAFSLLLSWTPVFTVAGNAACTRQGNITKEIIHFPFPCQLHMLLPLSTL

SEQ ID NO: 50443 - protein, 252 aa, Zea mays
  Clone ID: LIB3079-034-B9_FLI.pep
AASHLPPNCRTSSELANKKLAGCVRCMVIGVGSHRGGGGDDLDDLRHGAVRVCGGHPAGLGGHGGLLVLLLHHLDLVHAHDGDGAHRQDGHRVGRQLDDLPLHLHRVGAVRGRRQHGVVLGRRAGLAVPEVEAHLDAAEEEAADVGVHDKGVLGEEAVAEPGDGAEREAEGEADGQELDALGLDHLDDDAERRDEDGHGEGEADAAEELDAVGLADGEERDGDDEREGRHVQQEEVGQSPQARPPRRVRQVE

SEQ ID NO: 50444 - protein, 168 aa, Zea mays
  Clone ID: LIB3079-054-H3_FLI.pep
RIPIGVNISKLKALNPSRQEAHDRQRRADSPRCRVPCCVVLLICRRLAVRVWRRSWGSVLWRWRWATPGRRCSHRSRGKWGCGCMCRRRRRRRRDRYRGRRRRDRRKGRCRCMCRRGGRRRGGRSVSLVVVRLLPWQEHRVDEVDGERRLVEQRLGHRGGAGRCRRDF

SEQ ID NO: 50445 - protein, 94 aa, Zea mays
  Clone ID: LIB3079-056-C9_FLI.pep
TRIHKEITSKIELMVQKTKICKAIDALISYSKQPFNNAYIKADWHNSLTSSRYNLRRRGQEANEEGPNGYAQQHKLDRAEQRGPASSGLQLQNF

SEQ ID NO: 50446 - protein, 85 aa, Zea mays
  Clone ID: LIB3117-012-C12_FLI.pep
GQKQQIINSSPEDTKKKEQLLVSMNKRHKKREHVNLFNCFSMKRTGRMQVYRGKCSYFGCHGKFLHGRGKAELDSSLRAVMLSLL

SEQ ID NO: 50447 - protein, 140 aa, Zea mays
  Clone ID: LIB3136-002-H7_FLI.pep
ASPHGSTSQRCPSQSRHPPPISLAPSSIFSTSQPWPRGQAPCCCSSVVWKLRLVGAIVSYLRLKHHIELPSSRPSLLLCWPSLLPGARTRQSSPQPRSLLSIARPIRGALDMFGTWEVQAAMGSLIDHVMRRTRAELISK

SEQ ID NO: 50448 - protein, 182 aa, Zea mays
  Clone ID: LIB3116-004-B10_FLI.pep
HIPLRYNRNKSLSLLSEKRKNKRGVHKYGRNESSHGLAHATLFRHAPVHHNPQATGKKKEKKEGGKFGFLLLQCHGEPGEEALPRAGPRQERASVSVQVPRHGFLAHQGGETTAAVTSYYRNENPLPPRAAQTNSHTQPPSIHNSSPIPSTPAVPLVFVYVQLLLEWGRRRRRKSRCWSMNS

SEQ ID NO: 50449 - protein, 116 aa, Zea mays
  Clone ID: LIB3115-011-A2_FLI.pep
HALRLSPVPCVLPSQFYHSTGIILAINLTLDDKYKHAQKASTTRTCARCNKAVTRPAVAHQFQPYLTLIPAAAPPRARRRDADPRLADSDHLNGPLAGRRLLAPGPLPCGIREEYA

SEQ ID NO: 50450 - protein, 117 aa, Zea mays
  Clone ID: LIB3115-011-G8_FLI.pep
HSIYRTSLKTPPLSISATVSFKAVTLLAKVLYNLEYLALVPSAVRAKASKLTASGNCSNTPFISSKLKSARTVGLGTTRITSPPLGSWTRRSALITSSPLEFAPHFMMKGAVVPVLN

SEQ ID NO: 50451 - protein, 257 aa, Zea mays
  Clone ID: LIB3116-015-A6_FLI.pep
LQASNNEQSVQARDLRIAEDEHLHELGPALVAEQALLPVRPPRVRQAKPRASAAEVADAGAGVGSSEHAHHGGERRADEQAVGAELWPAAGVVEQRRAAPAHLGQHHGRRRDLRRFRPVEEERVQRVVVVVRASVPLRAEPAETEATVGVANDDAGALEVAPPVEVRSTEAVHGGLVAAPELTVSEVCFCHERHGERWLDVVVGELQLRRRRLGFSRAFAPVKEAARGDEGWPARRLHGPAARHERHHEYCLPGWDR

SEQ ID NO: 50452 - protein, 148 aa, Zea mays
  Clone ID: LIB3115-028-E7_FLI.pep
LRFATEIANPATACVRASERASRQNGAPRPEPEAGAASPRAVLPPPPRPPRLRRPHSKKPAPGGPAAAPAGSEAHFFSGGGDRGGDEHGQADGEGGRGGERLPTVRPQQPPRPTQGPLKSLLNGARLDDPIMLLLRCCHLYQQYRVLC

SEQ ID NO: 50453 - protein, 74 aa, Zea mays
  Clone ID: LIB3079-051-B12_FLI.pep
AWSADEAVGYRILGTDCVHCNQSVRRREAEFVIIHKQPCSEMYWATNCLPHTVNVKCMNKFLTGPAIITTNHGY

SEQ ID NO: 50454 - protein, 125 aa, Zea mays
  Clone ID: LIB3116-021-C7_FLI.pep
KIQDKEGIPPDQQRLIFAGKQLEDGRTLADYNIQKESTLHLVLRLRGGMQIFVKTLTGKTITLEVESSDTIDNVKAKIQDKEGIPPDQQRLIFAGKQLEDGRTLADYNIQKESTLHLVLRLRGGQ

SEQ ID NO: 50455 - protein, 73 aa, Zea mays
  Clone ID: LIB143-033-A6_FLI.pep
SCNGVSRCFCLISFSVNQLLLSLSVPSDARRAERDRDKRTMNQLGAENSRASGLNLRQFWVRVAGLHEHSEPV

SEQ ID NO: 50456 - protein, 113 aa, Zea mays
  Clone ID: LIB143-060-G1_FLI.pep
TRISLAAALSLLPRSLSSCSPPRPRERPRCRFLHSPRATPRFRPSRLLSLSVAHNQARLRAGVHAARGGDELRHDRDVTNDSEFRSWGAGSPAPHAVIGQSVGTLRSGGLLQS

SEQ ID NO: 50457 - protein, 176 aa, Zea mays
  Clone ID: LIB148-035-F8_FLI.pep
CISIGPGTSKVNITGVTCGPGHGISIGSLGRYKDEKDVTDINVKDCTLKKTMFGVRIKAYEDAASVLTVSKIHYENIKMEDSANPIFIDMKYCPNKLCTANGASKVTVKDVTFKNITGTSSTPEAVSLLCTAKVPCTGVTMDDVNVEYSGTNNKTMAICTNAKGSTKGCLKELACF

SEQ ID NO: 50458 - protein, 386 aa, Zea mays
  Clone ID: LIB3060-038-D6_FLI.pep
FSSSALLAHSSSDCAGGGPRTPAAPGVHGMVVLVATAARWPGGSTAARARPPAARGRAPIRFAAEPEHKAATVRFEKYRLLSWMKPIRHDVRAQMSNVNVGAGSYGGDEANGHGEHLDTSATGDPNKLAKQLSGSRYLQPVGVMLFLCALATSFFVFFKGQSSAVVAMLAKSGFTAAFTLIFVSEIGDKTFFIAALLAMQYQRALVLLGSMAALSLMTIVSVIIGRIFQSVPAQFQTTLPIGEYAAVALLAFFGFKSIKDALALPDNANGNLQGNSESGELAEAEELVKEKVSKNLTSPLEVLWKSFSLVFFAEWGDRSMLATIALGAAQSPLGVASGAIAGHLIATAFAILGGAFLANYLSEKLVGLLGGVLFLLFAAATLFGVF

SEQ ID NO: 50459 - protein, 547 aa, Zea mays
  Clone ID: LIB3060-018-A10_FLI.pep
ALSSIPAFPGQLQLLAHHQKPERTPATHLPEMAAVEPRQFGRLEPGSSPVRVATNGAKAYPPPASHLPRRADSPVRGCSFPPLVSPPRRLDDASDDEDEEQEDWRELYGSHLQLEVEPAVQDARDEGTADAWIERNPCLVRLTGKHPLNCEPPLARLMHHGFITPAPLHYVRNHGAVPRGDWATWTVEVTGLVRRPARLTMEELARDFPAVEIPVTLACAGNRRKEQNMVQQTVGFNWGAAGVSTSVWRGARLRDVLRRCGIVPRKGGALNVCFEGAEDLPGGGGSKYGTSVTREWALDPSRDIMLAYMQNGEPLLPDHGFPVRVIIPGCIGGRMVKWLKRIIVTPAESDNYYHFKDNRVLPSHVDAELANAEAWWYKPEYIINELNINSVITTPGHDEILPINSITTQRGYTMKGYAYSGGGKKVTRVEVTLDGGETWLVCHLDHPEKPNKYGKYWCWCFWSVEVEVLDLLGAKEIAVRAWDQSLNTQPEKLIWNLMGMMNNCWFKVKVNVCRPHKGEIGLVFEHPTQPGNQPGGWMARQKHLETA

SEQ ID NO: 50460 - protein, 128 aa, Zea mays
  Clone ID: LIB3059-055-E5_FLI.pep
KSQLQQIARPMYSNPPVHGALVVSIILSDPELKSLWLKEVKGMADRIIGMRKALKENLEKLGSPLSWDHITNQIGMFCYSGMTPEQVDRLTNEYHIYMTRNGRISMAGVTTGNVGYLANAIHEVTKPN

SEQ ID NO: 50461 - protein, 209 aa, Zea mays
  Clone ID: LIB3060-003-G2_FLI.pep
QLCIVKVKENCDEEMESPTKNNLNSNNSIKDISQEHKKLANGFNLFQKELERLKDENLSPLLPLDVNLTDPSLSGLERTLSQLDMANEHLQSIFPSFKELPGSGNALERLLALELELAEALQAKKKTNILFQSSFLKQHNDEAAIFQSFRDINEVIQDTIELKRRQMAVENELKEMQGRYSELSVQFAEVEGERQKLEMNLKNRTPWRS

SEQ ID NO: 50462 - protein, 243 aa, Zea mays
  Clone ID: LIB3137-002-H8_FLI.pep
MGASASVLSFPTAAAFPAAATAVAGAAGCFALGYLLAFTRLPRHAAGPGSGGTSDDDSEDDSEEDDDENSGRSRAAKRAGGQKRAGLRLLYWARNVVTKSDSAREAERSRSQAAASPLEIENLAEIIEDFKMVLVVRNDLKMGKGKIAAQCSHATLGLFKKLQQRAPKSLRRWERCGQVKVVVKIESEEDMLVLQGRAKSLNLPTHITIDAGRTQIAPNSRTVMAILGPADMVDDVTGGLKLL

SEQ ID NO: 50463 - protein, 401 aa, Zea mays
  Clone ID: LIB3136-019-A2_FLI.pep
KDLNLPAALPQPTRTPPQQQMGSPGLLRYRSAPSTLLGEVMCGGDQDFPAAGGAGHGPPDHAAADNVLARFLAGHHSETRDCKPPRPAAAAHFMDEAAVASMAASQQQQLMYQSQQEQQMAAMEGLYRNVSSGGTEHGAAVGAGNNSLIRQSSSPAGFLNHLNMDNGYGSMLRVGMGGGGFRNGVSDARLKGQLSFSSRQGSVMSQISEVGSEELDGGGGSGSPEAAGSNASGAARGYSGIPGYPMGGLASGAWPDEASPSPTSGAKRPRDSGPALQQPLAPQLSLPSGKNKGGRAASAEMAAIEKFLQFQDAVPCKIRAKRGCATHPRSIAERVRRTKISERIRKLQELVPNMEKQTNTADMLDLAVDYIKDLQKQVKVLNDGRASCTCSAGELQGQFTR

SEQ ID NO: 50464 - protein, 224 aa, Zea mays
  Clone ID: LIB3136-047-H2_FLI.pep
YRRRRATDRSCFSAAGCHVASGFLPATGRYATCLCYPSSHATSRRIAYRRRRCASPGDSGSSRLPARSNATGGACPGHAPSSDGSDTTSRCPRHASHRATCHGSRTGSRFSGSKSKRRPDPVSDRSSHPVAHRGPDPVSHAGAYTRAVELGVGEPVAGAGARARSGGRVGGAELAHWRRRGPGGRRARHRLVLRSRAVAFITAIRPYRSSHGSLVLLLVGVLMD

SEQ ID NO: 50465 - protein, 226 aa, Zea mays
  Clone ID: LIB3137-017-D7_FLI.pep
QLNITQGEITSGPPQLPNLHAALRLRVCDCESRELSVRLLGRHLRLGRTDDTLARVLVLGRLGAQLVAHAEVLFEGAGQEPRDEEDEEVGGEVEQVGGGEAPAEPHPGGVLRGGGPRVVGPVEDDEDAAHGVEQRHQRPDGRREGAQRPHHVLRQDLARQQEQVRRRRPHRRIVAAREPAQHVRQRQEQAHRRAHHHVHLEQLAAAEDLRGRLGGGGGRAGGVIRL

SEQ ID NO: 50466 - protein, 455 aa, Zea mays
  Clone ID: LIB3137-030-E2_FLI.pep
PRRPGSLLPPPPCKSPNPAGTTARFPVRGTGEKGRDRERGRRGVRRICSDPRRSLSRRPHSQPAKMGAGGRMTEKEREEQEQVARATGGGAAVQRSPVEKPPFTLGQIKKAIPPHCFERSVLRSFSYVAHDLATAAALLYLAVAVIPALPSPLRYAAWPLYWVAQGCVCTGVWVIAHECGHHAFSDHALLDDAVGLALHSALLVPYFSWKYSHRRHHSNTGSLERDEVFVPRTKEALPWYAPYVHGSPAGRLAHVAVQLTLGWPLYLATNASGRPYPRFACHFDPYGPIYGDRERAQIFVSDAGVAAVAFGLYKLAAAFGLWWVVRVYAVPLLIVNAWLVLITYLQHTHPALPHYDSGEWDWLRGALATVDRDYGVLNRVFHHITDTHVAHHLFSTMPHYHAVEATRAIRPVLGDYYQFDPTPVAKATWREARECIYVEPEIRNSKGVFWYNSKF

SEQ ID NO: 50467 - protein, 285 aa, Zea mays
  Clone ID: LIB3137-057-D9_FLI.pep
LVVGRSVVPEERAKGKGSLLVASCFPSSAMADPAEENVVSPPPTPAAPAVGASDPPLQPAADSASTEKVSAPAPEVRSRGFRLLGEDTSVHKSLGGGKTADVLLWKDKKTSAVVIGGATVIWVLFEVLDYHLLTLISHVLIGVLATLFLWSKATTFIKKSPPDIPVVQVSEDLVVNVSRALRNDINRALHLFREIAMGHDLKKFLGVIVGLWVLSGVGSSCDFLTLTYIAVLMLHTVPILYDKYQDKVDHFAGRAHTEALKQYKVLDAKVLSKIPRGAVKSKKQN

SEQ ID NO: 50468 - protein, 210 aa, Zea mays
  Clone ID: LIB3150-028-A4_FLI.pep
PHSTILRHYDHIDKRHNSCNPILFHRTTEANCRSSNHAGTTTADRGLAGDLNGLHFRLLGVLLGHSDCKHAVLHGGPDLLRLGVLGQSEPAQESPAAPLHAVPGVRLLLLLLVALAADLKDVAVLDLHLDLLLLQPRYVCLEHVRLWSLLPVDPRASEGRGLRAGPRERGEETAAAAGAEGEALKGVPEVEGEGIEHVAAADQRHGQVRF

SEQ ID NO: 50469 - protein, 362 aa, Zea mays
  Clone ID: LIB3150-030-G3_FLI.pep
ARGRGARGCSADVRGRAQQQGIRGGREAMGEEAAKKEEVEKPYHLIIVQDGDPTKTIKVPEGFDYELYNRNDINRILGPKASCISFKDSACRCFGYMVSKKKYIYTIDDDCFVAKDPSGKDINALEQHIKNLLSPSTPFFFNTLYDPYREGADFVRGYPFSLREGAHTAVSHGLWLNIPDYDAPTQLVKPKERNERYVDAVMTIPKGTLFPMCGMNLAFDRDLIGPAMYFGLMGDGQPIGRYDDMWAGWCVKVICDHLSLGVKTGLPYIWHSKASNPFVNLKKEYKGIFWQEDIIPFFQNVTIPKDCDTVQKCYIYLSGQVKEKLGTIDPYFVKLGDAMVTWIEAWDELNPSTPAAANGKAK

SEQ ID NO: 50470 - protein, 241 aa, Zea mays
  Clone ID: LIB3150-066-E10_FLI.pep
GPHPSNQASQQASKSKRGEELERRRRREATARSEPRLSRRREPEMVGLVGGSTARAEHVVANAGGEAEYVRRMHRHAPAEHQCTSTLVKHIKAPVHLVWQLVRRFDQPQRYKPFVRNCVVRGDQLEVGSLRDVNVKTGLPATTSTERLEQLDDDLHILGVKFVGGDHRLQNYSSIITVHPESIDGRPGTLVIESFVVDVPDGNTKDETCYFVEAVIKCNLNSLAEVSEQLAVESPTSLIDQ

SEQ ID NO: 50471 - protein, 83 aa, Zea mays
  Clone ID: LIB3136-012-D10_FLI.pep
STTQAIITYLIKNVPKREKNLIMSASLKIPNDRFQEALGNNPKAPLHVCSSILNTLDLMYHTLTTKVQALENTLLLRIDKRFG

SEQ ID NO: 50472 - protein, 163 aa, Zea mays
  Clone ID: LIB3136-014-G6_FLI.pep
SSRIHNLPLSSPGGVRGRMAESTARTVKDVNPHEFVKAYSAHLKRSGKMELPEWVDIVKTARFKELPPYDPDWYYIRAASIARKIYLRQGIGVGGFQKIYGGRQRNGSRPPHFCKSSGAVARNILQQLQIMGIIDVDPKGGRLITNQGRRDLDQVAGRVAVEA

SEQ ID NO: 50473 - protein, 285 aa, Zea mays
  Clone ID: LIB3136-038-A8_FLI.pep
PRAAALPAAPRVRRRRDGGAPPRAAGPRQRRRWRAAVGVRALHAPGHARHGGHGPRPQGPRPRRPGELPQGPRVLPPPRPRLAQELPAVRRSRHGQVHVRRRDGEVPGVRRLRRGPVPRRLRRPPRPAPGHRAAVAHPRGGPRPLPARRGRRDGGGEDRARARLHGRALLVMRRGARDGVHHERGQGRRGPGRAAARPARRAHPLHHVRLRGIQGSGEQLPGAQGPQAVPAGGGGVPRRRPPQPRRARRDHARQPRVREPRAPHRHQRAAARGPVTASAADRHRG

SEQ ID NO: 50474 - protein, 204 aa, Zea mays
  Clone ID: LIB3137-012-G5_FLI.pep
EEVRERGLEEHLAQVRDDPDADAGGQPRAEVLHPAQLRRQGQAAVQHPRHYHRQPPRRRPALVAARGHHGHHQPLRRRPGGGREALRAAPLRPREAGAQELARRGRPGLQRLISPPTDALRTVVSDGPVLAGRTAPAPAPPPRHRPCDEHEEWRSLVVQLPARGSSERLRSSRTRRHGRRYPFQFSVHNSASTEPNNFHVKGTE

SEQ ID NO: 50475 - protein, 170 aa, Zea mays
  Clone ID: LIB3137-040-C8_FLI.pep
THTHTDKWFPKPSVCTSNQLARAAAGSHHVGGEAPPLLQPPQEGRGAARRRVRVLRDRGGHCHRRGRVREVQEGGEGAQAQAAPRRGRRHRRRRLRTLREARGEEGPRARAQAQDHGGGRCRGGRRRRRLRIPRAPREEEGPQGRRGGQRREEAPPPLRLTVVPAGARPS

SEQ ID NO: 50476 - protein, 267 aa, Zea mays
  Clone ID: LIB3137-041-B12_FLI.pep
SKDQDRAQRSSSASRRRLLQPPPLLPTRAVRKKQEDTPMEVAAASAAGYGFKADDDVDSLRATELRLGLPGTEEEEAEESQNKAPPPPPSTPRGKKRDVVASSGPEDAPKKRDCETDTDAAPPPAAKAQLVGWPPVRSYRKSCFQQQAAAKNKPAAALAEEAPAAGGLFVKVSMDGAPYLRKVDLKMYKGYRELREALEAMFLCFSGAGAADAPAVNPSDFAVTYEDKDGDLMLVGDVPFGMFISTCKRLRIMKGSEARGLGSVKNN

SEQ ID NO: 50477 - protein, 90 aa, Zea mays
  Clone ID: LIB3150-069-A12_FLI.pep
LITFHLLPIKNKHLYIYAVVVTLGLGIYTTMFILLLLVQYNASNHPEISPEWNKDRRINETLITIQGYKLNPFHTTNWYRYSFIHTGSQN

SEQ ID NO: 50478 - protein, 156 aa, Zea mays
  Clone ID: LIB3150-069-G7_FLI.pep
ENTKVVYVGDGNNIVHSWLLLAAVLPFHFVCACPKGFEPDAKTVEVARSAGISKIEITNDPREAVKGADVVYTDVWASMGQKEEADYRKQKFQGFTVDEALMEIAGPQAYLMHCLPAERGVEVTDGAIEAPNSIVFPQAENRMHAQNAIMLHVLGA

SEQ ID NO: 50479 - protein, 107 aa, Zea mays
  Clone ID: LIB3136-015-G12_FLI.pep
QNWVGRIDPHDSHFLAIAIAEQQLLQAEFDDCVSANSSGATCCRSIALIVMFLLLVRHVIVIVRDVSMLQDATVLFSATLQFAGFFLPCYVIARSCYALQHRRRRQV

SEQ ID NO: 50480 - protein, 159 aa, Zea mays
  Clone ID: LIB3136-016-A12_FLI.pep
RTNSCSDHELAEVDDGGCAEQQEDAAGGGGRAGGGGAAGFVRFGGDHLRAGGVVAGAVHPVRDGEGQRAPRVVLQRRQEPQQRGADQRGPPGGVPLPQEPRQQRQERQHGHRRHHPRQVRRLRRIPHQHVHRLQQDQLSYDDQANKPTERTRTSRALHE

SEQ ID NO: 50481 - protein, 289 aa, Zea mays
  Clone ID: LIB3136-027-F5_FLI.pep
QGLLPFFAPPVAFPFVPAPSAAFPTVDVPRPSEKDRDCPVENAQNECQEARKQVQFEGLRVAASSESDGSGKGEVSLHTELKLSPAQNADATPTTGAGTNDAFRNKKKQDRSSCGSNTPSSSDVDAGNVPEEDNANEKAKQASCSNSSAGDTNHRRFRSNGSTSDSWKEVSEEGRLAFDALFSREKLPQSFSPPQAVDSKEVAKEEEDEVTTVAVDLNKNATSIDHDDLDTMDEPRASFPNELSHLKLKSRRTGFKPYKRCSVEAKENRVPTSDMVGTKRIRLDSEAST

SEQ ID NO: 50482 - protein, 158 aa, Zea mays
  Clone ID: LIB3136-060-D4_FLI.pep
ARHSYCSCRHWQFGIDKQQPQILRPFQSSTMFISFPYPHLYTRLHNQLYFSTTTTTTTTTSSIHVARDVVQVVHRHQTLCCLTLLTQDYRQAFLLVFAFGFRPSTVEQNTEHTRTHLQPETGSAITRLPRSMDIDMQGWMVYNARPLGSSATRPRARA

SEQ ID NO: 50483 - protein, 266 aa, Zea mays
  Clone ID: LIB3137-030-B4_FLI.pep
FSHARPAEPWPMVPLISVSLSLSIFFWLTLLLAEAKGDMDLAASRGGSDQNCAHAFHACAAGATACRSPMRQAASAVLVAPAATRSAVLRSAAVQRPLRAAPAAAPAAFPAAAARRHQAAAIADPSAAAAALVVAAARTARAPAPAPRAAAAPASSPVRGARLAASALSTGVSAACRRAAVRCDLPAASASRRAARGVRPAAAPARERAAAVRASVPRRRRARSAPAAACAPAPGAKEDAAARPVVVIPAVPVDACARSEYYITTS

SEQ ID NO: 50484 - protein, 207 aa, Zea mays
  Clone ID: LIB3137-043-E11_FLI.pep
AGGTINNIPTKCQNNSNCRWIKARSDALLLVYGSLLGGWSSRRRGLRGLLRLRAPLGGRGRRRSSGGPGLGELEEAAADLLGVGLEHLYPLLDGGRALGGGGGGLGGGGEGLGLDGHGGALGLGLRDGTVALGEDAGRRERLHEAAHHGVARALRRRPDTERREQRLRGLGARGSRQGGVGGSLGGRGLAALGDGVGGVLRHGRGRD

SEQ ID NO: 50485 - protein, 94 aa, Zea mays
  Clone ID: LIB3137-049-H12_FLI.pep
KSEAASSLGKFSADDREKVLTAVGVHTTISIAQPTSQIQEEGDNHTGNQEIIPRSNRMGRQLESLSRGLGIKIPTQITEGNKSQSHLFKLLSLH

SEQ ID NO: 50486 - protein, 427 aa, Zea mays
  Clone ID: LIB3150-045-F7_FLI.pep
QGQSHLPSTQAGSHTELSLRRIKSRSRGALAVAVGVAGLPQHGCLRDQRGHHVRVHVGRRPPVLEVAFAFLLGVAAHPHRRPAVRDAPDEGVDVGGLVAAGEAALVAVPVRGDVLPVPEAQLADRLLDHLVPAVTPHRLGAVVGVCTSAIPVPRNWLGVEGDNHAGDLGDPLKNVASHPELVAGRDADGRADLELPLPRHDLPVDATDVDAGVEAGLVVRVHDVPPVGLVRSDGAVVRSLRARVAAQRPTERPLGVLLEKGVLLLNPEPWFLSLDVRVAKDLRGPVPLVARDRLPVRLVAVAHDQYVLPLPERVPEDGPRAKDDFAVVARSLAGAGAVEVPLRKLAGVINRSGQRPGFAPDVHPGTANPDVLGDDLPGAAREVEVDEVGEQSHGSDEKLVGRSPEKGRARTSRRMAGPRVSVIDPCV

SEQ ID NO: 50487 - protein, 147 aa, Zea mays
  Clone ID: LIB3150-057-C11_FLI.pep
ARAPSVGLNVSLNRYDLFHGHLFLASETGRLGILFHAKEYPAFNKELFPYNLGYCQAGSNVPYDDSMNLRNVLWLAPLPSNETKAWLAPGLLVVLDAHPDGIIYQEMIRDYVQIVRTVYEDDLGENAVDVNYLNVANAAPVDRIYIC

SEQ ID NO: 50488 - protein, 133 aa, Zea mays
  Clone ID: LIB3150-071-G10_FLI.pep
RDVGKLKALVNSGKLIKVNQKYRIAPSPPPSGRIGTKVSSAEGMKAENNNAKRLTKHQVIAELEKMKGMTKEEAAAFAAKAVAEAEVAIAEAEEAARVAEAAENDAEAAKAFLDAVTLSMRNRNAASMMLRAC

SEQ ID NO: 50489 - protein, 325 aa, Zea mays
  Clone ID: LIB3136-021-D5_FLI.pep
DFVRMLLLDACYVLVNFGGIGGGGHRGSDMMEDVGVVRDVIYLAENQIPFFVVDEIRKLTIPDGGGGSAPDAITVYVRNLLRELQYSVAMPAVAEPPGPDNLLHLLHMHLMPTVALPSSRSTVGTGKPRRFGRWRSATEYYCAGVGFRSRPLGGKGARSILEVKLDYYGRTLEIPHLKIDAETSRLLRNLMALEQSNPEEVGSHVTAYCVFLSQLAGTVQDVELLSRRGIIAHGLGSHNEVATSLANLCKGIAFGGDDPDSNYLRATWEGLEESFRSRPRRWAAWLMLKYFRNPWLAVGLAAAGVGLVCTVVQAVYAVLAYTSNP

SEQ ID NO: 50490 - protein, 438 aa, Zea mays
  Clone ID: LIB3136-033-G2_FLI.pep
PNREAKPRRRRMAPSLVVSARHAHAVPHRRGRRQRVVVASSGGAGPPPKLVTFLGKGGSGKTTAATIAAQYYASEGFKTCLVVQSQDPTAEHLMGSKIGNSLTECVANLSAIKLETGKLLLEPLDRLKKVDAQVNFTQGILEGIVGEELGVLPGMDSICLVLALQKLLNFFSSGRSNSQSEFDVIVYDCNNTEEILRLIGAADRARSYLRYVRDLAEKTDIGRLASPSLLKLIYDSARPNGKISEGRLSTEIWNEIEQLLEKISVWFADPSKLACFLIMDPRTSISVSSALRYWGCTTQAGGQICGAFGYTEDPSEMHREVAQKFVPLSLSFLPFLPNDSSVDWSRALSSLSQNTKEQLRNASTWVYPSVSFDSVQKSVTLFMPGFDKSEIKLYQYRGGSELLIEAGDQRRVIKLPLTMQGKVQGAKFVDRNLVVSIR

SEQ ID NO: 50491 - protein, 163 aa, Zea mays
  Clone ID: LIB3136-035-E9_FLI.pep
KSQKNLILLLSTYRSPIDHVKGCCRRRLLFLLATKQDQLPHLYRANLILRCSAQLLIARDIAAITFSLVCCSVPGHLMMKECTTVPLLLLPVTFDSPRRTSASSNAWKTFLTGWFSIGDITRTRTSSCTTCMSTSGLGARSLGSTIPDSRSLSLSVSISFSFF

SEQ ID NO: 50492 - protein, 167 aa, Zea mays
  Clone ID: LIB3136-049-D4_FLI.pep
IMSIYVHAEPITENTIEKTKSSEHLASAIKMLLMLLCSLYIVPPYAFMIPGWLMRCWMQRIRGLRVSCGLVSNVKSWNFLCEGGWRILGKSPRTTASYTTQSTPTMRSFSDNPMPTHLMLYMADNTTHSTLSSVYGARSCSRRGRTPFITSSVTLDLLPPPPRLGRP

SEQ ID NO: 50493 - protein, 314 aa, Zea mays
  Clone ID: LIB3137-019-E7_FLI.pep
KKEDCLLCPTGFSANMAAITALGSITSLLSPGRKPAEHERIAIFSDALNHASIIDGIRLLERQQEALVFVYKHCDMFHLDFLLSSCSLEKKVVVTDSLFSMDGDFAPFPELIKLRRKYGFLLVIDDAHGTLVCGENGGGAAELFECEKDIDIGVGTLSKAAGCQGGFITCSTQWKRLIQSRGRSFIFSTALPVPVVASVHAALYVSSKETWRRSVIWRHVQYFASLTKLEITSPIISIVVGSEAGALRASRYLLRSGFHVTPIRPPTVPPNSCRLRITLSASHSSDDIKRLVDALTPWLPVKYGNGSYATASKL

SEQ ID NO: 50494 - protein, 75 aa, Zea mays
  Clone ID: LIB3137-036-G12_FLI.pep
CHHTSREQRLSGAQDPWPSPPSRRLCPWRRVSGSLSAPAGTRRRAGPSRSRPVVRRPGWPSSGRRPRIRSSTRPR

SEQ ID NO: 50495 - protein, 363 aa, Zea mays
  Clone ID: LIB3137-039-A10_FLI.pep
GAAMGGAKAEDKPAAAAAEDWCYQFGNKDAFDLKPPKKSPIALRTVVFAMTMLCGISICSMCMKQLGSDGWSRVVKIEVVEQPCNKSIAPLSEAQFVRYPQPITYSREECKCNAVRSFAIISSQRSGSGWFETLLNSHMNVSSNGEIFSRKERRSNISSIVDTLDKVYNLDWNSSASKNECTAAIGFKWMLNQGLVANHADVVDYFNRRGVSAIFLFRRNLLRQLVSQVANNHDRLLKQLNGTHKAHVHTKREAHILARYRPRLNTTSLIWQLKRADEYTRDALENLNNTRHMSVYYEDVVRNRTKLLDVLDFLGVPRRKLVSRHVKIHTKPLSEQIENWDEVYGALNGTQYEGFLNAADYLV

SEQ ID NO: 50496 - protein, 303 aa, Zea mays
  Clone ID: LIB3150-036-C2_FLI.pep
DDAPSTYSSLSSTTYLPSPCLASLMASAAALPTAINLSFSSATVAGLSDFCAPVSLASSTKDIPPSTLFMQRRATTDTLNTGAGATLPSRYSIPFSVWYRRLLLTPMWSAQVAALSSVGGGLLGVSNAGSMRFRIAISPLEIAVPVSPAANPTTAKVAPLDMIVATREPREYAPGSNMWLGSADAADDAAAATPAVGARRYMRTKLRMDPTTSVEKTKSSSLRPKLGREAMSPSTQAVTPTSSSMSTLKGNCGSAATRAAHPARRSPRMPPRRPSPPPECAASPDPPAPPYDRGGGGSLPPGP

SEQ ID NO: 50497 - protein, 203 aa, Zea mays
  Clone ID: LIB3150-067-A11_FLI.pep
RRHDGVSDSDLASRRGPPESQSSPLPQAPRVCCSASSPWSGIRVPGRMVALSAGALAPLAGLSPLPSCSAAPLYCRRSPPLLNVAIAKTRPAVHQSAPASFRKCAAMSEHGRQELRTNEYQLDDDDEPFWLAVVRDLAVGFKGLVAFLAEQPRQLKHLEWPGFLHTLKTATLTLVLVVMFIVALSTIDAALCYMLAWLLRKSA

SEQ ID NO: 50498 - protein, 176 aa, Zea mays
  Clone ID: LIB3150-067-D1_FLI.pep
HGEGQEGQLNNSKPRAATKPRRLIDQNPAQAQARTHARQRDPLRVSCPPPPSHLHLLAEERCGGGGEAEAEGGHHVQPGDARRRSVVVVGAACSCRAVGARAAERRAQGPGGRDPGAGASSGAGPRPGAHARACSGSSAGTHARARACSSAGAGARATADASACSAGAHTSAAAGA

SEQ ID NO: 50499 - protein, 63 aa, Zea mays
  Clone ID: LIB3158-010-E2_FLI.pep
PIRLEPGELELLLEQGAEVLVVPLGHHRLVQRVLPRLLVQRWVHIPIVPPQHRPQVVVCVVEG

SEQ ID NO: 50500 - protein, 140 aa, Zea mays
  Clone ID: LIB3150-088-F5_FLI.pep
DNRTTLCFGGMQKVLISCKCTRRGPKEGMPGQDYSGMYCALLTVGSTVVSAALLRVMGGDVAELPLVATSQDVQGLVGLRIALQLKLDCLFWSCGLVLCSLLDVSPIAVIDAGLLPSLVLVHREGASLTEDQALCASSCT

SEQ ID NO: 50501 - protein, 244 aa, Zea mays
  Clone ID: LIB3150-100-E6_FLI.pep
VRPMRALVVVSFASACLLLLLQLAGASHVVYNYKDLEAEAAAATDQVPPSIVNPLLRTGYHFQPPKNWINDPNAPMYYKGWYHFFYQYNPKGAVWGNIVWAHSVSRDLINWVALEPALRPSIPGDRYGCWSGSATVLPDGGGPVIMYTGVDHPDINYQVQNVAYPKNVSDPLLREWVKPSHNPVIVPEGGINATQFRDPTTAWRGPGPEQWRLLVGSAAGSSPRGVAYVYRSRDFRRWRRVRRP

SEQ ID NO: 50502 - protein, 205 aa, Zea mays
  Clone ID: LIB3150-077-G9_FLI.pep
LSCGISTGLGASINVAKPPKGSTVAVFGLGAVGLAAAEGARIAGASRIIGVDLNPSRFEEARKFGCTEFVNPKDHNKPVQEVLAEMTNGGVDRSVECTGNINAMIQAFECVHDGWGVAVLVGVPHKDAEFKTHPMNFLNERTLKGTFFGNYKPRTDLPNVVELYMKKELEVEKFITHSVPFAEINKAFDLMAKGEGIRCIIRMEN

SEQ ID NO: 50503 - protein, 127 aa, Zea mays
  Clone ID: LIB3150-118-G9_FLI.pep
QPSASLRFSSRVSRMKVIAAYLLAVLGGNTSPTADDVKSILESVGAEADEEKLEFLLTELKDKDITEVIAAGRERLSSVPSGGGAIDMGAPAAVAGGGAAPAEEAKKEEKVEEKEESDEDMGFSLFD

SEQ ID NO: 50504 - protein, 105 aa, Zea mays
  Clone ID: LIB3157-007-H9_FLI.pep
LSRLFLHARPGTPARCWADRQQLRQQLPGLRRAQQRVIYVGAVTETPSFASCSPDQASRRRFAQFMFGNRFSLRRTSIYRDAELLQHCPTPLSLFRRLTSMSVPS

SEQ ID NO: 50505 - protein, 64 aa, Zea mays
  Clone ID: LIB3157-009-F5_FLI.pep
AETSLYTQIYDISLHLQYNPLLCCPSQTLLYSQPILTTNPKPKTLRRDPADHPVTFNSIPFSTN

SEQ ID NO: 50506 - protein, 489 aa, Zea mays
  Clone ID: LIB3180-022-A10_FLI.pep
PSASLSLDNHGTRPPARRQAKAKRANPAMEKAIDRQRVLLAHLLPSPSAASSQPQLAASACAAGDSAAYQRSSSFGDDVVVVAAYRTPICKAKRGGFKDTYPEDLLTVVLKAVLDNTRINPADIGDIVVGTVLGPGSQRANECRMAALFAGFPETVPVRTVNRQCSSGLQAVADVAAAIKAGYYDIGIGAGLESMSINSIAWEGQVNPKISAFQKAQDCLLPMGITSENVAHRYGVTRQEQDQAAAESHRRAAAATASGKFKDEIVPVPTKIVDPKTGEEKEVVISVDDGIRPGTTASGLAKLKPVFKKDGTTTAGNSSQVSDGAGAVLLMKRSVALKKGLPILGIFRSFAAVGVDPAVMGVGPAVAIPAAVKSAGLEIGDIDLFELNEAFASQFVYCCNKLGLDRSKVNVNGGAIALGHPLGATGARCVATLLNEMKRRGRDCRFGVVTMCIGSGMGAAAVFERGDAVDGLSNVRDMQAHNFLSKDAK

SEQ ID NO: 50507 - protein, 151 aa, Zea mays
  Clone ID: LIB3059-016-A3_FLI.pep
RMLMQAILESLKDYEQSNTKNVQSTASDPASKANGTVKDCNGVAAAALEQDASSFDAPDKHTNVPNSGEKVSEGQSTDCNAGKSSASVSASGSSEPLAPTQMVNGQPASVDSQKVTQNANGEDGTRATLVVQKSRTGGLIEKWGSFFKNND

SEQ ID NO: 50508 - protein, 117 aa, Zea mays
  Clone ID: LIB3059-020-B12_FLI.pep
KYDAALNFTCVELRTMDQHEVYPEAFADPEGLVWQVLNAAWDAGIQVASENALPCYDRDGFNKILENAKPLNDPDGRHLLGFTYLRLGKDLFERPNFFEFERFIKRMHGEAVLDLQV

SEQ ID NO: 50509 - protein, 125 aa, Zea mays
  Clone ID: LIB148-030-B1_FLI.pep
QEPLRLKPETHSLASSSSLGRGGRASATDEEDVPVQQRFIWSGKRKMRRLFHDSIISLLDYSQCCSVNSRAVPCKSWSFSERVGALVELGPPVPHPRSHLSALGWPAGPAANHRASAIASPHNLG

SEQ ID NO: 50510 - protein, 215 aa, Zea mays
  Clone ID: LIB148-030-B6_FLI.pep
SVCRPYYLHQPPVSPRRGVGGTGTGGEDCLERGDDPGHGGPDLGVLAEAVVREAGHALQAHLRADLAHPPVQDPLQLFGPDKDGPRPVHQAAVAAPRPARLQRAPSHQHLQQHHAEAVHVAHHRQVPGGYVLRRGVAVGAHDPGGHVRLTAHRPFLGEPEVRQLGVEFRVEQDVGALEVPVDDGAVGPVEEGEAPGDVERDGHPRRPREAAGAAE

SEQ ID NO: 50511 - protein, 152 aa, Zea mays
  Clone ID: LIB148-046-D4_FLI.pep
LSPFVTITSSQPTKMSRVTAAVLFYILAVAALSAAEAPAESPKEGSAAKAPESAKRTAAPAEAPEAASTPVAAAAPSPSSRKSGPATAPATASTPPSSTDEELSPSPPASTAAASPAAEGPAADDSAGAAALGSGAAIAGVAAAVATMIFFY

SEQ ID NO: 50512 - protein, 139 aa, Zea mays
  Clone ID: LIB148-046-D6_FLI.pep
LKQGKAAGRQEIRTHAEVEVEVSAGRMETEQQGVVAGVKPTLAKGTPSASFRLRNGSLNAVRLRRVFDLFDRNGDGEITVDELAQALDALGLDADRGGLAATVGTYVPDGAAGLRFEDFDRLHRALGDAFFGALAGQDD

SEQ ID NO: 50513 - protein, 116 aa, Zea mays
  Clone ID: LIB148-046-D8_FLI.pep
HCLVQMQRRRKVLHLPAKKPSPRHTLAQLSAIMHAPTNRSLYFSHSLACAISVDTMSRRSRMTAGWNLRDDSITFILAGIYICTLQGFTNYLFPIISNHCSLSERDHGTLFIYTQG

SEQ ID NO: 50514 - protein, 186 aa, Zea mays
  Clone ID: LIB189-003-H3_FLI.pep
CTRLWNIFVIGAFVTCCFASALVTWGDLGFQEESGDHPDDDARWKAHGFDLSGSEVLQHGDICQQIIILYDRGRIQRYFFTIWHRRGSSTYERPPNWKDEGIWFCQIFIASRGRESCQGNGWQDSTWKIDLCGDGKRTRKQVGHPPHERISLNMKHESAISLCQMANIPNSQLMLQLIYKAQVNFS

SEQ ID NO: 50515 - protein, 574 aa, Zea mays
  Clone ID: LIB143-006-C7_FLI.pep
DSLPPTAKIGIITYGRTVSVYDFSEGAAVSADVLPGNKSPTHESLKALIYGTGVYLSPIHASLPVAHTIFSSLRPYQLSVPEVLRDRCVGAAVEVALGIIQGPSVELSRGIIKRSGGNCRILVCAGGPSTFGPGSVPHSAKHPNYAYLEKTAMKWMESLGHEAQRHSTVVDIFCAGQCPVRVPVLQPLAKCSGGVLLAHDDFGEAFGVNLQRASTRAAGSHGLFEIRCSDNMYVTQVIGPGEEASPDSHETFKHGSSFCIQMHSVEETQSFSVSMETKADIKSDFVFFQFAVHYSNIYQTEITRVITMRLQTDDGLSAYLASVQEDVAAVIIGKRTVLRARTASDAIDMRLSIDERVKDIALKFGSQAPKSKLYRFPKELASLPECLFHLKRGPLLGSIIGHEDERSVLRNLFLNASFDLSLRMLAPRCIMHREGGTFEELPAYDLVMQSNAAVVLDHGTDIFIWLGAELAAQEGQSAAALAACRTLAEELSEKRFPAPRILSFKQGSSQARYFVSRLIPAHKDPTYEQESRFPQLRTLTPEQRARLKSSFIQFDDYSFCEWMRSLKLVPPEPS

SEQ ID NO: 50516 - protein, 382 aa, Zea mays
  Clone ID: LIB143-019-D8_FLI.pep
ILKCAFEAAGHSPEYEGSFADAGNPVIALAAYLAGLVEDGNATTSFRSSLKSISEVPPALQLASRHCFILEDPPNELKDICVSVSKKNTDADQTKDEDMISNSIANEKKEINEKEDKSLSVEKTNNSSMSQNDHQESNIKSVSRDDCSSVEPKGNNAKESSDSTGIGDMSAIGTTKDVVAGNSKQVNDSPSVEVEAPDDSSLKSKDELNDTEDAVATPATVQEQKHSQTLENGDKAEPNNIERVVVDEKGSIVTANQNDSITRLKRAAATAVSAAAVKAKFLGDQEEYHIRRLTALMIEKLFQKLEVKMSLFSEIEQVVLRTREYTEKTRKKLLMERNAIIAARMGALPSRPNQPGVAGNRLPPGYGNPPLRSPNAMPRPSS

SEQ ID NO: 50517 - protein, 162 aa, Zea mays
  Clone ID: LIB148-005-E3_FLI.pep
QHLSLHVKTSPYACFTLLNKKRERKTITQAHYFRAFAATTHYTIESYIALQDPIGHRWRQRLIGRRRYLCRAASRKSCCWRVPATGSRRSRGQEQERERRRRPPVRPRTPWTCPRRRRCAPRPRTAPWRRRLGGARRGRRRRGPLLVCFLFAFAFWFRVLRS

SEQ ID NO: 50518 - protein, 219 aa, Zea mays
  Clone ID: LIB148-005-H3_FLI.pep
SEPREQGVGEETPASRSFKKNTSLPTTAAASPPVRRHGPPRRRRRVGAPSGGRGGGRVPRGAGLGEVRGAERDGVAGGEGRQRRGPAEVLGRGGRVRRGRGGGARAERRRPRLRRRGAADAGAAEADQPVHQLRGAARGPGAVQQARPVLLQQLRGAEGRQPLPPRLLRHHALRPQHELSPALAAAGARRRRRAGRSGLVWSACLPGHAAWLHRSHTIH

SEQ ID NO: 50519 - protein, 252 aa, Zea mays
  Clone ID: LIB189-002-A2_FLI.pep
NQQILSCPLPPPPRGWVVSCPHLVFVLLLPIPVPAIRPPNYGGNGSATPQPRGAHGHAAPRPQVAAAAAPAPARLPCLSVPPASAASAARGLGRARDEGGGGQDGRRDNREVRARVRPLEGVQLQGGRGRRGEEVADGPGQGTPGQVRRRVPGHLHLALHRLLHSMLPPRQRRRRRAGPAREGRDRDRGNRREGRDLRVGLRRAQGRVADQVPADGGTDAGGGQLDWQDQEGRRLMRRHSSTLLTESCSLCK

SEQ ID NO: 50520 - protein, 176 aa, Zea mays
  Clone ID: LIB189-002-B10_FLI.pep
YVEVPSDSGITFNVAPNMKALEIAEKARDALLSGKFDQVRVNLPNGDMVGHTGDIEATVVACKAADEAVKIILDAVEQVGGIYLVTADHGNAEDMVKRNKSGKPLLDKNDRIQILTSHTLQPVPVAIGGPGLHPGVKFRNDIQTPGLANVAATVMNLHGFEAPADYEQTLIEVADN

SEQ ID NO: 50521 - protein, 86 aa, Zea mays
  Clone ID: LIB143-039-H2_FLI.pep
NTSVCIVVSHICTIVITSPRRPKPFSSPPVVSSLCQPLHCILKPLPRAKFVHLTEVCPQRIIKIRQKSAQQMNQHSLKFRIDKITV

SEQ ID NO: 50522 - protein, 172 aa, Zea mays
  Clone ID: LIB143-040-B7_FLI.pep
HIAVYDSGKIACSFRIKANCLNRYICNLCRDKTLSILFKIKQAVTLETVTLESLPIWTPEKHGEENVGQHRHEKTMQVHYFFLPVTPATTSFRGGGGTFSAVSHESRIGRTTAGRKRPNPAMRQEAATTGSFTTKILSFSITAMAASSVSAPAPPLRLRRRWRREGRRVSAL

SEQ ID NO: 50523 - protein, 188 aa, Zea mays
  Clone ID: LIB143-052-E6_FLI.pep
IIRDAILAEGSPAPVVVSEGANTMDVGRAVLVQNEPRTRLDAGTWGTMGVGLGYCIAAAAAEPERLVVAVEGDSGFGFSAMEVETLVRYQLPVVVIVFNNNGVYGGDRRSPDEITGPYKDDPAPTSFVPAAGYHKMMEAFGGKGYLVETPDELKSALSESFRARKPAVINVIIDPYAGAESGRMQHKN

SEQ ID NO: 50524 - protein, 143 aa, Zea mays
  Clone ID: LIB143-060-C3_FLI.pep
TSFTRCVEHPGNHPRHPSHHCTTARFILLAGLLQHQERSLLLVDVRFSQTRELPSNSNTLLASLSLQAIVPLVLAKVGRVLSFARQRLQSSFLFHGCTLTDSSAWPWSSVSCVPVLGHQVTCSSVLMSCTLRLVELASVVSYY

SEQ ID NO: 50525 - protein, 275 aa, Zea mays
  Clone ID: LIB148-022-C8_FLI.pep
ENLHLSQDNSLNVVVTSCLRGVRFTKRRFKRADRQLCSVPPFPVVSFPLRSSSMLRFVVCPDHFGLMRTAILVCSILLGFTLSTCGCGLLLGSRALGRVVLRIGEERERRDDVADPRPAGSVLLQAHGRDGERLEQPLHGVPLAQQRVGQLHEPPPVSQQRRCPVNEDLLLGRPRDVDGAAAGDELEQHDAEAVDVRHLGELAGHGVLGGAVAVRAHDPGADVALVAHGAQLGEPEVGELGVEFPVKEDVGRLEVAVDHRRVGHLVQVLDALRRA

SEQ ID NO: 50526 - protein, 226 aa, Zea mays
  Clone ID: LIB148-024-C7_FLI.pep
RRKKISMGDVPTITSAASNEEEALFSVGESTKDDGHRLTMECTTPVSSSSPSTRKKRGAFSLFRAMFLSFGRSDDSMKKTDDDTTSPKKRAIAAADDDCKPADDESTSWKRLVDGMRPLRLRGQLEYYPPPPPPPPLGHADVYHDVILPPPSQARFGFEIKEVGMTSRYASAEDLHQMDSDQEEGAEGGDDGDSSCPHAIDMQAEEFITKFYEQFKSESFNGRASE

SEQ ID NO: 50527 - protein, 103 aa, Zea mays
  Clone ID: LIB148-041-E9_FLI.pep
PPMWRRRRGNARRTASDSLGHAWRRTTAPTCAAVRASPAAGAAPSAAAASALSRAKLTYSRQFDGGRLFYLLAYLIFFPLTIRKRTCWHVRCVVYAFLAGFIC

SEQ ID NO: 50528 - protein, 530 aa, Zea mays
  Clone ID: LIB148-042-D11_FLI.pep
NKGLAFSEAERDAHYLRGLLPPALASQELQEKKLMHNLRQYERPLHRYIAMMDLQERNERLFYKLLIDNVEELLPVVYTPTVGEACQKYGSIYRRPQGLYISLKDKGKILEVLKNWPERSIQVIVVTDGERILGLGDLGCQGMGIPVGKLSLYTALGGVRPSACLPITIDVGTNNEALLNDDFYIGLRQRRATGEEYHELVEEFMAAVKQNYGEKVLTQFEDFANHNAFDLLEKYRESHLVFNDDIQGTASVVLAGLLAALKVVGGTLADHTYLFLGAGEAGTGIAELIALEMSKHTGSPIEECRPKIWLMDSRGLIVASRKESLQAFKKPWAHEHGAVETLLEAVRSLKPTVLIGTSGKGGTFTKDVVEAMASQNERPVVFALSNPTSHSECTAEQAYTWTEGRAVFASGSPFPAVELDGRALVPGQSNNAYIFPGFGLGVVISGAIRVRDDMLLAASEALAEQVTEAHYAKGLIFPPFTNIRAISARIAAKVAAKAYELGLASRLPRPDDLVKYAESCMYTPTYRSYR

SEQ ID NO: 50529 - protein, 173 aa, Zea mays
  Clone ID: LIB143-055-B7_FLI.pep
SYCSFSLAFQNDDQKSEGSMELLNSVKAISIHPLSNNKFLVLDSSGVLHVFIFSTTQMVSRGAIKQYSENIHTYRLHYPMKVQLSAVFSVTSIKTQFFWVSDGGHTVHVMSAVETESPNGDNGDVTGERELAPIKLSAIEAIFTSERVEDIVSISKDSVLILGQGNMFLYGTS

SEQ ID NO: 50530 - protein, 340 aa, Zea mays
  Clone ID: LIB148-052-H9_FLI.pep
ARSPAAAAMPPPPPPAARIRGRCSALSFAAARDRCFSHRFRRAGLRPLAVPLPGPGPGPDADPATTVHMWVPAGPPPRNPLLLLHGFGASATWQWAPYLRPLIAAGFDPIVPDLLFFGASCTRLPDRSDAFQASAIKAAMDAIGLPRFGLVGVSYGGFVAYRMAAMFPEAVHRVALVCAGVCLEERDLAEGLFPVAGIGEAAALLVPHRPEEVRRLVRLTFARPPLIMPSCFLWDYIKVMGSDHIQEKAELLYALINGRQLCTLPKLTQPTLIIWGEQDRVFPMELAHRLNRHLEGNSRLVVIKNAGHAVNIEKPREVCRSIIEFFKEPVAGAANADDKV

SEQ ID NO: 50531 - protein, 147 aa, Zea mays
  Clone ID: LIB189-007-H7_FLI.pep
LTLEFHLLGAQLAKDDGHIHPLSHCSHSHLVRAFLGEANLACLFHFPHAVFEFLMAFHAHHTFPLDAAVVVAAAGVEVVAGLLAVAAAPAHAAVLAVADPEGVAVEGRARAAARRGLGCRGSGGEGDGEEDGEERPARRHRLVHVLP

SEQ ID NO: 50532 - protein, 317 aa, Zea mays
  Clone ID: LIB189-008-D8_FLI.pep
LPGQALFAGQPTWIASGLSSAPCERARQAYNFGLRTMVCFPVGTGVLELGSTDVVFKTAESMAKIRSLFGGGAGGGSWPPVQPQAPSSQQPAAGADHAETDPSMLWLADAPVMDIKDSLSHPSAEISVSKPPPHPPQIHFENGSTSTLTENPSPSVHAPPPPPAPAAPQQRQHQHQNQAHQGPFRRELNFSDFASTPSLAATPPFFKPESGEILSFGADSNARRNPSPVPPAATASLTTAPGSLFSQHTATMTAAAANDAKNNNKRSMEATSRASNTNHHPAATANEGMLSFSSAPTTRPSTGTGAPAKSESDHSDL

SEQ ID NO: 50533 - protein, 256 aa, Zea mays
  Clone ID: LIB189-016-E6_FLI.pep
FVNGGDKKPGEMPLATTAPTPAPPCPPPSPAAAPVRTQLLSSVAKLALTAALVCGSGGPAAVVVVPAAAQAVPFVRPPPPPLQGRPFASSTPYAQSQKLQLGLDKLGKIRPCPSTNPGCVSTNPLGSSGSFASPLLIPESSAGEKTVASLRQAIEKTQRNVEFKVDEDTPYGHYIEAEMDGGVGRDVMEFLVKKDAGVVAYRCMATKVTFVYPFTTAVGDSKGQKQRIAAISQELGWYAPDIQSSMDSVDDVNYVP

SEQ ID NO: 50534 - protein, 149 aa, Zea mays
  Clone ID: LIB143-022-F8_FLI.pep
TAPFYFQEPVHFVLFGFICLHLTCLCICFIISEVIDIPAISFLQIYSKSTDVFNERWQHAWIIPAFWHVLSFLLLCVICYLWAPSQNSMRFSYDASEFFDRKDNISLIRPAPSASKNGWNLSSTPEPKATKDVNTVADFEGDDEENKRE

SEQ ID NO: 50535 - protein, 168 aa, Zea mays
  Clone ID: LIB143-031-C2_FLI.pep
ADQMAIFLSWSRQHMCAMDVYEGTRMATAEDLPGIRKIIRPLEDSGVLVRRTDAQLLEALESFYVVERDGSIIACAALFPFPEEQSGEVAAIAVSEECRGRGQGDKLLDYVEKMALSLGLKKLFLLTTRTADWFVRRGFSECSIGSIPEQRRKRINLSRGSKYYIKQL

SEQ ID NO: 50536 - protein, 326 aa, Zea mays
  Clone ID: LIB143-031-E7_FLI.pep
LAMAQQQPVRRILKVAPPGKGDGESFPTVQAAVDAVPLGNRARVVIRLAPGVYREPVYVAKTKNFITVAGASPEATVVSWDNTATRIRHSQSSRVIGTGTFGCGTFIIEGEDFIAENITFENSAPQGSGQAVAVRVTADRCAFYNCRFLGWQDTLYLHYGKQYLRDCYIEGHCDFIFGNSVALMEHCHIHCKAAGYITAHSRKSTSESTGYVFLRCTITGHGEAGYMFLGRPWGPFGRVVFAYTFMDRCIKPSGWHNWDKSENERTACFYEYRCSGPGALPSNRVTWCRQLLDVEAEQFLAHTFIDPDVDRPWLLQMMAIRIPASA

SEQ ID NO: 50537 - protein, 399 aa, Zea mays
  Clone ID: LIB143-062-D3_FLI.pep
DKLARAMEGFSRDLLCGIGKGDAPPPEKRPGQLREEMEEVELSLGLSLGGRFGLDRKGSKLPRSSSVAAMLTTPVEVPAPPALSRASSLPVQAEASEVERKQGLDGWGSCREGGGLGVQHAARLPASGNPSSASSVGEGQILQGTLMRTSSLPAVIEASGNDDWKKRKEAQSLKRLEVKKKRIERRNSLTCNTSKEAAGQSPEEMNANTDKLVSSDETIASANESHSSGKHLVKGLPPKYQATITSQDSSSAMRKKPNSAFKGTAITEEQNSSSSVPSSGEAISSVTAPSLPLLSLVPITATLGSREDQSILGRAGARANGMGDVERRMMQEMPGVFTKGLSNGSRVEGFLYKYSKGEVRIVCICHGSFLTPSEFVEHAGAGKVDNPLRHIVVSATPNL

SEQ ID NO: 50538 - protein, 159 aa, Zea mays
  Clone ID: LIB143-063-B3_FLI.pep
QMIVDTHQLDRDTDHLELEGCRNKAKSTTGYIHIIYTNRFFLASSSSLADEDDGRVAAALVDQAAAAQRGQAAFQEARLPSGRRRGVLWRRHHRRALVRPLVVTLRGVGVGVLGVTHPLPLPCYLFRGSWTKREQQTTGKGNGDCTRRRLCYADGRRVM

SEQ ID NO: 50539 - protein, 75 aa, Zea mays
  Clone ID: LIB148-025-H9_FLI.pep
PSENILKCAHCYHYQTIRTVTCCLVKRFTSLNCHYKFLRRLSASTLISVVSICTYVFFLGISLPSLRYATLCSAT

SEQ ID NO: 50540 - protein, 112 aa, Zea mays
  Clone ID: LIB148-026-E1_FLI.pep
HDDPRVHGSAGCAEHTRGAMQASARLRPPPPTPALLPTPLDRRRRRRRGYSRLRRAEARVVRRPELRGVGVVPGEVRAAAAGGARGQEARWATDVVVVLTSEFLTEADRTTY

SEQ ID NO: 50541 - protein, 201 aa, Zea mays
  Clone ID: LIB148-061-B12_FLI.pep
LAALILVVALATCTNKSVDARVVHPIVTLEADGSSPTSGDGRRLISSTNQDELGALCQQMHYKTLCSTMTTLPGVTTPEQLLDASLRITAVKAAMAEMKLDNAIKSGSAQGNPMMSSLKTCKESYASLVDSINTTRNTLKSGGSNADLMSELSAADTFATDCGDTFDERPDLNSPIPGAQRHVNRLISNCLDLAATIKEQP

SEQ ID NO: 50542 - protein, 107 aa, Zea mays
  Clone ID: LIB143-003-C5_FLI.pep
ARSKFDVETEPPNAVEIEPANGFLNSEGLASLKFRRISSSLSMGRINCKVYYCKEDEVCLYQSIAFDVKFREEAEPNPAQITLSYTVSPRDNSGSTQLLAARKNAKV

SEQ ID NO: 50543 - protein, 174 aa, Zea mays
  Clone ID: LIB143-029-C2_FLI.pep
NSQHPLMGGLLNAVETVLKLSLPNVYLWLCMFYCLFHLWLNILAEILRFGDREFYKDWWNAKTIDEYWRKWNMPVHKWIVRHIYFPCMRNGISKEVAVFISFFVSAVLHELCVAVPCHILKFWAFLGIMLQIPLIILTSYLKNKFSDTMVGNMIFWFFSAYTGSQCVFYYITMM

SEQ ID NO: 50544 - protein, 168 aa, Zea mays
  Clone ID: LIB148-004-B6_FLI.pep
RIQVSSPCLITVSHTEHQASSANYINWHACTDSRSALLRQLLLPGLLGVLLRLHRRRGLGGGGDLFLCMGCCRWLLLLDDGLLHGFLLLVVGLGDGRLWSEHLISLLMLNVGRRSRLLHHHLLSYLFISRNLNGDWSGLGRNLGCGDGGLSWGLPLKRLGLGCAGAHG

SEQ ID NO: 50545 - protein, 202 aa, Zea mays; identical to SEQ ID NO: 39689
  Clone ID: LIB143-042-D8_FLI.pep

SEQ ID NO: 50546 - protein, 203 aa, Zea mays
  Clone ID: LIB3079-031-C7_FLI.pep
RTLSSACLSTVGLVTSSAPLRSPPLPNGRSLHGSSSWLQGAGDRWKLRQPRPRRQGRLAEEGRARLGVRQEPGGPGAPGVRAGRCDRQRREPRQVLEPPPQDRRLRPGGGGPQAGRWWRAGRRRGCCRRHGAGPEGVVPPARGRREAAPRRVSRAALLGQPTLLLAHKKGGGRAWQWQALCSCSAGLGSLLISLQYYTTSSGA

SEQ ID NO: 50547 - protein, 300 aa, Zea mays
  Clone ID: LIB3069-031-C2_FLI.pep
CPLGWVKRHEDIPARVPMLTTMNKKNWDVTDPTQHKLDFNAKHLVFGHLYLFPRPFNWTSEGNRLLQGDGERLLQLLYLQISVRVRQELREMALHQIVDGSCQLRNLHDLLIGQLPNEPGRASCPELAGRNPPSWGQYRASFEDRVGLHQRTFHKDRVLANDALRLDGARAQQTVGAHCHVPVHECLSWKPCGSRPCGMEDASLLYVGAEAERDLVEVPPQDCAAPDGGAVVDGDLAGEHGLGGDVSVHGHLGHPLSQRNKLPLPTIVPPHPIRAHGRGASRAGRRRRRGGCRDRGCGGD

SEQ ID NO: 50548 - protein, 97 aa, Zea mays
  Clone ID: LIB3066-008-A2_FLI.pep
RASPPRWPPRPTSSASPAACPDPTTSSATRRAACTPPPTAATGKDHPCRHAWHGAMAGARGVSFTRTYFDFFYVLYFCVRQNTPHPHIYGGEVDSSD

SEQ ID NO: 50549 - protein, 112 aa, Zea mays
  Clone ID: LIB3062-033-D6_FLI.pep
LCRSYPNLTALRLGRAARLPQEDLNLDSNCFNDAGDWRRPHLEQSVTVRERRGARSRARVWGQREQRIGEGRKRADPHRREGSRESRRRGCAPPPCWLRRAAAARSRRPGFD

SEQ ID NO: 50550 - protein, 117 aa, Zea mays
  Clone ID: LIB3062-042-C7_FLI.pep
ISGLLVQFWCSYSTLPLNVIISQMGSKFKKSLVSENVRESLHSWCKRVKDRSRHNPLFSRNGTLTTRSVCSLDTTYETDHETNTVCTLSRTASATSLDDQLTVVTVDDEPSCIEKDV

SEQ ID NO: 50551 - protein, 53 aa, Zea mays
  Clone ID: LIB3066-038-H9_FLI.pep
AHADLDLHDGVAHEGGEVVAEGAHEVGVALDGGAALEHGHRVAAQGDVLVVPA

SEQ ID NO: 50552 - protein, 243 aa, Zea mays
  Clone ID: LIB3062-047-C2_FLI.pep
YSNYDTECLVICDDIDLVSSRLRDPTGLADVWSDPLLALPDHSFPSTLFTGAGATAPPLAFFLSPPPPLLPFSLADSWLTDRSELASPAPPDVDVVTGAPTTAPPPHCSSSVAVVVADLELPYDAPSSLGRMSERAGAAEAAAADCRTCSKKRTCTTTRRGSRSFCTACSLASAVSFLQSISAHSRFLSPFDMPGCSCARVHSRERFDSAQSYKDFCAFFLATEIADFCAFLKLELQTDMMQN

SEQ ID NO: 50553 - protein, 153 aa, Zea mays
  Clone ID: LIB3117-008-D5_FLI.pep
TQQADRRTGRQRVQPRERSAMGSFFSTLVTPPPAADDPNCAVVAAHSKATYDEQWAAHKSSSKLMVIDFSASWCGPCRFIEPAFKELASRFTDAIFVKVDVDELAEVARTWKVEAMPTFVLVKDGKEVGRVIGAKKDELERKIRMFVTSSSSS

SEQ ID NO: 50554 - protein, 363 aa, Glycine max
  Clone ID: 700856414_FLI.pep
ATTRRLSYPPLPVSTMSCRKRQKTSPDKTSDDFFDSLPDDLVLSILCKLSSTATSPSDFISVLITCKRLNSLGLHSLVLSKASHKTFSVKAKNWCDSLHRFLKHCADAGNIEACYTLGMIRFYCLQNRGSGASLMAKAAMNSHAPALYSLAVIQFNGSGGTKNDKDLRAGVALCARAAFLGHIDALRELGHCLQDGYGVKLNVTEGRRFLVQANARELAAVLSAGNTKRPWLTWSHHPVTHPRLRSGCPLMSDYGCNVPAPDAHPASQFMSEWFDIRGGFPGPDMRLCSHSGCGRPETRRHEFRRCSVCGLVNYCSRACQALDWKFRHKAECATVERWLDDDGEGVAGENDGGGDDGVMMVNS

SEQ ID NO: 50555 - protein, 190 aa, Zea mays
  Clone ID: LIB3069-030-C2_FLI.pep
SVLTTTAVARRRVGRMPRKITLVKEGEPQPVDAAQGEPAPAPAAPTAALTEAEVDELPRAIVRRLVKDKLSHVAGGEGAEVIVNKDAMAAFAESARIFIHYLSATANDMCKESKRQTINADDVLNALDDMEFSEFVEPLRTSLQEFRNKNADKRSEAKKQQKEKRRKLNEETLPQKENDPADDAKENGVA

SEQ ID NO: 50556 - protein, 418 aa, Glycine max
  Clone ID: 700871904_FLI.pep
IEHSFITNMALLGLMSFAALTLFLVLTTVPRQAHASSRGNLGRNINPSVYGICASSVIVHGYKCQEHEVTTDDGYILSLQRIPEGRGKSSGSGTRKQPVVIQHGVLVDGMTWLLNPPEQDLPLILADNGFDVWIANTRGTRYSRRHISLDPSSQAYWNWSWDELVSYDFPAVFNYVFSQTGQKINYVGHSLGTLVALASFSEGKLVNQLKSAALLSPIAYLSHMNTALGVVAAKSFVGEITTLFGLAEFNPKGLAVDAFLKSLCAHPGIDCYDLLTALTGKNCCLNSSTVDLFLMNEPQSTSTKNMVHLAQTVRLGALTKFNYVRPDYNIMHYGEIFPPIYNLSNIPHDLPLFISYGGRDALSDVRDVENLLDKLKFHDENKRSVQFIQEYAHADYIMGFNAKDLVYNAVLSFFNHQV

SEQ ID NO: 50557 - protein, 111 aa, Zea mays
  Clone ID: LIB148-044-B12_FLI.pep
MRWAIKPARRRRHRRPGPWSRTPGCTSWCRRGLSCRWRSARSSRRSSRTRWPRAPPPPPPAGPPRPAPQSSCSAPLLLGGGDVLGSLLRLATTDGGFCYCECCCYAIFGEP

SEQ ID NO: 50558 - protein, 283 aa, Zea mays
  Clone ID: LIB3150-099-E1_FLI.pep
ARSSSPFLLSLPFPKHLSESNRSEGDGPAGCGRGRGGAGGAGADGGGVRAAASDGGRAPPLRRGGGPMLLAAGAAHPRAAGRRLGHRPPLRLPAGVQALHPQLRGPAGPGRRRRPPPRPPPRGVRHLGPPRQHQHRAPGPPRRRRQGVRLLHHRGRAPPPELPLRHHRLRARGARDLHRRARILRRRRPRRQHRGRHPPLRRHRHQAQPPEAQVRRRGQHLQFRTPAAVGVAGGRNRQGEKRSSKFWAFFCYFTSLRNGLSELNLIVDGFGLDERRRGGVGSA

SEQ ID NO: 50559 - protein, 326 aa, Zea mays
  Clone ID: LIB3150-066-A10_FLI.pep
EAENCDCLQGFQVCHSLGGGTGSGMGTLLISKIREEYPDRMMLTFSVFPSPKVSDTVVEPYNATLSVHQLVENADECMVLDNEALYDICFRTLKLTTPSFGDLNHLISATMSGVTCCLRFPGQLNSDLRKLAVNLIPFPRLHFFMVGFAPLTSRGSQQYRALTVPELTQQMWDAKNMMCAADPRHGRYLTASAMFRGKMSTKEVDEQMINVQNKNSSYFVEWIPNNVKSSVCDIPPRGLSMASTFVGNSTSIQEMFRRVSEQFTAMFRRKAFLHWYTGEGMDEMEFTEAESNMNDLVSEYQQYQDATADDDEEAEYEDEEEPADGM

SEQ ID NO: 50560 - protein, 93 aa, Zea mays
  Clone ID: LIB3137-029-H9_FLI.pep
PQVKEALKADKDNSASATSNQNNPEVPKVEEYADASKSYSEPLDLAKYSSAAELEVLGLEKIKIELQSRGLKCGGTFTGASYPTLPSEDNSIG

SEQ ID NO: 50561 - protein, 364 aa, Zea mays
  Clone ID: LIB3136-019-H11_FLI.pep
TDRGGFAPAHRCATGRSTSVSLWLRRPAVRHKHTRTQGPSAYTYRGETRSAVRACAEEGTEEEGCQQSEMEVGFLGLGIMGKAMATNLLRHGFRVTVWNRTLAKCQELAALGATVGETPASVVSKCRYTIAMLSDPSAALSVVFDKDGVLEQIGSGKGYVDMSTVDAATSTKISEAVKQKGGAFLEAPVSGSKKPAEDGQLVILAAGDKPLYDGMIPAFDVLGKKSFFLGEIGNGAKMKLVVNMVMGSMMNSLSEGLCLADKSGLSPQTLLDVLDLGAIANPMFKLKGPTMLQGSYSPAFPLKHQQKDMRLALALGDENAVAMPVSAAANEAFKKARSLGLGDQDFSAVYEVVKGAGGSGSGQP

SEQ ID NO: 50562 - protein, 84 aa, Zea mays
  Clone ID: LIB3136-052-A8_FLI.pep
FSQQPHDHKSWASKSQFIGENCFQPNRVLTKGYLISKDSKTNHVHFHIVLCQETGNNDAGKRASCCLILAACSIYASLYRMAGQ

SEQ ID NO: 50563 - protein, 279 aa, Zea mays
  Clone ID: 700355983_FLI.pep
RTHTQDATPLTLGQEFSGYTTQVKYGIDRINCTLPRMYQLAQGGTAVGTGLNTKKGFDAKIAAAVAEETNLPFVTAENKFEALAAHDAFVESSGAVNTISASLMKIANDIRLLGSGPRCGLGELILPENEPGSSIMPGKVNPTQCEALTMVCAQVMGNHVGVTIGGANGHFELNVFKPMIAAGLLRSLRLLGDASVSFEKNCVRGIQANHKRISQLLHESLMLVTSLNPKIGYDNAAAVAKKAHKEGTTLKEAALDLGVLTEQEFHELVVPEKMIGPSD

SEQ ID NO: 50564 - protein, 419 aa, Glycine max
  Clone ID: 700678787_FLI.pep
SVTHLFGSKSPPKLCVFTLRCSAGNGERPWKTSGARLMLEDGSIWKAKSFGASGTQVGEVVFNTSLTGYQEILTDPSYAGQFVLMTNPHIGNTGVNFDDEESRQCFLAGLVIRSLSISTSSWRCAETLGDYLAERNIMGIYDVDTRAITRRLRQKGSLIGVLSTDNSKTEEELLKMTHSWDIVGIDLISGVSCQSVHEWVDTTKQEWDFSSKGHGETFHVVAYDFGIKHNILRRLASYGCKITVVPSTWPASETLKMKPDGVLFSNGPGDPSAVPYAVETVKNILGKVPVFGICMGHQLLGQALGGKTFKMKFGHHGGNHPVRNLRTGQVEISAQNHNYAVDPATLPEGVEVTHRNLNDGSCAGLAFPAQRIMSLQYHPEASPGPHDSDYAFRDFVELMMQEKNKKSEPQISTVSSLDA

SEQ ID NO: 50565 - protein, 221 aa, Glycine max
  Clone ID: 700908719_FLI.pep
GKFNLHGVLGEIVELIKPIASVKKLPITLILSPDLPTHAIGDEKRLTQTLLNVVGNAVKFTKEGYVSVRVSVAKPESSQDWRPPEFYPASSDGHFYIRVQVKDSGCGILPQDIPHLFTKFAQSRSGPARPSSGAGLGLAICKRFVNLMGGHIWIESEGLDKGSTATFIVKLGICGNPDPSDHQAANRSQAYSGSGGLARFKPFITDENDTGFSTRRNQRSF

SEQ ID NO: 50566 - protein, 425 aa, Glycine max
  Clone ID: 700909708_FLI.pep
VAGAAAAGGLSLADVAAEAKHASEIVGTMGVALTVCSIPGQVASDRLGPGKMELGLGIHGEPGAAVADIQPVNVVVSHVLQQILSTETNYVPITRGERVVLMVNGLGATPTMELMIIAGKTVPKLQLEHGLAVDRVYTGSFMTSLDMAGFSISIMKADPVILQRLDAPTKAPYWPVAADGNHPPAKIPVPIPASRSAKTDEPRSQPLQLNEQGQILEVAIEAAANAIINLKDNLNEWDGKVGDGDCGSTMYRGAKAILEDIKNYPLNDAAETVGEIGSSIGRSMGGTSGIIYTIFFKAAHSVLKASSHSGVTSKQWAEALAVSIAAVSKYGGASAGYRTLLDALIPASLVLEEKLNSGVDPCIAFVLSSEAALAGAQSTVDMQAQAGRSTYFSGEILSTVPDPGAMAAATWYRAAALAVKAKYQS

SEQ ID NO: 50567 - protein, 484 aa, Glycine max
  Clone ID: 700745995_FLI.pep
LASHKLVSSLKISLEAVKMSRKGLMEQDLSKLDVTKLHPLSPEVISRQATINIGTIGHVAHGKSTVVKAISGVQTVRFKNELERNITIKLGYANAKIYKCEDERCPRPMCYKAYGSGKEDSPMCDVPGFENSKMKLLRHVSFVDCPGHDILMATMLNGAAIMDGALLLIAANESCPQPQTSEHLAAVEIMRLQHIIILQNKVDLIQENVAINQHEAISKFIQGTVADGAPVVPISAQLKYNIDVVCEYIVKKIPIPERNFVSPPNMIVIRSFDVNKPGYEVDEIKGGVAGGSILRGVLKVNQFIEVRPGIVVKDESGNIRCTPIYSRIVSLYAEQNELQFAVPGGLIGVGTTMDPTLTRADRLVGQVLGEVGSLPEVFVELEVNFFLLRRLLGVRTKGSERQGKVSKLAKGEMLMLNIGSMSTGARVVAVKNDLAKLQLTSPVCTSKGEKIALSRRVEKHWRLIGWGQIQAGITLDVPPAPQLS

SEQ ID NO: 50568 - protein, 273 aa, Zea mays
  Clone ID: LIB3067-032-D6_FLI.pep
SRSGGVGTLLSSNAMGGEGQQAHSAGCGSGCGGGCGSGMLIEGSKANNAMSGGCGSGCGGGCGSELLDAHRILAAVQNAQRSAKRRGAGPARPVIAVTPTTTSALQVPSLTSLAHTLRLVDAQLVWIVVEPGHRTDAVAAVLSRSNLDFLHITGPGDSTANLRMHALREIRAKRMDGIVVFADENSILRTELFDEAQKVTTVGAVPVGILGEDDGTSESFLQAPSCDAEGKLVGYHVSEETVLPANRSDMLMASRLEWAGFVVNARALWEDTK

SEQ ID NO: 50569 - protein, 147 aa, Zea mays
  Clone ID: 700049130_FLI.pep
VKHKKTTCPKPAWIQRPGAPFTFILSIDKQQRWSATKGHWGRPTIGRQKYLSLLGLEHVADQVDDAVAVAPLVVVPRDELDEVVVQGNPGLGVEDARPAVTGEVGGNQILLHVAHNTLEWALRSSLNSFLDFLVRGPLLDSDSEVNN

SEQ ID NO: 50570 - protein, 190 aa, Zea mays
  Clone ID: 700051487_FLI.pep
SMHRCTTSTKVTTTPADAEHVVCLTRIFCEQWSHLPHEFRRLVLVDEGAVLPDLALGAGLDLDGAHLDHGAREDLEEHLGRRVDHAEDVGLGGGVGDERGVGLEQAPPLEHAAVVAQVEGAEAAGVHLHDRRVVRQRLALEPQLRGVQRVQRRVRVVGPAAPREVVQALAEGVALGDADRVSPCTYTREK

SEQ ID NO: 50571 - protein, 174 aa, Zea mays
  Clone ID: 700072673_FLI.pep
KQMNATRVPYEDTTWKYCYSASPLEMPDVPTITLTFAADKSLQAVNPILPFNDKQGALAGFCLAVLPSTEPIGIIAQNFLVGYHVVFDRESMKLGWYRSECHDVEDSTTVPLGPSQRDSPEDLLPSNEQQTSPAVTPATAGTAPLSCATTNLQMLLASSYPLLLLTMSSVFFVS

SEQ ID NO: 50572 - protein, 214 aa, Zea mays
  Clone ID: 700072858_FLI.pep
AATHAWKHLEAWHGSRRPPHQQRTASRCPRRRSTGERRRVKPMTPPMDPPDVEMEMEPAPQPPAPTAVGEGWSMLSRARGLLEEGKPSLALQAVLLAIRSQGGEQALMQTLNRARELYAQRLQASPSVDELASLLAQCAIAEAQSSNTNPPQGPGSDPVNMLNSDEACILAESGRKQIILDAFADGSSFICLKCGGLFSTSRKDEHLAYWCGTA

SEQ ID NO: 50573 - protein, 231 aa, Zea mays
  Clone ID: 700074065_FLI.pep
SQIQDKSHRIDTQINSPHKPKRTNSYPRYAAPSTQPTTLQFQQRESLDALGGSLHQHNAQGDGGGVERVGHLAYHLAHAGDALRRPLGRHRQRRRRHQRDQQLHADRAQRVCGQLPDELRELLAVQEPVQVHVVLLHHGPELLLGRGVVVRPRQVLVDVIVDAEDGDVDLLESEGLLVALLGVLREAVEHLVGDLPHLVLLPPPPLEPILEITPGLTHGRRRRCSGKGQGK

SEQ ID NO: 50574 - protein, 95 aa, Zea mays
  Clone ID: 700074104_FLI.pep
SNATAMGIIYRLTQHHVQLPENLGSYQLLEWNVQPLPRRSWFQEHVVSMLLGILLVILVTLSAFLVVLVWRKKFSGQAAYRPVDSVVPEQELQPL

SEQ ID NO: 50575 - protein, 197 aa, Glycine max
  Clone ID: 700893415_FLI.pep
RILVSAKGIFETTGVKLSGKVAGIHWHYRARSHAAELTAGYYNTRNNDGYLPIARMLAKHGVVFNFTCMEMKDREQPDFANCSPEGLVHQVKMATTTARAELAGENALERYDADAYAQVLSTSKSESGSGLAAFTYLRMNKRLFEADNWRHLVDFVRSMSEGGRRERLPAADSHGSDLYVGHIKATQEKHTQEAALV

SEQ ID NO: 50576 - protein, 321 aa, Zea mays
  Clone ID: LIB3136-003-A2_FLI.pep
PSQAKNGNIIRIKLKSNQDPQSVLLEKPRVLEQPLVQQMSSVSSLSSKQNSINRKVNVRSTAGQQWVNGDSQAVQKSLVTETLSRAMQRTVPQPAVKVTRRADPQLSVKAPVGRSDLPPKFSGSVGPSPARVTGRFCPAPVKTQQRIEHPPSMVSQRVDPQAKVSQKEMGSAVCLPQAPHPPVLQKPKDLPVPKQREPINSLPKEEPCFSGRTVEADQGKEAKLSRSDRKKIHKTEKKNKKFRDLFVTWNPLLMENEGSDLGGQDWLFSSTRSSDGSMAQPTVPDGLGPIHPMVQQQPYLQPRATFLPDLHIYQLPYVVPF

SEQ ID NO: 50577 - protein, 293 aa, Zea mays
  Clone ID: 700074546_FLI.pep
FDGGGRGGGGGGRGFGGGRGGRGDRGGRGGRTPRGGRGGGGRGGRGGGMKGGSKAVVVAHKHAGVFISKSKEDALCTKNMVPGESVYGEKRVSVQNEDGTKVEYRVWNPFRSKLAAAVLGGVDNIWIAPGTRVLYLGAASGTTVSHVSDIVGPDGLVYAVEFSHRSGRDLVNMAKKRTNVIPIIEDARHPARYRMLVGMVDVIFSDVAQPDQARILALNASYFLKNGGHFVISIKANCIDSTLPAEAVFAAEVEKLKADQFKPAEQVTLEPYERDHACVVGGYRVPKKQKATS

SEQ ID NO: 50578 - protein, 170 aa, Zea mays
  Clone ID: 700076180_FLI.pep
QWFSLGAPLSSLVPSCRSISDPIRGGLRPSAPVSAAGFGIREMSWSAPDDILLSTSLAGFLDKKLIVLLRDGRKLLGTLCSFDQFANVVLQGACERVIVGEQYCDVPLGLYVIRGENVVLIGELDREKDELPAHMTCVSEAEIRKAEKAEREARDLKGTMRKRMEFLDFD

SEQ ID NO: 50579 - protein, 107 aa, Zea mays
  Clone ID: 700083421_FLI.pep
PANKNDGAYPPTDPDMKKANKARGARKFSEQPRPGNLTQVDLARPSHFDEASSHVPELKKSRSSKLTSQKDLVAERKRQREDIDTLLSSSLISSTKPSSSRNTKKQK

SEQ ID NO: 50580 - protein, 169 aa, Zea mays
  Clone ID: 700085079_FLI.pep
HGSAKNLPPSCTSTLPPGTCFFPQNEVKQIQTPLFILNAAYDSWQVRNILVPGVADPHGKWHSCKHDIDQCSASQLRVLQGFRGDFLKEVAGLGNSDSRGLFINSCFVHCQSEIQELWFSSDSPVLGNTTVANAVGDWFFDRSSFQKIDCPYPCDSTCHNRIYDDSSQA

SEQ ID NO: 50581 - protein, 150 aa, Zea mays
  Clone ID: 700048388_FLI.pep
SRWLARRTTTPAQPATPRRTPRHFRDRRRHPRLRAPRSHSHTRWPSLLNHPRRGWRRGLDWRSGRRRRTRSTPCPHRRAAYRCLRPCCSQSRRRPPAPWMSAPPTSSDGSSSFSCDDAAMASQQRCDLRDCPFSLASKRASWSRPKVVLF

SEQ ID NO: 50582 - protein, 128 aa, Zea mays
  Clone ID: 700048684_FLI.pep
RRVSTLYHGPRHQEERRGSGRRPATAQGVPRGAQGLPGARAEAHGRRYARRRRRSGAGAPEGDAEAGHGRGEQARTGRCGRARGGRGRAVRLRGVMVLRAAAEPRVRRAGLRRRPPAPGEHWLSVLGP

SEQ ID NO: 50583 - protein, 261 aa, Zea mays
  Clone ID: 700050701_FLI.pep
DVYDHLYPGKNAESGQEVAQVDPQELVVPKLFERFMGLRAALVTSCPHVSSFAANLGFHVFKTNDFAPQSGSSSITKEDGLIKRAFDLLGFSDGDVQETSEFDLVFMHVAMENTSSKLGKLGMKTDINRLDKLVGAVLESAPVGSAIASRIHVSVILSYGSASGNKDEFSLLTSSTETDSDLNLLRPRQSYTMKTGRTLDDVRLHHPILLAQWQDRVTRVDLAKGFSFEEFMKRGGNLAMLAERFLHEVAFKLWKAPKYGA

SEQ ID NO: 50584 - protein, 201 aa, Zea mays
  Clone ID: 700071985_FLI.pep
AGTGGKTSYEERREHRPPWPNPPSPSFSVVLYTQKQTSLAWGYTRHSSRGGGGGPPGAMSRLLLARLADGPGGAEAQRREHVEDIVPGQQRRRWLVVDDVGRVEEVVGVEEVVGEERGDVVAGGLVELALPEAVVPEPGGGVDELPPLGREVLHLPVRRRDEERRVGVQRRRRCGAHPLLPASARSCISLLFLSLEHRQAR

SEQ ID NO: 50585 - protein, 269 aa, Zea mays
  Clone ID: 700072142_FLI.pep
QLLLALGGRRERERERERDLVERLVGGPRTKMLAVFSGQVVEVPAELVAAGSRTPSPKTKASQLVGRFLAASEPAVSVQLGDHGHLAYSHTNQALLRPRSFAAKDEVFCLFEGVLDNLGRLSQQHGLSSKGANEVLLVIEAYKTLRDRAPYPASFMLAQLTGSYAFVLFDKSTNSLLVASDPEGRVPLFWGITADGCVAFSDDIDMLKGSCGKSLAPFPQGCFYSNALGGLKCYENPKHKVTAVPADEEEICGATFKVVEGSTVLTALH

SEQ ID NO: 50586 - protein, 251 aa, Zea mays
  Clone ID: 700073426_FLI.pep
SDPLVTHPRYPLSLGFLSHHQPPSRLSPPPPALGRRDEGRREAPAGRGGKRSSRAGGEMFLWDWFYGVLASLGLWQKEAKILFLGLDNAGKTTLLHMLKDERLVQHQPTQHPTSEELSIGKIKFKAFDLGGHQIARRVWKDYYAKVDAVVYLVDAYDKERFAESKKELDALLSDDSLANVPFLILGNKIDIPYAASEEELRYHLGLSNFTTGKGKVNLGDSNVRPLEVFMCSVVRKMGYGDGFKWVSQYIK

SEQ ID NO: 50587 - protein, 82 aa, Zea mays
  Clone ID: 700075612_FLI.pep
DVTSLHELTHRRNVTQLCRHHHPQSPSAYLDLCLIFRRFLFSLSPFQSTKKKWPKSALRKFHGKRDYGMNNTFSTIFIFFKE

SEQ ID NO: 50588 - protein, 263 aa, Zea mays
  Clone ID: 700094293_FLI.pep
PSSSSRDGASEAVRDAAVPQRGARGHRAQREGPRLRDRPRRPHHRRPQAARLPRPQPFRPDPGSRRRRRSPLRVPCDQPVHRQQVRVGGHGPAPRDGVGGEAGGVARGGVAPLLPERVAAGVPAAREAAPGRRPRRGGGGQARGAARQGARRVRGAPRPQQVPRRGRVHARRRQPRVLPALPQQDPQGRARRRPPPRQGLVGGHRRPPRVPEDRRRHPLAPAALLLGLTSPCVAPLPGSRMRRSPESNKRGSILSCICCCAMC

SEQ ID NO: 50589 - protein, 305 aa, Zea mays
  Clone ID: 700094315_FLI.pep
RSDKPPPTAAGMSPMALLTPLPIPLLSPYCQRVSSPSLLAAGAVIRPLICLSPHNHRHHDALYPSVPNVWPRHRRRRRGAVASVDQEESSASETAVAPEEDLGPPVSSDAAAEDGVATSAQPAEASPEDLENIREIKRVLELLKKNRDMTFGEVKLTIMIEDPRDIERKRTLGIEDPDEITRDDLADALAEVNEGKIPENRVALQLLAKEMAEWPDIEIEAPKKKSKPGKSVYAKATDTGIDPETAAKRLNLDWDSAADIDGEEEDDDETEVPSAVGYGALYLLTAFPVIIGISVVLILFYNSLQ

SEQ ID NO: 50590 - protein, 244 aa, Zea mays
  Clone ID: 700082161_FLI.pep
FAPSLTRARHTGSQGGGAQARALSDGVNGFPSRLRSSAHRPVTLLNYSLMAGESQGVERLLSYAEDLVAVLCVSTDCDDNAQVGAGVQRLLSACRSESDDLEMQLKEYQEKIHSCKEKIDKAKAETITDDELNALQSKMEEKLQEEKQLRQELRVLHDELDDLESQRLSIKERKDAVKKKKKDTQKAERTLSMCLSVTNIIPNLEDQDKVSGYIVDQNRKKIEKFEFENTTPPVEICDELWKKI

SEQ ID NO: 50591 - protein, 325 aa, Zea mays
  Clone ID: 700084301_FLI.pep
HLLSDVAAFAISLFSLWAAGWEATPQQSYGFFRIEILGALVSIQLIWLLAGILVYEAIVRLINESGDVQGSLMFAVSAFGLFVNIIMAVLLGHDHGHGHGHSHGHPHDHGHGDSDDGHSHHEEPEQGHVHHHEHSHGSSITVTTHHHHHSGTGQHHDAEEPLIKHEADCEGTQSAAKKPRRNINVHSAYLHVLGDSIQSIGVMIGGAIIWYKPEWKIIDLICTLIFSVVVLFTTIRMLRNILEVLMESTPREIDATRLERGLCEMEGVVAVHELHIWAITVGKVLLACHVTVAREADADEILDKVIGYIKTEYNISHVTIQVERE

SEQ ID NO: 50592 - protein, 165 aa, Zea mays
  Clone ID: 700087383_FLI.pep
ETRARMFTNIRTRVTPRTGNPDIIDTIVALRKMSMSMNVGVPNQGIGIEMITATLTRNTLMRNTGGHTSIGGSITPVLKGSTRKTDTRFAGSVCLDQVPSLNQTSCLMTLHKSTQGTTEAPSKLRAKIRATYCNILYHSSNIMSLGLCFVANCSFDFCICFERSN

SEQ ID NO: 50593 - protein, 82 aa, Zea mays
  Clone ID: 700048795_FLI.pep
RRLSCCQSTSRTMQTRTEEDRTCHFQVVTFLFSRAHPTFLLLLNDYVRECFVDVERDYLCLTKQYPRLAITPEFSKVGHFVH

SEQ ID NO: 50594 - protein, 57 aa, Zea mays
  Clone ID: 700048978_FLI.pep
QSALSTETVLHVKTHTTQCRCPEQTDITVISYWVVCTSETKTRTPRKLLQPLLPYLS

SEQ ID NO: 50595 - protein, 222 aa, Zea mays
  Clone ID: 700051071_FLI.pep
AYSKSLDEFPQNGATIVHWIKKFPFFCSDREYIFGGRIWESGKTYYCVTKGVPYPSLPKKEKPRRVELYFSSWRIRAVQSPKHVGQQSACEVTLVHYEDMGIPKDVARVAVRHGMWGAVKKLQSGFRAYQQMRDTENTLSHSAIMARMTTRVSITASNGGLDHDLSIADKIGGENDSSHAVQHGFDWKWVVFGGAVAAVCVLNTGLVGKVLLLGAARRQAKK

SEQ ID NO: 50596 - protein, 103 aa, Zea mays
  Clone ID: 700052405_FLI.pep
AANAVQEPKATKHDDKTSWEGSSISLQIKIKLDIAKSSKQHIQRTYALAAAWAAKSRLLCSSMMLSLIPLPLGRLTHGLLPLPMVNTLPMRVANWWPMESSTW

SEQ ID NO: 50597 - protein, 218 aa, Zea mays
  Clone ID: 700044985_FLI.pep
GLRTGIFEASKLVLINVAPTLPEIQVQSIASFCSTVLGTAVRIPCEVLKQRLQAGIFDNVGEAIVGTMRRDGPKGFFRGTGATLCREVPFYVAGMCLYAEAKKAAQHVLRRDLEAWEVVAVGALSGGLAAIVTTPFDVMKTRMMTAPPGTPVSMQMIILSILGNEGPLGLFKGAIPRFFWIAPLGAMNFAGYELAKKAMIKDEKNSSESTREILPRKQ

SEQ ID NO: 50598 - protein, 280 aa, Zea mays
  Clone ID: 700073673_FLI.pep
FVEPRVSKELLTEDSYYNFIQTWDNDEEIKMLRTKVDLIITLGGDGTVLWAASLFKGPVPPVVAFALGSLGFMTPFPSEQYRELLDNVLNGPFSITLRNRIQCHVIRDEAKDEIVSEEPFLVLNEVTIDRGISSYLTNLEVYCDSSFVTCVQGDGLIISTTSGSTAYSLAAGGSMVHPQVPGILFTPICPHSLSFRPLILPEYVTLRVQVPFNSRGNAWASFDGKDRQQLSPGDALICSISPWPVPTACLVDSTTDFLRSIHEGLHWNLRKSQSFDGPRD

SEQ ID NO: 50599 - protein, 163 aa, Zea mays
  Clone ID: 700094938_FLI.pep
PTKPARHDTKSRSSRAPIMAGVNSSVVGLKPAAAVPQAAAASSPAKRVQLAAPEGRRAALLGLAAVFAVTATTGSAKATIFDEYLEKSKANKELNDKKRLATSGANFARAYTVEFGSCQFPYNFTGCQDLAKQKKVPFISDDLEIECEGKEKFKCGSNVFWKW

SEQ ID NO: 50600 - protein, 105 aa, Zea mays
  Clone ID: 700084509_FLI.pep
GKHNHTAMETKCNNLHASLTLRYFAVTTATELLSRINNTRPKVIISLSLCAGIELQLKGHRTTECFMITLLSSHILMHYFRQKRTLIIKQFMLKIYIIPHFIRQP

SEQ ID NO: 50601 - protein, 119 aa, Zea mays
  Clone ID: 700084522_FLI.pep
TVLVTLQSRAMHHISKAFTIACSKLEKIGNVETEPDAVASESKTQKEAIDLKELKRIDHILSSLKRKIGAAPPPPPYPEGYVPPSAEQEKAPDDVAASEAPPQLDPIIDQGPSKRPRFQ

SEQ ID NO: 50602 - protein, 137 aa, Zea mays
  Clone ID: 700085033_FLI.pep
LQKDFAWHQGTVQTRRNLRHQRPLPNGADDGATADAANHWLGHPGCRPALRRHPPRGPRPGPRVLDVQAGFREATTPEEDTVTAPIYAIGDPSLASLSVPFSCEPVPSRTFRPSIIQRYPYSLSICFIYTYCILGIV

SEQ ID NO: 50603 - protein, 250 aa, Zea mays
  Clone ID: 700087416_FLI.pep
MSSRFISGAKHEAGYDAYMTGCIFAQLCAYLGIQFEQFSPLDNLATNTKLQKHINFLSPSWNSGTVLDLSTGMETPDPGYTRRYPAAVYDNIVVIWGFLSKVRPKEIKDCICKVFGSGSVTTVFSIDSTAALVQFKKQESVNDFLDLKAVLERADSAISILHPLSTILEGGQTRAAKYDTYRDICGSSESIYLFADQAEAVCATSKNQLIENVDGNLISDVLDGAALASVTEEDGIIPSSKNQNVAEVTC

SEQ ID NO: 50604 - protein, 343 aa, Zea mays
  Clone ID: 700051884_FLI.pep
RSRQLASNKQAEMERYSCCRWVLACSILALCLGGQGARCQLTSDFYDSTCPQLYYVVQQHVFDAMREEMRMGASLLRLHFHDCFVNGCDASILLDGDDGEKFALPNLNSVRGYEVIDAIKADLESACPEVVSCADVVALAASYGVLFSGGPYYDVLLGRLDGRVANQSGADNGLPSPFEPVDSIIQKFAAVGLNTTDVVVLSGAHTIGRARCALFSNRLSNFSATDSADPTLEASLADSLQSLCAGGNGDGNETAALDVSSPYVFDNDYYKNLLTERGLLSSDLGLFSSPEGVAASTKDLVEAYSSDGDQFFYDFVWSMIRMGNIPLAAGSDGEVRKNCRVVN

SEQ ID NO: 50605 - protein, 359 aa, Zea mays
  Clone ID: 700045969_FLI.pep
FTMCNTVSGLNKINTSLLLQAAGWPCMNHDRCNASGSFTTRMHLAFHSKQLAAAAAAAGMLMHHVLVELEAGEHVVVDGVGEVVEQVLERADAGDEPLDEVTEDGEHGEPAVLDLLELELIHLLLGLAEAERVEEGPAGVGRVAGAGEELLEAEEVLLAHGARVVPVLEAAVLGEAHERHVEDEERVGVGPVVVGARGRDDARLEPRQRGLRGDDAHLAEDLRGDGAHRAQHGVAAVDHLAIGQPLGLDEAPGALRVREAQRVEAIVAGQRAIEVGEGLLGREPQLPVGTLLGWRAGAGPDDEGRLPRRRPRDGRLHGAAQQLPAGEESLGRHRSGTGASSNLSFRQRTCLRSRSCRWL

SEQ ID NO: 50606 - protein, 77 aa, Zea mays
  Clone ID: 700046209_FLI.pep
IKLSKYSANDLDFQIFHSHALLENVICSSFSPGRLSYHHSCICVHLFRNPSHFCRDCFGALILSLCNHKTCLFHGFA

SEQ ID NO: 50607 - protein, 346 aa, Zea mays
  Clone ID: 700076886_FLI.pep
LAGRSPSHIAVGANKKASNVGHIKDGSNVSKVEDGHVDRSVGVKKPRYSADEGPSLTELSGYNAKRHEFDPEYDNDAEQALAEMEFKETDSETDRELKLRVLRIYLSRLDERKRRKEFILERNLLFPNPLEKDLTNEDREVYHRYKVFMRFLSKEEHEALVRSVIEERKIRRRIQELQECRSAGCRTLAEAKIHIEQKRKKEYELNAQKAKESNHLIANTKLVQKMNRPMKIESDGNLDPKKGGVGLDSPKTTGLTSVKQWDDWDIVGLPGAELLSASEKLLCCQNRLLPSHYLRMQEVLMQEIFKGSVLKKEDAHVLFKVDPTKVDSVYDMVTKKLGNHVELPTV

SEQ ID NO: 50608 - protein, 228 aa, Zea mays
  Clone ID: 700094083_FLI.pep
RPMASLSPSLHLPCNSRTGFLGKTRGIRPCVFPAGRVGFVRTVVECKESRIGKQPIEVPSNVTLTLEEQFVKAKGPLGELSLSFPGDLKIVKEESGNLRVYKTAETKRANQMHGLFRTLTDNIIVGVSKGFDKKLQLVGVGYRAAVEGNDLVMNLGFSHPVRMAIPEGLAVKVEENTRIIVSGYDKSAIGQFAATVKKWRPPEPYKGKGIRYMDEVVRRKEGKAGKKK

SEQ ID NO: 50609 - protein, 266 aa, Zea mays
  Clone ID: 700094210_FLI.pep
FLNPRRHGLRTDAAAPPPGDQPCVRIVPGRRRRLRCADRYAGFPALPEPDLRLGAALAVGSPAVGRAPRPFGVLEARLSLRRHLPPASQPRLLPRQLRRRGRLRAGGLAPGAPLLAPHPPGPPRRLVLPLPLPPLRPACCPLRPNLFRPRDAAGARRRVLHPAFLHLRRVAHHLRAARRRGPRRGARRVPGAGGPLPRRAQRAPRQQRGPRAAVIPWRTRIWGLRRRRARSGRVLGLDRSTGLVVVSIDAPASAKISKFIEILPYG

SEQ ID NO: 50610 - protein, 311 aa, Zea mays
  Clone ID: 700081934_FLI.pep
LSSLLVTQPRTEAPPSMALQAALLPSTLSSVPKKCSLAVAAKDTAFLSVSHGADADVHGGRVRDERRRQPPGPLPPGAPAPGRHAEVRLPVPPPRHPRLHHRQHQHAGREHPAQGRAGRPPRPRGGAARPERLCHDRRLRELRRRQGVQGQQDLQHAHHAGAAPAVPRGDGHHVRVALPGVHRHHGAVPRAHPAVPPALPAVPEVRHQGLRVGGGVRQEAGAGGQRPQPHQVGGVLELEQGLGVVREPAVAGGQRSGEGQEALGDQREARGACLSSPARRRRHDDSVEQRSFRFVVLCVPLASILFVSRSW

SEQ ID NO: 50611 - protein, 355 aa, Zea mays
  Clone ID: 700082112_FLI.pep
IDLGKPVALDVVVDGTVPQGSGLSSSAAFVCSATIAIMGILDKNFPKKEVAQFTCLSERHIGTQSGGMDQAISIMAKPGFAELIDFNPIHATDVQLPSGGTFVIAHCLAESKKAETAATNYNNRVLECRLAAIVLAIKLGMDRKKAISSVTTLSDVEGLCVSFAGREGSSDPAVAVKKLLHEDPYTAGEIEKITGEGLTSVFQGSQTSLDVIKAAKHYKLFQRATHVYSEARRVYAFRDTVSSKLSEEGKLKKLGDLMNESHYSCSVLYECSCPELEELVKVCRDNGALGARLTGAGWGGCAVALVKEPIVPQFILKLKEMYYKSRIDRGVIKQGDVGLYVFASKPSSGAAILRL

SEQ ID NO: 50612 - protein, 320 aa, Glycine max
  Clone ID: 700681685_FLI.pep
LVELKGTGELYAMKAMEKSVMLNRNKVHRSCIEREIISLLDHPFLPTLYTSFQTPTHVCLITDFFPGGELFALLDKQPMKIFKEESARFYAAEVVIGLEYLHCLGIIYRDLKPENILLQKDGHVVLADFDLSYMTSCKPQVVKQAIPGKRRSRSEPPPTFVAEPVTQSNSFVGTEEYIAPEIITGAGHTSGIDWWTLGILLYEMLYGRTPFRGKNRQKTFSNILHKDLTFPSSIPASLAARQLINALLQRDPTSRIGSTTGANEIKQHPFFRGINWPLIRNMTPPPLDVPLKLIGNDPVAKDIKWEDDGVLVSSIDMDIF

SEQ ID NO: 50613 - protein, 144 aa, Glycine max
  Clone ID: 700725419_FLI.pep
SIGILARLGGGHGGYNQLLPVVVPAPKPAVTKPQPTPSPKTTPSPASWSGPISIEQKRTTSWVANGKTYYRYSTVVTNKSNKSLNSLNLSISKLYGPIWGVTKSGDSYTFPSWLSSLSAGKSLEFVYIHSASPADVSVANYVLA

SEQ ID NO: 50614 - protein, 143 aa, Zea mays
  Clone ID: UC-ZMFLMO17176C02_FLI.pep
PAWPGEPRPHYLISVVTTSMKKRQSYQSSSVAMAMAIVSSSSPTNPPASGPWPSWSPPLSWVRLLLRRRWLFSMWGVGGFEARAIVRHGVASGTAIALYCGGTMTARHFEDEDVCPLRGLGGGGGGSSDSGGDWRRLRRCGHG

SEQ ID NO: 50615 - protein, 80 aa, Zea mays
  Clone ID: LIB3136-018-C8_FLI.pep
LQLVSASKQVIYVRPGDEVDLDSVIQETVRLTASTKSSCSETCEKSTVVWQYGGSQKKKTSSQRWSKLLDLKKTLDKAPK

SEQ ID NO: 50616 - protein, 177 aa, Zea mays
  Clone ID: LIB3150-064-B5_FLI.pep
TLSLLRPASALDGRRHTPRSLETGTGGTRMEDDSPLTKTMKGAVTGLAAGTIWGTVVATWYDVPRVERHVALPGLIRTLKMCGTYGATFATIGGLYIGVEQLVQSQRKKRDFVNGAVGAFVAGASVCGYRGKSIQSALIGGSCLAFTSAVLDIGGNTTRVDNGKEYYAYTTEKKPAN

SEQ ID NO: 50617 - protein, 226 aa, Zea mays
  Clone ID: 700149968_FLI.pep
PLHCWMKHGPLSRGAPSLVIIFILLTTLFIILVIDLRLGLVRLLFIFLLFLLGRSLLSCSALALVVGSDGLVVLELELVSLGYIGSLVRLAQGFPPVASSFPHRSDRLVLRVLLLELLAKFLHEHEESAGSPLRLVGVLAGLPFPALGGLLRPLALHRQLGIGLGGALGFGPLHGGFERRHGAQRSDPRLAEGIPVAGGRIGVESRAKLPLAARGEREGGKGKGRR

SEQ ID NO: 50618 - protein, 173 aa, Zea mays
  Clone ID: 700150284_FLI.pep
SVLVLLGLLYYHHGAVRVMGTVVAHTSKNSPFNGSVTMAADDEHLGPVPLDSLAEDVPSVPLQRLKHSVARLCAEAFGFFDDAQGGALEIRLHVRQHIRGAWAGEADGGGGGGLGGDDDEAVLLRLARREEVLQCPLQRVEAVLALVDPYHHRHLPRRRFRPRRRRRRFLRHG

SEQ ID NO: 50619 - protein, 167 aa, Zea mays
  Clone ID: 700153138_FLI.pep
DLPGRAGAAGRGVAVQRRHPHRGRPCDARLPEGPVPCLLLQQLHLLRGVRGRRRASAAGVAAQEVVVARGHERDDRAGPAGPLDRLCRRVQQDVEDFCGCFRSRSRCARLFRHTCAAVKLRQEREEDSPRLSVSAPGPGEQRGKRSGNERGRAPGSSLLKLECTVRS

SEQ ID NO: 50620 - protein, 373 aa, Zea mays
  Clone ID: 700155805_FLI.pep
SGYLSQQEIRSAILKASQSLRKAKGESNGNDEKTDASAVDKYPLVSVPDETLTPEQLKEKKKQILLKTTTEGKLRAKQKRAEEEALREKQEEKRRAENPELYLEELRARYSELSDNFEQRKRQKVNGSQTNGNHSSSAGVGRGERLNAAQKERMRLLASAAFDRGKGEDTFGMRDEDWLVYNKMSKDNDDDSNDDDESELVRISSKLQEIDPTFVSKSEAVQLTPEPPKVRPLTAEDYRIAIGIERFRCPEVLFQPGMIGIDQAGIDEMVSISLRRLMEDESVKERLCQSILVTGGSSLFPGMIPRLESGIRQYRPYLAPLKLVRAADPILDAWRGAAAFAASSKFGKQTFSVADYREHGENLFHRYNIVYSL

SEQ ID NO: 50621 - protein, 146 aa, Zea mays
  Clone ID: 700096958_FLI.pep
RSEVVAGAGGRARSNMSWQAYVDDHLLCDIEGQHLSAAAIVGHDGSVWAQSENFPELKPEEVAGMIKDFDEPGTLAPTGLFVGGTKYMVIQGEPGVVIRGKKGTGGITIKKTGMSLIIGIYDEPMTPGQCNMVVERLGDYLIEQGF

SEQ ID NO: 50622 - protein, 232 aa, Zea mays
  Clone ID: 700103185_FLI.pep
CGSNMVTVREEMRKGPWTEQEDIQLVCTVRLFGDHRWDFIAQVSGLNRTGKSCRLRWVNYLHPGLKHGRMSPQEERIIIELHARWGNRWSRIARRLPGRTDNEIKNYWRTHMRKKAQERKMGMPSPSSSSSSLTYQTCLLDTIPVIGMGSGDTHNGSCVTSILENTQSVMDGYPMDQIWKEIEAPHAPNLLSIAEGKEKTCSSIPCHLPSPVMWDYKCPEIFWKMGDQEIMM

SEQ ID NO: 50623 - protein, 202 aa, Zea mays
  Clone ID: 700103188_FLI.pep
ARRRRRPRPPRLRVGPPAPHVPHGGDQGDVPSAPVHAAVAAPRRRRGVRGGRVPHPRRHHAAGERVGDRPRPGGVARASRVPARPLPPGRLARGSRCQRERLRAHPVRRRPENLRGPQLGSADGHAHDGHAGARPGLGPRRRHDRGQAGHGGGLRAHPAARRAVNGPPSTQTAAVCLRRVEIDARRPAISMPSVCMDAWSNK

SEQ ID NO: 50624 - protein, 101 aa, Zea mays
  Clone ID: 700106515_FLI.pep
LAADLVQVRARRIRDAAAASGRRRRFSLPPPRPVAALLEDAADDPLSLRLSQAAAVLVQRRGEAVLVHDPAGLQGRRRRQRRRLLPAAGHERHRPLHAHQE

SEQ ID NO: 50625 - protein, 158 aa, Zea mays
  Clone ID: 700106601_FLI.pep
SYMNRLLQIAFPNEVDGFHDQLLKVQDNIPICASIIGQRLALYSLEAGPEWIKERVRDLVKNRALLVDALSPLGDGNVRGGQGAIYLWAKLPDTCSDDFEVVRWLANRHGVAVIPGSASGGPGHIRVSFGGLKEEDTRLAAERLRRGLQELVADGTVQ

SEQ ID NO: 50626 - protein, 92 aa, Zea mays
  Clone ID: 700106666_FLI.pep
HAASDFAFNPQLVSRTMVRLPCYTEKTLQVRTRCPEQSNSLFLLLNYRWNQHVACQQRRDGHQFHKDPLSRVRVQATGGTGHPQISKECKTR

SEQ ID NO: 50627 - protein, 312 aa, Zea mays
  Clone ID: 700158019_FLI.pep
PQGIDSFIQVKATRLQDGVQSRRFHRGNASHRRALHTSSPAEAQEPSRSAIPSRPGAGASARTGGAAPRGPRGPPQRGRAVPHVPGLPAEDRRHRDLPEPGERHEAGRHHRLRAQGLGVRGAEADHVRQPHPGPAQVAAAVPRAAQVLLAGRVRPAERARPGGHPRRLAVHAEPHLRHGHRPREVHVVRPQDQQQRVLHPPRRGVRGRQGSPADADLQERPPAGACPRSGTGCQGIRRRSQPGVGEIISECEGEGEGGREELVVPSRCRRPLLGDRCLRRPGALVVRIDEFVLTVCPCRRSKYGVQLRAPRV

SEQ ID NO: 50628 - protein, 193 aa, Zea mays
  Clone ID: 700158310_FLI.pep
CIHDPWIRGRETVKFSISYYSFHNDNLHNLPDIIFIIITCKFAANDNTHETTRVQDGHSRTQIQRNSTNRPADRYKSRGDGEQRGETVGQAADGAGGHRGVAAEVPGLDHPGDVPVLHRDPGVALALRREGDLRRGSRGGGGRCREVEGDDGARLEVLGLEEVGDLLERLLFVVLVEVGGGEVDHRNLHRARH

SEQ ID NO: 50629 - protein, 72 aa, Zea mays
  Clone ID: 700158338_FLI.pep
LAYNSLKGLILSKALMAQKDAEDESTRIAFENLRSEVISLRNEALEKDKILLSLVERLKSSDARLASLSEVE

SEQ ID NO: 50630 - protein, 212 aa, Zea mays
  Clone ID: 700158369_FLI.pep
NVQHVLFYSATKQTKGRPQQQCSVIILTLLITKGPSDVAGKPQRLVELAQGVLPGGRAHGQRLQPEPGACWPPHRRAVLVGVAGEAAQVRSVEAAHVQVPVRLELIGPRDGLRHDAAQVGREQQPLRVRAEAHVVDPLLVRLRAALRPGHVHAAQPGAVGPHQVDAEHGRVRRVVTVRRERDQTPVRGPAGHRVDPLALRQPPDSAFLAARR

SEQ ID NO: 50631 - protein, 89 aa, Zea mays
  Clone ID: 700158526_FLI.pep
ENRSTDANEKHSVENEEKASALHCYRRWLGGILLVVLSRLLNSMIPSEVGASLLEVLCLLKRSVIGYVTCISPQSAVQRAGGLYLYFSS

SEQ ID NO: 50632 - protein, 141 aa, Zea mays
  Clone ID: 700161055_FLI.pep
HGRALWCSHHRAGTLHQLQSPHLQRHRHRRCLRENEAVRLPKHLRRRRRQQPGAIGPPDPYRLREQLLQEPPRQEGAPALRPGALQWRSHRRAGPVLRREPERVLRGFRGGHDQDGRHHTADRLQQRTDKEELQKSQLADS

SEQ ID NO: 50633 - protein, 175 aa, Zea mays
  Clone ID: 700161056_FLI.pep
SERILADFGEAAADPDAVAELPPLLRARAFLALAQAATSLLGVRLRCSGVDPDEHPIRKEFERLSLMQEKLNQFENWDKAPLRPSTTLNTQAAARFIGHSLSHLTSDQKRSMHEISRGERRSWSGQKRKPEPSVEKKSVRAAAEEFLAKASQELIGHSDSRVKGPVILISDEDED

SEQ ID NO: 50634 - protein, 241 aa, Zea mays
  Clone ID: 700161458_FLI.pep
LIHSPLSYQTKVDSLVCPSSHFIVCALMDWHWRRGGGKEGSGVILVSEDVEEGEGLGDGELEPKLGPVVVVKDGAEGVLLQWIVDLPRCHSHLCREARLAGALLVLPRRRVDVGPAEAGGLEDAVQLVGGVVVEEEGQPRADGPHRVPVPRRQPEQLPPEVLVHGVVVADEDVAADGLAPRQRLRRRQRLEPLVRGRHRAAVALVLAVLPAAAALLAAAGVPVAVVARRPSGGLVEVALHL

SEQ ID NO: 50635 - protein, 110 aa, Zea mays
  Clone ID: 700161568_FLI.pep
TNNAPSHMYQKDAAVTSTEDLLKPSSTSKSPDPRHDAQASTQPAGTGVSMKPEPVIGVSTIKKEDSSLTEGEVDGGTEECLEKLGAIKARLKYLMQGTRLEHERSATFRG

SEQ ID NO: 50636 - protein, 110 aa, Zea mays
  Clone ID: 700164312_FLI.pep
LRPRRRSEWTNSENTLGILHLVSPCSDQWHHNCRCEGQQLTVREAPTPFPPPTVRQANGVNHYPIGPRLCISWNREPADGSLSCRQNQLQETHLRSLRPTAAFLVGTSSI

SEQ ID NO: 50637 - protein, 200 aa, Zea mays
  Clone ID: 700164577_FLI.pep
IETRTTRTRTTRLLVLEGGAAAGQLATDMAAAGGETMMTREQLLHLFSRFSFVTSLPEVKQRIADAVRDKQEAVAVTTEIQEEILREMGVDPSFGIGCLGKVNVVFKNDKELMIKFYQFVAKEEMAIDEAELEPRELAEKLHAQQIMQEQQLNMLVEMRKYSPESQSVILETLHKELEEADFDINASILSPEQIREIVQK

SEQ ID NO: 50638 - protein, 102 aa, Zea mays
  Clone ID: 700164732_FLI.pep
QRKKGENKMVKWFSLINGSHTEIVKIGNRSITKEFQNATSASELDTSICYPKVPSRCFPISQSLFPSPYVHSPMAKLQIPQKKSPAMGMSSKVQRSILLPRS

SEQ ID NO: 50639 - protein, 260 aa, Zea mays
  Clone ID: 700150552_FLI.pep
NRLARLMGRRHSGGGGGGRGRGRGRGRDEEEDLPLHKAARSGDAAAVESVCESNPLAVNSRDRLSRTPLHLAAWAGHVDVVRCLCKHKADVGAAAMDDTAALHFASQKGHVEVARELLASGASVKAKNRKGFTALHFAAQNSHLDLVKYLVKKGVDVTAKTKGGQTALHVAEDDEVRAFLKECEQSLKKGAELPSEKDDSAEKEGDSKSSGEVMKDEEDAEQGEKRKSELVGASSLSGVKKAKVSLGHLVCENDMDEEEE

SEQ ID NO: 50640 - protein, 162 aa, Zea mays
  Clone ID: 700152342_FLI.pep
EIPWSLLLAGTEESNMKQRNRSKEKTGSSRQQRGRRTDMLELRCVPTTCLCQQAKPRLLLAYLLAEALARGALRLALAAGEVLGLAHVGAVVAAHAQALEPVALRQAVPRLRHLGRPQLCGDEEEQEDEDGSRHASRQRHHPPWQLAPACSELRATQSVLTG

SEQ ID NO: 50641 - protein, 202 aa, Zea mays
  Clone ID: 700154983_FLI.pep
AAQQDRPGRSLRRAHDRAGTVQELPGAHIQRHQRERGVRDAAQGQLPRGGRQRRRQPGAAGHRHAHRVRQRLLHQPAGAERAATLRPAALQRRRHGRPGPHVRVHAEEVQRGLRGGHDQDGQHQPAHRDAGPDQARLFQGQLASYVLAAIATCAYVPSDPTIQRFPSVIITVIRPVVPLSVAPLFCLYWFKNSSFSSQQRWV

SEQ ID NO: 50642 - protein, 177 aa, Zea mays
  Clone ID: 700097860_FLI.pep
SWNDHFFLLKVEHDAYYIIDTFGERLHEGCSQAYILKFDKNTTIHKVPGEKKSCSPDSSGPMKDSSGSENSTTDQDSGNDTEEEVLVSKGKESCKEYIKSFLAAIPIRELQADIKKGLMASTPLHHRLQIEFQYTQSSPKETASATQLLTMEAPFEFSWPEAPPTMEVTLTSAVSVV

SEQ ID NO: 50643 - protein, 137 aa, Zea mays
  Clone ID: 700105031_FLI.pep
LAATAKMPDGLAVAMQSGVAPQVAQPPITNPITYHTADYGQNPGLKYFDRARETSSSAIPDDGNRIAGEVKKKKRKPEYDPVDTQANLPRAPMPHGSEKQKPSKPADEASAGSLPSMATTQTVLGLPSVLGHNQQPS

SEQ ID NO: 50644 - protein, 129 aa, Zea mays
  Clone ID: 700156618_FLI.pep
SNVPLQAKRSSKKPAARAKVPFEKGYSQMDWLKLTQTHPDLAGLKGQSNRRLISLEEVKQHKAGDCIWTVLKGRVYNIAPYMKFHPGGVDMLMKAAGKDCTALFNKYHAWVNAEFLLEKCLVGFLDPTA

SEQ ID NO: 50645 - protein, 146 aa, Zea mays
  Clone ID: 700160026_FLI.pep
QPCYSSYNFSRSPGRPSHCYVTEIYPLQLPSICQPTLSQTVFSILSILTNHVRHAFMPSNMPNHPQELYTQDEEPSLPVTQNSPTTSLAKLSTCSNERNEGDDQRTSELNKQELSSPPKRYLLFVHLSLSGSPSLLNHECFPLNMN

SEQ ID NO: 50646 - protein, 89 aa, Zea mays
  Clone ID: 700160060_FLI.pep
NPEVNMCLGFHCLWSLVYQKGLHRSLHGRSAGIFARSKSCPLLPWTNVSLAGSAGPASKNFFHFDICPIVVFMFLLNPVVNEKGRHLPP

SEQ ID NO: 50647 - protein, 165 aa, Zea mays
  Clone ID: 700162159_FLI.pep
KIENNEIIIDAPDEKTENKADADTPAGETKEGEITVEETDEKIESKVTAEPVIGETTEGQTAAGEPVEEARTAEDMVEDVKVLDDKSTAAEKPVENATVVAHENSTTVENTLKDAIVAPPDANTTNAEKTAIGATIETQNEDAPAERTIEDTSVEAPDVQAGASE

SEQ ID NO: 50648 - protein, 130 aa, Zea mays
  Clone ID: 700162436_FLI.pep
RMHNASLSQFRRRMCKPKPKPQRNHLQIQFQQSGLQSRLICLLKARRKLQLVLPAKRHLLPLAIMVLWNVVHHQTFSWQGDQGLLRTGMATRWKQSTRPRLKRWQRQPSGSWRSIDFRKCAPPSSPRFCN

SEQ ID NO: 50649 - protein, 105 aa, Zea mays
  Clone ID: 700166066_FLI.pep
THQKEEQKLKSLLFTRPLHVDASSRWPSWTRRPCSTCCTSCGSSRAAPRRAPTAGRARRRGPRRRPRWPAASRSTRDGPGSRPSRPGGPGRRTATPAESRPRLCP

SEQ ID NO: 50650 - protein, 154 aa, Zea mays
  Clone ID: 700150896_FLI.pep
GDDKKEEEPPAEKTVEKEVVPAVDAAENTEQSTGGQAQPNDVAAPESENKGDGKPAESESAPLAFVDEAAPHVIVGEEKTEDSQAAESAVPSLASSEGEKKENGGATEPAAPPPADADKGAENSGQVNTAPQEPTAANCDKGQIQPGASAVRCT

SEQ ID NO: 50651 - protein, 134 aa, Zea mays
  Clone ID: 700155282_FLI.pep
RLPPASVTMNAPASSSQAISFPSGPTRGLNYYQNLIHQHGGERQEPLQQHGMQFAMHHQPLASQASAADVVSSGAMPARDTKQRPTKPCAYFNSARGCRNGANCTFLHDVSAARKEQSKGSKRIKLDSRIAGRY

SEQ ID NO: 50652 - protein, 196 aa, Zea mays
  Clone ID: 700096182_FLI.pep
TVGASARDATGTPRAHAETSISRPAVRRRSARTAHGLTRWPSRPPQRPARPSRAPQRPAQPPRAPQQQQQPRAQRLPVLLLSRQRALPLPPSPLQPPPAPAPAPPPLPSLPPLASLPPPPRGPPRAQRRQLARSPPGQLAPPPWPRRREQPPRARRRPEPGSPPPALPRSPRRSGSGPRQWPWVTIRRLMTTRPSG

SEQ ID NO: 50653 - protein, 104 aa, Zea mays
  Clone ID: 700096266_FLI.pep
SPLKNSSTSSKHIVRRRVSHERAVVMDHIPPAVTQLVDVGHMEQHVRLHVHPCHLTEHTHTDVPYLQGNALPSSVLAPVQQHAPTLHHCVVSSAELPSRMNTLA

SEQ ID NO: 50654 - protein, 155 aa, Zea mays
  Clone ID: 700096541_FLI.pep
WPRHIRSLPALLLLLFSQSSLGLGFGEELRPLVRKYEHRLLVFLLLLLRVQQPRLGIQILHVLPYGGAGRLWLPRRRAWVRVGVGEEYGSRVPLLVVVEAGRRRRSEQVGAVVVMMAAAEVDVDVVVVARVEVEVDHVVVAAGKARLWVRRIHVA

SEQ ID NO: 50655 - protein, 206 aa, Zea mays
  Clone ID: 700096643_FLI.pep
RSSYRSRAAPTEKPATSNYNTRRTSTQEKPTKGERASLGGGELGDGLGALRDGVLGELAGEHEAHGGLDLAGGDGGLLVVARELGGLAGQLLEDVVDEGVHDGHGLGGDADVRVHLLQHLEDVDLVRLHALLALLLATLALAALLAGGLASGDPLLRLGLLPGGRLLRRGLLLRRLLRRGLLLGLGRHRSWVGRGEGNRLQGNARR

SEQ ID NO: 50656 - protein, 148 aa, Zea mays
  Clone ID: 700098059_FLI.pep
RDRLKLTDRREFIRPTTTKSQIKRRNPVMAPAQIRRCLHAGAWMLAQASTTSSSLDAITNSSRSAGDYLGDGPVHGVGPAQCLQRQVRRLLAGDHHGAERRAHPRGAVDLGDLHPGDDHAGHDLAREAHDLVLGGVHVERLHPGHGAA

SEQ ID NO: 50657 - protein, 84 aa, Zea mays
  Clone ID: 700098075_FLI.pep
VVRTICYSAKDTRKHLLVLQQHTGSTKRRRQRDDRRTRQARPRTHRHGHGCQPHKRPPPESLQQRTTKKNNMGHTKLTNLPTCT

SEQ ID NO: 50658 - protein, 347 aa, Zea mays
  Clone ID: 700098323_FLI.pep
PECSALAGGRGSFTFMEAAAIPTSAPETRIAVVTGGNKGIGLEVCRQLAGAGATVVVLTARDETRGAAAAQELRESGLSDVIFHQLDITDAASVSRLAEFLKARFGKLDILVNNAAVGAVEYVQDPADSSTSEEELSGMDMVQRLQCMLKRVRETYDAATEGIKTNYYGIKHVIEALLPLLQASSDGRIVNVSSDFGLLRLINNEEAKAGAKRRGEAHRGEAGRGAGRVPERLRRRRGGGARVAGGLLGLQGGQGGHERVHEDPSEEPPGAARQLRAPRLREHRHDRPHRASHARARRGQRREGGAAAGGRPDRRVLRVGRGGVLYVTKAPSSLSSSLFANSLLVDF

SEQ ID NO: 50659 - protein, 36 aa, Zea mays
  Clone ID: 700102661_FLI.pep
IKVYMPRDHYPVTFYCFILVASNKSETTVVKVKAQA

SEQ ID NO: 50660 - protein, 109 aa, Zea mays
  Clone ID: 700102727_FLI.pep
SAKGFTTPQVWKTESPKRPTDQHSTWLASFLGLVLVCFASSSFFLTCWEVGSRSRCKNQGAPSSAVGFSFHRRRHDQTTAAELLSEGRAGMAAVTRLTDRAGCAAPHMT

SEQ ID NO: 50661 - protein, 318 aa, Zea mays
  Clone ID: 700103077_FLI.pep
ARNRAARARATAPALPGGGAGPDGVHLGRAVQAHPGGGVQAQGVEAARARRPGRPQPGGQGRVPVAQVRAEGYQGQPLPAGLLPLLLRPGLPSQEEGAAQRRRPHHPGRHVRGRPQPRPAPATGAGAARRLQPWRQQEAAVAAEAGRRRSGAAPPPAGPAAPAAAGGWRGEMRAARGRGGVGAHPAEPRGADGHDADAGPQLQGGVRHRAVRPALRDVADQGLTERIGWIGRLASQEILDQIVFERTPQWSTAQRWLGCQSETAVTEQDTRGLHSAVVQEEEQTQGEDGARPDMAWNRDRRHRRRGCGRRRDMRNTTC

SEQ ID NO: 50662 - protein, 55 aa, Zea mays
  Clone ID: 700157149_FLI.pep
GCGLVHLPPVVDLGYPSLRKNCFSLPEETRPQAVALAPCLLKSPQLIYITLTLLS

SEQ ID NO: 50663 - protein, 182 aa, Zea mays
  Clone ID: 700160234_FLI.pep
RVSNTTRDNGTHAGEQPGLARSARRALPPLPVLRQIAAAFPHVKCSVLDLPHVVAGAPSDACVQFVAGNMFHSIPPATAVFFKTTLCDWGDDECIKILKNCKQAISPRDEGGKVIIMDVVVGYGQSNMKRLETQVMFDLVMMAVNGVERDEQEWKEMFIEAGFKDYKIRPVAGLMSVIEVYP

SEQ ID NO: 50664 - protein, 313 aa, Zea mays
  Clone ID: 700160276_FLI.pep
RRRPHVRGGHQVQLRAQPPRAELRLQLRRLHPRPAPLPARLPRQVQGPAGQAARLLQQQLRREEEEGHGRAGGQGQAQVRHRPRPPGGEERRDHPGERHLHRREHQRRGHRDHALVHRVGARRGRQPPGGAAQGPRRDQGRRRRPRAHHGVHHPPPPLPAGRHQGDAAPPLPDPAPRPAHEPRGGQARRLHHPQGLQGGGQRVVAGQQSGAVGQARGVPAGAVPRRGEERGRHRWREGGLPLPAVRRGPPQLPRDHPRAAHPRAHRRQARAQLPDGTTARRGEARRQRERRTVQPAHCQPLRHRLPPRLCMID

SEQ ID NO: 50665 - protein, 85 aa, Zea mays
  Clone ID: 700160988_FLI.pep
ILVRTERLRTKDITQKVKAKNYWQGGVCLAFADEVLCWLYGTVKENEDYVLQFVHPFNRLELLRAQSPCPEAITLHVQQLSGAAD

SEQ ID NO: 50666 - protein, 227 aa, Zea mays
  Clone ID: 700166434_FLI.pep
VDLPVEDISCDLGPEMDKGVVLRQQVVSRHHLGRTEKLAESSILSGSVVTSKHAALARPSNYKDPNVCSAPSRNKTCELKLRSEIEEQCQKHELDVDERGIGPSKNSRVLIGSIIVAIKDCSEHLLDLGSKNDPVPPNVKTKKHASVKVVQQVTHEGNRNEGVPDSDNRSSLSVTTDEISYSTCCDADLAVDEHLQCTTFSSEEATAFLSQRWKEAIAADHVKLVVS

SEQ ID NO: 50667 - protein, 61 aa, Zea mays
  Clone ID: 700166678_FLI.pep
SRQEETMMESGFPLYPMESRFSASPFSCDFGIPAQFPFMEGMRCCWLAHRKAEPLAVKACD

SEQ ID NO: 50668 - protein, 222 aa, Zea mays
  Clone ID: 700099573_FLI.pep
DKFPDIVIYTDVALDPYSSDGHDGIVREDGVIMNDETVYQLCKQAVSQARAGADVVSPSDMMDGRIGALRSALDAEGFHDVSIMSYTAKYASSFYGPFREALDSNPRFGDKKTYQMNPANYREALIETAADEAEGADILLVKPGLPYLDIIRLLRDHSALPIAAYQVSGEYSMIKAGGALGMVDEQKVMMESLMCLRRAGADVILTYFARHAAAVLCGMGPK

SEQ ID NO: 50669 - protein, 186 aa, Zea mays
  Clone ID: 700103520_FLI.pep
QKNKDNRSKVKFHQTTGSRSYMVHVENLGDKNIGQEPDALDLFKECHYSRKKKCYTSTVQQAITQMDNKRSATTEGEKSMSATEVVANVLAENTKKNLFLQNVGIQNVGPRSSLRNIEAQLEVEKRANSDLKSIVDAQHEQLDALLKQMQETEENRIREQEEVKKKQAEMETKMQLVLSQIHSRLR

SEQ ID NO: 50670 - protein, 63 aa, Zea mays
  Clone ID: 700104707_FLI.pep
KKDLLRWAEGKLLLGIRPTPHQLVEALPGLEDLVSAAKPESRSSLQDLYWGDKLLEHSAAFFR

SEQ ID NO: 50671 - protein, 64 aa, Zea mays
  Clone ID: 700161573_FLI.pep
FPLRLQLILSSFELTVGTVTNAGQVSPIALPPRCCLTHQSGERCPKRQTLQQRRPRLKKKLWCA

SEQ ID NO: 50672 - protein, 184 aa, Zea mays
  Clone ID: 700161721_FLI.pep
IKGYFLSLFTAEDIVKSYPLQQRSATKVTFPLVWTNTCCSHPLYRESELIEENCAGVRNAAQRKLFDELGIVADELPVDQFIPLGRMLYKAPSDGKWGEHELDYLLFMVRDVKLDPNPEEVADVKYMNRHQLKELLRKADAGEDGVKLSPWFRLVVDNFLMGWWDHVEQGTLQGAADMKTIHKL

SEQ ID NO: 50673 - protein, 66 aa, Zea mays
  Clone ID: 700161843_FLI.pep
TLNANYLDRLKNTPLKAFESHLNSTISGMCSRLTREQKLRIKTCLFFAKISATTCFSANFNHDLQH

SEQ ID NO: 50674 - protein, 178 aa, Zea mays
  Clone ID: 700161851_FLI.pep
HNTPSFSHIACRKQNARWKIKLRLIDELASWIIHHSHSSSGELRVHFDVLEEPEAEVLELVGGGLRDGDEHSDGVRVADHGQEDAVDLAGERAHVRGLAGAEVQVLEAQARPRRDHQAGRQVRAGAAPLLQEVDHGAHVVVVHARLGVLHQPHPVARGRAAGRGRQLGRRGPGAPEHE

SEQ ID NO: 50675 - protein, 163 aa, Zea mays
  Clone ID: LIB3597-003-C2_FLI.pep
SSGAGGGDGHAGAPSGGADAELRGEAGPVLVVHEHDGDAAGHLLRPAQGRRQERPQVPLRSLRHAGDLQGLQHQPRRGPRPLQALRPQRHHRRLQGFTIRWWQWQQLRSSHSVGRFLRIHELLVASLVVCISIKFRMLQWTLPVLSHKMICTYDTINICLAVY

SEQ ID NO: 50676 - protein, 191 aa, Zea mays
  Clone ID: LIB3689-245-E2_FLI.pep
ICHRQISCDQSFGGANRHHFCSFLKQILYSTSSQGFSGCPLRRCCWVQDVHFSFIYCVEDLVVKRQYKDWESCFEKLGLDAKPVTECYKSEHGHKLELKYANQTDALEPPHRYVPWVVVDGQPLLEDYENFEAYICKAYKGTPPKACEGLERLQMALETAAEARNGVSYNSGVSKLATAEDEGGEHKVGEY

SEQ ID NO: 50677 - protein, 307 aa, Zea mays
  Clone ID: LIB3969-003-F1_FLI.pep
QVPPSCPPTTPPPAPMAAPASSSCFHPRATASPPSSLSVGTKVFVGLRAQTKLGSSESSCPNVSAGFHTAVNRRISLRLSKKKATRARISMMPIGTPRVPYRTPGEGTWQWLDIWNALYRERIIFIGDNIDEEFSNQVLASMLYLDSIDNSKKIMLYINGPGGDLTPCMALYDTMLSLKSPIGTHCLGFAFNLAGFILAAGEKGSRTGMPLCRISLQSPAGAARGQADDIENEANELIRIKNYLYGKLAGHTGHSVEKIHEDLSRVKRFDAEGALEYGIIDRIVRPSRIKKEGSTAQRRDMRNLGLG

SEQ ID NO: 50678 - protein, 341 aa, Zea mays
  Clone ID: LIB3969-008-A1_FLI.pep
SIGPAAKVVVTVGSAEKGPEGGGVTTDDALRVVRAADLASVAHVVVVYDEGAASGGLGGGGSTYNVLDGFTSFFSNLFSREQQALTLSQFLAKVAETDVRYTLVKASLTDDYTPESYYAQLVLTKEGVSPSDTGKVSRSQIAALVADVFSNVAVAENKVVEVSTSSSATAKNIAEAFTAIPEDGRRTEYLEAAAKAQAEEETLASERANKKAEAAASKSEADTKTTPSEEAAATPSAVNGAQASLENLLSRAKVISADFSWEKFSTQFADVTTPLTSSLEKEPNKAQIATVRGQEKAKKLAPRIAVVKPAAQKAKQPDPKPEVRALFGGLFKQETVYVDDD

SEQ ID NO: 50679 - protein, 97 aa, Zea mays
  Clone ID: LIB3732-017-H10_FLI.pep
FINQRGFLFLFLGFRWNCFCPSVHATKKEKKFPRPMENLYKRVATCKRSVESVSRTKQQQQLGCSVRQWMSCVCERETSICGVFPFFPLFSPDYCML

SEQ ID NO: 50680 - protein, 277 aa, Zea mays
  Clone ID: LIB3732-031-A1_FLI.pep
QAQSEAVISEIRMRRFLPPLDNVHAWAWHVLHFRPSHTALSPVKSRTAAAHDLASLPACGASSQAGRPLGGAGDDGEQVVAEGVAEVLGEVLDGAFAGDVGLDEEGEHGEHGEPAVLDLLHLEDGGLVGVAGQAQGVEGATGVQLVLEVQSVDDPVVLGAADEDDLRDHGDHQVDGDAVAEIAEGVAVQEQGAGLEPDGLGAAVSAELVARLWDDSASGTEHGPSGMDQLVGLVLGEVLWLLAEEGDDLLSPRGGRCRGVAGGAGEVELGAQNLGWS

SEQ ID NO: 50681 - protein, 267 aa, Zea mays
  Clone ID: LIB3597-027-H6_FLI.pep
TVPSSMLQMSPDEDDEEFWSRLRSISSDCCAVADKPEEDQQAAAQETSNSCQAPQVTESTTPDEVSPSPSQQEETSKSLSPTATVTRQDSSEDAETSTTSHRALFEDGQEEDHAAAATAADDNTAVPREKILQRISSKKETKSYQLGKQVSFKWTTGAGPRIVCVRDYPSELQLRALEQVHLSPRSGGAAAAAGAGRAASSRFASPQRCGSPVAARGRREPLASAGCGRAASSRFASPQRSSSPMARARCEQLTPREAFRTHLMARG

SEQ ID NO: 50682 - protein, 199 aa, Zea mays
  Clone ID: LIB3632-044-C8_FLI.pep
ACSWSSTSCAHQQQHQEHHLKSQARPLVPSSPPPRTTSSTRAAPPPLPSAALPLLLLPVHRRRRCRRRPPALSCTGASSATGSSPTAGTYTCTEARGRSAARSAAAAISWQRRTMTTLLPRSGSWQRQRTAPPSSAIRPLLPASRSEVVSGRAGGRVDHRGLVRWACHRRLAVEEATMSITLSQIACPNTDGCHGLMHG

SEQ ID NO: 50683 - protein, 181 aa, Zea mays
  Clone ID: LIB3607-004-C8_FLI.pep
GAKRGVSTSSCPTRRMDSRKKRKEFEASYLHLSLYESSRSGYLAELAFSAYAYIDGHRLLPVLAILGRRHHSAAISPWRPVPEPGVRLLEHDDVIEMRVRVGYVPPARGPRLVRVAPPVVPRLRGHPATQGRTPRRRQVVHGGLLARAARQGPRVERVRRVVGAPVPVEERARRHLHLPRR

SEQ ID NO: 50684 - protein, 333 aa, Zea mays
  Clone ID: LIB3594-055-H9_FLI.pep
YSCLNGTSSIYTNTTHTSPHRPCTLGSASASVLAVVVVGGFGAVAVGGGGLEMVRGRRRLHERERALELRPALLQRAVVADGHADEARGDARARAVLGRHLAAGAAAGAGHERLVVAEADGHEAELGGVLEVVHEAVGALLGAHVEAQHAAAAVARVAHGGQARVVRVAREARVQHAQAQPLHPLGERQRAARVLLHPQRQVRQPLRQLERHLGVHRGAQQHQRPLLQVHHRVHQARRPADRAGDDVGAAADELGDAVDDDVGAEARGRHHHGGEGVVHHELGAGLVRHPRQHGDVGDGQRRVGHGLHVHHPRLAGDHRGAHGGLVVGVHEGG

SEQ ID NO: 50685 - protein, 321 aa, Zea mays
  Clone ID: LIB3689-204-A3_FLI.pep
DGGAREFKEIVLEVMQVGGVLNVGDFVPALRWLDPQGVAAKMKKLHRRFDDMMDEIIAGYREARRVAADGEESKDLLGLLLSMVDERPFDSGEEVRITETDVKALILNLFVAGTDTTSTIVEWSLAELIRHPEILRQAQEEMDAVAGRGRLVTESDLRSLTFFNAVIKETFRLHPSTPLSLPRMAAEECEVAGYRVPRGSELLVNVWGIARDPALWPDPLEFRPARFLPGGSHADVDVKGADFGLIPFGAGRRICAGLSWGLRMVTLTSATLVHAFDWELPAGQTPDKLNMEEAFTLLLQRAVPLVARPVPRLLPSAYEIA

SEQ ID NO: 50686 - protein, 519 aa, Zea mays
  Clone ID: LIB3689-206-B6_FLI.pep
HRTGSAQSGSLMESLVAALPAGGAAAAAAFGGLVAAAALAGKVGLVGSKKHLNAPPAVSGLPLIGNLHQLKEKKPHQTFTKWAEIYGPIYTIRTGSSTVVVLNSAQVAKEAMIAKFSSISTRKLSKALSALTRDKTMVATSDYGDFHKMIKRYIMTFMLGTSGQKQFRDTRNMMVDNMLNTFHTLLMDDPNSPLNFREVFKNELFRLSLVQALGEDVSSIYVEEYGKVISKEEIYKATVVDMMMCAIEVDWRDFFPYLSWIPNRTFETRVLTTEARRTTVMQALIKQQKERIARGETRISYLDFLLAENTLTDEQLLMLVWEAVIEAADTTLVTTEWAMYEIAKHPEKQEYLYQEIQKVCGNKTVTEDHLPELPYLNAVFHETMRRHSPVPLVPPRLVHENTNLAGYEVPAGTEIIINLYGCNMNKNDWAEPEEWKPERFLDGRFEAVDMHKTMAFGAGRRACAGSMQAMNISCTAIGRFVQEFAWRLEEGDEDKVDTIQLTTNRLYPLHVYLAPRGRK

SEQ ID NO: 50687 - protein, 113 aa, Zea mays
  Clone ID: LIB3689-209-B8_FLI.pep
RLLQWKANSQNKHQLNFHELLCFLFLLAGFELVDLLAGSVELLPDLIQLELPFAPCLVEGDDLVDELDGGEPTALGLVNKVRVAALVSAEQVDVEHRRLRRRRRRRRGVKASK

SEQ ID NO: 50688 - protein, 109 aa, Zea mays
  Clone ID: LIB3900-006-A12_FLI.pep
KVPKRAWNQLKNLKSTKLTGLLRQNSCRCPAEKICGSFDPPAPQQRTIISCYSEKHIIIKHTTYGDLNFYFYFYFRIYMHTAYLNGRAKSARMCHLFTDIRQIRGALST

SEQ ID NO: 50689 - protein, 541 aa, Zea mays
  Clone ID: LIB3960-023-C7_FLI.pep
QGSLAHFFPAECAVVMANASRGRVGGGGRSSVLALLLLLSAGGARASYDGEGEAGAGAEEKEKAAAWTGGLSRRSFPKGFVFGTAASAYQVEGMAHKDGRGPSIWDAFIKIPGEIANNATADVTVDEYHRYKEDVNIMKNMGFDAYRFSISWSRIFPNGTGEVNWKGVAYYNRLINYMVKKGITPYANLYHYDLPEALEVRYGGLLSREVVRSFADYADFCFGAFGDRVKNWLTFNEPRVVAALGYDDGRFAPGRCTGCEAGGDSGTEPYVVAHHLILSHAAAVQRYRRRHQPTQRGRVGILLDFVWYEPLTADSAADRAAAQRSRDFHVGWFLHPIVYGEYPKSVRRSVKGRLPKFTAEEAGLVRGSIDYVGVNQYTAYYVRDRRPNATAAPPSYSSDWHAEFVYERDGVPIGPRANSDWLYIVPWGLYKAVTYVKEKYGNPTMLLSENGMDDPGNVTVGQGVRDAARVAYYRSYVAELKAAIDGGANCVGYFAWSLLDNFEWKLGYTSRFGLVYVDFRTLRRYPKSSAYWFRDVIAGTN

SEQ ID NO: 50690 - protein, 479 aa, Zea mays
  Clone ID: LIB3600-058-D5_FLI.pep
GGTPQSRRPAPTSYRQTKQMAISISQEAFDSMVRENMEDLGMDPDEALADAVEALTLQGADLSGIVKRVPGEATAAEVSPVVRVLDELKASLSASGGSEQDLDGLVSLLDELRNLCCSGEGSENAAIAVRNGVVEALVALCASARVEQERLLASALKSLSSVLRDVPSTEKFRRSEGPKIVMDLLQGGSENSDLLDAGFSVVAAGSAGNEVVKESFMDLKVDELILRVMKDKSKSNVQSLYDAIRVLLKPDDNRVVASQVYGYSRRFAEIGVAEVLVNALREQVAPSSLPSACAALKSIAVNDEICRSISENGGIDVLLQCIDEAGEQKNKVVARSCCSLLSKLAASDANKSIIIQRGGFDRFLKLTSRFSEDPAIIQEVMSMVTVLTLRSPENAARAMEEGYGTLAIQSMQRFPSSGQTQKQACLMIRNLVARNPENRTVLLNDGAEKLIRKAMALHGSCKDAASSALRDLGLDNYNA

SEQ ID NO: 50691 - protein, 469 aa, Zea mays
  Clone ID: LIB3689-247-A3_FLI.pep
TPREPSMGSIGGPTATATADRRRRVLFFPLPYQGHINPMFQLAGLLHLRGFSVTVFHTDFNAPDKSRHPAYDFVPVPVRGCLPKGSSDALQVTVERILAVNRACEAPFRERLAALLAREDVACLVADAHLLTLLDVARGLGVPTLVLRTGSAACLRMFAAFPALCDKGYQPAQESQLEAPVTELPPYRVRDLPSTTSACHGVISEVISRLVTAVTTSSGLILNTMDALECGELASLRRDLGVPVFDIGPLHMLSPAASSSLLLQDRGCLEWLDAQAPASVLYVSFGSLASMSAAELVETAWGIANSGYPFLWVLRPGLVRGSQTSEAAPPLPDGFDAATRGRGMVVSWAPQEEVLAHPAVGAFWTHCGWNSTLESLCAGVPVIARPCFGDQMGNARYVDHVWRTGLTLDGVLERGEVEAAVAALMAPGEPGDGLRRRARELKSSAAECMAKDGSSCTNVDKLVDHILTL

SEQ ID NO: 50692 - protein, 218 aa, Zea mays
  Clone ID: LIB3689-249-F11_FLI.pep
SESFSGSGSGSGGGHVWSAPVSPRPAPPPVLVIPARARSKRSRSSAFTGAAARAGAETPTILVPTPMYSSGSAHSDPESIAESSPHPAPPMKKKKKAKKPAPPAPAASSDDNDGDADYEEGGELAEPQGGAVRRCTHCQIEKTPQWRAGPLGPKTLCNACGVRYKSGRLFPEYRPAASPTFVPSIHSNSHKRVVEMRQKAVRSGDPSCDLLHFIRRRD

SEQ ID NO: 50693 - protein, 77 aa, Zea mays
  Clone ID: LIB3959-017-D9_FLI.pep
GGSCLKHKPLTTISSTTKPDQRVTSSKNCITLQPICLLLFLHNYKTHSHTTFANQHTDKERNENSTIKSQKTSVTKF

SEQ ID NO: 50694 - protein, 310 aa, Zea mays
  Clone ID: LIB3960-007-D11_FLI.pep
RGKGQKPKGITAATTMAASLQAAATLMQPAKIGGRAPFASLPSRPSSQLACRAFGVDAGAARITCSLQDVASRCVDAAKLAGFALATSALLVSVSMHALLASELACLLLKVGRTEVGGDMCVCLRAGRERGGHAQEADLRRDPEQNVHGGEGHGHGEPVPDHRRRRGVVPVQGRQVPDEEAVPGADVLHRQGGGHRQERPARVPEDQAHDPPHVHAGRDRGPARGRLRRHAQVRGEGRHRLRRRHRAAPGGRARAVPLHRQAARRHRQARELRRALPRAQLPWLLLPRPQGPRRLHRLRQRRRAPRRGQR

SEQ ID NO: 50695 - protein, 406 aa, Zea mays
  Clone ID: LIB3732-046-H9_FLI.pep
TPPISSFTNLLEPRPEPYPTMAASLLSRAAAAAAALRGAARPNHLLARASLPKGRVGWAARAAEGAGGPRCGPSPLLGAFGIAARCNATSSSSAVSEATGVHTVPPTEPVVSAEWLHANLKDPDVKVLDASWYMPAEQRNPLQEYQVAHIPGALFFDVDGISDRTSSLPHMLPSEKAFSAAVSALGIYNKDGIVVYDGKGLFSAARVWWMFRVFGHDKVWVLDGGLPQWRASGYDVESSASSDAILKASAAGEAIEKVYQGQLVGPTTFEAKLQPHLLWSLDQVKENINTQTHQLIDARSKPRFDGAVPEPRKGIRSGHVPGSKCVPFPQVLDSSQKLLPSDELRKRFEQEGISLDQPLVTSCGTGVTACVLALGLHRLGKTDVAIYDGSWTEWGAHPDTPVATAV

SEQ ID NO: 50696 - protein, 547 aa, Zea mays
  Clone ID: LIB3632-011-A7_FLI.pep
SPSMELEGPWARVLHLQHDACEWGRAVRARAVAPALEAAAWACLAMSVMLVLEVCYMSVSSFVAVNLLRRTPQRRYSWEPMPSGTGTGTARGDDEEAAVGDGGGEAYPMVLVQIPMYNEREVYKISIGAACALTWPPDRIIIQVLDDSTDPFIKELVEFECKDWASKKINIKYEIRESRQGYKAGALKKGMEHSYAQECDFVAIFDADFQPDPDFLLRTIPFLVHNPKIALVQTRWEFVNYNICLLTRIQKMSLDYHFKVEQESGSSMHAFFGFNGTAGVWRVSAIGEAGGWKDRTTVEDMDLAVRASLKGWQFLYVGDIRVKSELPSTFKAYRHQQHRWTCGAANLFRKMAGDIVISKGVTVWKKLHLLYSFFFVRRVIAPILTFLFYCVVIPLSVMVPEVSIPAWGMFYIPTAITIMTAIRSPWSIHLVPIWILFENVMSMHRMRAALTGLLETTYVDEWVVTEKVGDHVKDKLEVPLLTPVKPTECVERIYLPELLVAFYLLLCASYDVVLGAGHYYPYIFLQAFAFLVLGFGFAGTVTPCSCS

SEQ ID NO: 50697 - protein, 590 aa, Zea mays
  Clone ID: LIB3632-014-H9_FLI.pep
QGMAGAVSVSAHRRQWRYTWEALTHLPLLRLYLLPRPALSFRIPSDLRADLRLQGSLLHLSFSLPGDGAAVALRVPVPRVLVDPSAPVECRAAAAGDHLELRLALVLPVDHPVVAAAFPPPPGAEPPASLALRDDLKSLSTGDVHLYCKNCSSRLTKQPLRKIMEMPSVDWVDVSDNWFGGCCTSFGGAGEKLVSQFIRAYGRLEGTSLLDATSITVETDDLETDLVSQVACSALSRHFVAIKEDIFNVSVEKDHTTGKIKLKNSEEQANITATHAQPPIILEEGPSVSCSETNGVTQTNQPGISQTEADTDAYFEKSENDCCVEKVGKSKKEVDLLLVDPCRCCCVNGYSEKAEDNPSQLSLVNEKKQNMLEIKRDYKLTKTISLGSSFIVKASNLLNDFEWVELLCGQCSSPLGSYPSQCSLGPADGRLRLFKCYTSTEIPVTGPHDVFRGHTLERVFVNLLLEVAEDEISFRTLVRDLKTKRPMLQLVLLSSKAWLSSGCCYENDIDGSHGTTDLQPSVKLLYSDYSNASEADLRIVEAWASKYRAEELYMMKRQIDELTECLSSGMDNFPVSCSSLEGMRLSSLRR

SEQ ID NO: 50698 - protein, 235 aa, Zea mays
  Clone ID: LIB3912-021-C12_FLI.pep
ENKEKTMAVLLRRAAALLVVAAVCADGASTFYSSDPNLGSARVVFQTNFGDIEFGFFPHVAPKTVEHIFKLVRLGCYITNHFFRVDKGFVAQVADVMSGRTAPMNEEQKKEAEKTIVGEFSSVKHVRGILSMGRHSDPDSAGSSFSILLGNSPHLDGQYAVFGRVTKGDDTLTKLERLPTRREGIFVMPIERINILSTYYYDIDLESCEAEKSILRRRLSESASEVERWRRKCFA

SEQ ID NO: 50699 - protein, 210 aa, Zea mays
  Clone ID: LIB3597-002-H10_FLI.pep
TSSVVKHRNILFSFYSLLMPIQMAKSLLIPLLVLVFPSPGLPVLVHVLFGPCYRRPCRLRCAGEPPLLDLALHVQERVNQERPWSTVIVLQECPHDLLGADVNDLLDMVPEVVLFLLLQPPRHVLPELARLLLGELRDGVRELVVLVSRVLGAAAHELPQARPAAAQPEPHRRRALRWGDRLRGRAGAERQQLRVQGHRRGHPCPRRHRR

SEQ ID NO: 50700 - protein, 295 aa, Zea mays
  Clone ID: LIB3607-002-B10_FLI.pep
AAILPVMERDDAAYDGFVKGCADLCRSQGVLVNTFRLLEQRAVETVAAGHCTPPGLPTPPIYCIGPLIKSEEVLGKGGEECLAWLDAQPRASVVFLCFGSIGRFSAEQIREVAAGLEASRQRFLWVVRAPPSDDPAKKFEKPPEPDLDALLPEGFLARTKDRGLVVKSWAPQRDVLAHASVGGFVTHCGWNSVLEAIMAGVPMVAWPLYAEQRLNRVFLEKEMQLAVAVAGYDSDKGLVPAEEVAAKVRWIMDSEGGRMLRERTLAAMRQAKDALREGGESEATLAGLVDNWKRT

SEQ ID NO: 50701 - protein, 258 aa, Zea mays
  Clone ID: LIB3608-061-C5_FLI.pep
SSQIKLAHLTPTTSLPDPPPQPWPPPLTPRPPPPPPRPSTTTLSSISTARPPPPPTASRPPRTPTRPLSGGGSSYGGGRYEDDEYRKKPSGGGYGGGRYEDEDDYRKKPSAGGYGGGGRYEDEYSKKPAGGHGGGRYEEDDEYRKPSGGGYGYGASSGGGHGGRYEEEDYKKKPSGHSGGRYEEEEGNKKASGYSGGKYGKEEDDKKKKHGEDGSESGGIGDYLKLAQGFMKKQDGEGDSGGGMGDYLKLAEGFLKKR

SEQ ID NO: 50702 - protein, 385 aa, Zea mays
  Clone ID: LIB3689-212-F9_FLI.pep
IKKRKRGNKNERIRYARSGDRRVEPNATRSSGGSESVRRRRRLGRAGGLGSCEPLLDVTGAARAVGGADHGLLASAQQPAQRPQPGGDRGPRLVGAPSHPARRQRGVEGRRGGQGHGPRRDVDDQVLLPTPGGRGARGDGAGDGRRRGRGRGEAGVGDLVVGAPEQDVGGELERRAEGLLPRQRVEVAADGGAAERAGVVGVEPHVDALHVERVPALGQRPHLLAVGHLGQAHRALQRLLAALGARAAAAAAVDRDGEGAQGGGGQAALRERGRGHEEEPRGRRRRERVPGAQVALGVEVEEEDEHNDHEEEDDRGEEHPVADDHLLMSRAARGLERRRVAAARPRRRRARGGRRRRRRRDRGRPWNHGCLSRNELLVTLCFFAG

SEQ ID NO: 50703 - protein, 158 aa, Zea mays
  Clone ID: LIB3689-223-E3_FLI.pep
YGYMAPEYAMRGHYSVKSDVFSFGVLILEIVTGRRNGGSYSSEESADLLSLVWEHWTTGTLVEIMDPSLSSLAPRDLMLKCIHIGLLCVQDDHEDRPMMSTVNVMLSSSTVTLQAPSRPAFLLPEEWLQLRDQLRSVPARSLSVREQVAHVAQRRLNH

SEQ ID NO: 50704 - protein, 356 aa, Zea mays
  Clone ID: LIB3898-020-E7_FLI.pep
DGSVQVLAATQMPEEPAGWFQGTADSIRKFIWVLEDYYSHKSIDNIVILSGDQLYRMNYMELVQKHVEDDADITISCAPVDESRASKNGLVKIDHTGRVLQFFEKPKGADLNSMRVETNFLSYAIDDAQKYPYLASMGIYVFKKDALLDLLKSKYIQLHDFGSEILPRAVLDHSVQACIFTGYWEDVGTIKSFFDANLALTEQPSKFDFYDPKTPFFTAPRCLPPTQLDKCKMKDAFISDGCLLRECNIEHSVIGVCSRVSSGCELKDSVMMGADTYETEEEASKLLLAGKVPVGIGRNTKIRNCIIDMNARIGKNVVITNSKGIQEADHPEEGYYIRSGIVVILKNATINDGSVI

SEQ ID NO: 50705 - protein, 104 aa, Zea mays
  Clone ID: LIB3957-001-A3_FLI.pep
MISHIYTIPSSNPNLQQPDSHLPLYRCLLVLQQTAAEQRSRLADSRQLLFAGPWLLLPHCLAVALGWSGVNFGQRHAVTVSTPVHRWPRRHLILLVGLVPRRSL

SEQ ID NO: 50706 - protein, 308 aa, Zea mays
  Clone ID: LIB3958-002-F11_FLI.pep
KNMVLREFYDYAAAAEVNSEHPLAKAIVEHAKKLRPEGNHMWPEAREFISVTGQGVKAEVSGKSVIVGNKGLMLSSGIDIPLEASEILVEEEGKARTGIIVAVDREVAGVISVSDPTKPNALQVISYLKSMNVESIMVTGDNWGTANAIGREVGIEKIIAEAKPEQKAERVKELQLSGRTVAMVGDGINDSPALVSADVGLAIGAGTDVAIEAADIVLMKSNLEDVVTAIDLSRKAFFRIRMNYVWALGYNVVGIPIAAGVLFPSTGFRLPPWVAGAAMAASSVSVVCWSLLLRYYKAPKIAGTAKEI

SEQ ID NO: 50707 - protein, 274 aa, Zea mays
  Clone ID: LIB3957-025-G3_FLI.pep
ARKILEKNGMAACNPCQVPMEARLKLSKFSTEPPLDFTTYRSVVGSLRYLVNTCPDIAFVVGYVSRFLEDPRKDHLAAVKHILRYLAGTKTWGLWFERRKKEEAKLIGFSDNDFAGDVDARKSTTGVIFFLNSSPIIWQSMKQKVVAQSSCEAEYIAAANAACQAVWLARVLAEVQGTTTKAPMLRVDNQSAIALIRNPVHHGQSKHIQVKYHFVRESEDEGLINVKFIRSEDQLSDILTKPLGKTKFLELRSKIGLINVQQLAPQGLGGECRK

SEQ ID NO: 50708 - protein, 299 aa, Zea mays
  Clone ID: LIB3958-003-E10_FLI.pep
GMQPPQQYPPAPGSWGGVAGARAGATTVDEASMERSKSFIKALQELKNLRPQLYTASEYCEKSYLHSEQKQKVLDNLKDYALRAVVNAVDHLGTVAYKLTDLFEQQASEVSTYELKVARLNQQIFTCQVYTDKEGLRQQQMMGANIKHHKHYILPPTGYKRSLANGHLQADTDQESKPRPYPSAKTLSWHLSSENSTKANAHKPTFALVDTAPSKPSSGKERSASPMRRPLQFNRSTSSDTTQKVGAKNISGVKELSTFHSFDNPKGRAIQKAPVGTKSMLAALFIRHKSSKAKRIAVR

SEQ ID NO: 50709 - protein, 127 aa, Zea mays
  Clone ID: LIB3958-010-F11_FLI.pep
SDNEVNHAFPNYKLMILFFCCQVFDTLRIIMCVLGMTFVFVGISLLAPDDSKDGSSTSEDSIIDIDRNGKMPMEETDTDDSISFVTSVKSACSMSLGLGESTISASSVLAMLMVSSRTNNRLQRNRK

SEQ ID NO: 50710 - protein, 250 aa, Zea mays
  Clone ID: LIB3637-232-A6_FLI.pep
KKALSADAPVFDYRSTAGGNGATDDPFYVGFGNQQRKRGNGYINQGRRRTNDRLRRADREDSVRRTVYVSELDHTVTEERLADIFATCGHVVDCRICGDPHSVLRFAFIEFSDEEGARTALNLGGTIFGFYPVRVLPSKTAILPVNPKFLPRTDDEKEMVMRTVYCTNIDKMVTQLDVKKFFEELCGEVSRLRLLGDNVHSTRIAFVEFVHAEGAIMALNCSGMILGTLPVRVSPSKTPVKPRVNRMGSN

SEQ ID NO: 50711 - protein, 190 aa, Zea mays
  Clone ID: LIB3637-236-E3_FLI.pep
WPRELASGIAEVVKYGLIRDAPFFEWQEKNMPKLLAREPNALAYAIKRSCENKAEVVAQDEKESGLRATLNLGHTFGHAIETGTGYGAWLHGEAVAAGTVMATDMSHRLGWIDDSIRKRVVDILKQAKLPIAPPETMTVEKFKNIMAVDKKVADGLLRLILLKGPLGCCVFTGDYEGNALDETLHAFCDN

SEQ ID NO: 50712 - protein, 127 aa, Zea mays
  Clone ID: LIB3591-099-A8_FLI.pep
SIIVACRDCVSRFEAICVVEALIKQAVSVHFIRRVMPSDNEGEDLGTQLSRLLGLMQDVCTIKSGSHLDSKDAYVTVMHVKFATKKGEHPLCKIDSYMKCSELKWVQLEGDQQKLLLLFDIKRRQAY

SEQ ID NO: 50713 - protein, 151 aa, Zea mays; identical to SEQ ID NO: 41374
  Clone ID: LIB3357-008-D11_FLI.pep

SEQ ID NO: 50714 - protein, 338 aa, Zea mays
  Clone ID: LIB3632-025-H6_FLI.pep
LLPAAMGGETHLSVQELAASLGALPPEFVRSEQDQPGATTYRGAAVPDAPVIDMSEPGFGARMAAAAREWGLFQVVNHGVPSAAVAELQRVGRAFFALPTEEKERYAMDPASGKIEGYGTKLQRDLEGKKTWNDFFFHVVAPPEKVDHAVWPRSLAGYREANEEYCRHMQRLTRELFEHLSLGLGLHGSAMAEAFGGDGLVFLQKINFYPPCPQPELTLGVAPHTDMSTLTVLVPNEVQGLQVFKDGQWYEAKYVPDALIVHIGDQIEIFSNGAYKAVLHRTTVNKEKTRMSWPMFVEPPGELVVGPHPKLVTEESPAKYKAKKYKDYQHCKINKLPM

SEQ ID NO: 50715 - protein, 136 aa, Zea mays
  Clone ID: LIB4073-020-H10_FLI.pep
CSWSSRRRRAGRRWCTCRRTRWCGRWRRWSGGWGRWGGSATTRTEASCSSTSATAAPTSSPSRATSPTSAPPTCTTSSSRTATTSRSSTPNKLYQLAASCTHPSSTIDLLISPIRHACVACASSVQLLIDMPAAVI

SEQ ID NO: 50716 - protein, 140 aa, Oryza sativa nipponbare
  Clone ID: LIB3432-012-D10_FLI.pep
TSMRSWRGSSGGGVTDLEDVAGLDDDVVHVDELEAGEVAGHGDEVDGGALVELEEARVVEVPLPPELPQPPLQNLVARHHLAARHVHKHLPSPTSTTDTAPSRRRLAICPPHHPILKHPHPCHIYNIYMFFFNSSLLDHS

SEQ ID NO: 50717 - protein, 134 aa, Oryza sativa nipponbare
  Clone ID: LIB3599-006-H1_FLI.pep
WNVNAHSLVYMIQGRSRVQVVSNFGKTVFDGVLRPGQLLIIPQHYAVLKKAEREGCQYIAIKTNANAFVSHLAGKNSVFRALPVDVVANAYRISREQARSLKNNRGEEHGAFTPRFQQQYYPGLSNESESETSE

SEQ ID NO: 50718 - protein, 252 aa, Oryza sativa nipponbare
  Clone ID: LIB3434-008-E2_FLI.pep
KARLGAAIDCYTEAIALCPDVAVYWLNRGLCHFKRKEWAKVEEDSRRALALDDTLVKGHYLLGCAMLEKEQCALAIKEFNKALDLLKSSNLGDKMAEDIWQVLAKAKYQDWEIHSTKRVWKMQSLKEACENALQEHHFLSGTLVGDGSTNEYTDQLKLLSEVFTKATIDDTPTDVPDYLCCQITFEIFRDPVITPSGITYERSIILEHLCKVGNFDPVTREPLKEHQLVPNLAIKEAVQAYLKNHSWAYKLN

SEQ ID NO: 50719 - protein, 157 aa, Oryza sativa nipponbare
  Clone ID: LIB3598-014-G11_FLI.pep
AEDIWQVLAKAKYQDWEIHSTKRVWKMQSLKEACENALQEHHFLSGTLVGDGSTNEYTDQLKLLSEVFTKATIDDTPTDVPDYLCCQITFEIFRDPVITPSGITYERSIILEHLCKVGNFDPVTRELLKEHQLVPNLAIKEAVQAYLKNHSWAYKLN

SEQ ID NO: 50720 - protein, 322 aa, Zea mays
  Clone ID: 700084757_FLI.pep
RSSNVAATGSLGNAARPDVSFRYRGAESCKKVAASLKSCEPWGNRAFWTNAAGPGWKLSFAVEPWTKGFSTSCAAPYSAGATEHQLSIDEKVDNSTVASDSDGKSPVSEKLKFLSGSCYLPHPDKEATGGEDAHFISIDEHVIGVADGVGGWADVGIDAGLYAKELMRNSMSAIKDEPEGTIDPTRVLEKAYMSTKARGSSTACIITLKDQGIHAVNLGDSGFVVVRDGRTVLRSPSQQHDFNFTYQLESGGGSDLPSSAQVFHFPVAPGDVIVAGTDGLFDNLYNNEISGVIVEALRVGLEPQVAAQKNCCPGSTKSHRQK

SEQ ID NO: 50721 - protein, 225 aa, Zea mays
  Clone ID: 700441260_FLI.pep
ASLSPSLHLPCNSRTGFLGKTRGIRPCVFPAGRVGFVRTVVECKESRIGKQPIEVPSNVTLTLEEQFVKAKGPLGELSLSFPGDLKIVKEESGNLRVYKTAETKRANQMHGLFRTLTDNIIVGVSKGFDKKLQLVGVGYRAAVEGNDLVMNLGFSHPVRMAIPEGLAVKVEENTRIIVSGYDKSAIGQFAATIKKWRPPEPYKGKGIRYMDEVVRRKEGKAGKKK

SEQ ID NO: 50722 - protein, 183 aa, Zea mays
  Clone ID: LIB3079-007-G2_FLI.pep
VQLSSPLSAIREHVVQTRPSAPVNELQPVQIECLPEVSVSTAGTAAENIQQVQQSSKDIQSKSQGASTRSCTKVHKQGVALGRSVDLSKFTDYGELKAELDKMFEFEGELVSANRNWQIVYTDNEGDMMLVGDDPWEEFCNIVRKIYIYTKEEVQKMNSKSSVPRKEEPPAAGEGCAAAAANE

SEQ ID NO: 50723 - protein, 259 aa, Zea mays
  Clone ID: LIB3067-046-F7_FLI.pep
QTLAASCKFQSSGICAMASETETFAFQAEINQLLSLIINTFYSNKEIFLRELISNSSDALDKIRFESLTDKSKLDAQPELFIHLVPDKATNTLSIIDSGIGMTKSDLVNNLGTIARSGTKEFMEALAAGADVSMIGQFGVGFYSAYLVADRVVVTTKHNDDEQYVWESQAGGSFTVTRDTSGEQLGRGTKITLFLKDDQLEYLEERRLKDLVKKHSEFISYPISLWTEKTTEKEISDDEDEEEKKDAEEGKVEDVDEKE

SEQ ID NO: 50724 - protein, 169 aa, Zea mays
  Clone ID: LIB3595-040-A6_FLI.pep
SSSRSKKGAHASRQARREPIDRELARDGEVFQDDGGGSSAGLGPGRVDRRGEEHQDHDDGEEGRRGGAAADLPALRPPRRRRVPGVRRPPRRQHSWQQHSRVQHARQRQQPTRVQLARQRQHAPLRRRLPGLQRLRRHARVAHRRLRPRARQQALNANKRGSRVVLLLL

SEQ ID NO: 50725 - protein, 112 aa, Zea mays
  Clone ID: LIB3912-053-C2_FLI.pep
FTQCMDKRGAWAKREEKKREKRTAKRYPHLSRYIPTSAGSCSCCISCCGGGGTLSLSLSLTHSLTHSPQDFIKRKTGSPLSRVLSSQSSSSSSSPLLLTLVAACCCHLSPQP

SEQ ID NO: 50726 - protein, 414 aa, Glycine max
  Clone ID: 700558525_FLI.pep
QRVFPSLPLHFLYRRPQTTPFSVLLCKRRSRTNQKKKRKSVIAVVVLFPVRFISMDRAALTVGPGMDMPIMHDSDRYDLVRDIGSGNFGVARLMQDKQTKELVAVKYIERGDKIDENVKREIINHRSLRHPNIVRFKEVILTPTHLAIVMEYASGGELFEKICNAGRFTEDEARFFFQQLISGVSYCHAMQVCHRDLKLENTLLDGSPAPRLKICDFGYSKSSVLHSQPKSTVGTPAYIAPEVLLKQEYDGKLADVWSCGVTLYVMLVGAYPFEDPNEPKDFRKTIQRVLSVQYSIPDGVQISPECRHLISRIFVFDPAERITMSEIWNHEWFLKNLPADLMDEKIMGNQFEEPDQPMQSIDTIMQIISEATVPAVGTYSFDQFMEEQIYDLESESDAESDLDIDSSGEIVYAI

SEQ ID NO: 50727 - protein, 269 aa, Zea mays
  Clone ID: 700448252_FLI.pep
PAASDLSSPLTRKRKLPSSYQPAGRGSARTATMATAGGGAGHLKLLGAWPSPFVNRVRMALHLKGLEYENVEEDLTNKSDLLLASNPVHKLVPVLLHGDKPISESLVIVEYLDDAFPGAGQAVLPADPYERAVARFWAKYVDGKLHGMMVKALMGATEEERATATADALAAMDTLEGAFAECSGGKEFFAGDAPGYLDVALGGFIGWLRAWDKVGGVKLLDAGRAPRLATWAERFAALDVAKEVIPDPDHIAEFAKVLQARSAAAATSN

SEQ ID NO: 50728 - protein, 321 aa, Zea mays; identical to SEQ ID NO: 49420
  Clone ID: 700333260_FLI.pep

SEQ ID NO: 50729 - protein, 162 aa, Zea mays
  Clone ID: 700345412_FLI.pep
GFLWSLRRRRHPPVSTVSLQDKMVSFEMNDLKKIGLGLTGFGIFFSFLGIVFFFDKGLIAMGNILFLSGLGLTIGLKSTMQFFTKPKNYKGTISFGAGFFLVLIGWPFFGMLLEAYGFIVLFSGFWPTLSVFLQRIPIIGWIFQQPFVTSFLDRYRGKRVPV

SEQ ID NO: 50730 - protein, 58 aa, Zea mays
  Clone ID: 700430686_FLI.pep
KVGIINQTGPMCQQCVFVSSVTRGEYLCLCTRQQWLLATKPLWHIVIRLLYLFYMTLK

SEQ ID NO: 50731 - protein, 168 aa, Zea mays
  Clone ID: LIB3088-013-C6_FLI.pep
WWMHSRSAVRLGGSERIRWFIPKDFLYLVALLVDGERQHLHLQAGSGRLVLRESVPDVAVEGASDERDAAAECVHGGDGVPEHHPGRQHRHGHLEVAGHVEGDCRRGVDDVEDGEVEAEGQHPGGDDDRQRRSHGLVRPQPPQHGAALQRHGRHRQDQRGQRSHVVHR

SEQ ID NO: 50732 - protein, 220 aa, Zea mays
  Clone ID: LIB3594-003-B3_FLI.pep
QTRTNNILIIRKKRSWLEHALHIASSSGHTAACLARAISRAEGDLVVAVAAAGMGLGVVAGKQVGVWAAGPAAVEGHAGAAREEHGQVVAVDHRDVVEVLAAAAADGELGQRHGRLPRERAGECAAAVARLAAPAAAVEGAPRAPPHPAGLGPRRHVHGPRLPGVKLRAAAHRGGRRPHRRAAVVGDGECGRPRTGGHQGRDEEQEGRGSSSPGRHGCYS

SEQ ID NO: 50733 - protein, 300 aa, Zea mays
  Clone ID: LIB3354-095-F4_FLI.pep
RRRPIRSLARHATTAAATHAMAPPDSISTCSSLPLAAAPMSEPTPFPFAASPLPNPLVATASFLQHHLSRLASHLNVPRPALAAAAARTPGPQGASLSLSLAPDEVARALTGTPVFTVCNSSNEFVLVSDPATGLRSLGLLCFRSEDADALLSHVRTRQPVLGKGAKVVPITLDQVYMLKAEGIAFRFLPDPLQIKNALEMKSGLTAFDGVPVFQSDLLVVKKQKKRYCPVYFQKEDIERELTRASKGSRGSALSKKIMVGSLEDVLKKMEINERDSGWDDLIFIPPGKSLNQHINEVSA

SEQ ID NO: 50734 - protein, 327 aa, Zea mays
  Clone ID: LIB3587-215-G5_FLI.pep
DAVELMFEPDALRWLARAGVSRATAVLQVCSSIAFDKGVESCLKYIEAVPWSESEEEKLKHVFARCTFGESVSKDVLARLQQQCASGSEDLAVQLVESITSGANNGARKEMQSLVSGLLSRSSVYHKDLSGVNKGGLYRICRSCLSSLVELFMEDSDGGQAMAPSGRRPMVERISQQTENLNWLLDILLNNDMAEEYVELWGTQEELIRMHERASPMFRYELSRVSASVFMALGRGRIQCPSDTRSQLFRGWFRPMLVDFGWLQRCSKGLDVRVLEENLGQALLTLPLHLQQSLFVEWFQCFASRGTGGCPNLSRAFQVWWRRSFVN

SEQ ID NO: 50735 - protein, 186 aa, Zea mays
  Clone ID: LIB3180-013-H3_FLI.pep
HDHNYDIAARPPRAQNSNTNVNERLLLLGVTSFGLLDTTDLLGPVLPLLHLLAGLLNLSSKTIPDEAVFRLELLGSLEVVVDEAETSGLSSSEVGAELEDKDGVGVLHLVRLGKPLLQLRLGDVGAAGVDHLKHELLAGQEAVGHELAGAEGDRRGGLGVRHGSTDRAAAGEDVEVEVVAARQERA

SEQ ID NO: 50736 - protein, 280 aa, Zea mays
  Clone ID: LIB3279-060-C7_FLI.pep
AYPNHDSGGKRTDTMVALTAGISVATGVVFSPAGRRRGRGHAAFRCSSSSAGERQALFSRIAPVYDHLNDVLSLGQHRTWKRICVSWSRAKMGDRVLDLCCGSGDLAFLLSQKVGLDGEVMAVDFSSQQLQTAAGRQEQRWKLCYKNIKWIEGDALDLPFTDCYFDAVTVGYGLRNVVDKPKAMQEIYRVLKPGSRASILDFNKSSSLFTASLQSWAIDNVVVPLASGYGLTEEYKYLKSSISQYLTGEELEKLAREAGFCAAKHYELGGGLMGNLVATR

SEQ ID NO: 50737 - protein, 110 aa, Zea mays
  Clone ID: LIB3279-209-F6_FLI.pep
PPVGDSQWPSPATPTTRRRTIPRRPPWCASTRRSLSSGRQSPRQHLAARAPSSPSATSRAGEPPGRPPRPASSPSASWPRCLAIVMQGSKFSSCKYQGGQTSSWLLELSG

SEQ ID NO: 50738 - protein, 182 aa, Zea mays
  Clone ID: LIB3608-024-D10_FLI.pep
HKQNHTTPSVHHNSQHNSHVHLHAEVQTVSLHFGLSFIIHVLLGDLLKRHALGLRHEHRHEHAQEVGSGEHEERVADADARRVAMVGLLGVLRRVQEPERADYGAGLAGRCRYAVARGPEPRREDLGRHDEGGAVGPEVCEEEGEPVEDDEAGVVGRLGPVLVRHPEREHEHGHHEEAHDLD

SEQ ID NO: 50739 - protein, 199 aa, Zea mays
  Clone ID: LIB3959-019-D7_FLI.pep
DELPMQAAIDQSPHLRFRAGMDDKSCYVATGLSLAAIRLITMDDVPGLGYLQCVINETLRLYPVAPLLLPHESAADCTVGGYDVPRGTLLFVNAYAIHRDPAAWEEPDEFRPERFRDGKAEGRLMLPFGMGRRRCPGETLALRTAGLVLATLIQCFHWDRIDGAEIDMTESGGLTMPRAVPLEATCKPREAMRHVLQQL

SEQ ID NO: 50740 - protein, 191 aa, Zea mays
  Clone ID: LIB3912-007-B11_FLI.pep
PDVGHILLDGVDIRKFQLRWLRQQMGLVSQEPALFNDTIRANIAYGKDGQATESEIVSAAQLANAHKFISSALQGYDTMVGERGAQLSGGQKQRVAIARAIVKDPRILLLDEATSALDAESERIVQDALDRVMVNRTTVVVAHRLSTIQNADLIAVVRNGVIIEKGKHDALVNVKDGAYASLVALHSAASS

SEQ ID NO: 50741 - protein, 167 aa, Zea mays
  Clone ID: LIB4071-018-F1_FLI.pep
KDGYPTIPSYGSIWWYRALQLGKFLSVIRWLPSGSKGVVVDIAAEGLSHRVVLLDGVDVQALELDHRLHVALEGVELPQPRDLSSSLGLLGDLGQLAVAALVVEQRVGGSLRRLEPVQCPLRGGPLRLPLFPPVVLLGGEGGLVLEEVVPCPAAEHEADEELEQVQG

SEQ ID NO: 50742 - protein, 273 aa, Zea mays
  Clone ID: LIB3689-222-A8_FLI.pep
LFAVDGAYRGKKGRAMAGAFAFRLVPRLAAEPAARGKGGGGGANRDAGSRALVSKKPNKQQHLWIRKETAGSGKKALRLIDAVRYTLAIDTVSKLPNEREAIYGALDKWSAFEPEFPIIAAAKALGMLKRRRQWLRIIQVTKWLMSKGQVLTWTTYDTLLLALLMDKRVDEAESVWNTVIQTHTRSVPKRLFSRMILIYDIHQRPDKVLEIFADMEELGVRPDEDTARRIGKAFVASGQEEKEKHVLEKYLKKWKYIHFNGERVRVRRDGPLA

SEQ ID NO: 50743 - protein, 202 aa, Zea mays
  Clone ID: LIB3357-030-B12_FLI.pep
EDAVKKVFQRALQYCDPKKLHLALLAMYERTEQYELADELLDRMTKRFKTSCKIWLCRIQFALKQGKDVEYIKAIVNRALLSLPHRKRIKFLSQTAILEFKCGVPEEGRSRFELILREYPKRTDLWSVYLDQEIRLGDVEVIRALFERRVACLTLPPKKMQFLFKKYLNFEKSLGKDNERIQLVQQKAIEYVQSSLPSQDNS

SEQ ID NO: 50744 - protein, 145 aa, Glycine max
  Clone ID: 700648724_FLI.pep
LESHIVRYNTLRHEAFKFVDEGARSAETYDVAMDALQEAAKRVSQGMQNEGKIPINNGKVRSHVLNDESHANYTSGCQEESLSQHMSKDDLDKNIRKLMNELECANRKCEIYRSNLLSVLKAVEDHKLELSVKVENIKISMKDGI

SEQ ID NO: 50745 - protein, 641 aa, Glycine max
  Clone ID: 701145504_FLI.pep
GTDLPAIMKCFSVSLASLWVLLALFSLSVSSQNISESGLQQASLPPRGWNSYDSFCWTISEDEFLQSAEMVSQRLKAHGYQFVVVDYLWYRKKVKGAYPDSLGFDVIDEWGRMIPDPGRWPSSIGGKGFSEVANKVHSLGLKFGIHVMRGISTQAVNANTPILDITKGGAYQESGRVWHAKDIAMPERACAWMPHGFMSVNTKLGAGRAFLKSLYEQYAAWGVDLVKHDCVFGDDLDLNEISYVSEVLSVLNRPIVYSLSPGTSVTPAMAKDVSGLVNMYRITGDDWDKWEDVKAHFDVTRDFSTANMIGGKGLKGNSWPDLDMLPFGWLTDPGSNEGPHRFSKLTLEEKRTQMTLWSLAKSPLMYGGDVRRIDPTTYELITNPTLLEINYFSSNNMEFPYITSSINLKHPGGKERRLKKGIHSLGLTSCSESKARGWSIESLNQDLERICWKKGLENKHQAPFCVHKRELQFRLDGVSMYQEDYRGKHQLVATDRMKFCLDASPRRKVTSKEFKRGTFSPCRWDSNQIWELNSNGTMVNSYSGLCATVEYIEANVNSGGIRSWIATGRTGEIYLAFFNLSEQKTEIYAKTSYLAKVLPDKSITSCKGEEVWSGTDVITTQGTISMNVEIHGCALFVLNCN

SEQ ID NO: 50746 - protein, 547 aa, Glycine max
  Clone ID: 701055604_FLI.pep
VWTVMSVNNNNPSKGIGASSSSFGNAGVPSNSIPSNPGFSQSQGQAQIPVGYQGQFPLSQAHAIVQAQSKAQAQAQAQAAAAAHAQLQAHLQAQGLSLNQNQAGGLGVSSPLISTPGNASGKRIPLKPPMRPVGFSPPNSFSPLRPVELTPAARRKKQKLPEKQLQDKVAAILPESALYTQLLEFESRVDAALARKKADIQEALKNPPCIQKTLRIYVFNTFANQIRTIPKKPNAELPTWTLKIVGRILEDGVDPDQPGVVQKSSPLYPKFSAFFKRVTISLDQRLYPDNHIIMWENARSPAPHEGFEVKRKGDKEFTVNIRLEMNYVPEKFKLSPALTEVLGIEVDTRPRIVAAIWHYVKARKLQNPNDPSYFHCDQPLLKVFGEEKMKFTMVSQKISSHLFPPQPILLEHKIKLSGNNPAGTACYDVMVDVPFPIQRELSALLANVEKNKEIETCDEAICGIIRKIHEHRRRRAFFLGFSQSPVEFINALIESQSKDLKLVSGEPSRNAEKERRSDFFNQPWVEDAVIRYLNRKPAVGSDAPGST

SEQ ID NO: 50747 - protein, 61 aa, Zea mays
  Clone ID: 700046037_FLI.pep
EHHLHALFVISTPSVPSIGRFDFSRQITFGMHLDMHYVWIHRKTIYLEKPKHFIICNRGII

SEQ ID NO: 50748 - protein, 312 aa, Zea mays
  Clone ID: 700095514_FLI.pep
HVTRSGTHTLGVPMAAAAPTHAPVSSSACRAGFSSSGVSFPNFRSAAASAPGWRRREPYPAVSVVSSSPQSVAGAITVDTEVDTLLDSVKWDSKGLAVAIAQNVDTGAILMQGFANKEALAKTISTRKATFFSRSRSSLWTKGETSMNFINVHDIFLDCDHDSIIYLGKPDGPTCHTGAETCYYTSVYDALQSSKPNEGRQVMTTLYSLEDTISRRHEEKVTDGGGKPSWTKKLLLDNQLLCSKIREEAGELIQTLLENEDQSRAASEMADLLYHAMVLLRVKDVKMEQVLEVLRKRFSQSGIEEKASRNKS

SEQ ID NO: 50749 - protein, 129 aa, Zea mays
  Clone ID: LIB3595-007-C11_FLI.pep
PSFARCGGEPAMAKSLRSKREKRLRTLRREIAEPFYDKKEAAKLAAQAAALAAAPLPVRGPPPSQDAGSSRAASSASAMDVEMSDAGNNRSKTFLRPLGSISKKKVQLHLKIKKDKRKARKKGKFSFKK

SEQ ID NO: 50750 - protein, 110 aa, Zea mays
  Clone ID: 700049368_FLI.pep
TGRSGRSTSGGGSSWRLGSVTTRSRTPEASRPSSRSSRDDHGSRVDHICMFVRVCVIINRSIMLFTLFISVCSCICGRAKINHGRPGFIKPMYPAVCNNAMENEPKRMLP

SEQ ID NO: 50751 - protein, 232 aa, Zea mays
  Clone ID: 700042840_FLI.pep
TDKPPPLFHLPLPGLAPMATALMVAATTSCSPGRAAPRLKPVASSSSSSSSSSARPRWPLAQQLPRLLATAAAAAVAAAPLPALAEQMEKAALFDFNLTLPAIATEFLLLMVALDKLYFTPLGKFMDERDAKIRGELGDVKGASEEVKQLEDQAAAIMKAARAEIAAALNKMKKETTAELEAKLDEGRSRVEAELVEALANLEAQKEEAVKALDAQIASLSDEIVKKVLPSA

SEQ ID NO: 50752 - protein, 329 aa, Zea mays
  Clone ID: 700043941_FLI.pep
HAYCIHNAEHQKQLRSDRHGCRHHGYHLPRARRQAGGWHEGRLRRGPHHHAQDRRQAQAGGVRQPMVRCRPRPVPGPAVRLAPELPDRRVPRRLRVGHRGAVGGPGDLRQEPRAGGDPLPLGHARRARVRVPGAARPQRRQVRRGGVVQGGLPDLQRGRARLPRQPEPGPRAEHPGHLGVPGGAHGRRRGVPRRRRAARRGGRPAVPWRQLRPARARRRPGGVRRAQGEGDQERPPRHVLHVRLLRAGYRHRQGPPREPRRPHRRPRQQQRLGLRHQLRPRQVSEGMMLACVYRRRTYSYVLQVAPVFVKGALGARDCTASVFVCMLWS

SEQ ID NO: 50753 - protein, 316 aa, Zea mays
  Clone ID: 700044109_FLI.pep
ATGMPGLGPLQKVCAALRVLAYGLPSDAVDEYIQIGESTARECLHHFCRGIIAYFSGWYLRTPNEADITRIMHHSESRGFPGMLGSIDCMHWEWRNCPTAWRGQFCGRNGRASMILEAVATYDLWIWHAFFGMPGTNNDVNVLHRSPVFDPMTSGRMPPVHYTVNGNAYNFGYYLADGIYPNWPTFVKAIRHPYEQKKVYFTQMQESCRKDIERAFGVLQARWAVLRGPAYGWDRNRLTEIITACIIMHNMIVEDEGAFAANTDFGDNTSTSQPPHLIAEGRAEWVINHLDLRSQERSCSLQNDLVEHLWARRGSM

SEQ ID NO: 50754 - protein, 165 aa, Zea mays
  Clone ID: 700151440_FLI.pep
QNTSRVRKAAASGESARGGGVGHDGEGEAEEAHSEGDRREDRRGDDEPGRRQGRAGGPAGAGQGRAREAGVPPLPHPGARHQVHADPPRGAPPQAPLRAGEAPQPALLRPRCCCRRRRHCRGHHLQAQARRPRQPQEVSLLAWLARPPAWGTIPFGFNPIRRPDL

SEQ ID NO: 50755 - protein, 84 aa, Zea mays
  Clone ID: 700153583_FLI.pep
NSQDLLRNGAGFLKSLLLLTAEVEFVGVVIHATSIFIHFLGTLLVKFFQQAEDAACDLAALLEALLGVRVLLLAVEEGNVLRAA

SEQ ID NO: 50756 - protein, 146 aa, Zea mays
  Clone ID: 700155190_FLI.pep
GEVATMENLALLWGIIGPGVSGAIFGAGWWFWVDAVVCSAVQVSFLHYLPGIFASLAALMFNCVNKDEIGYDYYSPYGDDSEWRVKLWLFVAYVVSFVCLAGSVGLLVQDALTNKGPSVWTGVAGVLQCVLVLISGLVYWTCHSED

SEQ ID NO: 50757 - protein, 96 aa, Zea mays
  Clone ID: 700093750_FLI.pep
TASAPSRSSATAASAVARSASARDTPSPPIRGREACRHIRAAWLTNTSTIGLGPVGIHDMHHDDFAVLHVPVFFFLSFYLSSFVYFLKMLVVCPCV

SEQ ID NO: 50758 - protein, 87 aa, Zea mays
  Clone ID: 700094145_FLI.pep
YYMFPLQRTHYLLRYKHRAILCLAMHGKLDTAANALVSWRSPAAWTQTWTRPPRRRLRPRRRARRRPAAPPATPALRGRGTRRRGPR

SEQ ID NO: 50759 - protein, 231 aa, Zea mays; identical to SEQ ID NO: 43391
  Clone ID: 700095115_FLI.pep

SEQ ID NO: 50760 - protein, 159 aa, Zea mays
  Clone ID: 700102915_FLI.pep
SQVAGRWRGRRREEDDLSTVDGDVIGVETETGLLVNEEIHDLLALVTLELDHLAGLFVIDLVAIASEFLPEEGQNLAGVELSRKTSDSGQRLATIALLNTNMDVILDLFGITGVVVGFGEGVEGLEIFDGHKLGCSGVSRGKKRCLGERRGLDRQQRKT

SEQ ID NO: 50761 - protein, 171 aa, Zea mays
  Clone ID: 700236652_FLI.pep
CLAASSVKQALTVAPLYYCSQASMAVPSKKRGMPALGWWLMAVGTLRSAFTWSCFFGSSASFCSATYSEIQVIGVHGRTVAVWTLLSCTLCFLCAFNLDSKPLYAATFLSFVYAIAYLIVECVVYHTMSAASLVPFTFIAVISVVWMLLQWNSDGHSSPSRPRRGSTSKQP

SEQ ID NO: 50762 - protein, 333 aa, Zea mays
  Clone ID: 700239011_FLI.pep
MEERYEALKELGAGNFGVARLVRDKRTKELVAVKYIERGKKIDENVQREIINHQSLRHPNIVRFKEVCLTPTHLAIVMEYAAGGELFEKICSAGRFSEDESRYFFQQLISGVSYCHSMEICHRDLKLENTLLDGSPTPRVKICDFGYSKSALLHSKPKSTVGTPAYIAPEVLSRKEYDGKVADVWSCGVTLYVMLVGSYPFEDPEDPRNFRKTISRILGVQYSIPDYVRVSSDCRRLLSQIFVADPSKRITIPEIKHHPWFLKNLPREISEREKANYKDADAAEPAQAVDEIMRIVEEAKTPGDMSKVVDPALLAEMAELESDEEEADADDTY

SEQ ID NO: 50763 - protein, 178 aa, Zea mays; identical to SEQ ID NO: 41250
  Clone ID: 700241716_FLI.pep

SEQ ID NO: 50764 - protein, 93 aa, Zea mays
  Clone ID: 700244294_FLI.pep
TFKYADMDRYIANVLRTDDRTAVAKPNTLLAHYIDISLERKQHLNHEAGHPKGMRLVGYTLPPSCRKYVILHRDTQLNNADLNSLTRYERRGR

SEQ ID NO: 50765 - protein, 130 aa, Zea mays
  Clone ID: 700084361_FLI.pep
ENGQRVPIQASTKYQCTNNSLRAQHRQIYYEKDNTTICLFTLTPDAKDHMIPYRQQNVSLQDRVYLSISKPQFGELEVGLFVVIKESLLIRSIFLDKRAENRVAQQGFVTWELKKALLITTQKFLEVRVV

SEQ ID NO: 50766 - protein, 139 aa, Zea mays
  Clone ID: 700084624_FLI.pep
LHFLLTSIDCGFFTILYMIAWNGKHLRLDDKIKASEIVACRMKLTHMLIKSKQNSADPCNVVKKLDVNIKKYSVSSRKVITSKNLTMLMGLIDQEIEEINAKKRKRSGHPAGQPELKDDDGQLRANAVKARDAELGCEM

SEQ ID NO: 50767 - protein, 271 aa, Zea mays
  Clone ID: 700084655_FLI.pep
PKFTEEDNSKSLEGTAEASTRKIKSRSVLEKTIKKEKEHVEKAKTKKLKHTEKVSEALKGPSEASFPAPAGMVVRSSSRIANRKSKMEEEDNGSANPPKPKAEGDKDNPAGRSRAKSPRQKTKADTKKKTKETRAEKRRAPSPASQKDEEEQAYDAEGCSITKQRLSLRKKGAKTEEKQQTEESRYRGRAPPSSPERKEEYASDIEGCSMSFGTKQALSLHKNDICPEKGCCRKFFSHKYLLQHRKVHADDRPRNARGRAAAWRSSGHGLG

SEQ ID NO: 50768 - protein, 179 aa, Zea mays
  Clone ID: 700085831_FLI.pep
PEFTKQRTEVHEQTHHNTTLRYEIKQLEAGRTHAFKQLVVMDSTLCGVEQHACSCFIHITKQSFLEGAHVDANGVQVVPGPANAREEAHDGATPRLHGDGKGGVVAVPVRSERPVGLVKVRDELNGGYHGAVVVVDGAVCSGHLCDHLRLGELDLIRLSTGTTPGTSRALVAGRVDVGE

SEQ ID NO: 50769 - protein, 103 aa, Zea mays
  Clone ID: 700086190_FLI.pep
VAYRPIIKSPFWTVRGSDARSLCRRQPSTLYGCSRCQKERRRLLNWRRDGGEAGGGCGRPALLPPGGAAGRDPRPPRPPGRRAHLCALPHLAGPLEVALGALP

SEQ ID NO: 50770 - protein, 394 aa, Zea mays
  Clone ID: 700221931_FLI.pep
RGDPADAPAAMGIWDSILPGGGRRFIKRKDSDAGEAGRALEELRGSLYNDFHTSEGARRQQQKLCGPIVALTFNFVVAVGIIMANKMVMGAVGFNFPVALSLIHYLFAFALMSVLKALYLLPIASPSKSTPFSSLFALGAVMSFSTGLANISLKHNSVGFYQMAKIAVTPTIVVAEFILFKKKVSLRKVSTLVVVSFGVAVATVTDLEFNFFGACVALAWIIPSAVNKILWSNLQQSGNWTALALMWKTTPITIFFFIVLMPLLDPPGLLSFSWDFKNSSTIIISALFGFLLQWSGALALGATSALAHVVLGQFKTIVIMLSGYLVFKSDPGFTSLCGAVIALAGMSVYTYLGMKESAASGRRNSLNSRQNSHLKKPKAIIDGENPETKPMDSV

SEQ ID NO: 50771 - protein, 256 aa, Zea mays
  Clone ID: 700224362_FLI.pep
YSASRTAMSATPLPPPGPDGAVALLPPPGTDMTGICFRDQLWLDTYPLDRNLVFDYFALSPFYDITCNNESLRSRQIHPLDMSHLTKMTGMEYLLSEVMEPHLFVIRKQKRESPEKSSPMLAYYILDGSIYQAPQLCNVFASRISRAMHHISKAFTIACSKLEKIGNVETEPDAVASESKTQKEAIDLKELKRIDHILSSLKRKIGAAPPPPPYPEGYVPPSAEQEKAPDDVAASEAPPQLDPIIDQGPSKRPRFQ

SEQ ID NO: 50772 - protein, 139 aa, Zea mays
  Clone ID: 700158512_FLI.pep
HALPLPPHAGQSSTHRGSSCSSCHHTIFHHSHLQSTPPSANPLDPETTMAPGLKAAAKSTKPSEVPLTEYDKLRAENLMRNNQKLQRFDVTKLASILTILLQRAKVTLVKNLDLCMRSMKVKVLKMRKSISVQQDKETN

SEQ ID NO: 50773 - protein, 95 aa, Zea mays
  Clone ID: 700163949_FLI.pep
IHVKSGSIDPPLMLHLGDLTKIHLPHMASLDKARDLRVLIFSADSCRSVGAGWTLVCLQCGNLDGGVAAADEDLPRLHPRDRDRHLLLSNFKPKA

SEQ ID NO: 50774 - protein, 251 aa, Zea mays
  Clone ID: 700165317_FLI.pep
NLAEARAAAANRDEEGSRNAMPKSKRNRPVTLSKTKKKPGLERKGKVVAEIKDAVDKYSSAYVFTYDNMRNQKLKDLREQLKSSSRIFLAGKKVMQIALGRSPADEAKTGLHKLSKFLQGNSGLLFTNLPRDDVERMFREFEEHDFARTGSTAIDTVELKEGPLEQFTHEMEPFLRKQGLPVRLNKGVVELVADHVVCEEGKPLSPEAAQTLRLLGIQMATFRLYLVCRWSGDDFEVYKEGLMHLGADESS

SEQ ID NO: 50775 - protein, 150 aa, Zea mays
  Clone ID: 700169506_FLI.pep
ALLPKPQTQKTALHMEAKKKPSAPAAVGAAPPPPGNGYFSTVFSAPTAGSASDAKHADLYTMLNKQSSRGQNGRDGKSHSRPTYKDGKHAHPNEPSESPYFGSSVHYGGREFYSSVLRKQPANEPHTDYKGDNPDGSATRGDWWQGSLYY

SEQ ID NO: 50776 - protein, 415 aa, Zea mays
  Clone ID: 700172634_FLI.pep
LVLVWVGTMAATEASADKNAVFRKLRTKSDNKMCFDCNAKNPTWASVTYGVFLCIDCSAVHRSLGVHVSFVRSTNLDSWTPEQLKMMVYGGNNRAQAFFKQHGWTDGGKIEAKYTSRAADLYRQLLAKEVAKSATEDGNNSWPSSPVAASQASDQTAAFPDLKLTEVSKENVSEKEDSEIVRSPRVPTRSIKKPIGAKKPGNKTGGLGARKLTSKPNESLYEQKPEETAPVLPSSVIASTTARSKPHTSRFEYVENAPAPKTGSSSEGNLMSGHVAPPKSSNFFVEFGMDSGYHKKSTSSSSKVQIEESSEARQKFSNAKSISSSQFFGDQASFEKDTQVSLQKFSGSSAISSADLFGHPANNSSVDLSASDLINRISFQATQDLSSLKNMAGETGKRLTSMASNIITDLQDRIL

SEQ ID NO: 50777 - protein, 203 aa, Zea mays
  Clone ID: 700208893_FLI.pep
RRRTLLKVIILGDSGVGKTSLMNQYVNKKFSNQYKATIGADFLTKEVQFEDRLFTLQIWDTAGQERFQSLGVAFYRGADCCVLVYDVNSMKSFDNLHNWREEFLIQASPSDPDNFPFVLLGNKVDVDGGNSRVVSEKKAKAWCASKGNIPYFETSAKDGTNVEDAFQCIVKNALKNEPEEELYVPDTVDVVGGNRAQRSSGCC

SEQ ID NO: 50778 - protein, 403 aa, Zea mays
  Clone ID: 700209522_FLI.pep
RRCSPGRHRRRRPTRATRWSSRRTCGGPRPWPARSSPPSWRPWAPRPRPGSARGSEPPPPPPRPGRRIHHGERVLGLGRVVLVVGRARRGAGADAERVGRAEVGAAADHGVEVVVVEAGAPRGRVARRLQRVDLGVGQVAGARRGAGEAHGAARVDVGARGVGAAHGDVYPAVLLDLGLRLDGVPAAVEGDHVRVDDDGGDGPGVVRELLGDEHPRAAVLEHEEHERVPDDALEHDDLHHEAAGEVAVHALEQGDAHDERVGQRGEGEERDGPLQAAPAAEVAPRGEHGQHHELLQRVGGDEAQVHGVGVVGGDEVEGQQRHREERHEAVDPGALVRREDAPPPHRPVRQDHRHVQRHHGRHDVVEVRPRNHRGALTTLASSLTHQAAPGELNAARYTLRPPR

SEQ ID NO: 50779 - protein, 279 aa, Zea mays
  Clone ID: 700211751_FLI.pep
PRKPRRHGMGIVEEAHNLRVVGKGKRGVIVLAHGFGTDQSVWKHLVPHLVADYRVVLFDTMGAGPTNPDYFDFSRYATLEGYALDLLAILQELGVQSCIYVGHSVSAIIGALASISRPDLFTKLVLLSASPRYLNDVDYYGGFEQDELDELFEAMQSNYKAWCLGFAPLCVGGDMESVAVQEFSRTLFNIRPDIALNVAQTIFQSDVRSLLPHVSVPCHIVQSTKDLAVPVVVSEYLHRHLGGDSIVEVMPSEGHLPQLSSPDIVTPVLLRHIQHDIAV

SEQ ID NO: 50780 - protein, 187 aa, Zea mays
  Clone ID: 700212274_FLI.pep
IHFESHVTAGRRIVLTTNGCRKYNSEIPWSLLLAGTEESNMKQRNRSKEKTGSSRQQRGRRTDMLELRCVPTTCLCQQAKPRLLLAYLLAEALARGALRLALAAGEVLGLAHVGAVVAAHAQALEPVALRQAVPRLRHLGRPQLCGDEEEQEDEDGSRHASRQRHHPPWQLAPACSELRATQSVLTG

SEQ ID NO: 50781 - protein, 149 aa, Zea mays
  Clone ID: 700259159_FLI.pep
KMAPHPQEDKSDRHSSGAGASREQERRPSKAWGILIFGLIGVTTASFAITQVRKSMDWFYTQLNKVQSTSSWTWRYTSNNSSRGSFSEEAKKRYYQRMQQEYEEEQERVQRIRHMQSVFNRERNKFGRGYESWRENGPPRGYNYIPRDD

SEQ ID NO: 50782 - protein, 217 aa, Zea mays
  Clone ID: 700262255_FLI.pep
VVPASPSRSPCRFSCNQDAARIGPGGRRHRHVRAGGDGWHGALLHVRRVHAAQPGQHVRALPARARRHHRGRPAPRRRGLLPRLLLLPPAAAVLAPRRTRVARAHADPAPPNQPPARAAPRLPLRRRVRLLRAPLQAPPPQAPPPPRGAPRHRPRADAPSGVRRPRPVVRLLLPRAGQPRPVGCRRPAAPARAPPPHFPLPRAAPPQARPGFPRDPS

SEQ ID NO: 50783 - protein, 355 aa, Zea mays
  Clone ID: 700264671_FLI.pep
SHLLPPLHDLICSPLYMLHPFLLSEILGPAMAGFSSSVRPPDLAREREWYAIVPVLDVEKVGLTVHRRIRERGLRGDRGLHGDALGVEHVLRLLGLLPQPRQRLPDVVDALQRVVRAFHPLRLAHQHCVKADLLPGLDVAYAVVEENRLVRVDVGDPERLLHGVDVGLAQDGGLGKLGGGAGAGEVAGDVEDLGLPVSLRRARRVQGLEADDPLEAVLQAQPLQGSHGVDLVAVGEYEFADAQVLENVLENRVGLDVVVRQPPVDEGVVLIVIEAVADRPEASHRGAVVLVQQISQVLDLALVNTQLLDHVIFNVLLDMARDPGAQRIQGVVEVEEQTVELGLLDLVAAILELHA

SEQ ID NO: 50784 - protein, 196 aa, Zea mays
  Clone ID: 700333173_FLI.pep
AEPFAFVYISAEMGLTFTKLFRRLFAKKEMRILMVGLDAAGKTTILYKLKLGEIVTTIPTIGFNVETVEYKNISFTVWDVGGQDKIRPLWRHYFQNTQGLIFVVDSNDRERVVEARDELHRMLNEDELRDAVLLVFANKQDLPNAMNAAEITDKLGLHSLRQRHWYIQSTCATSGEGLYEGLDWLSNNIANKARSI

SEQ ID NO: 50785 - protein, 182 aa, Zea mays
  Clone ID: 700334779_FLI.pep
KEPRAREVTSLPEESPAPEVLLPAGGFFFRSSPSPLPGGIMIVCVAVVGHQNNPLYLQSFTEADDALKLHHIVHCSLDVIDERVSNPKRSAPTLNETFLGLLYPTENYKVYGYLTNTKVKFIMVTTDLDVKDADARNFFRKFHAAYVDAVSNPFHVPGKKIASRSFGARVSTIVKSFGSGSS

SEQ ID NO: 50786 - protein, 228 aa, Zea mays
  Clone ID: 700334874_FLI.pep
TMAARRSTSPARHGVLPALLLILCSSLPSLAAAYRPGDIVPMLRSGQYHGSRSVWFDVVGRHCPAFAVNREVLMPIPKPTGFTGADPYKITFQIGHEKFHVPWLYVINRKTSEVPLIDFHLKYSGNDILGVTAKVVDMPHHYVEVHPDIKKNFWDPQNWPKYVLVRYTWEEQSEIDVTGGFYVLFGSGLVLSFILAIYVLQSSQEKLTRFVREAVADSSLPDGVAKVE

SEQ ID NO: 50787 - protein, 54 aa, Zea mays
  Clone ID: 700379019_FLI.pep
TATCCAVNGVFLSFVLLLIFCYARSPACACGDDAGEPWWVLCFCCQWNCKTMFI

SEQ ID NO: 50788 - protein, 154 aa, Zea mays
  Clone ID: 700550275_FLI.pep
ARHETNPPSSNITTTNSSATAQALSPLMRRASWMSLGMMVTLLAWMAQRLVSSKSPTRYASAASCSAATADDWNRRSVLKSCAISRTRRWKGSLRMSSSVLFWYLRISRSATVPGRKRCGFFTPPVAGADLRAALVASCFRGALPPVDLRAVCF

SEQ ID NO: 50789 - protein, 171 aa, Zea mays; identical to SEQ ID NO: 46977
  Clone ID: 700347487_FLI.pep

SEQ ID NO: 50790 - protein, 171 aa, Zea mays; identical to SEQ ID NO: 46977
  Clone ID: 700351763_FLI.pep

SEQ ID NO: 50791 - protein, 219 aa, Zea mays
  Clone ID: 700381991_FLI.pep
ASPSRSPPPVAFVPSISGCVAGEPDTANRIRRQGEREEMGLTFTKLFSRLFAKKEMRILMVGLDAAGKTTILYKLKLGEIVTTIPTIGFNVETVEYKNISFTVWDVGGQDKIRPLWRHYFQNTQGLIFVVDSNDRDRVVEARDELHRMLNEDELRDAVLLVFANKQDLPNAMNAAEITDKLGLHSLRQRHWYIQSTCATTGEGLYEGLDWLSSNIATKS

SEQ ID NO: 50792 - protein, 130 aa, Zea mays
  Clone ID: 700356845_FLI.pep
AAVYDKLLVADDLQSFGEQLRKNYEETKELLLQVAGHKDVLEGDPYLKQRLRLRESYITTLNVCQAYTLKRIRDPSFQVSPQPPLSKEFTDESQPAELVQLNQQSEYAPGLEDTLILTMKGIAAGMQNTG

SEQ ID NO: 50793 - protein, 153 aa, Zea mays
  Clone ID: 700450039_FLI.pep
KYTDPFFFTDRPVHQCSALGDAGHKNAGEVRGQQLSKTYLIHMGRRPADCLKPHLRRPEILPLLNYNSTSVGEGRLVGEQRVPVDLVGRVLAEHEALVLVPRNLAEIQLSHVRHRRRHHRRRGGRGHLVVRPEPGAGTFVGGAVARRRRCRFQ

SEQ ID NO: 50794 - protein, 100 aa, Zea mays
  Clone ID: 700451805_FLI.pep
ELGSSTPSFSQENGIDHSMTPLSVSRSSAETAKEKPSEATSVISKLTEEKMSAVQQNQKLRQELELLRKESSKTGSGFSITFLFVVGLLGIVVGYILKRT

SEQ ID NO: 50795 - protein, 307 aa, Zea mays
  Clone ID: LIB143-047-A10_FLI.pep
SLSHKNVISLVGFCFKNDDLLLVYEYLQRGSLEEILHGKKECKSIFGWTERFSVAMGVARALDYLHSDNNSRPVIHRDVKSSNILISKCFEPKLSDFGLAVWAADVTSQMTCNDVAGTFGYLAPEYFMHGKVGNKIDVYAFGVVLLELISGRKPLCTGCPKGQESLVMWANSIIQGGKLRQLVDPNLPTEGHVDEVERMTLAASLCIRQTPQNRPEIDAVLKLLHGDNDTLKWARSQVGLSCESSDIDEFVMTPPAPRSNTNIQSYINLAFDVDDDSASVSSNDFIAANTSLEEYLKGRWSRSSSFD

SEQ ID NO: 50796 - protein, 43 aa, Zea mays
  Clone ID: LIB3150-104-E5_FLI.pep
LHLGVVKIHLFMFLHPFLDSATFFMSNSEFSYSTEVDKKGLPV

SEQ ID NO: 50797 - protein, 279 aa, Glycine max; identical to SEQ ID NO: 39337
  Clone ID: 700876171_FLI.pep

SEQ ID NO: 50798 - protein, 182 aa, Glycine max
  Clone ID: 700893192_FLI.pep
EKAKARALKRVVGDPFKKGVEQGPQIDVEQFQKVLRYIKSGIESKATLECGGDQIGSKGFFVQPTVFSNVQDDMLIAKDEIFGPVQTILKFKDIDEVIRRSNATHYGLAAGVFTKNVHTANTLMRALRVGTVWINCFDVFDAAIPFGGYKMSGIGREKGIYSLNNYLQVKAVVSPVKKPAWL

SEQ ID NO: 50799 - protein, 254 aa, Zea mays
  Clone ID: LIB143-025-H3_FLI.pep
IILVQKRSTVGHTHPPVHQQHKRKQKSTPPIHPTRHATTYALRFYCCYSADCRLLGDGDLHGLGLLLRRRQLLDGDGEHTVLAARRNAARVRVLRQPELAHERPRRRAALQPDVSAPFAVHVLLLIALPLPAAALHHQHPVLLQRHLDVGLGEAWHVEHEGVLAGALHDVHRRSAAAAEPVDASVAVAVRRVVAGRPPVAVCGGEAVQHLRQVEEAGHGRVEQLRHGSHSHLLPRSNCVRVARSASSSLALALR

SEQ ID NO: 50800 - protein, 158 aa, Zea mays
  Clone ID: LIB148-009-F7_FLI.pep
LEIMSSVGGALLLLLVLLLEVRGIVVACDEDASLEALCSCASHLGAPLADHEREVAALLVRPAACALLRVPVVDGLLLAPPEDGLLGGGVPVVVAPEQALAVLVAAVDELAVLAHAVGPAPRLPRQLPVPLHGRHAVARAELVVGVHELPGDALVPPR

SEQ ID NO: 50801 - protein, 179 aa, Zea mays; identical to SEQ ID NO: 45243
  Clone ID: LIB143-042-H6_FLI.pep

SEQ ID NO: 50802 - protein, 110 aa, Zea mays
  Clone ID: LIB189-008-G8_FLI.pep
NQLTRMKPATVALLILLNMMCIVAYFDHGTMAEETTLLANSYGRNEGTKGIHHGRKLMDNSIGSNREYSIDDMSHPKAPHTELKQPSYLAPGCSSNPLKQPSNLAPGCIP

SEQ ID NO: 50803 - protein, 185 aa, Glycine max
  Clone ID: 700852695_FLI.pep
PTPTRAEVADVSEAVRQRADALMLSGESAMGQYPEKALTVLRSVSLRIEKWWREEKRYEAMLLPSVGSYFSEKISEEICNSAAKMANNLEVDALFVYTKTGHMASLLSRCRPDCPIFAFTTTSSVRRRLNLQWGLIPFRLSFTDDMESNLNRTFSLLKARNLIKSGDLVVAVSDMLQSIQVMNVP

SEQ ID NO: 50804 - protein, 108 aa, Zea mays
  Clone ID: LIB3076-003-E1_FLI.pep
VVVVEWMDGETSESQSHSLGPLFLAVERLRRRRGGSDDAGRRQRRAVDLRADAGPHLLPAPVLAEEVAAEAEEDGEEDEGQRDHQHEPHWVARRCRSLKSKQRCFEAL

SEQ ID NO: 50805 - protein, 249 aa, Zea mays
  Clone ID: LIB3076-004-H1_FLI.pep
RVRGATMRVASSPAEAGNSRSSVESNLRSSNAAHARRSSAGVTSNGVHKILFPDGHQSDDEPPSGDMRYGTGRFYKENGSIEGRLGNCDSDSNHHTFDEASVGKFENGGTHSGLDLYGESMALLQSAQEALENEIQKFVEIRKETDEDSTAHQSEIEWSSSPVEELNEKIKMVELKLEEATMLINERDSEILELDALSHVQPQNTVACNNYPLSLQSDVDRLFLEKMEAEIQCFILTRASQDWKLLTMD

SEQ ID NO: 50806 - protein, 199 aa, Zea mays
  Clone ID: LIB3075-019-E3_FLI.pep
IPCGSRQSESLSHEGQELLQFTRCRQELPHSLTPSGAVVAHGGGGHPEGAVPGVAEARVGAGLDPAAVGDEVVAAGAAEQARVHGHRAGEALGAEAHGADGAAAGVAHRHLEHRVVPGPVARVGLRHRHARRRAPGGGGGGRGRRVRRRWPSPLRLDEEQEERREDNQNQQLDGGGRRLCHRFFLLSVHKERLWVLGLV

SEQ ID NO: 50807 - protein, 132 aa, Zea mays
  Clone ID: LIB3076-015-E5_FLI.pep
KIRTVSTEFSFAVHLIFLQLRGRQKAIKRPHVRHASKARTNNRDNNTVARTLIIYHPPALQLHATRACSVVADLGGGHGDADGRVLLLRLGGPVLGARHGGAGAADGCHGRRSSREHDGAASVGGGPGLGCC

SEQ ID NO: 50808 - protein, 110 aa, Zea mays
  Clone ID: LIB3070-007-B2_FLI.pep
NLDGSVYSVLIHGHCRAGNVMKALSFHKQMLQRGFAPNSTSTISLIRGLFENGMVVEADQVIQQLLNCCSLADAEASKALIDLNLNEGNVDAVLDVLHGMAKDGLLPSPR

SEQ ID NO: 50809 - protein, 98 aa, Zea mays
  Clone ID: LIB3070-009-E7_FLI.pep
DCIHGKLWPVMDVCRPHALQEHESDVRPEVRWEEEERKHMRHCLQNTIQWVKRKSTHASATVRGSQLGERGNLINSSRVGSPRRHENEKKNTSICSYA

SEQ ID NO: 50810 - protein, 172 aa, Zea mays
  Clone ID: LIB3078-026-E2_FLI.pep
QLLSRGNERSLESAMESTALMTARLPLLTSGSRSKPLPFASFTTAACRLASAPCSGSGSVVLLSRRSRDYAGVGSLVSAAAAPGDTADAGSESILLSVQGMMCDGCAASVKRILESQPEVTSATVDFKEASAVVWTTDEAKGTQGWQKQYGEKLAKHLGTCGFESRLQGKTD

SEQ ID NO: 50811 - protein, 97 aa, Zea mays
  Clone ID: LIB3078-026-F7_FLI.pep
AKLERRSLGVRRISDARRRPLCSVSPCIFIDVASVVNLAVAALKLGVLVQNRRHPVIAGRCAIVCLCFIIYAMALVIVPSLILCVVNGRSVDCKCQF

SEQ ID NO: 50812 - protein, 211 aa, Zea mays
  Clone ID: LIB3078-047-C12_FLI.pep
RKTSERGEMLRHAARRLVSRTAAAPTARRALVTAEVPAEAAEDSTFVEAWKKVAPNIEPPTTPLFLMQPRPPTPATIPTKLTVNFVLPYKSEIANKEVDMVIVPATTGQMGVLPGHVATIAELKPGVLSVHEGNDVTKYFVSSGFAFVHANSIADIVAVEAVPVDQIDPAFVQKGLAEFTAKLGSASTDLEKAEAQIGVDVHSALNAALTG

SEQ ID NO: 50813 - protein, 91 aa, Zea mays
  Clone ID: LIB3076-011-B12_FLI.pep
ENMYAPSYNSRCRPQHQVRPLKRDLNSGGYPNKIVLLPRTPTPGHDKGCGEEVAASHAIMSCSTSSLLLQKKDKSLNKGVLQPDFCNILNN

SEQ ID NO: 50814 - protein, 324 aa, Zea mays
  Clone ID: LIB3076-011-H8_FLI.pep
PGPAARKSIWSRGQCCGAWFHQNSRKKRPRRSRDGPTSVAAVIQRWAERNKHLEYEESEEAKRPRKAPAKGSKKGCMKGKGGPDNTQCGYRGVRQRTWGKWVAEIREPNRVDRLWLGTFPTAEDAARAYDEAARAMYGDLARTNFPGQDATTSAQAALSSTSAQAAPTAVEALQTGTSCESTTTSNHSDIASTSHKLEASDISSYLKEKCPAGSCGIQDGTPIVADKEVFGPLEPITNLPDGGDGFDIGEMLRMMESDPHNAGGADAGMGQPWYLDELDSSVLESMLQPEPEPEPEPFLMSEEPDMFLAGFESAGFVEGLERLN

SEQ ID NO: 50815 - protein, 506 aa, Zea mays
  Clone ID: LIB3078-001-D5_FLI.pep
GPPCFHPPVHQFRGPPMFNLRPQMKLNQPGVSYPMHDAVDRFSTHMHPFGWPNHLDESCPPHMQVWNGGSSVFPGEPYIYGRQEWDQNRPHGGSRGWELTGDISKGPNDVPDAELLIAKKDPYSAITAVSDSGGQHNLQPQAEQKEIGHLTAEKFETKDDSKSSKSLESLQGVQHVTSMLTKNGAVFCKDYLARINVSHDLVESELYKRCISLLGDLGVTKASHLVRNGIQQDNENIEKMSTKYGHLNPFSSRYLKSDSTIFQRALALRNNQTRKGLIIVSASVKMEANMDVLEDDHGKEMLEQVVSNPALQRHTEVMEEGSLSKQELGDGIEGTIPATIGSGGLDAPPEIPQPEVVVATTAITQFNKDMEDVLPPAIEDGALQATLEHAVGILEVTPGDGLGNVAPSSGDDMEIMPSAMTEPRLGKETAPVASPPDSQEKPSIMHDSETGMEVDKVIDDIHGDGRVSSILGTKLDVAASDGDSEALLVESRVNLSRIPNSPESTH

SEQ ID NO: 50816 - protein, 94 aa, Zea mays
  Clone ID: LIB3078-002-C3_FLI.pep
ADQSKAKILKYHIVKTPRSVYKTVPNCEPCRPLQRSPIEGFYLAGDYTKQKYLASMEGAVLSGKLCAQSIVQDYSRLALRSQKSLQSGEVPVPS

SEQ ID NO: 50817 - protein, 62 aa, Zea mays
  Clone ID: LIB3075-006-G10_FLI.pep
AATFECEGHLFTNRRLIQQQRMFPNSTTQKLENYSWQCAKRRSHAIMIHASVSLSPKSVQSK

SEQ ID NO: 50818 - protein, 134 aa, Zea mays
  Clone ID: LIB3075-056-C9_FLI.pep
EVPCDQHADRYLQEKGEALSRGVQEPAAGARHAGGPGVRVRGQHGRRRRLGRRGGGAGRRPAGHVRLPRGAQPAQPARHGLRLPRPPPGLAHPSPCWVVLLDHPTAWQCKLVGWFAHASSVNKASKQCNATEVL

SEQ ID NO: 50819 - protein, 263 aa, Glycine max
  Clone ID: 700740124_FLI.pep
VDNTDTHHLSHILKMLTFNLNAISSSFSVVPFHANYPLSTQTQLLVPSNLSYSFATTGTRKFKSFQLKAGFWESIKSGLMKNNSMQVIDPPSADEEDEEPLPQEFVLVEKTEPDGTIEQIIFSSGGDVDVYDLQALCDKVGWPRRPLSKLAAALKNSYIVASLHSIRKSPGSEGNEQKRLIGMARATSDHAFNATIWDVLVDPGYQGQGLGKALIEKLIRTLLQRDIGNITLFADSQVVEFYRNLGFEADPEGIKGMFWYPNH

SEQ ID NO: 50820 - protein, 394 aa, Glycine max
  Clone ID: 700670756_FLI.pep
FSFLHRSILLLLKMQIFVKTLTGKTITLEVESSDTIDNVKAKIQDKEGIPPDQQRLIFAGKQLEDGRTLADYNIQKESTLHLVLRLRGGMQIFVKTLTGKTITLEVESSDTIDNVKAKIQDKEGIPPDQQRLIFAGKQLEDGRTLADYNIQKESTLHLVLRLRGGMQIFVKTLTGKTITLEVESSDTIDNVKAKIQDKEGIPPDQQRLIFAGKQLEDGRTLADYNIQKESTLHLVLRLRGGMQIFVKTLTGKTITLEVESSDTIDNVKAKIQDKEGIPPDQQRLIFAGKQLEDGRTLADYNIQKESTLHLVLRLRGGMQIFVKTLTGKTITLEVESSDTIDNVKAKIQDKEGIPPDQQRLIFAGKQLEDGRTLADYNIQKESTLHLVLRLRGGC

SEQ ID NO: 50821 - protein, 626 aa, Glycine max
  Clone ID: 700672271_FLI.pep
KIVNKCGGLPLAIRTVGNILRAKFSQHEWVKILESDMWNLSDNDSSINPALRLSYHNLPSYLKRCFAYCSLFPKGYEFYKDQLIQLWMAEGLLNFCQINKSEEELGTEFFNDLVARSFFQQSRRHGSCFTMHDLLNDLAKSVSGDFCLQIDSSFDKEITKRTRHISCSHKFNLDDKFLEHISKCNRLHCLMALTWEIGRGVLMNSNDQRALFSRIKYLRVLSFNNCLLTELVDDISNLKLLRYLDLSYTKVKRLPDSICVLHNLQTLLLTWCYHLTELPLDFHKLVNLRNLDVRMSGINMMPNHIGNLKHLQTLTSFFIRKHSGFDVKELGNLNNLQGTLSIFRLENVTDPADAMEANMKQKKHLEGLVLDWGDKFGRRNENEDSIIERNVLEALQPNGNMKRLTVLRYDGTSFPSWFGGTHLPNLVSITLTESKFCFILPPFGQLPSLKELYISSFYGIEVIGPEFCGNDSSNLPFRSLEVLKFEEMSAWKEWCSFEGEGLSCLKDLSIKRCPWLRRTLPQHLPSLNKLVISDCQHLEDSVPKAASIHELELRGCEKILLKDLPSSLKKARIHGTRLIESCLEQILFNNAFLEELKMHDFRGPNLKWSSLDLQTHDSLGTLSITS

SEQ ID NO: 50822 - protein, 340 aa, Zea mays
  Clone ID: UC-ZMFLMO17118B08_FLI.pep
YLATRSKQRGQSYERPASFAMNMGGVSPSTVRCKHCSTQLTVCPGERAIQCTQCCGVTRIRRRRVQRPAAAPPTTGFPRARGKKRALLIGITYAGTRRGCGQLRGALNDVKCMRQLLCQRFAFPSDCIIMLTDDQKDPFRLPTKDNIRLGMQWLVEGSSEGDSLVFHFSGLGAQVADDDGDELDGYDEAICPMDSFQKGPILDDEINETMVRPLVHGVKLHAVVDACHSATVLDLPFCCNMSRSGSWQWKDESPPSGAYRGTSGGKAMLISGYSDGKAKSSVASAQKPEACATMGAMTHSFITAVEREPQGVTYGRLLTSMKAIMTNSGGCAVQGPIGAG

SEQ ID NO: 50823 - protein, 414 aa, Zea mays
  Clone ID: UC-ZMFLMO17305F01_FLI.pep
DGGRLIAVKRFSRLSWPDPQQFLAEAAGVGKVRHRRLVNLIGCCAEGDERLLVAEYMPNDTLSKHLFHWDKQPLPWEMRLRVAYFIAQALDHCNAENRKIYHDLNAYRVLFDEEGDPRLSSFGLMKNSRDGKSYSTNLAYTPPEFLRTGRVIPESVIYSYGTVLLDLLSGKHIPPSHALDLIRGKNILLLMDSSLEGQYANEDASKLVDLASKCLQFESRDRPNIKYLLSSVGPLQNQKEVASHVFMGITKATSVLPTICSPLRKACAGMDLSAVHDILLKTGYKDDEGAENELSFQEWTQQVQEMLNTKKFGDIAFRDKDFKTAIDYYSKLVAMMSTPSATVFVRRSFSYLMNGQAELALRDAMQAQVCMPEWPTAFYLQALALSKLGMETDAQDMLNDGATFEAKKQNGWRS

SEQ ID NO: 50824 - protein, 368 aa, Glycine max
  Clone ID: 700747701_FLI.pep
AAEDLIYQLRQEEDGRKQNKKGTTKKTITKRALKASGQSDLSGNASKDLLLMHKLGETICPMKEDFIMVHLQHACTHCCILMVSGNRWVCRQCKNFQICDKCYEAELKREEREQHPINQREKHTLYPVEITDVPADTKDKDEILESEFFDTRQAFLSLCQGNHYQYDTLRRAKHSSMMILYHLHNPTAPAFVTTCNICRLDIETGQGWRCEVCPEYDVCNACYQKDRGADHPHKLTNHPSMADRDAQNKEARQLRVLQLRKMLDLLVHASQCRSAHCQYPNCRKVKGLFRHGMHCKIRASGGCVLCKKMWYLLQLHARACKESECHVPRCRDLKEHLRRLQQQSDSRRRAAVMEMMRQRAAEVANSSG

SEQ ID NO: 50825 - protein, 314 aa, Glycine max
  Clone ID: 700749140_FLI.pep
SIGKLSSLVTLDLSENRIMALPATIGGLSSLTRLDLHSNRITELPDSVGNLLSLLYLDLRGNQLTLLPASFSRLVRLEELDLSSNQLSALPDSIGSLVRLKILNVETNDIEELPHSVGSCSSLRELRVDYNRLKALPEAVGKIQSLEILSVRYNNIKQLPTTMSSLTNLKELNVSFNELESVPESLCFATSLVKMNIGNNFADMRSLPRSIGNLELLEELDISNNQIRVLPESFRMLTRLRVLRAEENPLEVPPREIAEKGAQAVVQYMDELVEKREKKDVKAQPLKQKKSWAQICFFSKSNKRKRDGVDYVKT

SEQ ID NO: 50826 - protein, 275 aa, Glycine max
  Clone ID: 700763939_FLI.pep
GCCIVVVCKVLVMDRHKCKLCSRSFSNGRALGGHMKAHLASLPLPLPPKLHSCFSSSDSEQEQSLRENPKKTLRILDPEDRESETESNKNPTRQRSKRNWKSTMPKLSLGHPEAEPLSSVSDTSPEEDLAMCLMMLSRDTWQEHKLANAGPPKTRCSSGSEIKLKNKVRSKHLCHACHKSFRSSRALGSHRTLCSPRLEAQNNSIISNNNIKVFECPFCYKLFGSGQALGGHKRSHLIPSSSSTVNHSVKLKQSFIDLNLPAPAEDDDLSVVSDA

SEQ ID NO: 50827 - protein, 134 aa, Zea mays
  Clone ID: 700196142_FLI.pep
QLVLANLAAYSQQQQFLPFNQLAALNSASYLQQQQLPFSQLSAAYPQQFLPFNQLTALNSPAYLQQQQLLPFSQLAGVSPATFLTQPQLLPFYQHAAPNAGTLLQLQQLLPFNQLALTNPAAFYQQPIIGGALF

SEQ ID NO: 50828 - protein, 110 aa, Zea mays
  Clone ID: 700221258_FLI.pep
ALLLLLLLLLVLCHLLADLLCSVEDAQRRFVADVALLVLRVVLQSAMFTKVVLAFGDHWINEWLPTNEAGKGQRLLLILVICCLIITLTTTTHGNSSLAGLLSLLIFLLE

SEQ ID NO: 50829 - protein, 142 aa, Zea mays
  Clone ID: 700167257_FLI.pep
SVGIEAMSRGCSEAHFVEMDPWVISEVLKPNLECTGFLDVSHIHMLRVENFLANAEKSQGRYPSFDYISVTPPYLEVNYSTLLGQLARSPLVGKDCFILVEYPLKTDMAESCGNLVKVADRRFGRTNLLIYGPTWSEKKKKR

SEQ ID NO: 50830 - protein, 60 aa, Zea mays
  Clone ID: 700172323_FLI.pep
YQVQQLSHIEPKFNLHVKQRKERKSTCSISVSSTPYPQSDKIAKSRSLQKFQDGRRRLKL

SEQ ID NO: 50831 - protein, 200 aa, Zea mays
  Clone ID: LIB148-043-E2_FLI.pep
ATLVSCRSFRNVEYVGEANQLRSATLLVVPDKLAKPLASLPADKVRPAVENHVLLSYFDPIKLDEMKTRTAILPTLLSVTDKKLGVLNYTRADDGQMYFGAPGAPCVAKLVKVVAARPYSVSIMEISEPILPAALPSPVAAPGRRGKGGKRKIKPSAATHEDSNMIPRKPVEAVVVGKGKVAKDTVSESPAPSPAPVSAP

SEQ ID NO: 50832 - protein, 203 aa, Zea mays
  Clone ID: 700155810_FLI.pep
RSSANLQMASISSLAALSLLLLVSVGLSDAIRVARYSSSQGAGQGGGNGGADQNGSGSGVGLGSGSGESGADGVYVSAGGGGEGGGWSQYGGTAFGGGSGTGSSSSQYSSGSSFGNGGSTLAGGIGGGGGGGQGSENQGSGGYGTGGGTGSGSSEASSGDPPSATPPYASADASGNGGGMGGGRDGGTGGGKGHGSGFGEGQP

SEQ ID NO: 50833 - protein, 160 aa, Zea mays
  Clone ID: 700160217_FLI.pep
RLTTAPSAAVAPAAAAGSTTTMAVAASAGGSYQQEASAAVVSADYLQYQMMLLQGAATSGQGSSSSHGGYPLYYDYGGHGGAGAGAGGGAMSSSYSFPASTVVTVASVPSSSASSAPSYGEAAQWAGGWPESSAWSYPATTASWSGSSQYEYPPSTRPPQ

SEQ ID NO: 50834 - protein, 144 aa, Zea mays
  Clone ID: 700152672_FLI.pep
EGIYKEAASAAPGRGEAAPVGNDEQWTLSGDHEDKDPFAESVLGEGIEGIQGECDGLDDLGAGEDPEVELKRQRNKEREKELMEILKGQVGAIRLGISRALENWEPGWRPYLKAAGYLTRDSRVVERKKPGKAKARKSFQWVKR

SEQ ID NO: 50835 - protein, 255 aa, Zea mays
  Clone ID: LIB143-013-H6_FLI.pep
CSLAAPAPVAHSLGRGELRSEEAEKPGSACVQGQRRQAGASIRWCKQDRRITTQSHAAARRGEEGEGEEGVAGGARRGGGGRRLPAALRHPHRVPVPPAVPAPAGGRARRLRLRLLRGAAAPALLRRRVPPPARARRAGGAGALVVVLAPPPRPRRRGVPRRPLLPLLPVHPRKGHLVIDRRPRLSYACVVVSGGVCRARDSIVVRRLGSYLASPAGVLCLCFLFDRFPVLSLCCWPFPCTLLCMRLILQAHVLY

SEQ ID NO: 50836 - protein, 219 aa, Zea mays
  Clone ID: LIB3136-019-E6_FLI.pep
RRRRRRRRGQPGRRGHGADAGGRAPAPRGAPELPRRRRRHRPDGARRGRAQPLARVLAHRQPRHDRHGVAAGHVRPGQGGHPGAPRPGRRRARHARGRQLHRRHRRRRRVQPRRRRQDEDDEHEGGARRAPALRRRRRLRPQDRQVGGTHGAVQGVHPHRDAPGALHRCALRHARAGAQGLQGRRVLRPATRKDDDDNKRCAASSSPRSLPRITRCHPT

SEQ ID NO: 50837 - protein, 154 aa, Zea mays
  Clone ID: 700240323_FLI.pep
QQVSSLAKPRHPPISDGREKGARQECRGRGGRRAAGAALRGERGRRDVQRRPGHGAEAVRVLLERRAEPGVLRRAEERRLRLPLQQLLEQAQEHAIRQLRQGHPFRVQPPKRQVPVDGDMECVTRTANGQLGPNRINPLHYPVSSSSECVSSLL

SEQ ID NO: 50838 - protein, 85 aa, Zea mays
  Clone ID: 700243408_FLI.pep
RLAIAGPWHHTCKHAHRRTHTHAMIYVSSSSLSCRHHACMDDGGRHLIWERVCLGNGKLHAPLGRTARSCRAACHRAASCRSPCC

SEQ ID NO: 50839 - protein, 36 aa, Zea mays
  Clone ID: 700221989_FLI.pep
EILIHQITISIIKFKRGRRNTGDAKTTDYLSLPSGN

SEQ ID NO: 50840 - protein, 140 aa, Zea mays
  Clone ID: 700235266_FLI.pep
SDFLLFDLIELADYCNAKKVHLIYDKREHPKQSLLQQSLGDLQGSSLTVVFEGTIMNREEVCSFQLPPPWKLRGNILNYGLGLLSSYFVCDALTILSGGYFYIFDPLGLTGGTTSTATSSARYFSLLGAEYNHSIYLHIK

SEQ ID NO: 50841 - protein, 141 aa, Zea mays
  Clone ID: 700239490_FLI.pep
RAKTDVQLSDGCMIPRDGAAHPDHGHPPRRQVLGPRRRAVQPRTVRRRHGQGGEAPAGVHPVRAGLPDVHRPEPGTAGGQAHHGDPAAAVRDEGVPELHPRADGPDAPLPAVRSAGDLPATFGASGSLIAQMLRLSPTFFC

SEQ ID NO: 50842 - protein, 167 aa, Zea mays
  Clone ID: 700243970_FLI.pep
YRCSPARSRASAEEAGLHTSECYKIRAVVADLRVRFVQVCQATDFRNTDAAREILKEINVVMDLSKKMRLKLGATSEPVKPLEKPSAGSVKDELVKPSEKPSAGPVNDEPVKPSEKPSAGPVKNEPTEPAPAGENNQAPTVGQTTVSPNNAGVGAPVVKHDNSEAQK

SEQ ID NO: 50843 - protein, 113 aa, Zea mays
  Clone ID: 700244205_FLI.pep
IQVSSSLVPRPLVRCGQRPWRSLPRSSRASSLASSAASPAVAAPAPPTRMPLVRQRPSHQWDPSLLRSGQGEVLLPLMEGPRVTSTVTPSRGEGEEKRRDRREEKKLTDSYHV

SEQ ID NO: 50844 - protein, 166 aa, Zea mays
  Clone ID: 700224379_FLI.pep
HLHIAIVTDNSLALHKQRMAKKKKVKCMTRDGHFCFLGFFGGLSTSGASPSLSDSPSAASSGTSFGALCLAMCSLRTAMLFSFTAASCSDRVPNSELIANDSDPRTRLAFTLGPGLDNAAAPGWPSIAAFPKCGGAKKTVMGGRRQGRRPPSGRQRRSRRREREKE

SEQ ID NO: 50845 - protein, 337 aa, Zea mays
  Clone ID: 700258394_FLI.pep
FRVPQDLVVTGGPCTLYKWVREDRLAALKAKDKEQGAASAMPEPNSEVLFLCSYEGCGKTFFDVGALKKHAHVHGERQYICHYENCGKKFLDSSKLKRHFLIHTGEKNFVCPHEGCGRAFSLDFNLKAHMKTHSADNYHVCQYPECGRRFTQESKLRAHIRAQHEKAVGLQNPGASSMNHSAIGGPHQPPRPAKVSAAPPAPSAERPYVCPYDGCDKAYIHEYKLNLHLKKEHPNHYQDGGPNGAAAPSKRSISKSSHRSKLDITSRMPPANIPKHRGYATPLPAVVSLPEEQQLLRKVVYEDDSEETEEEGDNNGEDRWNYKRAASSDDEETEDEE

SEQ ID NO: 50846 - protein, 365 aa, Glycine max
  Clone ID: LIB3049-006-D5_FLI.pep
RSMVTSPPAMPTKGRVLIIGATGFIGKFVAEESLISAHPTYLLVRPGPLNPSKDAIVKNFQDKGAIVIHGVINNKDFVEKILKEYEIDIVISAIGAKSLLDQLILVEAMKSVKTIKRFLPSEFGHDVYKADPVEPGLTMYKEKRLVRRVVEESGIPYTNICCNSIASWPYYDNCHPSQLPPPLDQLQIYGHGNVKAYFVDGIDIGKFTMKVVDDARTVNKNVHFRPSNNCYSINELASLWEKKIGLTIPRVTISEDDLLAVAAENCIPRSIVASFTHDIFIKGCQVNFNIDGLGDVEISTLYPDEAFRSLEDCFEGFALMIDDEINKGENKITGTKSVVEAVPFTASCGEESPPQKCSNFVVTNY

SEQ ID NO: 50847 - protein, 249 aa, Glycine max
  Clone ID: LIB3049-030-F8_FLI.pep
IANLIARVPMENILYLGGPNIASEIYNKEYANARICGAEKWRKPLAKFLRQPHFIVWDNSDLVTHEVMGGLKNVYAIGAGMVAALTNESATSKSVYFAHCTSEMIFITHLLAEEPEKLAGPLLADTYVTLLKGRNAWYGQMLAKGQLRPDMGDSISGKGMIQGVSAVEAFFELLSQSSLNVLHPEENKPVAPVELCPILKTLYKILISREQSSQAILKALRDENLNDPRERIEIAQSHVFYKPSLLGQP

SEQ ID NO: 50848 - protein, 189 aa, Glycine max
  Clone ID: LIB3051-016-F12_FLI.pep
DGSDAILLGAETLRGQYPVETISIVGKICAEAEKVHNQDLYFKKAVKYVGEPMSHLESIASSAVRAAIKVKASVIICFTSSGRAARLIAKYRPIMPVISVVIPQLKTNQLRWTFTGAFEARQSLIVRGLFPMLADPRHPAESKSGTNESILKVALDHGKAFGIIKPHDRVVVCQKVADSSVVKILELED

SEQ ID NO: 50849 - protein, 72 aa, Glycine max
  Clone ID: LIB3049-052-A7_FLI.pep
TVWDFSFHALFKVTLNAKSLATELTVKNTDNKAFSFSTTLHTYFQASVSNASVKGLKGCKTLNKDPDPKNPV

SEQ ID NO: 50850 - protein, 527 aa, Glycine max
  Clone ID: LIB3050-018-B5_FLI.pep
EPNQTEPNHHTHILRSNNSSTMDLLLLEKTLIGLFLAAVVAIAVSTLRGRKFKLPPGPLPVPIFGNWLQVGDDLNHRNLTDLAKKFGDTFLLRMGQRNLVVASSPELAKEVLHTQGVEFGSRTRNVVFDIFTGKGQDMVFTVYGEHWRKMRRIMTVPFFTNKVVQQYRHGWESEAAAVVEDVKKNPDAAVSGTVIRRRLQLMMYNNMYRIMFDRRFESEEDPIFQRLRALNGERSRLAQSFEYNYGDFIPILRPFLKGYLKICKEVKETRLKLFKDYFVDERKKLGSTKSTNNNNELKCAIDHILDAQRKGEINEDNVLYIVENINVAAIETTLWSIEWGIAELVNHPEIQQKLRDEVDRVLGAGHQVTEPDIQKLPYLQAVVKETLRLRMAIPLLVPHMNLHDAKLGGYDIPAESKILVNAWWLANNPAHWKKPEEFRPERFFEEESLVEANGNDFRYLPFGVGRRSCPGIILALPILGITLGRLVQNFELLPLPGQSQIDTSEKGGQFSLHILKYSTIVAKPRSF

SEQ ID NO: 50851 - protein, 194 aa, Zea mays
  Clone ID: LIB3070-005-C7_FLI.pep
AASCCYPTPFVQRQVPAERAQVRRVRRCARPRQRRGWQGACRAMLYPHQRPCGLRGRRLPLHGHQGQRARRRHRCPHQAQRPRQLLWQVRAQGLLVRVSSFRRSHARSCSRTRLHMHAPCMARMHALCLLIYLSCLSCIVHLSVLQNLEPFQPNTCQFNSHVLSLVEFPFFFVFGHFLVRVRHLLQGKRAVLRV

SEQ ID NO: 50852 - protein, 123 aa, Zea mays
  Clone ID: LIB3078-024-F8_FLI.pep
QIENDGDVLWEPDVRETNEAVALRGMKFMDWLWTREEKEIAIVSHSGFLFHTLSMYSKECHPTIRDEVSKHFANCELRSMVLVDRSMLGSYSSRFNYAGKNPTGLDVPNDIADKKQVDEAQKN

SEQ ID NO: 50853 - protein, 116 aa, Zea mays
  Clone ID: LIB3070-014-F10_FLI.pep
GHWIDSLSVLPSYISGPDATKILSICPSLQKAIKSSKAVVFGESCVFSNMFIKGIFDRLEKDMDSFGIRLSVGQGRPVNTNLGSEHKTGSGQHSDTKDLGGNGTSSTGASSDRGSK

SEQ ID NO: 50854 - protein, 118 aa, Zea mays
  Clone ID: LIB3078-004-F3_FLI.pep
HIFLQKHLRVAPSALHSPPGKFSVWHTLAQLLLLMHRPLNRWLCDRQCLASATLVVPSSVATRRSMRTRTGAAMRRDSAITPLDRTLACSELRYVRLLSVLTGSPLGVLPYVLTTRLV

SEQ ID NO: 50855 - protein, 174 aa, Zea mays
  Clone ID: LIB3075-048-C5_FLI.pep
SHSQLSSFHPERRRKQASGQPTMISAKKIAHLAKKWQRMAAQGRKRLALGAAAKQADECCSYVASKGHCAVYTADGARFEVPLACLSTPVFGELLQMSQEEFGFTGGDGRITLPCDAAIMEYAMCLLRRGASAELEQAFLSTMAMSCHCASHMAPYVGRAHEPDSRLLFSFCSV

SEQ ID NO: 50856 - protein, 283 aa, Zea mays
  Clone ID: LIB3078-046-F6_FLI.pep
LFLPLPLQEAKYNLEAPFLLSPIRTQSNRHPAEMGRKFFVGGNWKCNGTTDQVEKIVKTLNEGNVPSSDVVEVVVSPPYVFLPVVKSQLRQEFQVAAQNCWVKKGGAFTGEISAEMLVNLGVPWVILGHSERRALLGESNEFVGDKVAFALSQGLKVIACVGETLEEREAGSTMDVVAAQTKAIAEKIKDWSNVVLAYEPVWAIGTGKVATPAQAQEVHASLRDWVKINVSPEVSESTRIIYGGSVTAANCKELAAQPDVDGFLVGGASLKPEFIDIINAAAV

SEQ ID NO: 50857 - protein, 175 aa, Zea mays
  Clone ID: LIB3076-033-B8_FLI.pep
RRLCRLPRLFPLVSSASASAAPRPHHLPFAVNPNPAPLAPSFSSSSPPAFPGPHRLFSSTSGSSMVVVGSADSFNSIFSKVQDEKLPAVFYYTAVWCGPCRAIAPLVSKLSSQYPKIPVYKVDIELEGLGNKLRDLNICSVPTFHFYHKGQRISEIVGADAKKIEATMESLHKQQ

SEQ ID NO: 50858 - protein, 147 aa, Zea mays
  Clone ID: LIB3075-012-F7_FLI.pep
VDGGEPLCPGDDGDLRGGGGGGRRRRADRRPEEGGRRARRLVPRGGAPRRRAVGRRAVQRAGHAVGDLRQGVGEHQAGGGDVRGRPEGRRRVRGGVGRGGGAQRHGQPRPRQPQGDQRQRPAREVLQGQPGFRGVPHLRQLASRIAI

SEQ ID NO: 50859 - protein, 174 aa, Zea mays
  Clone ID: LIB3078-020-D11_FLI.pep
SASASPAAVAAMGRGKFKGKPTGRRNFSTPEEIAAGTSGRPRTFKKKEEEEDEEEVEREESEEESEEDSDEKTKHKGTEGIIQIENPNLVKAKNIKAKEVDFGKTTELSRREREELEKQKAHERYMKLQEQGKTEQARKDLERLALIRQQRADAAKKREEEKAAKEQRKSEARK

SEQ ID NO: 50860 - protein, 181 aa, Zea mays
  Clone ID: LIB3067-052-C11_FLI.pep
LAGSLPLRSASTAPSAARAQPLPSAAAPRRIPARLSVAAGGGEQQLVTAQEPAHEPDYGVVSIHHVGILCENLERSLAFYKDLLGLRVNPARPNDKLPYRGAWLWVGSEMIHLMELPNPDPLTGRPEHGGRDRHTCIAIRDVLKLKEVFDEAGISYTLSKSGRAAIFARDPDGNALEFTQV

SEQ ID NO: 50861 - protein, 237 aa, Zea mays
  Clone ID: LIB3068-007-C10_FLI.pep
ELRCMELVGLLVLQQGDDVEGDGAQAPQRLLPLGQLRRVRSPTRPTLLLPAPEQRAAHRGVLAGGAHVHEGVVVGLLGEGRARLHERVAGGGVLAGAGAEEGAVRLRGGRGVAGVAEEGGRAGGVVCGGGHGDGAEARDVGGGAGGVGGERGDAEVVEAGGVARRLHQQRGLAMLLGVLLLWFRGEGEGEGGGGVGEAEEQAELDGEQQEKNRGNPCCCHCRRRRIACSDPVLPFLN

SEQ ID NO: 50862 - protein, 100 aa, Zea mays
  Clone ID: LIB3068-007-F5_FLI.pep
QDKCSFTDLGLDNVLPHGEILLTLLFPLGLQGELVLGEAPADGAGLLGAEVEREQLLLLVRLTQRRLLLLRDDGQHARDGGAHNLDLGELVGSPAGDLGY

SEQ ID NO: 50863 - protein, 290 aa, Zea mays
  Clone ID: LIB3068-036-G9_FLI.pep
HQFDSHFRYSHQFDSISSSFQSSSRHPTTQYIFRTPRSPRNRSGTRAAHTATTTQCLFLGEVLLDPAADKGAAAVAAAFLFGDALAGAPAAGTEAFLFGEALGTVAFLFVDVVAGVAAPGFCLLSTTSCCCCSAAMRSNSSLSFLARLFLAAVTMAARGSSSSDSPDPSESSSSSTSSCFRARSRAATSCSSSESPLEASSSDPSAASEAGMWPAARALALALTLASRCARRRSLSTEPSMRPCRRRRFTLMPPMDQCASRAHSSSGSVTDAGGSTRSPGKKRGLGRPLP

SEQ ID NO: 50864 - protein, 104 aa, Zea mays
  Clone ID: LIB3068-037-B3_FLI.pep
KGDPRAHSRRGFRTRKKYIGVKISFFPPSTSPSAAFSRKLETLSLPCGARPTYSRALTIVRVIMRPTEVKRKLLRENRLGSKGKYQGKGESSARSLSQTTSNPA

SEQ ID NO: 50865 - protein, 150 aa, Zea mays
  Clone ID: LIB3069-026-G12_FLI.pep
LINNCNLYRRVRDRINPARHARCSNLPTQPEPSERVTCTSNFSLSPFFFTFRRHSSRGCRRLRRGPLDEGCPERVLHDDGECEGLGGVRRALTGGRQPAELAHHVGEHELDVEHAERGGGADAAAGAEGHHAQRAGAGDVGVEALAAFQE

SEQ ID NO: 50866 - protein, 215 aa, Zea mays
  Clone ID: LIB3069-036-E2_FLI.pep
RTTPTPISHYGNTLRAEPSKLGADGGAAADQEGVGAGGGGRGVVVRGAVAGGDAGGAVHAGRRGRRRRRAGGGGARRGAVGAAVRGDLRGGGGRDAAQHQRQVRRPSHPGAEPARARPGRRLPRPRHPDHTVQAQVDRWRSIGRREPNRMPLLTCCGVVKPPSAACRVRTTVCRLHCRGIGERSDARGRHVLLSMREQRVARSSGRGLQPPVCKL

SEQ ID NO: 50867 - protein, 283 aa, Zea mays
  Clone ID: LIB3067-022-D2_FLI.pep
IPSDLAKNVKILNLDLGNNFIERSSDLKVLSELRYLRNLNLQGNPVSKKDSLVKKVKKSVPTLRILNAKPLEATSKSDTRSTKENPPSKDEDPIGIDAKKDKRKGSKQEVKGLEELEVQSVSTGITTSNPGKLEVPDGKEKKKVKEAKTKKSEEPYHANNSSLKNKEVQSFVYDTSTKDKKEAKRKKFVDEEDVDAEGIDNTEISFADLMFSNVGNPETKLKNISTLEAAPDGKSVGGLVIDHTKKRKKPKGVVTITDSSALKMFSSMPEVGAGGLGLSGWDE

SEQ ID NO: 50868 - protein, 143 aa, Zea mays
  Clone ID: LIB3067-035-B11_FLI.pep
HYFITLRHACIPRPDAHRTPHLINRVAVNVGAGQRGGAAVGGVVGLLQQAADAAAARLGRHGPAHLDERQARHQRAVHGGARHRRAHRGRGSHRGRRQEHGQRQRRELRSSHASPSLSAGLTYDMMAGQCSAVQQAEIGASIR

SEQ ID NO: 50869 - protein, 80 aa, Zea mays
  Clone ID: LIB3067-036-C12_FLI.pep
DNEVLSKAIEVAEAIVRNNRNLVVLYKSVINDGFKLDLEHAQALEKERGHNYYNGMTKEQFTDMQKFIQGRSSKKTPSKL

SEQ ID NO: 50870 - protein, 134 aa, Zea mays
  Clone ID: LIB3067-056-G3_FLI.pep
RHATSSVQLVRNVTPRATHHMLRGRSCQLSPLLYEKPSTNNSHAVSLMKPKAQTITHTHGLAQPLRRATIAAAAHAVPDAHLLAGVLLLEVLEGVHVQLPAHRLALLPPDLLLLDRVPQLSDRVPLPPCEPGRV

SEQ ID NO: 50871 - protein, 190 aa, Zea mays; identical to SEQ ID NO: 44980
  Clone ID: LIB3068-022-G3_FLI.pep

SEQ ID NO: 50872 - protein, 254 aa, Zea mays
  Clone ID: LIB3069-003-F12_FLI.pep
ARAGALLPAVLEGHGAGAVAADSAESAVDTQEEPLDAADDASGSAARRGTRRRLTCLDARKLAPCTLASQRRQRNAESAAQCTAAAPPQSSHRVPVPRFWPAAVESRAAPIPDVFRFLPPRTSEPWCSSPSSVVVLRPLRAELVPGGLQRMTNGSPVPGAPDDTRPAYMQVSARGWARGVRRNRPAVQVASRRKPGGWNGNRGRGRRLRPGSSVALEALGRAYGRHLKGPRPAHRPQPAPEAGSGRWLLTVGWS

SEQ ID NO: 50873 - protein, 240 aa, Zea mays
  Clone ID: LIB3069-009-D3_FLI.pep
AEHKRNPSVSLLPLVHQTKPKPHSTALLPNQLCSPTASSSSSSSPRLRRAASPPLSRRRTKPSPTTTSPRGSFPRAWSPTRSTTPRAPSRPRSMPPRPARDPPSASSPSRAPTRYATRPRSPARSPPTTSPTSRVSPSRSSSFGSTSSRSPAMAIISSSPSASPPRTSGLTTSSSAQPVAAGSTATTCSCSRRRGQPPPGCACEVPSRIPLMQIQDGIVSSGLDFMFHQLFQTVLGESEI

SEQ ID NO: 50874 - protein, 87 aa, Zea mays
  Clone ID: LIB3069-044-A5_FLI.pep
FVKYKFLKAVVLAYSAPGPTAYASLSEKSWVYRILGDGKLQYVFVEHEFLDFILCAFVCSSFVFAIHIYKIRAMVLISLIMYMSISY

SEQ ID NO: 50875 - protein, 170 aa, Zea mays
  Clone ID: LIB3067-054-E9_FLI.pep
GGLREADGLHGLRDGARGVALVHLLRRRRRHGEGAPRVPLLHHPADAHGAQPGAVARAALRPTHGAPRRLQPPQLQRLALHHPAEPEARLCGLRPLRQRLQDHAVSRRQPCERQRRGQRRQVPGWGQRRRRARRGLRDRLVTLLMDRPPLKGAAAVFFTLLWIRSRAAFR

SEQ ID NO: 50876 - protein, 220 aa, Zea mays
  Clone ID: LIB3069-040-E7_FLI.pep
TLYFIYMQAEALVKAQDDLRETTGHLGMTLIKLAKFEREQATCNSLRRRAGEIHNFANSVLKMSRSQIKLNSEMVKHLGSIHEYLEMMISVHHAFTDRSNALYYVQSLSADLFSLHTRAGGLESSSARDMGHEWSTYQKVEGLKEAIRSAEAAKSDAVREYESIKENNMIEIKRFDKERRHDFIEMLKGFVVTQVSYSDHFANMWTNVTEETEVYANRSN

SEQ ID NO: 50877 - protein, 77 aa, Zea mays
  Clone ID: LIB3069-011-D5_FLI.pep
SCTVENVCLDSNTLVYNSGIGFVCNVIRCGHLLPIKLWHGIPGFLYILESVSSYAGHSAMPSNSCRNVVGNKPVTLV

SEQ ID NO: 50878 - protein, 193 aa, Zea mays
  Clone ID: LIB3069-012-D6_FLI.pep
GPPAPSSASTSVGEMVKRSKKSKSKRVTLRQKHKVLRKVKEHDMEKMVTKADPSKRIVLLHNKIDLVPKEAVEKWLTYLREEMPTIAFKCNTQEQRTKPGWKSSKLDKTNSIPQSSDCLGAENLIRLLKKYSRSHELKLAITVGIVGLPNVGKSSLINSLKRSRVVNVGSTPGVTRSMQEVQLDKKISDPAPW

SEQ ID NO: 50879 - protein, 269 aa, Zea mays
  Clone ID: LIB3069-036-D11_FLI.pep
LHKSRSPIHTHSRAHRDLHAQPKHPPMAPLLLLFLLGGLCALLSLATSSRASAKKCDDVKSNGNCGDSGEEARCRDDCAPEETQQQGKMQARPDPEKDLGIVFSTFDHDGDGFITAVELEESLRRLGIAVSADEAAAMVTRVDANSDGLIDIHEFRELYDSIPKKRKHQHPAAGGFSGAAREVPVEGDDEEAEEERDLREAFDVFDGNKDGLISAEELGTVLGSLGLRRQGNGRTAVADCRDMIRLVDSDGDGMVSFEEFKRMMAVVKA

SEQ ID NO: 50880 - protein, 149 aa, Zea mays
  Clone ID: LIB3069-044-F7_FLI.pep
RDGLCFLHPSSPSRPALPSVFFLGLRRRMIHRLIFRYRSQLIPEGIIWVAHNHNRADTVVHAVVTDAPEPPFPDPARGTESPAAHDHRGQAEALGLEAEALLHVVVFDDVDLEGDLRADQRLRKVLRLSGREGVELLLPLLLRLLRLLL

SEQ ID NO: 50881 - protein, 184 aa, Glycine max
  Clone ID: LIB3040-042-D6_FLI.pep
ELLVRTLMLGVIRARTWLRYSEPLLQPWKVGFSSLSAIDGRKHHLLNLQEIETVLTDVKADDVKVIPVPKHCDWADFMVLATGRSTWHVKNIAQALIYKAKQKQRGVERMMLPSVEGQAGGKWIVIDSGKVIVHALDEKARAYYNLEGLWTPGGIQNEHDEDLQKALVKVRRKNNSKKPAQKNA

SEQ ID NO: 50882 - protein, 285 aa, Glycine max
  Clone ID: LIB3040-053-G6_FLI.pep
GHTQLYCRTEQGFLFLFLCLLLHFLSFQSKKIMGRKFFVGGNWKCNGTTEEVKKIVTTLNEAKVPGEDVVEVVVSPPFVFLPFVKSLLRPDFHVSAQNCWVRKGGAYTGEVSAEMLVNLGIPWVIIGHSERRQLLNESNEFVGDKVAYALQQGLKVIACIGETLEQREAGTTTAVVAEQTKAIAAKISNWDNVVLAYEPVWAIGTGKVATPAQAQEVHADLRKWVHDNVSAEVAASVRIIYGGSVNGGNCKELAAQPDVDGFLVGGASLKAEFVDIINAATVKKN

SEQ ID NO: 50883 - protein, 160 aa, Glycine max
  Clone ID: LIB3050-027-H7_FLI.pep
GPQVDKEQFEKVLSYIEHGKKEGATLLTGGKTVGNKGYFIEPTIFSNIREDMLIAQDEIFGPVMALKKFKTIEEAIKSANNTKYGLAAGIVTKNLDTANTVSRSIRAGTIWINCYFAFGDDVPFGGYKVSGFGKDHGLEALHKYLQVKSVVTPLYNSPWL

SEQ ID NO: 50884 - protein, 363 aa, Glycine max
  Clone ID: LIB3049-008-H12_FLI.pep
GQKTYLPPAILSIPPNPCMAEARKEAEQVMFGAIDQLLEKTGVKAKDIGILVVNCSLFNPTPSLSAMIVNHYKLRGNIQSYNLGGMGCSAGLISIDLAKQLLQVHPNSYALVVSMENITLNWYFGNNRSMLVSNCLFRMGGAAVLLSNKSSDRRRAKYQLIHTVRTHKGADDRSYGCVFQEEDEKKTIGVALSKDLMAVAGEALKTNITTLGPLVLPMSEQLLFFATLVARKVFKMKIKPYIPDFKLAFEHFCIHAGGRAVLDELEKNLELSDWHMEPSRMTLNRFGNTSSSSLWYELAYTEAKGRIRKGDRTWQIAFGSGFKCNSAVWRALRTINPAKEKNPWMDEIHEFPVHVPKVATISS

SEQ ID NO: 50885 - protein, 89 aa, Glycine max
  Clone ID: 700788123_FLI.pep
YIYYSYLCFKVINLDLTCSCMGRRCSLIHSCSHRSQLQHPFQHPPIGPSQTQHPKQESLWLSSQHSSSQKSTCCNRSCCHSCSYFHTHS

SEQ ID NO: 50886 - protein, 732 aa, Glycine max
  Clone ID: 700676135_FLI.pep
LISGKRTSCGDEDPDYFGVSKGKIPFGEQSSRTLFVRNINSNVEDSELKALFEQYGDIRTIYTACKHRGFVMISYYDIRAAQNAMKALQNRSLRSRKLDIHYSIPKGNSPEKDIGHGTLMISNLDSSVLDDELKQIFGFYGEIREIYEYPQLNHVKFIEFYDVRAAEASLRALNGICFAGKHIKLEPGLPKIATCMMHQSHKGKDEPDVGHSLSDNISLRHKAGVSSGFIASGSSLENGYNQGFHSATQLPAFIDNSPFHVNSSIHKITRGASAGKVSGVFEASNAFDAMKFASISRFHPHSLPEYRESLATGSPYNFSSTINTASNIGTGSTESSESRHIQGMSSTGNLAEFNAGGNGNHPHHGLYHMWNGSNLHQQPSSNAMLWQKTPSFVNGACSPGLPQIPSFPRTPPHVLRASHIDHQVGSAPVVTASPWDRQHSFLGESPDASGFRLGSVGSPGFNGSWQLHPPASHNMFPHVGGNGTELTSNAGQGSPKQLSHVFPGKLPMTLVSKFDTTNERMRNLYSRRSEPNTNNNADKKQYELDLGRILRGDDNRTTLMIKNIPNKYTSKMLLVAIDEQCRGTYDFLYLPIDFKNKCNVGYAFINMIDPGQIIPFHKAFHGKKWEKFNSEKVAVLAYARIQGKSALIAHFQNSSLMNEDKRCRPILFHTDGPNAGDPEPFPLGNNIRVRPGKIRINGNEENRSQGNPSSLASGEESGNAIESTSSSSKNSD

SEQ ID NO: 50887 - protein, 231 aa, Zea mays
  Clone ID: 700421896_FLI.pep
IFFTGALLMGFAPGYGFLMVGRFVAGIGVGFALMIAPVYTAEVAPTSARGFLTSFPEVFNNFGILLGYVSNFAFARLPVHLSWRAMFLVGAVPPVFLGVAVLAMPESPRWLVMRGRIDDARRVLQKTSDSPAEAEERLLDIKKVVGIPEGVSDADDVAAIVRASGKGSSSSRHDGVWKELLINPSRPVRRMLMAGLGLMFIQQATGVDCVVMYSPRVFERAGIKSKTNSLG

SEQ ID NO: 50888 - protein, 188 aa, Zea mays
  Clone ID: 701158624_FLI.pep
AAVMTRDETSVAMPTSFMTGSVVGKRFYRDATVRRADDGNGWTVMLDYRTLKSPAKRVLKLPSRALAMAIAAEWEYQESDGIRPFTMPLMKLACTALERVPLTRRKVIDNLMKKFHQDLVFCRSPADSELTIGVHQKQKEKIDPILEWVDTEFGFKPVVYTSFFGGKQDEGLAKAVETVLKKATDCEL

SEQ ID NO: 50889 - protein, 176 aa, Zea mays
  Clone ID: 701162867_FLI.pep
VLHLLDLLLILSNRKVGGGARTPVLQSCKIIRPGSLLLLIIATQIYLAALAALPFASAAVVPQMCLVPASPPVPCDAAVDGRALPKGVDGLPLLRRRSSRRRRQGQLGTGLVEGGQRRRRRRRRRAAKEPGGGYELEVRVVHLRGRHRLRTTGGDASAEEVLQLRRRRGAGYRGQL

SEQ ID NO: 50890 - protein, 131 aa, Zea mays
  Clone ID: 700076923_FLI.pep
VLVEEEAAQQVAGMGRGGGMGNPVNVGIAVQADWENREFISNISLNVRRLFDFLLRFGQLLFHSISPRPALSRSGSPTFGSGPPPSCFIPYHAELNCPCYPHITLPCPSLCLVIVGWQTIAQTTHETGCFN

SEQ ID NO: 50891 - protein, 224 aa, Zea mays
  Clone ID: 700203525_FLI.pep
SYLRSEASFIRTSPGRICHRLASLPSSRESFGTGSDHIREKDGIWAVLAWLSIIAFKNKDNLGGDKLVTVEDIVRQHWATYGRHYYTRYDYENVDAGAAKELMANLVSMQSSLSDVNKLIKEIRSDVSEVVAADEFEYKDPVDGSVSKHQGIRYLFGDGSRLVFRLSGTGSVGATIRVYIEQYEKDSSKTGRDSQEALAPLVDVALKLSKMQEYTGRSAPTVIT

SEQ ID NO: 50892 - protein, 676 aa, Glycine max
  Clone ID: LIB3106-076-H11_FLI.pep
RSEQTLTLFFAVAVAAMPTKLFSQLHLLHPLLPMKPRTLPLLSRPFFFPSSKFLRTSPFKVRAFSSREKVPLRPSKSLIDDEADLSNWVDELRSGGPDEMRSGRGNEVRTGRRDRFADSGRFSRDDREREFRPPRNNNRASALGKRRGEDLRKGGQSVGSRRKFQPRSDDDDNEVMNGRKLKGGGVGAFPSEDEDEDEDEESEGSEEEEILNKSRTALFGQQNVLNRRNTEPTPRPSSPGGGSDSYLSETRFDQCSISPLSLKGVKDAGYEKMTVVQEATLPVILKGKDVLAKAKTGTGKTVAFLLPSIEVVAKSPPSDRDHRRPPIAVLVICPTRELASQAAAEATKLLKYHPTIGVQVVIGGTRLALEQKRMQANPCQILVATPGRLRDHTENTAGFATRLMGVKVLVLDEADHLLDMGFRKDIEKIIAAVPKQRQTLMFSATVPEEVRQVCHIALRRDHEFINTVQEGTEETHSQVCQTHLVAPLDKHFSLLYVLLKDHIADDVDYKVLVFCTTAMVTRLVAELLGELNLNVREIHSRKPQSYRTRVSEEFRKSKGLILVTSDVSARGVDYPDVTLVIQVGLPADREQYIHRLGRTGRRGKEGQGILLLAPWEDFFLSTVKDLPIEKAPVVPSVDPDTKKKVEKALSNVEMKNKEAAYQAWLGYYNSNKKSGA

SEQ ID NO: 50893 - protein, 148 aa, Zea mays
  Clone ID: 700083120_FLI.pep
RNATPVHVASSIATATPECDRPIKSYTSRPSAHARTNLATSTCTGHENDDLRCPPRPSPSIPLAAVVFVQRGRPPPPAQHAAHARQPDHGVGPRHPLQRSPHRRRPLLRHRLAVARQSPAEAAACERRGRPHVVGNWEQAAAALDGSR

SEQ ID NO: 50894 - protein, 597 aa, Zea mays
  Clone ID: 700167678_FLI.pep
AQTHKKGGAVVIILTMGARRGLRRGQAAVAAVFSACPFLALAVLLALPELAAGDTHYYTFNVQMTNVTRLCVTKSIPTVNGEFPGPKLVVREGDRLVVKVHNHINYNVSFHWHGVRQLRNGWADGPSYITQCPIQGGQSYVYDFTVTGQRGTLWWHAHFSWLRVHLYGPLVILPKRGEGYPFPRPYKEVPVLFGEWFNADTEAVINQALQTGAGPNVSDAYTFNGLPGPTYNCSSKDTYKLKVKPGRTYMLRLINSALNDELFFGIANHTLTVVEADASYVKPFTVSTLVISPGQTMNVLLTTAPSPASPAYAMAIAPYTNTQGTFDNTTAAAVLEYAPTTTRNNTLPPLPALPLYNDTGAVSNFSRNFRSLNSARYPARVPVAVDRHLLFTVGLGTDPCPYTNQTCQGPNGTKFAASVNNNSFFRPRTALLEAHYRRRYAGVLLADFPTAPPHPFNYTGTPPNNTFVQHGTRVVPLRFNASVELVLQGTSIQGAESHPLHLHGYNFFVVGQGFGNFDPVNDPPGYNLADPVERNTISVPTAGWVTVRFLADNPGVWLMHCHFDVHLSWGLSMAWLVNDGPLPNEKMLPPPSDLPKC

SEQ ID NO: 50895 - protein, 555 aa, Zea mays
  Clone ID: LIB3059-042-G5_FLI.pep
GGAEGMAEERKVSASAVASVTTARSSQATSLPQDSEEKECVWDASLPPSGNVSPHSSIDSMGVVTAMSTLNSCTSTYKSETIAGEAMLNVERNCESVKGVRGDLLESAKTSMSRASDSSVVSDDSSWSHITGGASKPHKGNDPRWKAIHAVRTRDSVLGMSHFRLLKRLGCGDIGSVYLSELSGTRCYFAMKVMDKASLASRKKLNRAQTEREILQLLDHPFLPTLYTHFETDRFSCLVMEFCPGGDLHTLRQRQPGKHFSEYAARFYAAEVLLALEYLHMLGVVYRDLKPENVLVRDDGHIMLSDFDLSLRCAVSPTLIRTSAFDSDPRRAGGSFCVQPACIEPTSACIQPACFLPKFFGQKSKKKTRKARSELGHNAGTLPELVAEPTSARSMSFVGTHEYLAPEIIKGEGHGSAVDWWTFGIFLHELLYGKTPFKGSGNRATLFNVVGQQLKFPESPSTSYSSRDLIRGLLVKEPQSRLGVKRGATEIKQHAFFEGVNWALIRCSTPPEVPRPVEAELPVKYGVAEAIGSNSKRVVGADVKSAGKYLDFEFF

SEQ ID NO: 50896 - protein, 495 aa, Zea mays; identical to SEQ ID NO: 38515
  Clone ID: LIB3060-028-F9_FLI.pep

SEQ ID NO: 50897 - protein, 126 aa, Zea mays
  Clone ID: LIB148-013-F3_FLI.pep
HPAIGLTAARTEVPKMSTIVMAALAIDIVCCSMASGIAALEFDGRGERASEPVGGQAQALSTISAAAREAGGRRGAAPPWPRCPSPSDGPSISGASARIGGGEVADLPRHFCRGPRRRWWTFQKWR

SEQ ID NO: 50898 - protein, 443 aa, Zea mays
  Clone ID: LIB3069-040-F12_FLI.pep
VSLRLPSAAREHAPMATPPPAATASALPKSGAVSKGYNFASTWEQSAPLTEQQKAAIAALSHAVAERPFPPNLEKSSGKDEGVAVPEKESALEEAGAIDAVLVNTHQFYKWFSELESAMKSETEEKYRLYENTLQERVNTCDVILKQVDDTLSLFEELQSLHSSVATKTKALHDACDQLLVEKQRLIEFAEALRSRLNYFDELENVSSSFYSQNMNIGNEQFLPLLKRLDDCISYVENNPQYAESAVYLVKFRQLQSRALGMIRSHVLSILKGASSQVQAAIRSSDSGKNIVTEGVEASLIYVRFKAAASELKPILGEIESRSSRKEYAQILSECHSLFCEQRLCLVRGMVQQRILEFARKEALPSLTRSGCAYLMEACQFEHQLFAHFFPASAADVSSMAPLMDPLCTYLYDTLRPRLIYEGNIDSLCELVDILKLKCWGNN

SEQ ID NO: 50899 - protein, 809 aa, Zea mays
  Clone ID: LIB3357-004-F10_FLI.pep
DPMVAAAAAAGGGADAGCGGGGGGGGKDALFVELWKACAGPLSSVPLLGEKVYYFPQGHIEQVEASTNHLAEHQGTPLYNLPWKIPCKLMNMELKAEPDTDEVYAQLTLLPDKKQDENTSARVENEEAEEEVVPHVPPATSEGLRIHSFCKTLTASDTSTHGGFSVLRRHADECLPPLDMSQHPPNQELVAKDLHGVEWRFRHIFRGQPRRHLLQSGWSVFVSAKRLVAGDAFIFLRGENGELRVGVRRALRHQTTIPSSVISSHSMHLGVLATAWHAVNTGSMFTVYYKPRTSPAEFVVSRARYCESLKRNYSIGMRFRMRFEGEEAAEQRFTGTIVGICVSDPSGWADSKWRSLKVRWDEASSVPRPERVSPWQIEPAVSPSPVNPLPVRFKRSRSSVNASPSDVSTVNREVASKVMVESQQNNLPRALHNQGRTQLTGRYRDSTDVKTAQDLTMWSSGTEQQRNNIAAQTKRCLEGWTQSRTPEGYNQLFSAFQPLKDAHNPLRPFPNKISGTRSSTWVTADARYPAQQANHNMLHGTLSFMPHSSGFRMIQQNNLVMPEAANFTGKSAFTSVQGHVTDQCSTGWFGPIESNSHTDHASSSLIRSQPLVIGNDVQKTKGTSFKLFGIPLGSPEKSEPLVSPPSVAYDGKLQTSPTDNNEPCSEATQNIQNKVPSSSTRSCKKVHKQGSALGRSIDLTKFACYDELIAELDQMFDFDGELKSPCRNWLVVYTDNEGDMMLVGDDPWNEFCDMVHKIFIYTREEVERMNPGALNSRLEDCLSESLGRGLASKEPRSGPSTSAVDSENC

SEQ ID NO: 50900 - protein, 681 aa, Zea mays
  Clone ID: LIB3591-112-F12_FLI.pep
RAAAAVNEMAAALLLRSLRPSVSRAHIHLLSHASSPTALGSPLLPRLYSSAAASTAASPVFTPGGVMDPSRIRNVAVIAHVDHGKTTLMDRLLRQCGADIPHERAMDSISLERERGITIASKVTSVSWKENELNMVDTPGHADFGGEVERVVGMVEGAVLVVDAGEGPLAQTKFVLSKALKYGLRPILLLNKVDRPSVSEETCDEVESLVFDLFANLGATEEQLDFPVLYASAKEGWASLTFTKSPPDNAKNMSSLLDSIVRHVPSPKADLEAPFQMLVSMMERDFYLGRILTGRVRSGVVRVGDKVHGLRSTDDGVHKIEDGKVVKLMKKKGTNMVTVEAAGAGDIISMAGLAAPAIGHTVANSEILSALPTIELDPPTISMTFGVNDSPLAGRDGTHLTGAKIGNRLMAEAETNLAINVLPGPLSESYEVQGRGELQLGILIENMRREGFELSVSPPKVMYKTERGERLEPIEEVTVEVGEEHVGFVLETITHRKGEVVDMGPVPGTTGRTRIFMTCPSRGLVGVKGIFSSFTRGTGFMHRAFQAYAKYRGPLGSVRKGVLISVGKGLITSHALMSLEARGILFVSPGMEAYEGMIVGEHSRDSDLEVNPVRTKELTNIRAPGKDENVRLSPPRLMSLEEAIGYVAADELIEVTPKVVRLRKKYLDSTKRKMMKNKPMN

SEQ ID NO: 50901 - protein, 813 aa, Zea mays
  Clone ID: LIB3279-215-E2_FLI.pep
RTRGLKAAKVGDMNVIKMLLMGNVDVNEADSEGNTALHWCLSGASCTKEPRIVWLLLKNGARVFQGNKLGLTPVHSAAAKGNYKALQSLLLHAQDCVDIPTKTKETPLFFAVKNGSVDCAKLLLRFGADTKARNLRKQRPIDVATSQDMRFILSSANVLLFSGNHNSPQKNRVMRKEIYKELGDEFDDFDKDSCDESYTGLKTSVGQRDFCSSNLSAQGPKSKSQYVPKQAQGSKFVPRNNHWPKHDYTRKIFVGGLPPSVDSEYLIEFFNAEFGPVEEAVVIGIPIGNRVQSRGFGFVKFEREEDMISAKEAHHVYMLGKRVEVKDAVARAYLPLEDQRYTSLRQFIKERPKIHRVLDGELTEEHNIQKRRPLPEKCLPSWFFIFRKWLPGFLEDETARLRGERYPLSSLKGDFRATCRMELDHTALGYPKLSDFIRSLPGICRMCVVPVGSGPATHMVLLPPLSRPKYVPLLEPCSFDHDELAESVSDQHSPRSPLNTNIADDSPRNTDSQQGDDACSETNVQIQQVDDACSETCVQSQHDYGKSQQDGSSSDNGSLLDDIPASTTKLDLIESVTSVKPALIEPVLPRKPDLIDSVPPSKPDLVECVPPRPKLIESGFLPQKNESGPVQKPNLLGFGPSRNLELIESRPSACFIDSPFERTAVTPSSCEGEMRFSFFQSQWDKYLAPYPRSDSCIICRSCEAGMQLVPCFHKICVACMMRCNVRACMVCGTSVSGVKSSPAVDATYRYMGLTERVLDLRCQLMVVCRGAEAIVRCSPCMHTIACRGCFLASVTLLKSCTTCGCMVEHFKIV

SEQ ID NO: 50902 - protein, 439 aa, Zea mays
  Clone ID: LIB3061-107-H7_FLI.pep
TMAATMAVTTMVTRSKESWSSLQVPAVAFPWKPRGGKTGGLEFPRRAMFASVGLNVCPGVPAGRDPREPDPKVVRAADNCDIARQLGAAVPGQQAAWEAEEEAAKRRKQKGGGSKKQQQLGDLSLRKVRVKIANPHLRRLVSGAIAGAVSRTFVAPLETIRTHLMVGSIGVDSMAGVFQWIMQNEGWTGLFRGNAVNVLRVAPSKAIEHFTYDTAKKFLTPKGDEPPKIPIPTPLVAGALAGFASTLCTYPMELIKTRVTIEKDVYDNVAHAFVKILRDEGPSELYRGLTPSLIGVVPYAACNFYAYETLKRLYRRATGRRPGADVGPVATLLIGSAAGAIASSATFPLEVARKQMQVGAVGGRQVYQNVLHAIYCILKKEGAGGLYRGLGPSCIKLMPAAGIAFMCYEACKKILVDKEEDEEEEDEAGGGEDDKKKVE

SEQ ID NO: 50903 - protein, 380 aa, Zea mays
  Clone ID: LIB3354-120-A12_FLI.pep
YHLSGTTPERQPSAGCRRTPTSQGHSVQCTESFMRENVMDELKQMQPEDESKKKMLDILKRLHLEEEMASDGEDESMLSEELIQKVMSGEEIKLEDLSDCEIKRFRQALASGELSKMIEPWTPWWKKPSARSISLGLDGSQLIRQVNAEDTAVPYPDPNTDQEASINEIPEGPESPLPSLKQLTRTEPSPLLAVHLVDILYSYCFTLRLYNGDWHSDPLGACTVALSMSKVMGQDAKPETVPEALAACIEETCSPAYRHTGGFRFAIGLVDDIIAILSLGQNALICALCDFHRLIEVGKSMLKVEKVGKTERAQNSPKLRSAARKLFFMTCWVHEQPDEAWPSLAHIVQVQKASMEELETGNWKADRKSKPQSAVLIEEL

SEQ ID NO: 50904 - protein, 495 aa, Zea mays
  Clone ID: LIB3069-029-F6_FLI.pep
PLAVQFSDPLPQQRRQSRRQGSMAPPRISFLELCLSFLCFVVFYYLHIRSKRKNPFVPLDWPLVGMLPALLGNLHHLHDWITSLLVASQLSFLFTGPPRSGMQFFVTADPANVRHVFTSNFANYPKGPEFEEIFDVLGGGIFNADGDSWRRQRAKAQLLMSSAPFRALVSRYSRAKVDTALLPLLSHMAATGEAFDLQDVFLRLTFDTTTTLVFGVDPGCLSVGLPEVPFARAMDDAMGVLLLRHVVPMTWWKLARRLRIGHERKMAEAWRTIDQFVADTIAKRRAEKARHGNEQVSADLLSSYINDDEDEEGGVDAFLRDTTINLMLAGRDTTGSALSWFFYLLTRNPRVVGKIRQELECVKSKSSGSGGGMASFDPDELSRLTYLHAALCESLRLYPPVPQELKEAAAADVLPCGHEVRAGDKILVSLYAMGRMEEVWGSDCREFRPERWIPELEDGRRVVQVRYVPSYKFMSFNSGPRTCLGKDMAFVQLKA

SEQ ID NO: 50905 - protein, 567 aa, Zea mays
  Clone ID: LIB3592-098-F5_FLI.pep
LLSRKRRRCRRSGEEPAMAAHATLPFSCSSTLQTLTRTLSSRGAHQLRGGFLRLPSLAALPRLAHPYRRHVSASAAAAPNGASVEGEYDYDLFTIGAGSGGVRASRFASALYGSRVAICEMPFATIASDELGGLGGTCVLRGCVPKKLLVYASKYSHEFEESRGFGWTYETDPKHDWSTLIANKNTELQRLVGIYRNILNNAGVTLIEGRGKIVDPHTVSVNGKLYTAKHILVSVGGRPSMPDIPGIEHVIDSDAALDLPSKPEKIAIVGGGYIALEFAGIFNGLKSEVHVFIRQKKVLRGFDEEVRDFVAEQMSLRGITFHTEQSPQAITKSNDGLLSLKTNKENFGGFSHVMFATGRRPNSKNLGLEAVGVEMDKNGAIVVDEYSRTSVDSIWAVGDVTNRVNLTPVALMEGGAFAKTVFGNEPTKPDYRAIPSAVFSQPPIGQVGLTEEQAIEEYGDVDVFVANFRPLKATLSGLPDRVLMKILVCATSNKVVGVHMCGDDAPEIIQGIAIAVKAGLTKQDFDATIGIHPTSAEEFVTMRSPTRKIRKSSTDQVESKDEVVSKQ

SEQ ID NO: 50906 - protein, 356 aa, Zea mays
  Clone ID: LIB3608-012-F4_FLI.pep
SNDMMATSKLAVLALFALLGSVSCQAGGYYDYYYPTPQRPPTPSPAGTHLKVGYYRNKCAAAYVDVEAIVKKHVKATDAGMQAGLVRLFFHDCFVRGCDGSILLDTFSNDTSLTPEKFGVPNFPSLRGFEVIDAAKAEIEAACPGKVSCADIVAFAARDASYFLSAGGISFAMPAGRYDGTVSLASETLPNLPPPFAGFDQLVKMFADKGLDASDMITLSGAHSIGRSHCSSFTRDRLPPSNTTDIDPAFAATLQAKCRSANAGTDNTVMQDFKSPDVLDNQYYKNVLAHKVLFTSDAALTTNFTSNNLVRAYADFVPYLWQQKFEKAMVKMGGIQLKTADNGEIRKTCRKVNNRT

SEQ ID NO: 50907 - protein, 410 aa, Zea mays
  Clone ID: LIB3960-023-D4_FLI.pep
GSTRRRPAGFAPLRPVLANLQEVFLGTKLAVLFPAVPLAIAAQCAHFGQVWVFTLSLLGLIPLAERVSFLTEQIAIYTGPTVGGLLNATCGNATELIIALFALMGGQIEVVKCSLLGSVLSNLLLVLGTSLFCGGVVNLGSDQPYDRTQADVSTGLLILGVLCQSLPLLLRYAVGAGEHSVAAPTTVLDLSRACSVVMLLAYVAYLFFQLKTHAQLFEPQEVDDGCEAEEDEQAVIGFASGLFWLAFNTVLIAILSEYVVGTIEPTSKSWGLSVSFISIILLPIVGNAAEHAGAIIFALKNKLDITLGVALGSATQISMFVVPLSVIVAWIAGIQMDLDFKLIETGSLFVSVIVTAFTLQDGSSHYLKGILLLLCYIVIGACFFVTRQPASNNNGAGLSLPTGTLSAQAA

SEQ ID NO: 50908 - protein, 252 aa, Zea mays
  Clone ID: 700266631_FLI.pep
RPHRPPHVQRLPPRRGHRRRRGHGHVQRHPQGQEEDFPHRLQLPPATSALILPISYTYIAMMGSQGLTDASKIAILNANYMAKRLEKHYPVLFRGVNGTVAHEFIIDLRAFKTTAGIEPEDVAKRLMDYGFHAPTMSWPVPGTLMIEPTESESKAELDRFCDALISIREEIAEIESGKADVLNNVLKGAPHPPQLLMGDTWSKPYSREYAAFPAAWLRGAKFWPTTGRVDNVYGDRNLICTLQQATQVAEEA

SEQ ID NO: 50909 - protein, 189 aa, Zea mays
  Clone ID: 700168880_FLI.pep
DRLPFFTDEEREKLVGSYDMLGLNYYTSRFSKHIDITQHNTLRLNTDDAYASQETKGPDGEPIGPPMGNWIYLYPQGLKDLLKIMKEKYGNPPMYITENGMAEVDLGNNLNDQKRIDYLQSHLAALQESVQSGANVKGYFLWSLLDNFEWFCGYTQPYGIVYVDRNDGCKRYMKQSAKWYKRFIAANDK

SEQ ID NO: 50910 - protein, 73 aa, Zea mays
  Clone ID: 700264441_FLI.pep
LRLLVEVWIFPQHGEVIRLTASLGVLSRMDGGSNPPRFFSSRNLLLTKELTIALGCFIFVYRLSRLGPVWISL

SEQ ID NO: 50911 - protein, 135 aa, Zea mays
  Clone ID: 700425893_FLI.pep
DPVGRAAGPWRRGRARRRGGRRLQAHDGRDVPCVQQRAQGIHHHRQGQEELRLLAQEGVRGAVRLQPRIPVPVVRQVCLRGRRACHAGACDAEARRHVAGGSVPAQPQSLGMLAAGRIDDPGHIKCSRTCIQIIR

SEQ ID NO: 50912 - protein, 100 aa, Zea mays
  Clone ID: 700338423_FLI.pep
DDETKALQVELTSLLDAVQETETKMIEMSALNHLMSTHILQQAQQIQYLYDQAVEATNNVERGNKELSQAIQRNSSSRTFLLLFFFVLTFSVLFLDWYNN

SEQ ID NO: 50913 - protein, 88 aa, Zea mays
  Clone ID: 700356152_FLI.pep
APHGEQARKQPPHCHYLTMARAYVFLVVLLLAAVIVAPFAGATRVDVVEGRSMASADAPEAAAPSPGPDSASSPDSSSDAPSSSSSSD

SEQ ID NO: 50914 - protein, 76 aa, Zea mays
  Clone ID: 700425005_FLI.pep
RSRTGVSEISAESSFTSIEEFLEPLELCYKSLCDCGDKAIADGSLLDLLRQVFTFGLSLVKLDIRQQPLLPLVLGP

SEQ ID NO: 50915 - protein, 88 aa, Zea mays
  Clone ID: 700194567_FLI.pep
LGWLHQHGNRLFDGDAEFPLANNCLKALWGKAGLREFFVSVSYESVTLSIKLFHPIFTSKGSRKESSRNCCDNKTTCNMIISLWCFQF

SEQ ID NO: 50916 - protein, 222 aa, Zea mays
  Clone ID: 700217236_FLI.pep
RQARHYGRRRTDGSAALVRARVSRAQRRLRAVQRQPLLASTARVHGGGRVERAGAGQGGVPGVFGARRRQEAARRRGAQAAALAHARLRRRRRVAAGVGAQPAAQGVGAAPPGHQGGPGRQHGQRQQGAHAGAGGQDAGGRAVRRRLLLPAARLVSVSDRPCPCKQGIASCAPRGSSSAVTIAAVRGGDDVVHVKRELLPPYDSFTTYIFLCVVLTCRSINQ

SEQ ID NO: 50917 - protein, 95 aa, Zea mays
  Clone ID: 700468059_FLI.pep
SSSTPRCTRRRTTPPTRLTAGTRRCHSSRRTEDLNVAVLRLGCDPILYSLFPSSSSCASWAIPISSAMKNLSLLVVIHLLPVPWEVLDPATTQGC

SEQ ID NO: 50918 - protein, 126 aa, Zea mays
  Clone ID: 700470737_FLI.pep
IMNGSMDELARCPGIGERKVRRLYDTFHEPFKRVPARPRPNLVVPDTPDREKAKGQPSSTDGSSLQDAVEKPDASKKTKKGSDVRSALTVAFAKYSEKIRSQGRDAPNEAGESTGGSTVEAERAGD

SEQ ID NO: 50919 - protein, 91 aa, Zea mays
  Clone ID: 700429657_FLI.pep
MLPLFCGLIITLHHSGKRKPSPEFYLQAADQLNVDPASCVFIDDRMINIEAALSVGMVGLQFKSAEALQKDLCALGVELSPLVCEGEAQVQ

SEQ ID NO: 50920 - protein, 121 aa, Zea mays
  Clone ID: 700471983_FLI.pep
ILLVMVDSLAKLSMDVGDKDLVYSLLLVFSGMLMDEKGKECILDNIQITISVLTELVSYPHMMVVRETALQCLVAFSTFPHSKIYPVRRKVVQAAVRALDDKKRAVRRVAVRCRHTWQSFA

SEQ ID NO: 50921 - protein, 90 aa, Zea mays
  Clone ID: 700472369_FLI.pep
IHKIPPPPQGGTEFCVSQETSRLTSLFLVFMPTTQDNTATPMELEDFISFDWIWMRWTLLVRRERECMAWEEHIFVHPFHESCYLPCQIM

SEQ ID NO: 50922 - protein, 106 aa, Zea mays
  Clone ID: 700441870_FLI.pep
WGTTWRTSQNLSVYSNEIAGPSSKSYWEESRKQEATNSGVSISGEAIRNKRLNPPDNAIRGSHHHRGRYSQISESWLLSSNHSRSSSARFGSGGSSRSTSKGQTRG

SEQ ID NO: 50923 - protein, 124 aa, Zea mays
  Clone ID: LIB3159-021-D3_FLI.pep
RSAKRHRLQLRRGPDGSLRALPQRDAQGACQGRGRRRQQGQGARRTCGGHHCQADRGDDGTCSCRGGGSCQGPRRPPGGSSQGRRQAGGERRGTQRRRASLDSSLDQIRIHEEEHAYVCVSGRS

SEQ ID NO: 50924 - protein, 120 aa, Zea mays
  Clone ID: 700169189_FLI.pep
ATYISLFFFSRLVVAAPSSLVSSEPLLVVESFIAGPVTPEEDKDSSRRLHTATSGTKFRAARRRRGRRRLGGAVTHGPRRRRRWRVARRRGRPSSRSWAARPRPAGSRRSICRWWCSGRM

SEQ ID NO: 50925 - protein, 242 aa, Zea mays
  Clone ID: 700431831_FLI.pep
CRLGDQSSRLFFVTANVHVLGPEEPGRLRSFMLDFSYPRVSSAMRGGFPAVRPGGERVPGGIQWQAGLDPRHHQGAVAGYGAHYGSEGGSSSSARPPVFPGPELPPGGCLAGVPADSSCALSLLSTQPWDAAHSHSHSHAAPTAGFDGGSPVAPSLMAASSYIAPSPWTETDSWGHEGGRSVPQLPPDDVPLGEVHSGSSSHHGQFSGELELALQGNRPAPGSAAPPAPRNNQGSAGTFDQA

SEQ ID NO: 50926 - protein, 238 aa, Zea mays
  Clone ID: LIB3068-052-B8_FLI.pep
PDDAAVAVVVLNQPLPRFAPLLWSRAAVRVCADGGANRVFDGMPALLPGQDPDEVRASYKPDVIKGDMDSVRPEVKEHYSNLGTRIVDESHDQDTTDLHKCIAFIAENYSATNKSNQLSILVLGALGGRYDHEMGNINVLHLFPSINIVLLSDDCLIFLLSKMHTHEIHVEKSIEGPHCGLIPIGMPSTSTTTTGLRWNLDNTSMSFGGLISTSNIVEEDKVTVTSDSDLMWTTSLRK

SEQ ID NO: 50927 - protein, 328 aa, Zea mays
  Clone ID: LIB3069-026-F10_FLI.pep
KELALNLEVGPISMTKWQLFLQIEQSFQVHRSYGSMLEGEADELKRVFLEGNPYLLGLTMIVSLLHSLFDFLAFKNDIQFWNKNKSMEGLSAKSVVLNFVCQLIVFLYLLDNDTSWMILASSGIGVCIEFWKIGKAMHIEVDRSGKIPMLRFRDRESYAQNKTKEYDAIAMKYLTYVLFLLVIGFSIYSLKYEKHKSWYSWILSSMTSCVYMFGFIMMCPQLFINYKLKSVAHMPWRQMTYKFLNTIIDDLFAFVIKMPMLHRLSVFRDDVIFLIYVYQRWKYPVDKKRVNEFGFGGEEEPAAQETLEGSDPAAAAAAAEPTEDKKTK

SEQ ID NO: 50928 - protein, 372 aa, Zea mays
  Clone ID: LIB3069-036-D6_FLI.pep
IHKHKRTLAMASEVVRPSDAELLKAQADIWRLSLSYLTPLSLRCAVELGIPTAIYRHGGAASAAELVTALSLPSTKLPFLRRLLRLLAASGVFTVDKQSTEEERYRISPVSYLLVDGIPHEDHMNHTALVLTCTSTRYIEAGIGLAEWFKRDVVTSPFEELHGATLFHESMGSLDADFHDMASEALDAHDNFGIEIAMREFRDLFEGIQSMTYCCGNFGDDKGARAIVKAFPHIKCTVLAPPKIIATKPADGAKINYVEGDMFSFIPPAQTVVLKLVLHHLTDEECVKLLAQCRKAIPPRKDGGKVIIGDIMIDHSGLMLETHLLMDIGMMTMTKGRQRDEKEWSELFTKAGFSEYKILKEFGARVAFEVYP

SEQ ID NO: 50929 - protein, 184 aa, Zea mays
  Clone ID: LIB3069-046-E1_FLI.pep
KPTGQTNYTHNVIMISLSLSLTHTHTFRSLDSFTTTTNGCTAQLHTSLSNDHRLHVPRHARARHDLVHQRGDGGADHRAGPVHGLVLEVAADDGRAERAGRVHGRARQRARGQHERALREPNRQRAQRRGRELPLAVAAARPRLALADHVHRVHQQEREHALQHRPAEPGHRHRDPRRRHLLRA

SEQ ID NO: 50930 - protein, 466 aa, Zea mays
  Clone ID: LIB3067-047-F4_FLI.pep
SDLLEGDAAAAAAARRSLVQWSGASTELSQRSRSKSKILEADGKGSRRGHARWLSADMTSNGSGMEVGKFSQDDVSRCPEKTVNLQDLQNSLIASKELVKVLAHIWGPGELNPSSVSLISALRSELDVARSHVRKLIKEKKSNPYEIEDLKKQLAEEMESWKVKQKEKVANALQFIVSELDTEKKSRKRAEKTNKKLSVALANTEASLQAVTKELERERKSKGRVEKICNELIRGIDEDKAEVEALKRETEKAQEELQKEREMLQLADEWREQRVQMKLLEARLQFEEKNAAVNQLRDELQAYLDTKKEQEPMNDPMQLSHASENGATAADDVVPDRNGGNFSEDDSSEGSDIHSIELNVDGVNRTYTWSYTPSSKGRQRSASRHESFSDRGMDGVNSWRLEQSFRGMDEELEGDWAEGCSNGILTMDHDEERYLAIKNLREQMLAGSGFILSQGRENAERECCGL

SEQ ID NO: 50931 - protein, 295 aa, Zea mays
  Clone ID: LIB3067-056-D2_FLI.pep
YYWYATTDRDEQRPLSRSISTAEEPLSRLVRWRESSGCCRRRSQRRVRRLSEGRVAERVGAALLVVRVPQERGVRGEHVAVLRGRLGRPLEVAGGALLVAVHLPDQLGVLRQELAVVGVGEDRAGVVLVCPPVVPFHLVQELCVVPEEEAVAGVLLDHLLVVRLDAGAVPSVPRRHQIPAAAAPAAVAAAEPGAAAAAAVGAEEARAEAVDAEAPGQEQRVLLRVGAAGKAELAEAQLPLHLVRVFVVVVFLLFVVGGRMRAPERLDGLERHRPRPWRALAGRREEKVVVVVVVR

SEQ ID NO: 50932 - protein, 256 aa, Zea mays
  Clone ID: LIB3068-017-G10_FLI.pep
SAFSGLRVLNLSGNSIVRVTAGALPKGLHMLSLSKNNISTIEGLRELTRLRLLDISYNRISRIGHGLASCSSLKELYLAGNKISEVDGLHRLLKLKILDLRHNKISTSKGLGQLAANYNSLEAINLAGNPAQKNVGDEHLKKYLLGLLPNLAVYNKQPIRATGSKDVSDRHTRKISSSHHSDRGGRPDRRSSRLVGAPSAHKPQSSRHGRSGYVSSSALKYTRARNTHKTSLGSRPLEHASAIDLAKQTQTEGRTQ

SEQ ID NO: 50933 - protein, 362 aa, Glycine max
  Clone ID: 700844117_FLI.pep
SNPDSAWIIVHGHVYDCTRFLKDHPGGTDSILINAGTDCTEEFDAIHSDKAKKLLEDYRIGELITTGYTSDSSPNNSVHGNSEFTHLAPIKESTTPPSRSVALNPREKIPCKLVSKTSISHDARLFRFALPSEDQLLGLSVGKHIFLCATIDGKLCMRAYTPTSSVDEVGFFDLLIKVYFKGVHPKFPNGGLMSQHLDSLPIGSMLDVKGPLGHIEYTGRGNFMVHGKPRFAKRLAMLAGGTGITPIYQVAQAILKDPEDHTEMHVVYANRTEDDILLREELDEWAKIHNDRFKLWYVVEIAKEGWKYSVGFITESITREHLPKASRDSLALTCGPPPMIQFAVQPNLEKMGYDIKNDLLVF

SEQ ID NO: 50934 - protein, 271 aa, Zea mays
  Clone ID: LIB3068-013-G3_FLI.pep
PFPSATDSTNRSLSAIVIYSRERPTRTSRCFLQDLIILARARMQLKPPARPKLYSGLMPQEDLDPYRDLIPGLPEDLAKICLALVPRAHFPAMGAVSKRWMSFLESKELVAVRKEVGKLEEWVYVLVPDAGAKGSHWEILECSGQKQSPLPRMPGLTKAGFGVVVIGGKLFVIAGYAADHGKDCASDEVYQYDSCLNRWTVLAKMNVARCDFACAEVNGVIYVAGGFGPNGESLSSVEVYDPEQNKWTLIEGLRRPRWGCFGCSFEGKLYV

SEQ ID NO: 50935 - protein, 132 aa, Zea mays
  Clone ID: LIB3068-039-C12_FLI.pep
SMQCSNSSLILGNVTAQPTTGGCSVSSCNYDGYVNGTIATSLSSGLQPMCPGPHQFPPLTAVPTAANHGSYSPSPAPGPGDAGGATPGGSSLSPSNEPAGNSSQAAAINQPCRFLLIFILSVTLSLRVWIPV

SEQ ID NO: 50936 - protein, 171 aa, Zea mays
  Clone ID: LIB3069-040-G9_FLI.pep
LQEKEDMNLGALQSEDASKEIGDKKGGTIEGDHVKGIRRSSRLESNDEMKIDDKATTRAMAKDAFINKGISSNPFSVLNTDNYVLMDVALKLGVELGSSFNEAVENLELIKSLELSRKNLAVQSVKSSFDPNHMVIPDSDVDNIVHNEQEDNTKTDIENVMVLRKGHKICH

SEQ ID NO: 50937 - protein, 460 aa, Zea mays
  Clone ID: LIB3067-027-G6_FLI.pep
YQLHKSLSKMALQNIGASNRDDAFYRYKMPRMITKIEGRGNGIKTNVVNMVDIAKALARPASYTTKYFGCELGAQSKFDEKTGISLVNGAHDTAKLAGLLEVFIKKYVQCYGCGNPETEILISKTQMISLKCAACGFVSDVDMRDKLTTFILKNPPEQKKGGKDKKAMRRAEKERLKEGEAADEEQKKLKKDAKKKGSKDSTAKGLKKKATTATGSDEDHSSSPTRSHDGDKAAADDDDDDVQWQTDTSIEAAKQRMQEQLSAATAEMVMLSTEETEKKMKQATHKDGSTNGSAKEIPNDKPAVTKPSPYEELIGDIKASLGSAPTPTQLKAVLASSTLPPQDVMNALLEALFGGVGKGFTKEVVKNKKYLAVAVPDEGAQTLLVQAIEAFGGKCNPEALKEVPVVLKALYDGDILDEETIVDWYNDAVAAGKDSQVVKNAKPFVEWLQSAESDEDGDDE

SEQ ID NO: 50938 - protein, 264 aa, Zea mays
  Clone ID: LIB3068-031-A9_FLI.pep
GLKEGGVLPGIKVDKGTIEVVGTDKETTTQGHDDLGKRCAKYYEAGARFAKWRAVLKIGPNEPSQLAIDLNAQGLARYAIICQENGLVPIVEPEILVDGPHDIDRCAYVTETVLAACYKALNEHHVLLEGTLLKPNMVTPGSDSKKVTPEVIAQYTVRTLQRTVPAAVPAVVFLSGGQSEEEATLNLNAMNKLSTKKPWALSFSFGRALQASTLKAWAGKVENVEKARAAFLARCKANSEATLGTYKGDAAADTESLHVKDYKY

SEQ ID NO: 50939 - protein, 256 aa, Zea mays
  Clone ID: LIB3068-046-G3_FLI.pep
IFVQERVDMEPSPQPMGVAAGGSQVYPASAYPPAATVAPASVVSAGLQSGQPFPANPGHMSAQHQIVYQQAQQFHQQLQQQQQQQLQQFWVERMTEIEATTDFKNHNLPLARIKKIMKADEDVRMISAEAPVVFAKACEIFILELTLRSWMHTEENKRRTLQKNDIAAAITRTDIYDFLVDIVPRDEMKEDGIGLPRAGLPPMGAPADAYPYYYMPQQQVPGSGMVYGAQQGHPVTYLWQEPQQQQEQAPEEQQSA

SEQ ID NO: 50940 - protein, 164 aa, Zea mays
  Clone ID: LIB3068-049-A1_FLI.pep
VKLASLLVLDTFAETYIHNLSHHENRASSGITSLPHHFYKLFVVDSPILVFINFVQHFLNACFITHPILRHGLFQFVSCYVPAIVFVEVLKSKEQILLLLQFMPVHHGSEELGVVNAATLVHVNCFHKLLNLRFANLGPELRQPVLEFLDRDRAAPVCIHVVEH

SEQ ID NO: 50941 - protein, 107 aa, Zea mays
  Clone ID: LIB3069-004-B4_FLI.pep
FGKSIEAEEAYKNGCQYLLGQFGPPFATLRLDFSPVKLTVPSPSLASKPPLRDIRKNLEDMISARRSALATSSDGQLNPVPDKLLGEMQGLLANVDRMLTRPPENAP

SEQ ID NO: 50942 - protein, 287 aa, Zea mays
  Clone ID: LIB3069-014-C9_FLI.pep
LRANLFYIYGESTPVFTSCKRACLRLADRPACAAMDVKCRRLEGKVAIVTASTMGIGLAIAERLGLEGAAVVISSRKQKNVNEAVEGLRAKGITAVGAVCHVSDAQQRKSLIETAVKNFGHIDILVSNAAANPSVDSILEMKESVLDKLWDINVKASILLIQDAAPHLRKGSSVIIISSIAGYNPEQGLTMYGVTKTALFGLTKALAGEMGPDTRVNCVAPGFVPTRFASFLTENETIRKELNERTKLKRLGTVEDMAAAAAFLASDDASYITAETIVVAGGVQSRL

SEQ ID NO: 50943 - protein, 294 aa, Zea mays; identical to SEQ ID NO: 42329
  Clone ID: LIB3069-023-F6_FLI.pep

SEQ ID NO: 50944 - protein, 313 aa, Zea mays
  Clone ID: LIB3069-024-D6_FLI.pep
RSRSSCHPALSCCDNMVEEDPSSSCNPALACWDMVDVAPVQEGNDAHEAMVFVLSYLGLRDILSVEMVCKSLHSAVRNEPFLWKCIHIDSRLGKKMSDADLMCLTQKSPGSMQCLSLMHCNNITDQGLKAVLKSNLQLTKLGIFGAFRITYQGLIDSLRSFNMETDIGIKKLRVTNHVTASEAQYEELLSLMKIDKKMALHKQEPRIFHSGRLLLDLYGGYVPDSFVPELHDEFALDIEKCPLCPNYKLVYDCPSKECKNSRHSTCRGCIVCIWRCLLCGRCIDIANVFQESFCLGKLCRDCVKYEDLLPTEK

SEQ ID NO: 50945 - protein, 97 aa, Zea mays
  Clone ID: LIB3069-034-H12_FLI.pep
YSLVGDLNSTFSFLALGPFLSIYLIDFHAYHVMDVTVRAMPPGDIFFMFTLEYSKVFKVRHARAASKTWRPVCFAAPSASPLRKLQGSTIQPHTRIC

SEQ ID NO: 50946 - protein, 560 aa, Zea mays
  Clone ID: LIB3069-056-C11_FLI.pep
PHPQIKPRAQGSKRAAHRKAPGSCTRWPHCGMAATAAAAGVEFPLIGVAVATLIVTVLVAAVMRRRRRPWHQAPLVEGKPAPEAGCAVSDGGTDVIIVGAGVAGSALAYTLGKDGRRVHVIERDLTEPDRIVGELLQPGGYLKLIELGLQDCVEEIDAQRVLGYALFKDGRNTKLAYPLEKFHFDVAGRSFHNGRFIQRMRQKAASLPNVQLEQGTVTSLLEENGTVKGVQYKTKSGEELKAYAPLTIVCDGCFSNLRRALCSPKVDVPSCFVGLVLENCQLPHPNHGHVILANPSPILFYPISSTEVRCLVDVPGQKVPSIATGEMANYLKTVVAPQIPPEIYDSFIAAIDKGSIRTMPNRSMPAAPHPTPGALLMGDAFNMRHPLTGGGMTVALSDIVVLRNLLKPLRNLHDASSLCKYLESFYTLRKPVASTINTLAGALYKVFSASPDQARNEMRQACFDYLSLGGVFSNGPIALLSGLNPRPLSLVAHFFAVAIYGVGRLMLPLPSPKRMWIGARLISGACGIILPIIKAEGVRQMFFPATVPAYYRAAPTGEKA

SEQ ID NO: 50947 - protein, 315 aa, Zea mays
  Clone ID: LIB3069-057-G3_FLI.pep
RGKKLCVPLYPELPLEGQFPAPMFHGSPLLGRGGAGGPMCYFPDGTPAGIQGARHAQFGISLSDLHLNKLQPGLSPHGLHRQLDHGVQVQVQQPRIAAGLIVGGHPAARDDVSCLLTIGTPKSKKPPSDVKKASTAAAPQLMLFGKAILTEQQISLGGGNVVPALLAKKSPSDDDDDVAERTVSNSDVSSPGRSNQDGTSSGGGPAARACWQEEECNNRAAGSEDDLLGHCKVFMQSEDVGRTLDLSAVASYEELYQRLADMFGVDKAELTSHVFYRDDASGALKHPGDEPFSEFTKTARRLTILTDESSDSLAR

SEQ ID NO: 50948 - protein, 182 aa, Glycine max
  Clone ID: 700874396_FLI.pep
VLLDENLEARVSDFGMARHMSAMDTHLSVSTLAGTPGYVPPEYYESFRCSTKGDVYSYGVVLLELLTGKRPTDSADFGDNNLVGWVKQHAKLKISDIFDPELMKEDPNLEMELLQHLKIAVSCLDDRHWRRPTMIQVLTMFKEIQAGSGIDSQSTIANEDDSFNAVEMVEMSIKETPELSKH

SEQ ID NO: 50949 - protein, 225 aa, Glycine max
  Clone ID: 700876074_FLI.pep
CSDPRGLLLVYDYIPNGTLAEHLHNRKGSLTWQVRLDIALQTALAMEYLHFSVVPPIVHRDITSSNIFVERDMRIKVGDFGLSRLLVVQDNNTTSSSNGFVWTGPQGTPGYLDPDYHRSFRLTEKSDVYSFGVVLLELISGLRAVDQNRDKREMALADLVVSRIQMGQLHQVLDPVLDCADGGVAAVAELAFRCVAADKDDRPDAREVVEELKRVRNRAVTAAKE

SEQ ID NO: 50950 - protein, 141 aa, Glycine max
  Clone ID: 700789612_FLI.pep
FVFSLFQISEIISRFERKGYKLVGIKVVIPKKEFAQRHYHDLKERPFFDGLCDFLSSGPVIAMVWEGQGVISYGRKLIGATDPQKSEPGTIRGDLAVVVGRNIIHGSDGPETAKDEIKLWFKPEELVSFTSNAEKWIYGAN

SEQ ID NO: 50951 - protein, 98 aa, Glycine max
  Clone ID: 700877175_FLI.pep
KVSFTRGSSNFVASYLGLSPSIYILSCILIFVVLFILFLHVLVGGSYYFTYHIAHGVFCCFLHCNTALQTATLLSKDGSIPLPAHLGNQPRNEPYPFI

SEQ ID NO: 50952 - protein, 242 aa, Glycine max
  Clone ID: 700788839_FLI.pep
RPVNTFCPCHLIGSNNVHITGLAYSSFSELLVSYNDELIYLFEKNVHSDSSPSSATSEDPKNIHEAQVYSGHRNAQTIKGVNFFGPNDEYIMSGSDCGHIFIWKKKEAKLVRLMVGDQHVVNQLEAHPHIPILATCGIEKNVKIWAPLGNDIPPLPANVKEIMETNRQGREDRSRVTLTPDVIMHVLRLQRRQTLAYIERRHNRADIVSDEEDAEGYLLGFSDGDASSEEDSPGNSRDCNIS

SEQ ID NO: 50953 - protein, 276 aa, Glycine max
  Clone ID: 700788136_FLI.pep
VTGANKGIGFETVKELASNGVKVVLTARDEKKGHEAFERLKECGFSDLVIFHQLDVTESASISSLVEFVKTNFGKLDILVNNAGISGANLDEVEGSTFKWEELTQTNEMTEKCLTTNYYGAKKTTEAFLTLLQLSNSPRIVNVSSQAGLLKNISNEWAKGVLDDADNLTEERIDEVLKEFIKDFKEGSLATKGWPTFLSAYIVSKAAMNSYTRILAKKHQNMCINSVCPGFVKTDINKNTGILTVDQGAASVVKLALLPDGSPSGLFYIRQELSNF

SEQ ID NO: 50954 - protein, 111 aa, Glycine max
  Clone ID: 700895707_FLI.pep
VQTSVVVIEQKAKKQLVFVINKLMWMACLFISIAFISLTYVVVGSHSRWLAIYATVIGSLIMLSTIGSMCYCVILHRMEETKLRAESRSFSMSHASDQEILNSEYKRMYAL

SEQ ID NO: 50955 - protein, 170 aa, Glycine max
  Clone ID: 700875818_FLI.pep
ITGVLLNGLDHGQKDLTWQKWSYQIGLRGEAMNLVAPNGVSSVDWEKDSLAVRSQSQLKWHKAYFNAPEGVEPLALDLSSMGKGQVWINGQSIGRYWMVYAKGSCSSCNYAGTYRPAKCQLGCGQPTQRWYHVPRSWLRPTKNLIVVFEELGGNPWKIALVKRTTHTPAN

SEQ ID NO: 50956 - protein, 227 aa, Glycine max
  Clone ID: 700877158_FLI.pep
NRISGKIPTDIGNLWSLTLLSLGDNEISGEIPMSVVNLARLKHLDLSNNRLTGEIPYDFGKLAMLSRALLSENQLTGSIPKSVSRINRLADLDVSSNRLSGSIPVELGKMKVLSTLKLDGNSMTGPVPSTLLSNTGMGILNLSRNGFSGTIPDVFGAGSYFMVLDLSFNNFSGRIPGSLSASKFMGHLDLSYNHLCGTIPIGSPFEHLDAASFSNNDCLCGNPLKAC

SEQ ID NO: 50957 - protein, 122 aa, Glycine max
  Clone ID: 700831544_FLI.pep
EDITIEGFNIPRDTIVIINGWGMQRDPQLWNDATCFKPERFDVEGEEKKLVAFGMGRRACPGEPMAMQSVSFTLGLLIQCFDWKRVSEEKLDMTENNWITLSRLIPLEAMCKARPLATKIGI

SEQ ID NO: 50958 - protein, 94 aa, Glycine max
  Clone ID: 700893844_FLI.pep
VYFDESVCQCTQVMAVDMSYRLGWIDDSLVKRVGDILKQAKLPSAPPETVTVDMFKSVMAVSTDSQYPFNVQFVYIKAYSFFYFLFWCIRWIRR

SEQ ID NO: 50959 - protein, 270 aa, Glycine max; identical to SEQ ID NO: 44080
  Clone ID: 700839666_FLI.pep

SEQ ID NO: 50960 - protein, 98 aa, Glycine max
  Clone ID: 700843418_FLI.pep
TIYGILQRIKIPEIKNHPWFLRNLPIEQMEGGSWQMNDVNNPSQSVEEVLSIIQEARKSLNVPKVGGLLIGGSMDLDDLDADEDLEDLQTSGEFVCPI

SEQ ID NO: 50961 - protein, 149 aa, Glycine max
  Clone ID: 700844289_FLI.pep
YLKAVIKETFRLHPPITILAPRESTQNTKVMGYDIAAGTQVMVNAWAIARDPSYWDQPEEFQPERFLNSSIDVKGHDFQLLPFGAGRRACPGLTFSMVVVELVIANLVHQFNWAIPKGVVGDQTMDITETTGLSIHRKFPLIAIASPHA

SEQ ID NO: 50962 - protein, 379 aa, Glycine max
  Clone ID: 700844620_FLI.pep
FALCGLIGIITAYIFVWIAKYYTDYKHEPVRILALSSSTGHGTNIIAGVSLGLESTALPVLVISVSIISAFWLGHTCGLVDETGNPTGGLFGTAVATMGMLSTAAYILTMDMFGPIADNAGGIVEMSQQPESVREITDVLDAVGNTTKATTKGFAIGSAALASFLLFSAYMDEVSAFAHEPFKQVDIAIPEVFVGGLLGSMLIFVFSAWACAAVGRTAQEVVNEVRRQFIERPGIMDYKEKPDYGRCVAIVASASLREMIKPGALAIISPIVVGILFRILGYYTGQPLLGAKVVAALLMFATVSGILMALFLNTAGGAWDNAKKYIETGALGGKGSEAHKAAITGDTVGDPFKDTAGPSIHVLIKMLATITLVMAPVFL

SEQ ID NO: 50963 - protein, 155 aa, Glycine max
  Clone ID: 700843651_FLI.pep
TVYGFNATIPNFLTSSFQVTLSSRNPNDKIGIYYDRLNTYVTYRNQQVTYRTSIPPSYQGHKEEDVWSPFVYGTNVPVAPYNFVGLSQDQTNGNVLVLVKIDGKVRWKVGSFVSAHYNLNVRCPAFITFGPQSNGIALGNNAVKYQLVQRCTVGV

SEQ ID NO: 50964 - protein, 274 aa, Oryza sativa
  Clone ID: LIB4309-027-A10_FLI.pep
LEQPTATTHTQFPAMSAAATAGTYSPASAAGEKRRERKEELRRHLAEDADWPRADGRSFHDCRPAFMQTGPTTAASGSAYAEFGKTKVIVSVFGPRESKKAMLYSDTGRLNCNVSYTTFATPIRGQGTDNKEYSAMLHKALEGAVMLHTFPKTTVDVFALVLESGGSDLPIIISCASLALADAGIMMYDLVTSVSVSCFGKNIIIDPTSDEEAWQDGSLMVAYMPARKEITQLTLTGEWSDGKITNAVELCMDACSKLCDILRERLKDASSLAE

SEQ ID NO: 50965 - protein, 176 aa, Zea mays
  Clone ID: 700048626_FLI.pep
VQCFLGHQALWLHGGIFFSRAGLVHHAYVFISMMPFVLNKMDSVCSYKEGAGVLLSCDQYMSSATWVMSDCEFSADLNFLQLPSSVQLHSQAHGTFDIFATVLCTLEGADPPTIVYAINGLGASRILSGGECQHHHRRGSSRLGRRGKDKLRQEEEKTEPRPCRMRRANVGMVGPE

SEQ ID NO: 50966 - protein, 378 aa, Zea mays
  Clone ID: 700044506_FLI.pep
SMAASPAEAGAQALPEATEAKEKGKRGGVLRRVWRALFGGREDFEKRLQYLSKEEAAVHARMRRRTQFSRRTVRNLIVLSVLAEVLAVVYAIMMTRNEDLTWQMRAIRVLPMFVLPVVSSVIYSTVVNFTRMLERKDQKTLEKLRAERKAKIDELKERTNYYLTQQLIQKYDLDPAAKAAAASVLASKLGEDTGLKVHVGEEPKLDAAVARSNDVEIVPSDGLRNRKQPNARGSRTGSPTADTPARGTESSLTAGADLETAPAPLVVEHHQGLGASDGGGWIAKIAALLVAEDPSQSYALICGNCHMHNGLARKEDYPHVTYYCPHCHALNTSKQSMWQYSGSNSGRSSPVVLDDGLSTSSSVQETELSNLTHTAGAT

SEQ ID NO: 50967 - protein, 542 aa, Zea mays
  Clone ID: 700075354_FLI.pep
LTKINRQVPAGNLITDWSSQHRACHPLSSSSVVGDVARNLEPLGVERARHVDPLVGVSPEVVPLGLHQVGRQPVPAVGVEVGQASGHSRGADAVVDGEAHHPAPRRLPVHDLLRELGVYEQAGEARVPVVGLLDAVQEDGADDAPALPDPGQLAEVEPPAFLRALGLDDVHALRVAADLGRVQGLPHVLHQLRLVHRRAGGVVVTLEDLGGLHPLVLQPAQEPRVQGRLDRRSGHRQLGGLLHRPLPCPFHPGLVKDLVHQVAIAMLVLDAKDVGRDLDQEAQELALVPLGEHLVQLTVGELTDRLENVVCLGNQLHIAILDSVVNHLDKVARSTFANVRDTRATVRDLSSHLEDNVFDVLVSLERASGHQGRAVAGTLLSSRDTHAKIQEAALLHGLLPPLRVLVPLVPPIDDAVALLQVSCERRDGLVNWRAGLDEHDHHPWLLNGLHKGRGVMEAVDGKVSFCLGTLHGLVHLGGCPVVHRDGEPFLCNVEGKVLPHDRKASKTDSCERHLLLHYGAGALPSADSDAELNWRCHHRPAT

SEQ ID NO: 50968 - protein, 432 aa, Zea mays
  Clone ID: 700150895_FLI.pep
ASACKPSLLATCETTHNTTAMAVVDRWAGLGSALASFLFLWSMVQRHVPVTISHRVATWANKLVSYFNPYVEITISEYGAERFRRSDFFLAAEAYLSDACAPRARKLKAELGRDSSNLQVSVGDNDEVTDAFQGATVWWYVVKKLPRSNVISLYANQDDPRTYRVVFHRRHRDLVVGKYLPHVLKEGRAVTVRNRQRRLFTNNPSGGGRGRGDVWSHVPFEHPSTFDTLAMDPDDKEAVVDDLEAFREAKDYYTKVGKAWKRGYLLYGPPGTGKSTMIAAMANLLDYDVYDLELTAVNNNTDLRKLFIETTGKSIVVVEDIDCSVDLTGKRKDKKSEREADDKPKLPMEPDKDEGSKITLSGMLNFIDGLWSACGGERIIIFTTNHKDKLEPALIRRGRMDRHIEMSYCRFPASRCSPRTTWTSRSTSYSTR

SEQ ID NO: 50969 - protein, 188 aa, Zea mays; identical to SEQ ID NO: 44958
  Clone ID: 700153319_FLI.pep

SEQ ID NO: 50970 - protein, 234 aa, Zea mays; identical to SEQ ID NO: 42501
  Clone ID: 700103340_FLI.pep

SEQ ID NO: 50971 - protein, 475 aa, Zea mays
  Clone ID: 700223885_FLI.pep
TSRFPSNQFSDQSVVGVAGGMAQTPNPSRRSWVGPAPMPFLTPRPERRHLEMRWADGVSQSAARRSGVGAIARDGCERDQEVNVQVMLRCRPLSEEEQRVNAQSAISCNESKREVTVLHSLFKQADRTFTFDKVFGPQSQQRSIYNHAVAPLVTEVLEGYNCTVFVFGQTGTGKTYTMEGEMRQKVSELPDTAGVIPRAVCHIFEILTARRADYSMKVTFLELYNEDITDLLSLEDQSRFPEGRQKRPITLMEDGKGGAVIRGLEEIVVYSPSDIYSLLEHGSARRRTADTALNKQSSRSHAVFSINIQVKETTVGNEELIKYGRLNLVDLAGSENIARSGAREGRARETGEMNKSLLTLGRVINALVEHSVHVPYRDSKLPRLLRESLGGKAKTCIIATVSPSAHSLEETLVTLDYAARAKSIRNKPEANKKTCKTVVLKELYQEMERMKQDVKAAREKNGIYISHERFAQDET

SEQ ID NO: 50972 - protein, 418 aa, Zea mays
  Clone ID: 700166267_FLI.pep
AQQDPKVQAVREHVERGRRGATGRAGPVGLAGRRRRRRALRHVRAGVPGGGAAARAQRAGRRQEARRDAVDRAHPRRAEPVALAAQQGRRRRQAEGAPGAGRRWRRAGQGVPVRGEQADGGHPAHGVGALRPPPLRPPPQRLLRRMRRHGLPRQQGEYIVLYLVTPEYMVAAGAASLAKLISKRSRNEWQGGVSVRFWLHDTSFCFVCCHLASGGREGDEAHRNADAMEILSRTTFPRGHALNLPLPQNILDHDRVILLGDLNYRISLPEAKTRLLVERQDWKTLLENDQLRAEVCRGGAFQGWSEGPIGFSPTYKYHPNSDAYYGCATAARGRNKRRAPAWCDRVLWRGAGLAQTRYDRCESRLSDHRPVRAVFAVEVDAPGDLNSLRSFFMSERFDRDQMLLRKDDVNSARFADTL

SEQ ID NO: 50973 - protein, 436 aa, Zea mays
  Clone ID: 700213183_FLI.pep
GFIFALLLLVVVTFFSLSVVSLAAAVVVADLISNPTDQQLLARDGNRSWIAMALQYVEAQRQARPDLADWYASLADLYQQKLWHQLTLKLDQFLQLQAAQTGDTIIQLYNNFITDFETKINLLKLAHFAVIASRQYPDKDAAITFLEGVITKLRDTRESRINEPILYVKMQIAAINLEKGNQKECKNSLEDGKTTLDSMTDVDPTVHASFYWISSQYHKSCQEFAEFYKNALLYLAYTTVESLSESFKLDLAFDLSLAALLGDNIYNFGELLAHPIINSLIGTKVEWVYHMLQAFNTGNLAFYQELCRVHNAALTAQPALVQDERKLLEKINILCLMEIIFSRPSEDRTIPLSVIAEQTKLSISDVEYLLMKSLSVHLIEGIIDEVDSTVHVSWVQPRVLGIPQVKALRDRLDAWVGKVHTTLLSVEAETPDLVAA

SEQ ID NO: 50974 - protein, 123 aa, Glycine max
  Clone ID: 700893784_FLI.pep
FKNKCNVGYAFINMVSPSHIIAFYKAFNGKKWEKFNSEKVASLAYARIQGKAALVMHFQNSSLMNEDKRCRPILFHSEGQDTGDQEHFLSSNLNICIRQPDGSYSSDLLESPKGNLDQKLEKD

SEQ ID NO: 50975 - protein, 130 aa, Glycine max
  Clone ID: 700894449_FLI.pep
NVSYKSDIYSYGMLLLEMVGGRKNVDTSSPEDFHVLYPDWMHDLVHGDVHIHVEDEGDVKIARKLAIVGLWCIQWQPLNRPSIKSVIQMLESKEEDLLTVPPNPFHSSTSTIPSGFTSARLPLELEVIQE

SEQ ID NO: 50976 - protein, 171 aa, Zea mays
  Clone ID: 700344526_FLI.pep
HRHTSLLGTAETVQGGKKDIILFFNLLFHSLLFSDTSSTPPPLATPGRTIHAIHLSVFLFSGVVDQGAVGLAGLPRGRDGVVGDEHPAGVGGEPEPERRFELPAVVEAPRGAPVVRHRSPDAAAGLHEVHGAEVAVVVLELDEHVEVVRVRALIHLERDVDAGVLARHPPA

SEQ ID NO: 50977 - protein, 201 aa, Zea mays
  Clone ID: 700351762_FLI.pep
KRRLHGCTSASCAPRLAAASVAVAGATMPLRLDIKRKLAQRSERVKSVDLHPTEPWILSSLYSGSVCVWNYQTQTMVKSFEVTDLPVRSAKFIARKQWVVAGADDMFIRVYNYNTMDKVKVFEAHTDYIRCVAVHPTQPFVISSSDDMLIKLWDWDKGWVCTQIFEGHSHYVMQVTFNPKDTNTFASASLDRTIKIWSLLG

SEQ ID NO: 50978 - protein, 350 aa, Zea mays
  Clone ID: 700352804_FLI.pep
HCIGRQPSRAEPCSLLQLPKSHSAMAGTCAHVEFLRAQPAWALALAAVGLLVAVRAAARFALWVYAAFLRPGKPLRRRYGAWAVVTGATDGIGRAVAFRLAASGLGLVLVGRNQEKLAAVAAEIKARHPKVPEVRTFVLDFAGEGLAAGVEALKDSIRGLDVGVLVNNAGVSYPYARYFHEVDEELMRTLIRVNVEGVTRVTHAVLPAMVERKRGAIVNIGSGAASVVPSDPLYSVYAATKAYVDQFSRCLYVEYKSKGIDVQCQVPLYVATKMASIRKSSFMVPSADTYARAAVRHIGYEPRCTPYWPHSVVWFLISILPESLIDSVRLGMCIKIRKKGLAKDAKKKAL

SEQ ID NO: 50979 - protein, 183 aa, Zea mays
  Clone ID: 700353802_FLI.pep
AIIDFYSHIGYKHKYHKICVGRDSNGQPCMKILTIQSFKVNDKGILSLLELKFRNEMWPQIMTSPTMSMLPRVDILPQLQGNSGLGFLGHGQALPEIILHEHQAVPQDDLGLPSQNFLRLCDVRLPLAGIIRSVLGHRHCHIWVDQLLHILSKFQHGEFTWVPQVNRSSLVSIHQLNKTINLQ

SEQ ID NO: 50980 - protein, 547 aa, Zea mays
  Clone ID: 700354580_FLI.pep
ASAASDPDRAPAMALAFDEFGRPFIILREQEKKTRLRGLDAQKANIGAGKAVARILRTSLGPKGADKMLQSPDGDVIITNDGATILEQMDVDNQIAKLMVELSRSQDYEIGDGTTGVVVMAGALLEQAEKLLERGIHPIRVAEGYEMASKVAFDHLERISEKFEFSADNIEPLVQTCMTTLSSKIVNRCKRALAEIAVKAVLAVADLERKDVNLDLIKVEGKVGGKLEDTELVYGIIVDKDMSHPQMPKRIEDAKIAILTCPFEPPKPKTKHKVDIDTVEKFQTLREQEQKYFDEMVQKCKDAGATLVICQWGFDDEANHLLMHRNLPAVRWVGGVELELIAIATGGRIVPRFQELSPEKLGKAGLVREKSFGTTKDRMLYIEQCANSRAVTIFIRGGNKMMIEETKRSLHDALCVARNLIRNNSIVYGGGSAEISCSIAVETAADRHPGVEQYAIRSFADALDAVPLALAENSGLSPIDTLTAVKAQQVKESNPHCGIDCNDVGTNDMKEQNVFETLIGKQQQILLATQVVKMILKIDDVISPSEY

SEQ ID NO: 50981 - protein, 386 aa, Zea mays
  Clone ID: 700354473_FLI.pep
PRLLLVVVAIFVSISAVAAAVINVKNYGAHGNGVNDDTKPLMAAWKAACGSAGAATMVVPPGTYYIGPVQFHGPCKASTLTFQLQGTLKAATDLKRFGNDWIEFGWVNGLTVAGGVIDGQGAASWPFNKCPIRKDCKVLPTSVLFVNNQNTVVRDVTSVNPKFFHMALLSVKNIRMSGLKISAPSNSPNTDGIHIERSSGISIMDTHISTGDDCISIGQGNDNVDVARVQCGPGHGMSVGSLGRYSGEGDVTRVHVRDMTFTGTMNGVRIKTWENSPSKSNAAHMVFENMVMRDVQNPIIIDQKYCPYYNCEHKYVSGVTLNDIHFKNIKGTATTPVAVLLRCGVPCRGLVLQDVDLRYKGQGGTSAKCENAKAKYLGYQFPKPCP

SEQ ID NO: 50982 - protein, 315 aa, Zea mays
  Clone ID: 700354918_FLI.pep
KGSNIAIQLDGNLLGSNDLDKYTASWIELSHVNNIGITGSGTLDGQGTAVYSKSKTDNVKAMPNTLVLFHVINATVAGIKLLNSKFFHINIDNSESITVKDVNITAPADVENTDGVHVGGSSKISILNSTIGTGDDCVSIGPGCNGVLVDSITCGPGQGISVGCLGRYKDEKDVSDITVRNCVLKNTTNGVRIKSYVDAESVLTASHLTFENIRMEEVANPIVIDQYFCPQKVCPGKRSNSSHVSVKDVTFRNITGTSSTPEAISLLCSETQPCSGVSLIDVNVEYAGKNNKTMAVCSNAKGTAKGSIEALACLV

SEQ ID NO: 50983 - protein, 128 aa, Zea mays
  Clone ID: 700354642_FLI.pep
SSLFEVDQEQKASNSRFMTQKPASAIVSKLEQIAETERFMVKKQDGLVKLQGSKQGRKGQLAIDAEIFEVTPAFHVVEVKKSAGDTLEYEMFCSKGLRPSLSDICWSSRSEENMAPSVVQPSQLEPSS

SEQ ID NO: 50984 - protein, 295 aa, Zea mays
  Clone ID: 700379870_FLI.pep
FTIHNLEFGAHHIGKAMAHCDKATTVSDTYSKEVAGHGAIAPHYYKFHGIRNGIDPDIWDPYTDKFIPVHYTSENVVEGKSAAKKALQQMLGLQQTDTPVVGIITRLTVQKGIHLIKHAMHRALERNGQVVLLGSAPDPRIQSDFTNLASKLHGEYHGRVKLCLTYDEPLSHLIYAGADFILVPSIFEPCGLTQLIAMRYGSIPVVRKTGGLYDTVFDVDNDKDRAQAQGLEPNGFSFEGADSSGVDYALDRAITTFYDARDWFNSLCKRVMEQDWSWNRPALDYMELYHSARKS

SEQ ID NO: 50985 - protein, 166 aa, Zea mays
  Clone ID: 700380180_FLI.pep
LRFKNTLVRRRRSSGYDPCTETYAERYYNRMDVQRAMHANTTGIPYRWTACSDVLIKTWQDSEFSMLPTYKKLMKAGLRIWVFSGDTDSVVPVTATRFAISHLGLKIKTRWYPWYSAGQVGGWSEVYEGLTFASVRGAGHEVPLFQPRRAFRMFRSFLAGEPLPKS

SEQ ID NO: 50986 - protein, 279 aa, Zea mays
  Clone ID: 700382655_FLI.pep
HNVFWDDQNSQMQWVKPLNLAQLKAAMQKRLKSVVSRYAGKVIHWDVVNENLHFNFFETKLGPMASAQIYQQVGQLDRNAILFMNEFNTLEQPGDPNPVPAKYVAKMNQIRGYAGNGGLKLGVGLESHFSTPNIPYMRSSLDTLAKLKLPMWLTEVDVVKSPNQVKYLEQVLREGFAHPNVDGIVMWAAWHARGCYVMCLTDNSFKNLPVGDLVDKLIAEWKTHRASATTDHNGAVELHLPLGDFKFTVSHPSLKAAAVQTMTVDNSASASQHTINVKS

SEQ ID NO: 50987 - protein, 294 aa, Zea mays
  Clone ID: 700421846_FLI.pep
GCIFHTAKGAHHSETVSRANNRRRTGAARARLFLARSCPLAAPESSIHTLGRASLVPEARGRHADAAPEVGVVERRGRRGPLRELRLLLRHGVLRLAAALHRAGCRGQHPEGLRHRRRHAAPAGARRLARAHGEWSRSGGAAAAAAGPGCCRSWGAAAGGAPPVRVRANGRRYRRAAGGVHVLRGARGEEWSGERGRQAAARQLLAVRGLPGRRAGRRDGAAAAGVPPPVSRRLRRRLVARSPDVPALPLPALPEERRQHKAGRRGRRGVIHRRVAAGVSVTHSSILRSWPAHW

SEQ ID NO: 50988 - protein, 116 aa, Zea mays
  Clone ID: 700421659_FLI.pep
KKLNYSTITEHSHARTSGDRWIGFGCRRVDNQSLSRGFWSTSLSMRSAASWMVAMLWALSSSTVILNSSSSVMTISTVSSESAPRSVNLVSAVSPTSAASASCCFTMSITLLTVSA

SEQ ID NO: 50989 - protein, 131 aa, Zea mays
  Clone ID: 700421933_FLI.pep
RVGANLKDSEITTLMEAADIDNSGSIDYGEFLAATLHLNKVEREDNLFAAFSYFDKDGSGYITHDELQKACEEFGIEDAHLEDIIHDVDQDNDGRIDYNEFVTMMQKGNNPLGKKGHCQMSFGLREALKLG

SEQ ID NO: 50990 - protein, 213 aa, Zea mays
  Clone ID: 700421971_FLI.pep
DGLQDHGAEAEHVRLARGPPRVEALGRDVPQRARHAQLVRVRGLVGLERARQAEVAQPRVERRVQHDVGRLDVAVDHRLLELVVQVVQRRRHAGDHVVALLPVQRRRRRRRRRRLPAAEQVPVQAAVWHVVVHQQQHAVLVAPADELDEIPVAEAVDDAELGEEVLLPLGVGAGELLDGHLHAAAVVPGHGGAVHHAVPALPQLHLVVEAVGA

SEQ ID NO: 50991 - protein, 185 aa, Zea mays
  Clone ID: 700422632_FLI.pep
RLNYNQDIHRQRIINWIDNTGGLCAAFDFTTKGILQEAVKGELWRLRDSEGKPPGVMGWWPSRSVTFIENHDTGSTQGHWPFPSDHIMEGYAYILTHPGIPTVFYDHFYDQGVPLHDEIAKLMQIRKCQDIHSRSSIKILEVGSDLYSAIIDDKLCMKIGDGSWCPSDPEWRLAVSGDRYAVWHK

SEQ ID NO: 50992 - protein, 245 aa, Zea mays
  Clone ID: 700422814_FLI.pep
LSVVAVQTGPQKPSPSSSQAAAAEDEADALQKLLKREYKYGFVSDFESFSIPKGLSEATVRRISELKAEPAWMLDFRLAAYRRFLTMVEPTWRTTSTRPWTCSPFATTPRPKPSPSSIASTRSTRSCSRPSTASASRSPSRSASPTSPLTPSSTPPPSPPPTAKRSWPRASSSAPSPRPSASTRTLSGVTWAASYRQATTTMPLSTQRCSATGPSASCPKTQSAPWKSRPTSGSTTRRPVSLRGL

SEQ ID NO: 50993 - protein, 139 aa, Zea mays
  Clone ID: 700423094_FLI.pep
IQTSNEICNCICIYHYMITASSCKPLIIHPNRHPATRKKKQLIQLVPHLPKKTVSKHCYIPPDYPCLQTLYFLSTSPRALIARYSPPLEPERTRVTGHCEYAPSGRATGLSSPPRRKLAYHFAECLWYLVRAVELNSTP

SEQ ID NO: 50994 - protein, 188 aa, Zea mays
  Clone ID: 700423276_FLI.pep
SGDATATATAAVSTLASFRRRGGYSGYLSSMAASSSSSAGGFDGLMNTVIKKKLGIIPKDLKWGEQSDDVFDALAGDFMKPRIQEVDQLLKLGVNVTIYSGQLDLICATKGTMDWVQKLKWDDLNSFLRSPRTPIYCDKEGQSGTQAFVKSYKNLNFYWILEAGHMVPLDNPCPALKMLADITRSPAE

SEQ ID NO: 50995 - protein, 225 aa, Zea mays
  Clone ID: 700423687_FLI.pep
GCDLVTAGALPVAFGTSHLALVHRAQLKAGQVLLVLGAAGGVGASAVQIGKVCGAVVIAVARGAEKSDYLKSIGADHVIDSSKDNVIESAKSFLKARGLKGVDVLYDPVGGKLTQDSLKLLNWGAQILVIGFASGDVPVIRANIALVKNWTVHGLYWGSYLTHRPQVLIDSLNELLSWLSKGLITVQISHCYRLVEVHLAFSALRDRKAVGKVMIVMGSSAVPRL

SEQ ID NO: 50996 - protein, 137 aa, Zea mays
  Clone ID: 700424041_FLI.pep
RGNYGWVWFRAPDQPTLRSVFWRRPANHLDGRIRYRCLPPLVAAGRFRGALALTTYFCGPPVPLFSCNYVARSSCNPVLASTYIYIAIVGLDLISLPALLHCEHSTATSCLLPPCTMISLPAFNRKKERTREIMGSS

SEQ ID NO: 50997 - protein, 124 aa, Zea mays
  Clone ID: 700426259_FLI.pep
FHGTRHLQVRAVPPQTIRNAGQDLGSRIQTKSLLEVLVVGSPTMRLRRNHGAERRSPRRNPDESIRWSGRFARAPFPARPGHRPPPAPLVPGTAHTGRPQTCPCGVSCERQPLGGSRARWRWGR

SEQ ID NO: 50998 - protein, 228 aa, Zea mays
  Clone ID: 700455961_FLI.pep
KEGDEVYGMVSENPLQGPKQSGSLAEYTAVEEKLLALKPKGLDFAQAASLPLAVETANEGLERAGISAGKSVLILGGAGGVGSLAIQLAKHVYGASKVAATASTKKIELLKSLGADVAIDYTKENLEELPDKYDIVFDGVGQGDKAVKVVKEGGSVVVLTGAVSPPGFRFVVTSNGSVLEKLNPYLESGKLKPLIDPEGPFSFSQVVEAFSYLETGRATGKVVISPIP

SEQ ID NO: 50999 - protein, 165 aa, Zea mays
  Clone ID: 700455983_FLI.pep
VTWKRAATMEDVLREADVISLHPVLDKTTYHLINPERLAIMKKEAVLVNASRGPVIDEAALVEHLKANPMFRVGLDVFEDEPYMKPGLADMKNAVVVPHIASASKWTREGMATLSALNVLGKIKGYPVWGNPNQVEPFLQENLTPPPACPSIVNAKQIGLPSAKL

SEQ ID NO: 51000 - protein, 191 aa, Zea mays
  Clone ID: 700457081_FLI.pep
GNWLNVIEEHHLKYSGNCQVNDILDIGCSVGVSTRYLAEKFPSAQAVGLDLSPYFLAVAAQKEEKLSRPKPIRWVHANGEATGLSSDSFDLVSLAYVCHECPARAITGLVKEAFRVLRPGGTIALTDNSPKSKVLQELSPVLFTLMKSTEPFLDEYYMLDLEETMRKVGFVNVCSVLTDPRHRTVTATVPY

SEQ ID NO: 51001 - protein, 300 aa, Zea mays
  Clone ID: 700458854_FLI.pep
RSYDVRSDEATFTSVLKACSEMASLTDGKEIHGLIVKSGFVSYETATSALMDMYSKCGDVISSFEIFKELKNRQNIMPWNSMIVGFAKNGYANEALLLFQKMQESQIKPDDVTLLGVLIACSHAGLISEGLHFFDSMSQVYGIVPRVDHYACLIDLLGRGGHLQKAQEVIDQLPFRADGVIWATYLAACQMHKDEERGKVAAKKLVEMEPQSSSTYVFLSSLHAAAGNWVEAKVAREAMREKGVMKFPGCSWITVGNKQSVFVVQDTHHPDTLSIYKMLDDLTGMMNKDGRIKECLLEGQ

SEQ ID NO: 51002 - protein, 322 aa, Zea mays
  Clone ID: 700467533_FLI.pep
IATSLLFSAFESWLVAEHNKRGFDPQWLSITFSKAIFLGNGLIAIVSGLFANLLAENLGFGPVAPFDAAACFLAIGMAVIMSSWSENYGDPSDSKDLMAQFKVAAKAIASDEKIALLGAIQSLFEGSMYTFVFLWTPALSPNEEDIPHGFIFATFMLSSMLGSSVASRLLARKLKVEGYMQIVFSISAVTLVLPVVTNILVPTSSVKGGSISIGGSLQLLGFCTFEACVGIFWPSIMKMRSQYIPEEARSTIMNFFRIPLNLFVCVVLYNVNAFPITVMFGMCSIFLFMAAILQRRLMVVSDLHKSSTKAQEMIGEDEPLNP

SEQ ID NO: 51003 - protein, 80 aa, Zea mays
  Clone ID: 700468730_FLI.pep
GSIYCALRGKLETRYQLSSSSADMPRLQTNFIRISDYGMRYILNQLECSNISWLTSMSVVARNFPMRHACSSSGTAGSGV

SEQ ID NO: 51004 - protein, 297 aa, Zea mays
  Clone ID: 700469144_FLI.pep
LSMPMPMPKNPKIALMFLTPGSLPFEKLWEKFLQGHEGRYSIYVHASREKPVHTSSLFAGRDIHSDAVVWGLISMVDAEKRLLANALEDVDNQVFILLSDSCVPLHSFDYVYNYLMGTNVSFIDCFKDPGPHGSGRYSIEMYPEIDERDFRKGAQWFAVTRRHALMILADSLYYKKFKLYCKPAEGRNCIADEHYLPTLFNMVDPGGISNWSVTHVDWSEGKWHPRSYSADDVTYDLLKNITAVDENFHVTSDDKKLVMQKPCLWNGSKRPCYLFARKFNPEALDNLLKQFTSYTSV

SEQ ID NO: 51005 - protein, 239 aa, Zea mays
  Clone ID: 700468993_FLI.pep
VAAAAVRSAAQHLQGVWLLPLVLLIPELAAAGGHQGPGTRRRRSSSSAGGAAAHGHVVVVLALVRGDHGALVVGRALHVLPHRAPRRGALVVAPRVRVPLHHLLPVLAPPEPVVQDVDVAHRLDHQPGLADRLAAAACRAALVLAVLLQRLASGSSPSLRCDPFSASSSPKVTDEFSAVAPECSGPVQPAAATAERLLLPACSSSAAPPPDELRRVDSGLGWLCAPLYTICVMRPSARA

SEQ ID NO: 51006 - protein, 328 aa, Zea mays
  Clone ID: 700470006_FLI.pep
QNAATSPPLPRSSPFPGSRDGAPQPARKEDETRRGATHRVLVKGRSGRPPPRCYLDRKRGDRIASLNQSINLPVGRSRRARSTSPFRSVAGKEGRRERSDGVRVPRGGGVRLPVQGGADRGQRRGEVEPAVAVRQGRVQPRDQVHHRRRVRHQDRPGRRQARQGTDLGHRRAGEVPRHHERILPRRGGRAGGVRREPPHHLRQRGALAAGAAGPHGRQHRGHAGGQQGRPAPPPRRLARGRGGLRRAARHLLHGDVGAGRHQRGARLRRGAPPDLPRRQPERARHRGRPRRAAQGQDHRRQRRQGRGLPCERGRVLLVGLALVKHTLC

SEQ ID NO: 51007 - protein, 350 aa, Zea mays
  Clone ID: 700469777_FLI.pep
QVGPRKSPPKPTGPADTSSIPSAAMDLASSDLAALGAAELIRVSASIPRAAPRTFALLTACLVFPLSFAVLAHSLFTHPILLRIRGAAHSGFAPWLGLFAYQFIYLIVLFTFSLLSTAAAVFTVASLYTGKPASVSSSLSALRPILPRLLRTFLWVSLLMLAYHLAFALAVLLLIVVFAPNASESAPPSLAFVLFLLLVVLVFLGIHVYISALWHLASVVSVLEPLCGLAAMAKSRQLLQGRTGTAATLVVSYFAVCGATSLLFRAAVVKGRTEEGSFGLALPGRLLVGAVLVCVLVSVNLLGLLVQSVFYYACKAFHSQQIDRTALYEHLGGYLGEYVPLKSNIQMENL

SEQ ID NO: 51008 - protein, 81 aa, Zea mays
  Clone ID: 700472710_FLI.pep
NLQKAKAEAAIRKLEMKLEKKRSSSMDKILGKLRSAQKKAQDMRSVVSSSEGQCSVRATKKTSSSVKTGRPFSCCFTYRAC

SEQ ID NO: 51009 - protein, 524 aa, Glycine max
  Clone ID: 700555942_FLI.pep
RSRKRMSKEDVFVGAIDQGTSSSRFIIYDAKTGVVGCHHVEFTQFYPQAGWVEHDPMEILESVKVCVAKAVDKATADGFNVDKGLKAIGLTNQRETTLLWSKSTGLPLHNAIVWMDARTSSICRRLEKELSGGRNHFVESCGLPISTYFSALKLLWLMENVDAVKEAIKKKDALFGTIDTWLIWNLTGGVNGGLHVTDVSNASRTMLMNLKTLDWDASTLKTLNIPAEILPNIVSNAEIIGEVGSGWPIAGVPIAGCLGDQHAAMLGQSCRKGEAKSTYGTGAFILLNTGEGIIQSKHGLLSTIAFKLGPKAPTNYALEGSVAIAGAAVQWLRDGLGIISSAAEIEEMALQVESTGGVYFVPAFNGLFAPWWREDARGVCIGITRFTSKGHIARAVLESMCFQVKDVLDSMHKDSGESESQKTEFLLRVDGGATVNNLLMQIQADLVGCPVIRPADIETTALGAAYAAGLATGIWKEDFIFNTEEKLKNARVFRPVMTEEVRKKKVDSWCKAVSKTFDLADLAL

SEQ ID NO: 51010 - protein, 286 aa, Glycine max
  Clone ID: 700559868_FLI.pep
AAITKKDSIITAYRDHCIFVGRGGTLLEVFAELMGRKEGCSKGKGGSMHFYKKESGFYGGHGIVGAQVPLGCGLAFAQKYSKDESVTFAMYGDGAANQGQLFEALNIAALWDLPAILVCENNHYGMGTAEWRAAKSPAYYKRGDYVPGLKVDGMDVLAVKQACKFAKEHALKNGPLILEMDTYRYHGHSMSDPGSTYRTRDEISGVRQERDPIERVRKLVLSHDIAAEKELKDIEKEVRKEVDEAIAKAKESPMPDPSDLFTNVYVKGYGVETFGADRKEVRATLP

SEQ ID NO: 51011 - protein, 468 aa, Glycine max
  Clone ID: 700559592_FLI.pep
PGSHIVVLAFVLLISSKLAECHNIVRFLPGFQGPLPFLLETGYVEVGETEAEEHAELFYYFIESENDPKGNPLLLWLTGGPGCSAFSGLVFEIGPLTFKNEEYNGSLPNLTLKPQSWTKVSSIIFVDLPAGTGFSYPKTERAVHQSSSKLVRHAHQFIRKWLIDHPEFLSNEVYIAGDSYCGIPVPVIVQEISNGNEGGMQPWIYIQGYLLGNPITTSTEKNYEIPFNHGMALISDELYESLQKNCRGEYRNIDPRNALCLRDMQSYEESISGIETGHVLAPLCDESDLRNDMEVTWRRSSLAHKTSAFFSPRLTLPPLYCRSHAYVLCSYWANDDNVRKALHVRKGSIGKWTRCNDDLKSKFNADIPSSFQYHVNLSRKGYRSLIYSGDHDMVVPFLATQAWIRSLNYSIVSDWRQWYYDGQVAGYTRTYSNRMTFATVKGGGHTAPEYKPEECLAMFSRWISNMPL

SEQ ID NO: 51012 - protein, 242 aa, Glycine max
  Clone ID: 700560085_FLI.pep
VDAIIKCQGLPTTSGYMVVNMEWGNFWSSHLPRTSYDIDLDSESPNPNDQGFEKMISGMYLGDIVRRVILRMSLESDMLGPISSKLSMPFMLRTPMMAAMHEDDSPDLREVARILKGILEIPDVPLKLRKVVVKVCDVVTRRAARLAAAGIVGILKKIGRDGSGGIAGGRRSDMKMKRTVVAIEGGLYSSYTLFRDYLHEALNDILGEDIARHVILKVTEDGSGVGAALLAASHSSYDVDTV

SEQ ID NO: 51013 - protein, 222 aa, Glycine max
  Clone ID: 700560672_FLI.pep
KIAVETASALNFLHHKDVIHRDVKTNNILLDSDFCVKVADFGLSRLFPDHVTHVSTAPQGTPGYVDPEYHQCYQLTKQSDVYSFGVVLVELISSLPAVDITRHRHEINLSNMAINKIHNQALHELVDPTLGFESDFKVRKMINAVAELAFQCLQSSKEMRPSMEEVVETLKDIQSDGKHKSQPEVMDITSTADDVVLLKDDPPPPSPDSNAVSKSTTPNASG

SEQ ID NO: 51014 - protein, 376 aa, Glycine max
  Clone ID: 700562087_FLI.pep
TRKLWIQPFSSSFFFMAVLFATHVLLLILSTATTLHFSASKAARLNMTCSEKERNALLSFKHGLADPSNRLSSWSDKSDCCTWPGVHCNNTGKVMEINLDTPAGSPYRELSGEISPSLLELKYLNRLDLSSNYFVLTPIPSFLGSLESLRYLDLSLSGFMGLIPHQLGNLSNLQHLNLGYNYALQIDNLNWISRLSSLEYLDLSGSDLHKQGNWLQVLSELPSLSELHLESCQIDNLGPPKGKINFTHLQVLDLSINNLNQQIPSWLFNLSTALVQLDLHSNLLQGEIPQIISSLQNIKNLDLQNNQLSGPLPDSLGQLKHLEVLNLSNNTFTCPIPSPFANLSSLRTLNLAHNRLNGTIPKSFEFLRNLQVLNLG

SEQ ID NO: 51015 - protein, 120 aa, Glycine max
  Clone ID: 700562871_FLI.pep
LFSATMKSSGALATLVLLILLLATTSEAAISCSDVIKDLRPCVSYLVSGSGQPPAACCSGAKALASAATTSEDKKAACNCIKSTSKSININSQLAQALPGNCGITLPVAISPNADCSKVG

SEQ ID NO: 51016 - protein, 248 aa, Glycine max
  Clone ID: 700563726_FLI.pep
KHYNFYYIHFVARMSKLLLIRVAGFVATFVTMVMMMVPKNVSAQNIGDDIVTQDFFNSIISQADDGCAGKNFYSRDAFLNAHNSYNEFGRLGNQDDSKREVAAAFAHFTHETGHFCYIEEINGASGDYCDESNTEYPCAPNKAYYGRGPIQLSWNFNYGPAGQSIGFDGLNAPETVANDPVVSFKTALWYWMEHVRPVINQGFGATIRAINGRLECDGANPSTVQARVNYYTQYCSQLGVSPGDNLTC

SEQ ID NO: 51017 - protein, 339 aa, Glycine max
  Clone ID: 700564904_FLI.pep
LDVANNMLQGPCRALLADLCAGDHRKTRNANAFFSFFMAVGNVLGYAAGSYSGLHNVFPFTKTKACDVYCANLKSCFFLSIALLLTLSTIALTYVKEKTVSSEKTVRSSVEEDGSHGGMPCFGQLFGAFRELKRPMWILLLVTCLNWIAWFPFLLFDTDWMGREVYGGTVGEGKAYDRGVRAGALGLMLNSVVLGATSLGVEVLARGVGGVKRLWGIVNFLLAVCLAMTVLVTKMAQHSRQYTLLPNAHQEPLPPPAAVKAGALALFSLLGIPLAITYSIPFALASIFSSTSGAGQGLSLGVLNLAIVIPQMVVSVISGPWDALFGGGNLPAFVVGAVA

SEQ ID NO: 51018 - protein, 170 aa, Glycine max
  Clone ID: 700565832_FLI.pep
DHHLFELPLKKKLRSEKFTSPIPIPSLQMIRFILLQNRQGKTRLAKYYVPLEDSEKHKVEYEVHRLVVNRDPKYTNFVEFRTHKIIYRRYAGLFFSLCVDITDNELAYLECIHLFVEILDHFFSNVCELDLVFNFHKVYLILDEFILAGELQETSKKAIIERMGELEKLE

SEQ ID NO: 51019 - protein, 229 aa, Zea mays
  Clone ID: 700575728_FLI.pep
QLHDGAGVGVLVAEDLRRHGLLLVQVVVRRRVERRRVGRLVGVRVPRRRRVGRRLVVPSSEREPRVVHVQAGGRVLVLVAGLVLLVAVSVAAVLLLLILLAAVLLLFLLLAVLLLLASGSACILLLLLLGRLVAAAALRRRGRLGLDDGRVLARALVHVLRQLGLLEHALHRHLRRLEVRFYGLHAFHLEDPLLDPLGARLAVHVHLQHHGDHRRLLLLLRLRRLGLRL

SEQ ID NO: 51020 - protein, 239 aa, Zea mays
  Clone ID: 700577718_FLI.pep
EYDGVSEVKSTLQSAFAKLMTASKDMVSEAVAKLISRLNTESKIRTLTDKEQLLLSLERQYQDDVGVLAALFFNYVKLSPGEALYIGANEPHAYLSGECIECMATSDNVVRAGLTPKYRDVQTLCSMLTYKQAFPEILRGVPVQPHVRRYTPPFNEFEVDRCLVPPGGSLVVVPPVPGPSIFLVMTGAGEIQLDSASDGEKADEGDVFFVPAYTEVKISACGPESLQLYRAGVNSRFFS

SEQ ID NO: 51021 - protein, 187 aa, Zea mays
  Clone ID: 700579657_FLI.pep
RTPKVTVDETWFSDPQICETNQQWYILSKTLAEEAAWKFSRDNGLEIVTINPAMVIGPLLQPTLNTSAEAILKLINGSSSTYPNFCFGWVNVKDVALAHILAYEVPSSNGRYCMVERVVHYSELVNIIRNMYPTLPLPDKCADDKPFVPPYQVSKEKIKSIGIELIPLETSVKETIESLKEKGFASF

SEQ ID NO: 51022 - protein, 217 aa, Zea mays
  Clone ID: 700579794_FLI.pep
VRFIGSCTKPPQFYIITECMSRGSLFDFLHNEHNVLDLPTLLKFALDVCQGMSYLHQKGIIHRDLKSGNLLLDKNDVVKVADFGLARFQDGGGDMTAETGTYRWMAPEVINHQPYDSKADVYSFALVLWELMTSKIPYNTMTPLQAAVGVRQGLRPQIPENTHPRLINLMQRCWEATPTDRPSFEEIIPELEDIQAQAQRTSGETSQTEEDHSCSKD

SEQ ID NO: 51023 - protein, 191 aa, Glycine max
  Clone ID: LIB3056-013-F1_FLI.pep
KETYWGNVNPIGERSCYDEGKRTAETLAMDYHRGAGVEVRIARIFNTYGPRMCLDDGRVVSNFVAQAIRKQPLTVYGDGKQTRSFQYVSDLVNGLVALMESEHVGPFNLGNPGEFTMLELAQVVKETIDSSATIEYKPNTADDPHMRKPDISKAKELLNWEPKIPLREGLPLMVNDFRNRILNENEGKGMK

SEQ ID NO: 51024 - protein, 485 aa, Glycine max
  Clone ID: LIB3049-020-H4_FLI.pep
NFVPTYQVPPHLHQTINDSKITRNSTQVPHSSMSVNSLPNQILWNRIGTVSGLQSSIPQGLNRQHIGLPERHTIIRKTMFLAKILNQRRNLPQMAPWQPWKQMVLHLKLQPSMKPVHPRRAVHTKSPLSLLLEPIAAAGGPKVHLRRKMVQTELHMLNTRNRETHENKQKPLPPIGQEGNQQRVPNPECKQTQKLTASVLHLPLRQQQEKRLRKQINPSETHHRVKSPVLVTNQKPSKGIEIQLSVVESGSEGIEKPRGDDEEGQMLEIGVIVEAVACNVVGVVVPLPPADADSGENVAGENLNCAVEAAAEHHVVMAGVVAYPAALNPEKAYQCSGKHVHESAVGEEDAADRERKKGENKGEEDGGCVALAVEEVERGEVGEELAVVGGGGGDGVVGKTVGGGEGGEEEGGGVGRVEGEEGVGGVGAGEGEEWEGAAGVAVEPGGDVVDLAVDGDPGVVARVMLAKFIGGNVGCGRLHWSRSDE

SEQ ID NO: 51025 - protein, 80 aa, Zea mays
  Clone ID: LIB3075-050-A6_FLI.pep
YLYNHNQPQMASPSISELFKWAYASSRTDFLPHFHSATGEYTYRCMRGQCSRAAHSFATGRFSSSDDKNAEHSFVRGGRT

SEQ ID NO: 51026 - protein, 257 aa, Zea mays
  Clone ID: LIB3069-009-H9_FLI.pep
AFKQPPFAISNAVASSTVGSYGGTRDAVRPRTAQLTIFYAGSVNVFNNVSAEKAQELMFLASRGSSAPVACKPEAPPTLAPAKVTAPEVLLPAKQMLFQKPQHLSPPPSSVPGILQSAALPRSASSSSNLDSPAPKSSVPLAVPPVSQAPPATLIATTTAAAIMPRAVPQARKASLARFLEKRKERVTTAAPYPSAKSPLESSDTFGSGSASANANDKSSCTDIALSSNHEESLCLGGQPRSIISFSEESPSTKLQI

SEQ ID NO: 51027 - protein, 231 aa, Glycine max
  Clone ID: 700794035_FLI.pep
MRSSPRLSPVFLGNGPFPGLPPTTLEGLADRARSRWIENNGSQVDSKKQFQLNLDKIKSGEDTRTTLMIKNIPNKYTSKMLLAAIDENHRGTYDFLYLPIDFKNKCNVGYAFINMLSPSLIIPFFETFNGKKWEKFNSEKVASLAYARIQGKSALVSHFQNSSLMNEDKRCRPILFHSEGSEVCDLIVQDHHLPSNSNNLNIQAPRPSEFYSSDFAGSPPKAGPSASLDAN

SEQ ID NO: 51028 - protein, 178 aa, Glycine max
  Clone ID: 700797368_FLI.pep
AVLTSIVLKRNVTMLDIASTRMLGQYGFLAKVFSIFEELGISVDVVATSEVSVSLTLDPSKLWSRELIQQASELDHVVEELEKIAVVNLLQNRSIISLIGNVQRSSLILEKAFRVLRTLGVTVQMISQGASKVNISLVVNDSEAEQCVRALHSAFFESELSELEMDYKNGNGSVDELS

SEQ ID NO: 51029 - protein, 572 aa, Zea mays
  Clone ID: 700346056_FLI.pep
NKGLSGSISPSIGKISSLKVLNLANNNITGTVPEEVAALPSLTEVDLSNNNLYGKLPTFASKSAVVKTAGNPNIGKDAPAPTAGSGGSNDSLSGGGSSGSIGNNGGSSPSSVGVIVGSVAGTVVGLGLVAALGFYCYKRKQKPFGRVQSPHAMVIHPRHSGSDDMVKITVAGGNANDGARASETYSQASNGPRDIHVVESGNMVISIQVLRNVTNNFSEENILGRGGFGTVYKGELHDGTKIAVKRMEAGVMGNKGLNEFKSEIAVLTKVRHRNLVSLLGYCLDGNERILVYEYMPQGALSQHLFEWSEKNLRPLEWKKRLSIALDVARGVEYLHSLAQQTFIHRDLKPSNILLGDDMKAKVADFGLVRLAPADGKCVSVETRLAGTFGYLAPEYAVTGRVTTKADVFSFGVILMELITGRKALDETQPEDSMHLVTWFRRTQLNKETFRKAIDPVIDLDEETYASVSTVSELAGHCCAREAHQRPDMGHAVNVLSTLSEVWKPADPDSDDSYGIDLNMSLPQALKRWQAFEDSSHFDGATSSFVASLDNTQTSIPTRPPGFADSFTSADGR

SEQ ID NO: 51030 - protein, 623 aa, Zea mays
  Clone ID: 700350914_FLI.pep
ARSERMKSSLRKLRGFALQRQEQRVDRDRGRGHAAAAATAADELLAAAQDMADMRSCYDNLLSVAAAIANSAYEFSEALQEMGTCLLKRVTPNKDGINDKVLLLLGKSQFELRKLLDSYRVHVLNTITTPSLSLLNELQTVEEMKHQCDEKKELYEFMVNAQKEKGRSKNAKGDNGSSEQLKQAQEDYQEEATLFLFRLKSLKQGQFRSLFTQAARHHAAQLNLFRKGVKSLEAVEPHVRLAAEQQHIDHQFSALEEEDYLVEDENDDDYNGSHDGELSFDYGENKEVEESGNASRNHTEVFFNRSKEEYSSVPHERQRIVSQSAPLFPEKKLNTEERIKDLRRSATRKLNTYVLPTPNDVGATSQRASGNPTSEPLESKGAFHSSPLHSSADIRDLGDNNLPSPTRLSNVQSVLKDSNTNKTETRKVLPVGDLALPSYHDLKTSDNKKVKRGSFSGPIASRPRSTENIDVISAAPRHSSAHQPVHMRVSPGNSPPPISSPKIKELHELPRPPVNTSKNIAFPSLVAHSAPLAPNPASLTPKVQDHFRTKQTLQRTASPLPTPPPGSIARSFSIPSRGISDSKETEDQHKGAARMSLSSLPSAQTFLEDRQPLSAAAGSVSKT

SEQ ID NO: 51031 - protein, 234 aa, Zea mays
  Clone ID: 700424447_FLI.pep
AAGNFPEWTLYIQTMDPEMEDRLDDLDPLDVTKTWPEDAFPLQPVGRLVLNRNIDNFFAENEQLAFCPGLIVPGIYYSDDKLLQTRIFSYSDTQRHRLGPNYLLLPANAPKCAHHNNHYDGSMNFMHRHEEVDYFPSRYDAVRNAPRYPIPTAHIAGRREKTVISKENNFKQPGERYRAMDPARQERFITRWVDALSDPRLTHEIRTIWLSNWSQADRSLGQKLASRLSAKPSM

SEQ ID NO: 51032 - protein, 196 aa, Zea mays
  Clone ID: 700471486_FLI.pep
SLSILRMTAYFNQTGWPAKAPKTDDKRKEFIASLHKRKTELFMALIEKKLLPLRPGVQRLIDEALGKAVKVAVCSTSNEKAVSAIVSYLLGPDRADKITIFAGDVVPHKKPDPAIYILAATTLGVDPQSCVVIEDSTIGLAAAKAAGMKCIVTKSGYTAEEDFETADAVFDCIGDPPEVRFDLDFCAKLLKKQYVS

SEQ ID NO: 51033 - protein, 381 aa, Glycine max
  Clone ID: 700561167_FLI.pep
LILKKNPHYSIKTSYNNMSNVLAGEESEKVVTYGWAARDTSGILSPFHFIRRANGDNDITLDVLYSGICHTDLHMVKNDFRISIYPMVPGHEIVGKVTKVGRRVTKFSVGDIAGVGGSVGSCGSCSDCSNGFYVYCPKMILTYSAHYYDGTITQGGYSNNIVVDQNFVVLIPKSLPLDGAAPLLCAGITVYSPMKYYGLAQPGLHLGVVGLGGLGHVAVKFAKAFGMHVTVISTSPSKKEEALEKLGADEFLVSLDQQQLQDARGTMDAIIDTVSANHSIQPLIALLKTSGKLILVGGPPSPLEVLAMPLLLGRKMIAGSAGGGREEIQEMMDFAAKHNITADVEVIPMDYVNTAFERLEKNDVKYRFVIDVANTISCMSN

SEQ ID NO: 51034 - protein, 698 aa, Glycine max
  Clone ID: 700565119_FLI.pep
HGGRNNPDGERWQRSASFQQRGLIPSPTQTPLQMMHKAENKYEVGKASDVEEVKQRQLKAILNKLTPQNFDRLFEQVKAVNIDNAVTLTGVISQIFEKALMEPTFCEMYANFCLHLASELPDFSEDNEKITFKRLLLNKCQEEFERGEREEEAANKADEGEVKQSAEEREERRVKARRRMLGNIRLIGELYKKKMLTERIMHECIKKLLGQYQDPYEEDIEALCKLMSTIGEMIDHPKAKEHMDAYFERMKLLSNNMNLSSRVRFMLKDSIDLRKNKWQQRRKVEGPKKIEEVHRDAAQERQAQAGRSGRGLGNNQSARRNPMDFGPRGSSMLSSPNSQMGGLRGLPTQVRGYGAFQDARFEERQSYEARTLAVPLPQRPSGDDSINLGPQGGLARGMSTRGSTAISNLPISDVLPVHGDSHRMNTGLNGHSNLSERTPYSSREDHVSRYGTDRSSGPSAYDQSSAPEHNVNHGNRGLRSEDRNLEPLAHLQGSIVSQNASSEKIWPEERLRDMSLSAIREYYSARDENELALCVKDLNSPSFHPSMVSLWVTDSFERKDAERDLLAKLLVNLVKSQHGTLNQDQLIKGFESVLSTLEDAVNDAPRAAEFLGRIFAIAITESVVTLKDIGQLIHDGGEEPGSLLEVGLAADVLGSTLEVIQSEKGDAVLNKICSGSNLRLETFRPPNAKTSRKLEKFI

SEQ ID NO: 51035 - protein, 539 aa, Glycine max
  Clone ID: 700903581_FLI.pep
FFVLGVGPSTHMDAATALMILSAIAAYLIWFTLVTRSLKGPRVWPLLGSLPGLIQHANRMHDWIADNLRACGGTYQTCICALPFLARKQCLVTVTCDPKNLEHILKLRFDNYPKGPTWQSAFHDLLGEGIFNSDGDTWLFQRKTAALEFTTRTLRQAMARWVNRAIKHRFCPILATAQKENQSVDLQDLLLRLTFDNICGLAFGQDPQTLAAGLPDNAFALSFDRATEATLQRFILPEILWKLKRWLRLGMEVSLSRSLKHIDQYLSHIIKNRKLELLNGNGSHHHDDLLSRFMRKKESYSEEFLQHVALNFILAGRDTSSVALSWFFWLCVKNPRVEENILNELCTVLLSTRGDNISTWLNEPLVFDEVDRLVYLKAALSETLRLYPSVPEDSKHVVKDDVLPNGTFVPAGSAVTYSIYSVGRMKFIWGEDCLEFKPERWLSPEGDKIQVQDSYKFVSFNAGPRLCLGKDLAYLQMKSIAAAVLLRHRLAVAPGHRVEQKMSLTLFMKYGLKVNVYPRDLKPVLEKLTTIKSVTVGQK

SEQ ID NO: 51036 - protein, 235 aa, Glycine max
  Clone ID: 700907612_FLI.pep
IAAHLPKRTDNDIKNYWNTNIKKGLIGKGLDPLTYKPIKSNTFQAYGGNFLDPSIDTTNMNHVAQSESAQIEAEARESMLQFGSLPSHLPGLILSKIPTQPFPSSASLLTQRINTTYDMYALVLATNHLDLHPPPFTDPESFPSRKLLPSVSTSVGQSTDPESSLSYDGIGYNMIDNSSSQMQMTMECYATNFEDDDVMIALEAFGIARFEGIQELFDGPTTMEDLINESFERDV

SEQ ID NO: 51037 - protein, 478 aa, Glycine max
  Clone ID: 700755250_FLI.pep
GFRALSLPSPGSARRSAECSELQRCLLEMASSYPGSVSAAQVGSYFVGQYYQILRQQPNLVHQFYSDSSSMIRVDGDSVETAHDVLQIHSIVSLLNFTTIEIKTINSLDSWDGGVLVMASGFVKIKDIGGKRKFVQTFFLAPQEKGYFVMNDMFHFIDDGVMYPNLVPVASETIDTQPHLSASLAEPPVSDYGLEEEAREYANSVHIDDDPVDKYSLPEHQQQLQEELETEIVVEETSVQEASPPIHTVAHTIQEPPVALVEESFEEPPKKTYASILRVSKGLPVLSAAPKHAPHSFKSAPPPPELNHVAQPAVQQSSSASMYAPESGTEAAEEGYALEEDEVTSVYVRNLPANVTEVEIDQEFKNFGRIKPDGIFIRVRKEIGVCYAFVEFEDIIGVQNALQSSPLQLAGRQVYIEERRPNSVGAARGGRRGRGRGSYQADAPRGRFGGRSMGRGGYQDGSDYTRLRGDGYLQRGSR

SEQ ID NO: 51038 - protein, 155 aa, Zea mays
  Clone ID: 700215532_FLI.pep
QAVPPPMAADWLWARRVWEKWAAKHIGTSGKPVQAALLLNYDPSGPSRLLPVVAEQEGTQLSALDMQPLLDFVKRGNLQTELFSVGLNQHLVTSIHENWFCARCINSTKPEGEGVIVMQIGACLLVTMYAGSLAAASQAMVAADQFAIQFNRRSH

SEQ ID NO: 51039 - protein, 409 aa, Zea mays
  Clone ID: 700344709_FLI.pep
NLLAAAAAARLLPRRAVLLGRAEGVAGRGPAPADDEVAERRGAASRDAVLVAQELPAQHLLHLELEVVHQHVGGALGRGGAGARQHGGGEDGRHPAGRVGVPAGRPVDEDHVPGHVVEVVGQVVDGEAALGEEQVLHGPALLGPRRPRRRQQVPEVAHLRRVGHVVRLHPGVPRLQVLDVELVLLQEHGPPAVVQRQPQRGLRAQPEHQQVAGRPRAEHGRHGPDVRVRHAVRRVRDGREVDQRLEHRDRQPLGHGLGPCLALAAAAARRAGGRGGGGRGRDGAGAGAGRGREVGGGVEEGEEGGEGEAEGEDHQEDAAGARRRRELVAAAHGLHAACLARSVLSPSVGGFTGGLGRFDFFLGVGAGLGDEGVDRAGRGAGIRRQTGGRKIVVVDSVAAGELPSWSGRE

SEQ ID NO: 51040 - protein, 387 aa, Zea mays
  Clone ID: 700470880_FLI.pep
GLVEINGCSDNSISLSSFFLRLLQIICYHLTTPLRNSSPYQVKDLVFPVNVHLGQHFTKPPPRYSEGALIKKLEELGIGRPSTYASIMKVLLDRKYVTAKSRVLHPEFRGRMVSAFLLHHFSEVSDYNFTANMETELDNVSAGSTEWKGLLKDYWERFSKYCADVSKLDGRKVERMLEEKFGPILFSDVYKDCRICPSCSEGTLRFKVSRYGEGYFVGCDRHPKCKYIARSLSQQEDETEPIEENAKSFEPRLLGVMPDSDQKVFLKQGPYGYYVQVGEDKKGLFPKRVSLSKVKDIDSVTLEDAIELLQYPKILGKHPEDDNLVLITHSKVGYNIKHRRFIAQVPKNMDPKKMTLERALKLLSSKSVRRIGRLKGKVEKKEPIEWH

SEQ ID NO: 51041 - protein, 277 aa, Zea mays
  Clone ID: 700619165_FLI.pep
TSPTTSTSTSLDPVDSRLPPQQLPYPQRGGAGASRAAGGPVGSAAVKMNDADVSKQIQQMVRFIRQEADEKANEISVSAEEEFNIEKLQLVEAEKKKIRQEYERKEKQVEVRKKIEYSMQLNASRIKVLQAQDDLVNKMKDDAMKELLLVSHNHHEYKNLLKDLIIQGLLRLKEPAVLLRCRKDDHHHVESVLHSAKHEYASKADVHEPEIFVDHDVYLPPAPSHHDAHGQFCSGGIVLASRDGKIVFESTLDARLEVVFRKKLPEIRKLLFGQTAA

SEQ ID NO: 51042 - protein, 208 aa, Zea mays
  Clone ID: 700623579_FLI.pep
RLQEEEGGAAGRVGEMFLWDWFYGVLASLGLWQKEAKILFLGLDNAGKTTLLHMLKDERLVQHQPTQHPTSEELSIGKIKFKAFDLGGHQIARRVWKDYYAKVDAVVYLVDAYDKERFAESKKELDALLSDDSLANVPFLILGNKIDIPYAASEEELRYHLGLSNFTTGKGKVNLGDSNVRPLEVFMCSVVRKMGYGDGFKWVSQYIK

SEQ ID NO: 51043 - protein, 176 aa, Zea mays
  Clone ID: 700433211_FLI.pep
RPLAQQLPRLLATAAAAAAVAAAPLPALAEQMEKAALFDFNLTLPAIATEFLLLMVALDKLYFTPLGKFMDERDAKIRGELGDVKGASEEVKQLEDQAAAIMKAARAEIAAALNKMKKETTAELEAKLDEGRSRVEAELVEALANLEAQKEEAVKALDAQIASLSDEIVKKVLPSA

SEQ ID NO: 51044 - protein, 157 aa, Zea mays
  Clone ID: 701161209_FLI.pep
APILPPNGDSACSARTQRGAQQLSAPRTRFLLHPCRPAVFPTTLESKKKPHKHCTRSLTIIISNLALASAGVPSSPFPPFYPFQKPPGSDSNRIAKADRGARGGAELDGARWPGTTGSTATWRLFWTLAGPREISRQPQAAGTAATGRPWRSGISRR

SEQ ID NO: 51045 - protein, 331 aa, Zea mays
  Clone ID: 701167176_FLI.pep
SKRDRPGAPAVAEAIPARQRRLHGALCSNREPSSRCGPPSASGARIICEKQPQKYTHVQEWTLDTICPLHVQAGVKRDTKVRLGAWSWDASTGEELRVGAGLAEPYDAVWCAVEYYESTGSILRMLLRSGFTSTAAHLGRTLLHHAILCGSAGAVQTLLASGADSEAPVKTTRSNRSRPVHLAARLGQPEILRMLADRGCDLNARAEAGDTAAIICSRHKREDCLRVLVSAGADVALLNSAGDSSASVASSGGWKTGFERAVIGAIRCGAVPRSSERSVFSPLMFGALCGDATAMEVLLSQPDVDVDEQDSDGCSPIMAAAKMGNVEAFRA

SEQ ID NO: 51046 - protein, 344 aa, Zea mays
  Clone ID: LIB143-005-F9_FLI.pep
GPSSAVVWASRDMAGPAPAVAASAAASQSPPMQLPSPFAELVKGSSGLEKIVLRGARNCCAEIYLYGGQVTSWKNDNGEELLFLSSKAIFKPPKAIRGGIPICFPQFGTHGNLEQHGFARNRFWTIDNNPPPLPVNPAIKAYVDLILKPSEEDLKIWPHSFEFRLRVSLGPSGDLSLTSRIRNTNTDGRPFSYTFAYHTYFSVSDISEVRVEGLETMDYLDNLKAKERFTEQGDAIVFESEVDKVYLAAPSKIAIIDHEKKRTFVVTKEGLPDAVVWNPWDKKAKAMQDFGDAEYKSMLCVEPAAVERPITLKPGEEWKGRLVLSAVPSSYCSGQLDPSKVLQG

SEQ ID NO: 51047 - protein, 441 aa, Zea mays
  Clone ID: LIB143-050-F1_FLI.pep
AEMAKHLAAMCRCSLLVLVLLCLGSQLAQSQVLFQGFNWESWKKQGGWYNYLLGRVDDIAATGATHVWLPPPSHSVAPQGYMPGRLYDLDASKYGTHAELKSLTAAFHAKGVQCVADVVINHRCADYKDGRGIYCVFEGGTPDSRLDWGPDMICSDDTQYSNGRGHRDTGADFAAAPDIDHLNPRVQQELSDWLNWLKSDLGFDGWRLDFAKGYSAAVAKVYVDSTAPTFVVAEIWSSLHYDGNGEPSSNQDADRQELVNWAQAVGGPAAAFDFTTKGVLQAAVQGELWRMKDGNGKAPGMIGWLPEKAVTFVDNHDTGSTQNSWPFPSDKVMQGYAYILTHPGTPCIFYDHVFDWNLKQEISALSAVRSRNGIHPGSELNILAADGDLYVAKIDDKVIVKIGSRYDVGNLIPSDFHAVAHGNNYCVWEKHGLRVPAGRHH

SEQ ID NO: 51048 - protein, 361 aa, Zea mays
  Clone ID: LIB143-054-E3_FLI.pep
YLYSGLSVSFFEPGSYTVRTPIPAAARFQPLVPRGLCSCGHTGLHPSLSRLPIRSKGTQYRFGPSFYSHTMARKCSHCGNCGHNSRTCGRETMLCEAGDNGGYGGLRLFGVQVRIGGGGAGSASMKKSYSMDCLQLAAPGCSLVSPSTSSSSSSLLLMSIEEGSERGAPNGYLSDGPHGRAVQERKKGVPWSEEEHRQFLSGLEKLGKGDWRGISRSYVPTRTPTQVASHAQKFFLRQSSLGKKKRRSSLFDMVPICENSASISDPLSSEGASTSLSLNVPRHGVTSVSERAALDLNSTEEDDSGADASSASASGAGTRPPFPAAQTEPLQPSSLGRGRGHHCSPLDLELGMSLPAPSIGT

SEQ ID NO: 51049 - protein, 183 aa, Zea mays
  Clone ID: LIB143-062-F2_FLI.pep
LLSDGVLLSNWVVQEGSSEVLGLVRERLLSLYTCAGCGLEAEHQLWEMKLLGREPDTQLYDVVLAICASQGEAAAVRRLLAGVESTSAGRRKKSMSWLLRGYVKGGFILDASETLIQMLDMGLLPDYLDRAAVLTALRRNIQESGSLESYLKLCKRLSETDLIGPCIVYLYVRKFKLWMAHML

SEQ ID NO: 51050 - protein, 529 aa, Zea mays
  Clone ID: LIB143-046-B8_FLI.pep
TEPSLFFFRIYLEPSPNHSSSSESSSNPGFGHNLQATAPSCGPWILELLFSNSFAHGCSRGDATLHSLEHPVVEIGARPLLMLQRLHAVDPLLPLDPLHVGQHAAACEVPRERVGDERVGVEPGERDELPDVAEARDARDEGGHLGVRHPRRVPVEGRREVVGEHRLGARRLDALGEGGALGHVGAGRLHPQHVGVRREGAAPDHGRRHGPPEAVEPFPGPRQVPVPEHGRDAEAGGDVARLVVGHAPVVAAGGAVPLLEPALLLLARDAEARDGVPDALGEGLEPRRGQPLVLDGLELPAALARRHAGRQHGREALAPEARVGGADYELVVARVDVGLDERGGDGVGARDEDGLDAHDVELEPRGDEAVHVLGDGDEHLARHVAALLGDGGLVLEVDPGRPALHEELAELDGGRGAAEARVAVGDDGLEEVDVRRPRALGAGQRHARLPLLAVVVDLREEEVLHLVGHGVVGVVGEVRAGLVGGGVRGRALPPGDVDGVQVLGHHGDLDGVERAEGAGGGAAGARTWR

SEQ ID NO: 51051 - protein, 470 aa, Zea mays
  Clone ID: LIB148-037-B10_FLI.pep
GHNSYLTGNQLSSDCSDVPIIKALQLGVRVIELDIWPNSCKDDIDVLHGRTLTAPVSLIKCLRSIKEYAFVASPYPVIITLEDHLTPDLQERVAKMVLEVFGDILYYPESKHLQEFPSPEALKGRVMLSTKPPKEYLEAKGDTMKEKEIEARIKRGEREAAAWGVEVPDIQDEMQVADKDEDELLYRERGADGDDGKETKHVAAEYKHLITIKAGKPKGPLVDAIKNDPDKVRRLSLSEQELAKVAAHHGPNIVSFTHRNMLRIYPKGTRFNSSNYNPFLGWVHGAQMVAFNMQGYGRALWLMHGFYKANGGCGYVKKPDFLMQTCPDGKVFDSKADLPVKATLKVKVYMGEGWQKDFKQTHFDSYSPPDFYVKVGIAGVPLDSVMRKTKAVEDSWVPVWEEEFAFPLTVPEIAVLRVEVHEQDVNEDDFGGQTALPVAELRPGIRAVPLFDHKGLKFKSVKVLMSFEFA

SEQ ID NO: 51052 - protein, 439 aa, Zea mays
  Clone ID: LIB148-045-F9_FLI.pep
NTRRRGRAAREGLRVVSLLFLLLLLLSPTPHPSALPSALLLIPSSTSILPPRSKAGGGRKVRESAMGCFSCCCVADDDNVGRRKKHDDPYVPIPAHVYNFGPSRFPAPTPVISTGRAQPIAVPAIHLEELKEITKNFSSDALIGEGSYARVYFGVLKDGTKSAVKKLDSSKQPDQEFLVQVSAVSRLKHENVVQLVGYCAEGSTRVLAYEYATRGSLHDILHGKKGVKGAQPGPVLSWMQRARIAVCAARGLEFLHEKADPRVVHRDIKSSNILLFDHDVAKIGDFDISNQAPDMAARLHSTRVLGTFGYHAPEYAMTGQLSTKSDVYSFGVVLLELLTGRKPVDHTLPRGQQSLVTWATPRLSEDKVRQCVDPRLGDEYPPKAVAKMAAVAALCVQYEGEFRPNMSIVVKALNPLLHSRSGNRPTASSASHAAERSGL

SEQ ID NO: 51053 - protein, 223 aa, Zea mays; identical to SEQ ID NO: 42285
  Clone ID: LIB148-024-E5_FLI.pep

SEQ ID NO: 51054 - protein, 506 aa, Zea mays
  Clone ID: LIB143-003-B4_FLI.pep
QSLTMGALLPWLAWLLVSLVGVYLLGHLVQARRRRGLPPGPHPLPIIGSLHLLGNQPHRSLARLAKTHGPLVSLRLGSVTTVVASSPAAAREILQRHDAAFSNRSVPDAPGAHARNSTVWLPNAPRWRALRKIMGTQLFAPHRLDALQHLRRDKARELVDHVRRLARRGEPVNVGRVAFTTSLNLVSRTIFSRDLASLEDDGASRKFQEVVTDIMEAVGSPNVSDFFPALAVADLQGCRRRLARLFARLHRIFDEEIDARLRGRDAGEPKKNDFLDLLLDAAEDDDNTAGLDRDTLRSLFTDLFSAGSDTSSSSVEWAMVELLRSPGSMAKACDELATVIGPRKDIEESDIGRLPYLQAVVKETFRLHPAAPLLLPRRAQADVKMMGYVIPEGSRVFVNVWAMGRDEETWPEPEKFMPERFLGKKKTQAVDLRGGDFDLIPFGGGRRICPGMPLAIRMVHLLLASLLNQFAWRLPAELERNGVDMAENFGITLTKAVPLCAIATEI

SEQ ID NO: 51055 - protein, 411 aa, Zea mays
  Clone ID: LIB143-037-C6_FLI.pep
HGNNKKLIALPSLSLAVEDGGAAVGPVEPAVGDLLVGGLGEVDAVPAEVRRRAGARGRARHAAPRAVLVVVLAAPRAAARLEHRAEPVAAGVLDHVVDGGVEVGVHDARRLVLGLEGGDLGLQLGVVVGGEVVELLEAAERVVVGAVGGAVDGEVDGEAADGEHPRHHHVRGAHGQQLLHAGRDGAHDLRRVRAGLVRVVVAEQHGVVVVAPELAEHEQRVGQVALAVLPAHGGGDLLEPLQLEADGPVVPDLVGEAERAEEGRVHGRGAGDGHVSALLEVGRRGLGRRQERQAEPGAEEVRDDAAVAAAARRRAEVGLAVGRLREGDLRRPPVGAEVPGVGDGVAEVEDGIVLLRRRRRRRRERPRQSHRHRHRQPPAPHLASHSLSQPTPDTRCRGSRVESSSALGELD

SEQ ID NO: 51056 - protein, 249 aa, Zea mays
  Clone ID: LIB143-038-B10_FLI.pep
CKCKQGPLAAPTLQLLTKEDLSKMYFSDFKMIDINGYACFLTRTGYHFDSLSPLFEQYCKDCLISYFSYTGEDGFEISVPSENAVDLAEAILERSEGKVRLTGLGARDSLRLEAGLCLYGNDMEQHITPVEAGLSWAIGKRRRAEGGFLGADVILKQLQEGPKIRRVGMVTQGPPARSHSELVSGSGERIGEVTSGGFSPCLKKNIAMGYVKSGMHKAGTELKVVVRGKSYDAVVTKMPFVPTKYYKPS

SEQ ID NO: 51057 - protein, 496 aa, Zea mays
  Clone ID: LIB148-032-E3_FLI.pep
AMIRSHSAELLRDGVSLEQIGLDFSPELTETTAPDSIRMLVQTVLSDKKPEEIQSVVESLLSKVINELEHRIASQSELVKETMDTNGCNSVLRMESPCNTNDSKSLSRVDPPQVELTSCSDLEKVKETMDTNGCNSVLRMESPCNTNDSKSLSRVDPPQVELTSCSDLEKATENIKMDEVDENALSLTEDVSTLVHAPLSNDNVNKNMPKPVRNFDREEKQIQDLKSNMSTVKCCMEQLKLLYSEDLKKLGNQLRIVSHAASGYRKFVQENRKLYNQIQDLTAKSNEEGGEGGEEVRELKEQIACLRAALARKDGGQESIRSTQSSPDIYRMRTGNGLPALRHPIVDGSIENDSALGDFAEHSPFGSSNSLPELGPDGTQDLAFYQRSSPEQQWSWSGSVATEDSDDFEVATNCSSDLDCVRPSSAPKASGLTNGGGSAARKSQLKGAKSSDIRGGNPAKKSSPLQKKLSAPSPTVTKKSGTEGKKTPNGKTGAKK

SEQ ID NO: 51058 - protein, 506 aa, Zea mays
  Clone ID: LIB3060-003-F12_FLI.pep
PPTPSVCQRLPAPLSLPLPSLPRKTMVADRLRLALLLSACLCSAWARPRLEPTIRLPSERAAADDAVGTRWAVLIAGSNGYYNYRHQADICHAYQIMKKGGLKDENIVVFMYDDIAHSPENPRPGVIINHPQGGDVYAGVPKDYTGREVNVDNFFAVLLGNKTALRGGSGKVVDSGPNDHIFVFYSDHGGPGVLGMPTYPYLYGDDLVDVLKKKHAAGTYKSLVFYLEACESGSIFEGLLPNDINVYATTASNAEESSWGTYCPGEFPSPPPEYDTCLGDLYSVAWMEDSDFHNLRTESLKQQYNLVKDRTAVQDTFSYGSHVMQYGSLELNVKHLFSYIGTNPANDDNTFIEDNSLPSFSKAVNQRDADLVYFWQKYRKLADSSHEKNEARRELLEVMAHRSHVDSSVELIGSLLFGSEDGPRVLKAVRAAGEPLVDDWSCLKSTVRTFEAQCGSLAQYGMKHMRSFANICNAGILPEAVSKVAAQACTSIPSNPWSSIHKGFSA

SEQ ID NO: 51059 - protein, 336 aa, Zea mays
  Clone ID: LIB3060-054-C12_FLI.pep
TQSPQTPPEFLIPPHLLHLRPRARRASPSMAGAAAAAVASGVSARPAAPRRASAGRRARLSVVRAAISLEKGEKAYTVQKSEEIFNAAKELMPGGVNSPVRAFKSVGGQPVVFDSVKGSRMWDVDGNEYIDYVGSWGPAIIGHADDKVNAALIETLKKGTSFGAPCLLENVLAEMVISAVPSIEMVRFVNSGTEACMGALRLVRAFTGREKIIKFEGCYHGHADSFLVKAGSGVATLGLPDSPGVPKGATYETLTAPYNDVAAVKKLFEDNAGEIAAVFLEPVVGNAGFIPPQPGFLNALRDLTKQDGALLVFDEVMTGFRLSYVELRSTSGSPLT

SEQ ID NO: 51060 - protein, 439 aa, Zea mays
  Clone ID: LIB3066-007-H12_FLI.pep
HYWASVTYTAVPLFLMAVLWFVGFGIVMLVISCCCCCFCRGKNDAYSPGCYLSSLVLLIIFTMATIAGCLILHGGSDLFHGSTIRTVEYVFGQGNLTVDHLRNFADSLAAAKDITINQIFLPADVQQKIDVVEEKLNSSAGVFSTRLQENSRKIKGVLNHMEHELFAVAAVMAGLSILGFLFSVLGLRFLVSLLVIAAWILLTNTIISSGLFLLLHNVVADTCVAMGDWVAHPQAHTALDDILPCVDVATANESLYRSQEVTSQLVALVNNVVVNISNRNFPPGLRPLYFNQSGPLMPVLCNPFNPDMSPRRCAPGEVDFGSAAREWKRFECQTTGPPGSELCATPGRVTPAAYGQMTAATSVSKGLYEFSPFLVQLQDCSFVRETFTSITNYNCPGLEQYSRDVYVGLVVISAGVMLSVVFWMVHTRHRRRRAMRKQL

SEQ ID NO: 51061 - protein, 523 aa, Zea mays
  Clone ID: LIB3066-035-G3_FLI.pep
GFASRLAAVSMGDNYDDEGEPIVNLDEREPSPEHQPYEDLDDDLDGGGDWTRDRSPTPVHGDDGGAGSSSKPRKRLLKKGGGGGMPGDDGLDDFGLEDEDADPSAEARKRKGSSSLRDLARGGAGREKKAKKMRMEDDGRGRDTGMVRDRRGSGGRDSGGRDDQDDGEREIQELWDTIAGGESEDDQEGVRTVDDDNFIDDTGVDPADRYGSDNERHSPGRYAQAEEGEEDDEIEQLFKGGKKKKKKNDRPRADIGLIVEQFIAEFEVAAEEDANLNRQSKPAINKLMKLPLLIDVLSKKNLQQEFLDHGVLTLLKNWLEPLPDGSMPNMNIRSAVLKLLTDFPIDLEQYDRREQLKKSGLGKVIMFLSKSDEETTANRKLAKELVDKWSRPIFNKSTRFEDMKRYDDERAPYRRPQMKKPSSSSSGMESRDDDLDADFSQRKSGQSSSRQHASRPEASPLDFVIRPQSKIDPEQIRARAKQAVQDQRRLKMNKKLQQLKAPKKKNLQASKLSVEGRGMIKYL

SEQ ID NO: 51062 - protein, 415 aa, Zea mays
  Clone ID: LIB3066-055-A3_FLI.pep
AWIVCGSLGLWSSFRSVIPASANSFEVVMADQANQPTVLHKLGGQFHLSSSFSEGVRARNICLSFSSYERRFATRNYMTQSLWGPSMSVSGGINVPVMPTPLFANAPAEKGGKNFMIDFMMGGVSAAVSKTAAAPIERVKLLIQNQDEMIKSGRLSEPYKGIADCFKRTIKDEGFSSLWRGNTANVIRYFPTQALNFAFKDYFKRLFNFKKDRDGYWKWFAGNLASGGAAGASSLFFVYSLDYARTRLANDAKAAKGGGDRQFNGLVDVYRKTLKSDGIARLYRGFNISCVGIIVYRGLYFGLYDSIKPVVLTGSLQDNFFASFALGWLITNGAGLASYPIDTVRRRMMMTSGEAVKYKSSLDAFQQILKKEGPKSLFKGAGANILRAIAGAGVLSGYDQLQILFFGKKYGSGGA

SEQ ID NO: 51063 - protein, 143 aa, Zea mays
  Clone ID: LIB3067-002-B1_FLI.pep
SWCSSKNLSIGTRRPKQQGNLPAMWTKPRVVLLRSEAWLALTRAQPFAFIRQVKKRNEETCSVRISTVRGMPCKSCLSYPGQWHCLVQWWIFRSQPFLCQLSVISTLQPSEPWLSLSILCVVCSIPRVFVVQNGVKSSFLLRE

SEQ ID NO: 51064 - protein, 324 aa, Zea mays
  Clone ID: LIB3062-011-C11_FLI.pep
PLAELERRCRHNGLSLCGGKEMMVARLLNLEEAEKERIYEKDVDMKYVQGEQHVVGREDSGVNAHSTSRFGEGSNGDELDVSRNSTRAGKGRSGGSASAELESFPSKKPKYDPVLPASKWSREDDISDDEDRKGGRGLGLSYSSGSDIADGLGKVDTTEASTDHTSRHHDTIVDEEHRQKLRQIEISVMQYRESLEEQGLRDLDEIERKVASHRRRLQSEYGLSTPADGANSRRSSERTSSSSERKERHRDAHDHPRKRGRSQSRSLSPPRKSQERDREHNRGRDRSHGNDVGRDRVRGKSASQGRDDHHDRSRDREKDRRKGR

SEQ ID NO: 51065 - protein, 132 aa, Zea mays
  Clone ID: LIB3066-013-B1_FLI.pep
GARRSGSGRKGRPRGGWRCPWRAWATRECWSCSGRPGRSTASRTRAPSSSRAPSSGSCGRWRPRRRRGTGTSTTATDTITTTFACLIFTSPGALDRRTSLLRIHVERARVAKKFHFPFCLEVARFLFFFLLV

SEQ ID NO: 51066 - protein, 438 aa, Zea mays
  Clone ID: LIB3066-042-C6_FLI.pep
LTLTLQLTTAAAAMAASRRQHRRGFPLVPLLLSLLAAAAYGRLISDGGPPAPLLPVIRLAAPPAEAECEQTYGFLPCTTTVLGNLFLVLAYGFLMFKAATFLSAGSELLLEIMGPGLVGGLLLPILGALPDALLVLVSGLSGSKEEAQSQVLIGMGLLAGSTVFLLTLLWGTCVVVGKCDLGPGREAVDVTDTKGFSLKGTGVTTDVQTSYAARIMGLSVIPFIIAQFPKMLKTHHGQRLAMLLALVVSFALVLAYCLYQVFQPWIQRRKLAYAKHKHVISGILRHAQMQSLGRLLNDDGTPNEQVIRKLFRKIDMDESRSLSRAELHALIVGINFEEVDFDRTDAVDKVMDDFDTSRNDVVEEEEFVQGMRKWLDEARRSVPVGGAFSSKFIHEYHERTRQEHDELVDRSDEAVESVENPGWCIAKAVALLLLGSAA

SEQ ID NO: 51067 - protein, 461 aa, Zea mays
  Clone ID: LIB3066-004-F9_FLI.pep
PEIWPPSSRGTTRGCPVHSRVGPAMGMFASAAKRYSNGKNFLRSAGVCCCSPSASAQLGGVRGKEETSTSAPAFAPDSNKKRWRKRRFWRKKMKARKEIGGLVDLVNDISAKSEESLGVSNQNMPSRALTFSQLSAATDGFSSQNLLGEGGFGRVYKGLLEDTGEVIAVKQLNRDGLQGNGEFLVEVLMLSLLHHPNLVKLLGYSTDSNQRILVYEYMPRGSLEDHLLDLPPSWKPLPWHTRMRIAVGAAKGIQYLHEVANPPVIYRDLKASNILLDADFNAKLSDFGLAKLGPMGDQSHVSTRVMGTYGYCAPEYAMTGKLTKMSDIYSFGVVLLELITGRRAIDMARPSEEQVLLNWASPLLRDKRRFVKLADPLLGNRYPVKALYQALAVASMCLQEDAASRPGISDVVAALSFLADPQYYPPGGTEAEHKSTHSGTDNDSSPPRTEMVRADDDMKHR

SEQ ID NO: 51068 - protein, 654 aa, Zea mays
  Clone ID: LIB3066-005-C2_FLI.pep
AIEDNEARALMAAQAIMSCEDTLVNLQDQKNKLTEEAEVELRRANEAIEKLKTFKNECGLPHVQMEWHDHHEIELVHALPFEDSDDSALNESRLDLQEICQRVKEIIESYPELSVAELADKVDRLVEKVISLELATTSQNAQIDRMKTEIDGLHERLHALEQDKVALVVDSSNLADGLRKAEEMLQEVQKIWKSVQNGFENICKQMTEAAHELTEFVETLHAPEQESSDFVDSSRDSKHDTSLEDYSGLTSLSVQNEPSKSLHGTTNETDKHEETLEDQAQKELVPKESEVEGKILLEDYASVLQSYKDTEQKLSEIEKINQDYHLEAMSELKELKSANATKDEEIQSLRRMLRSLRKKMSASIIESIEKAEETSKISSSPTTEDKEIAKSEETSKISATPSTEDKEIAEIEEYIKQWQINDSLASSVAEEKFRAEIDRVLGENLDFWLRFSTSYHQIRNFQICFDMLKTEMYRLTDEQEDGGNYGFAGSYQVAKLESAVLEKKFRDLNTDLQVWIEKNVLLKGEVENRFSSLCCIQEDISKVTTLDKCDEIHFNPFQAAKFQGEVLNMKQENNKVAKELEAGLDHVRGLQVEVGRVLLKLRENLEVSLERSHRAQQNFRNLSTKAGIPLRTFLFGSKTRKSSFFSCMSPGVHK

SEQ ID NO: 51069 - protein, 151 aa, Zea mays
  Clone ID: LIB3067-016-F1_FLI.pep
GNVVIPLHVALHPQTQMIQRKTRTSTTIFAYLGRHLPDCLVRIWVCHDAALLDLYRKDPPQRPAASLQPRSCTCSPFLTEDLLDAAHTPSPCAPDVYWERENVEEKKKRTQIPIHRVSGYKPRTRRQKLFFSTTTSSVPSSRFRFGVKFTS

SEQ ID NO: 51070 - protein, 302 aa, Zea mays
  Clone ID: LIB3066-010-A1_FLI.pep
GSDVTPSHGNNGTARRGDGAAGGGCVRVRRVGVDAGAVQPVRGDGVAGHPAERREGGAGARRAAAGAGAVGVGAAPRGVVGARVGAAGVLVRRGGARAVRHGRLRRRALLRRRRGRAAGHAGGDHPGHRAVPGLLRREPGGRVQHPHRDDAGARVGRPVRGGRVRERPEPRVPRGARRPRRGPRGGVPQRLRRLRRAAVLLHGAVREPPAVQAHGLLAPLQVGVPQGLLLRLRRPDVHPHLLRRRLLRRHLLPAPPLNFYFFKVFGRVLLVILCLRLRFDVLACVRFTCLRHASSESPDLPP

SEQ ID NO: 51071 - protein, 136 aa, Zea mays
  Clone ID: LIB3066-018-G6_FLI.pep
RKLLLRNMGSQACNKDQTIGQNICLSIHGSHSCKGQLRCDCSSKLAFKKPASGDDSFLGSCQLRCDCSSKLAFNKPATGDVSFICSCQLRCDWSFKLAFKKLAPPSDVSLVGSCLLICDWSFKLTFNKLASAISFK

SEQ ID NO: 51072 - protein, 469 aa, Zea mays
  Clone ID: LIB3066-030-H5_FLI.pep
PIDRHSQHHPPRRRDSRQEEGINSLPASEGGEVYCSVDQCAHRPAGLLISSTTSGLIGMAALATSQLVATPAGLGVPDASTFRRGAAQGLRGARASAAADTLSMRTSARAAPRHQQQARRGGRFPSLVVCASAGMNVVFVGAEMAPWSKTGGLGDVLGGLPPAMAANGHRVMVVSPRYDQYKDAWDTSVVSEIKMGDGYETVRFFHCYKRGVDRVFVDHPLFLERVWGKTEEKIYGPVAGTDYRDNQLRFSLLCQAALEAPRILSLNNNPYFSGPYGEDVVFVCNDWHTGPLSCYLKSNYQSHGIYRDAKTAFCIHNISYQGRFAFSDYPELNLPERFKSSFDFIDGYEKPVEGRKINWMKAGILEADRVLTVSPYYAEELISGIARGCELDNIMRLTGITGIVNGMDVSEWDPSRDKYIAVKYDVSTAVEAKALNKEALQAEVGLPVDRNIPLVAFIGRLEEQKGPDV

SEQ ID NO: 51073 - protein, 450 aa, Zea mays; identical to SEQ ID NO: 46482
  Clone ID: LIB3066-048-F1_FLI.pep

SEQ ID NO: 51074 - protein, 297 aa, Zea mays
  Clone ID: LIB189-009-A9_FLI.pep
SRRKGHRQRPSPIINLAGYIQETARGNEKLVSMEKKQKKHAHARSRSFTGGGLASFLRSTVSSFSSAFPPSGRRSSFNHRNAFSGPIVVSIVPPEARGGGGRRKRPGYVTPEPSSPKVSCIGQIKRSNSRRQKKVNPSCGKGGGACPLPPRPPAEDKKPCSRTSSSRGSLVKRMPFFRRSRSRPRSRAASSKDGLIVVGDGKESDGDSAVADPAPPPPPMGLGQMKRFTSGRAAFQDFDWREEERTTGRDSDEDDDGFVAHSAPLVLGGGVVASEPRKEVNLWRRRPIVPPTQLQLP

SEQ ID NO: 51075 - protein, 243 aa, Zea mays
  Clone ID: LIB189-020-A10_FLI.pep
SGPDVDEGERERERERRKGAAGAMAGHAPARDKTTTGFAATCSLLSQFLKEKKGGLQGLGGLAMAPAPAAGAGAFRPPTTMNLLSALDAAKATVGEPEGHGQRTGGNPREAAGEEAQQLTIFYGGKVVVFDRFPSAKVKDLLQIVSPPGADAVVDGAGAGAGAAVPTQNLPRPSHDSLSADLPIARRNSLHRFLEKRKDRITAKAPYQVNSSVGAEASKAEKPWLGLGQEQEGSDGRQAGEEM

SEQ ID NO: 51076 - protein, 164 aa, Zea mays; identical to SEQ ID NO: 44928
  Clone ID: LIB3137-027-D5_FLI.pep

SEQ ID NO: 51077 - protein, 126 aa, Zea mays
  Clone ID: LIB3136-016-B4_FLI.pep
TDSSNRDLLGYVQSQGGHDAMQMLKSEMQDHGFHYLPPRKPRKSDGYLRYRRRRLSGGFIFVAHADYYLLLRAFAKLAEIDIRIMHISVLKLEKRLACIEERIERSLNTLHNFSTGTVDELRSVSD

SEQ ID NO: 51078 - protein, 380 aa, Zea mays
  Clone ID: LIB3136-054-E9_FLI.pep
PRPRSPLSFQLASPAPRRPSPAAPMDLPVVDLTPYLGAAAGGPAASGVEELRALCATVSASLRDTGALLVMDPRCSAADNDRFLDVVERYFARSADAKRLQERPHLHYQVGVTPEGVEVPRSLVDKNMQEKIRSMPKDFRPATPKGPDPKWRYMWRVGPRPTNTRFKELNSEPVIPEGLPEWEEMMDSWGSKMISAIEVVAEMAAIGFGLSKDAFTSLMKEGPHLLAPTGSDLQRHGSEGTVFAGFHYDLNFLTIHGRSRFPGLNIWLRNGKKMEVKVPVGCLLIQSGKQLEWLTGGDCLAGMHEVVVTKRTLEAIALAKEQNRSLWRVSSTLFAHIASDAILKPLGHFAETPDAHSYPPICAGDYVEQELSVINLKGKD

SEQ ID NO: 51079 - protein, 566 aa, Zea mays
  Clone ID: LIB3136-054-G4_FLI.pep
QIEFESLCSSFDGHQNVGRRILNDFSRASADLAATAADLKVRLQIYKVRLLLLTRNLKVAKRELKVLMNMARGRDSSTELLLKSQLEYARGNYRKAVKLLSTPNNRTEPAMLAIFHNNMGCILHQQRSYHASIWCFSKALKYSLSFRSEKPMKLSTLSQDKSCLISYNCGIQHLMCGKPLLAASCFREAMPLFYKRPLFWLRFSECSLLALEKGLLCANGASSFNDEIEINVVGSGQWRQLIVNPVNSRSNLDSAGVTLGEHKNLVSLGFARQCLQNALLLLDATEKENWVIASDTEDWDQGTVHGYKSSGQKNTTSTDSKTPSGPTLANVNGEQKGTSLNATLQSSLAFYDEIRRKEYIKIRQAVLANLAFVELCLDNPLKTLTYAKSVLQVTDCSRMYAFLSHVYAAEALCTLNRTEDAAENLSVYIRDGNHVELPYSVENSEKALVEKDSDGEDLVAPAVTKLATEEPEQLRPEEARGVLYINLGMIAARQGEVEKANYMVSRGLAMLPNNPRAVLASVYVDLLQGKSQEAVVKLRRCRNVRFRPASIAASSQQSSLEKPPLS

SEQ ID NO: 51080 - protein, 195 aa, Zea mays
  Clone ID: LIB3137-036-F1_FLI.pep
TRRMYTARKKIQKEKGLEPSEFEDSVAQAFFDLENGNQELKSDLKDLYINNAIQMDVTGSRKAVVIHVPYRLRKAFRKIHVRLVRELEKKFSGKDVVIVATRRIVRPPKKGSAVLRPRTRTLTAVHDGILEDVVYPAEIVGKRVRYRLDGSKIIKIFLDPKERNNTEYKLETCTAVYRRLCGKDVVFEYPMTENA

SEQ ID NO: 51081 - protein, 133 aa, Zea mays
  Clone ID: LIB3158-011-F6_FLI.pep
GAGAHSDYGLITLLATDDVVGLQICKDKNAQPQLWEYVAPLKGGFIVNLGDMLERWSNGVFRSTLHRVVLDGRERYSIAYFVEPSHDCVVECLPTCKSESNPPKFPPITCSAYLSQRYKDTHADLKSYDDSKA

SEQ ID NO: 51082 - protein, 183 aa, Zea mays
  Clone ID: LIB3180-020-D3_FLI.pep
RQRWRRRLRGRWRASGAAGRRRQEVHALPDREDAAVARGAAGAQDALQRLRRALQVRSSVPGVPPRGEPHLRAVHPLQLAQEGGGDAPEGCPERRPVVRPSPFHPPPGLTSRHGVAGLSVGLVPHIAIYVCMHGCFISRRRPSWSSSPLHRSPPWIVSRPSSHALVCVSIHPIPIHRRASRRC

SEQ ID NO: 51083 - protein, 410 aa, Zea mays
  Clone ID: LIB3180-036-H9_FLI.pep
AMEDDYDFPAAGGYDPMGMMGMGMGGYGLGGPMGMGGYGLGGPMGMGGYGLGGEDDDDAMKDLHAGDEVEVHYTGTLIDGTMFDSTRDRDSPFKFTLGQGQVIKGWDLGIKTMKKGENAVFTIPPELAYGEDGSPPVIPPNATLQFDVELLSWVCIKDISKDGGILKKVVAKGDKWENPRDPDEVVVKYEARLEDGTVVSKSDGVEFTVRDGVFCPAISKAVKTMKKNEKAHLTVMPQYGFGVKGRQASGEEASVPPNATLHIDLQVVSWRTVTELGSDKKILKKILKEGEGYDCPNDCAVVRVKLIGKLEDGTLFVKKGHDGEEPFEFKTDEDQVIEGLDKAVLSMKKGEVSLVTIPPHHAFGTNETTKDLATVPPNSYVYYEMELVSFDKEKDSWDLKNVAEKIEAAA

SEQ ID NO: 51084 - protein, 229 aa, Zea mays
  Clone ID: LIB3159-004-D4_FLI.pep
EDATWNRSPEKNHHQSVDDDQNKLLTEKDHAHINKEVRKFTPQTKAHAKIRKPDGSTIKEKVAPNPKPVTNLVKDFSMSPRASSDSTEGMPQSANRYRVAVRKVPSKRYEETSGNSNKASRKVGSGAIFNDSISEGSGDELDTKTVMERSPNKSSTSADSGISSAASGESEVPDDDGTVSLSQKSFKGLHISSILRGSRSYKKALKRQMELLDDDTIVPDSQPADGLWG

SEQ ID NO: 51085 - protein, 146 aa, Zea mays
  Clone ID: LIB3159-019-C10_FLI.pep
SKRILKELKDLQKDPPTSCSAGPVGEDMFHWQATIMGPSDSPFAGGVFLVNIHFPPDYPFKPPKVSFRTKVFHPNINSNGSICLDILKEQWSPALTISKVLLSICSLLTDPNPDDPLVPEIAHMYKTDRAKYESTARSWTQKYAMG

SEQ ID NO: 51086 - protein, 57 aa, Zea mays
  Clone ID: LIB3156-015-G5_FLI.pep
HYEFSKEVPPDAAAVACTRNKAQATANNMIFARHHSYSITLKKYRRYAVHSVKNTIL

SEQ ID NO: 51087 - protein, 156 aa, Zea mays
  Clone ID: LIB3156-016-B6_FLI.pep
RDPVRAGQGRVPLRGVQRRAADVPGQGPGVLADEVYRFRCATAPLGGARPWTQGGAEDVAHSVHEERPPSARQAAGPRRLRRGTGGSPAAGSLCDLDHNCSSCISLHVPAHIGTRFFVLKFFYMPLPVKVISFLRFSLFIRLLGLWVPGVILVVPV

SEQ ID NO: 51088 - protein, 87 aa, Zea mays
  Clone ID: LIB3156-016-D4_FLI.pep
CSSKVGRVLVRLEPQREVDPFLLKVFSRRADPIQKLSMNKSVGNKNRAIEDRKLSTVHASYHPTSFLYYQDASSHIPWLKSVFPVSF

SEQ ID NO: 51089 - protein, 270 aa, Zea mays
  Clone ID: LIB3158-016-G3_FLI.pep
RLPFYSEAKLMFFVYLWYPKTKGTTYVYGTFFKPYISQHENEIDRNLLELRARATDTVVLYFQKAASAGQSTFFDVLKYVAAQSPSQKSRQRLHQESQQPPQQQQPQVQVQQAQPQKQAAPVMRRASSIAARQAAMAHQSQETKPVSSSPKIKRQTSARSGSVASTKPPVAASAPKPGGSPKKGEVKPAADPVQTPTTGVDSPKPEPSAPSLPGAEGVDKMAIDEASGDAPEGAEELDPAIEEETPMEETIRVTRAKLRRRTATEDPAGN

SEQ ID NO: 51090 - protein, 79 aa, Zea mays
  Clone ID: LIB3150-114-D2_FLI.pep
SVSTPEHTTAVPNGTEHVAGDVDGEMAEAEAEESSGSHDIEMQEDKPDQVDNVNADANPGAAAAPEAFNASESTSQPQS

SEQ ID NO: 51091 - protein, 338 aa, Zea mays
  Clone ID: LIB3159-008-F1_FLI.pep
LPSRSVHARVCRCRFSAAAAGGEPDLAVLDVVDDAERLLLRVPDDGGAPGGREGQARGGAVHVHQQVPGGQLERRAAGEGHGDLGHAQPRRLALEARVQDGERRRAGRPLHGARHRLAERRVHARRQARDHRAGVDDRRQAGVGRRRHGQRLARDLDPGHLDEVERVVQRARRHGRVRVLPRVVGADGQVPRGRRRRRREAVGEGVAHARRQLVQQRQLVTRQADEPRRLPEEALVVLSAAVVEVGHAGGAERHGVLAQIPDREGAVAVAGLVDADVGGGAGGGVERGGGEVAALLRGAGHGGVGAGRLGVEHRAGLAVARHDAGGALEPGERGPRVH

SEQ ID NO: 51092 - protein, 233 aa, Zea mays
  Clone ID: LIB3158-008-F4_FLI.pep
YIVTLGTTPEQRVISRESQAFAATTSSKTKIASVQLSRGGSGSGSVPVVLVRGGGGRLFGHRRLAVVGGEPLGAHVLGLTPGREVEAALLEAGARGVGGGGNEEAEPVVLAHEHRRQPLQQGAVRLGGSRDLERRPEVHVHQDALARAAVRGRREEHVDVSVLADRVGRGLVPAGDADGGVVPRAAQRRGYQAEEVAPPRPRLAMPLQVRAHVGEEVALPKRGAVDEALATPA

SEQ ID NO: 51093 - protein, 586 aa, Zea mays
  Clone ID: LIB3150-077-F2_FLI.pep
LALCSSEMAAATSSSTYLAIGRKTLNPAPSVATAATSVSFPATQHPCLVAASADRRRAVAAKVSSPSVIGTAMPSLDFETSVFKKEKVSLAGHEEYIVRGGRDLFPLLPEAFKGIKQIGVIGWGSQGPAQAQNLRDSLVEAKSDIVVKIGLRKGSKSFEEARAAGFTEESGTLGDIWETVSNSDLVLLLISDSAQADNYEKIFSHMKPNSILGLSHGFLLGHLQSLGFDFPKSISVIAVCPKGMGPSVRRLYVQGKEINGAGINASFAVHQDVDGRATDVALGWSVALGSPFTFATTLEQEYRSDIFGERGILLGAVHGMVEALFRRYTEQGMDEDSAYKNTVESITGIISKTISKKGMLEVYNSLTEEGKKQFIEAYSAAYYPCMDILYECYEDVSSGSEIRSVVLAGRRFYEKEGLPAFPMGKIDQTRMWKVGERVRSTRPQGDLGPLHPFTAGVYVALMMAQIEVLRKKGHSYSEIINESLIESVDSLNPFMHARGVAFMVDNCSTTARLGSRKWAPRFDYILTQQAFVTVDKKAPINQDLISNFMSDPVHGAIEVCAQLRPTVDISVTADADFVRPELRQSS

SEQ ID NO: 51094 - protein, 262 aa, Zea mays
  Clone ID: LIB3150-077-F3_FLI.pep
HLIPSPPPDPPPPHPHLLPPRRRRHVLLLVRCGRPDRALRALQGPPGGGGLGRRGGDGLLAAGAGHARPGPGLHPRGTGAPPPVPGRGGAGPHAPPPHPLRHQGGPGVLRGAPGARGRRAGARPPQRARHHRRRLGQRRAAPVPRGPRQRRAPHAGEGEGRGGGRAARGEGGRGDPGRRGRQGELRGELFPGAGQGVPVRDGGGVRQRGGAGRRGRGRQGGGGQGLGQAAAGRGDGPGLRRRRCSNAREPLITGCRVSVSGF

SEQ ID NO: 51095 - protein, 219 aa, Zea mays
  Clone ID: LIB3180-030-H9_FLI.pep
LLHAVGHQSSPTTTRPSSGSFIRDVRVAVLRHDLTRALCLLPKPSSAAPAPAVPPPQRPPHQFLLRGARRPAEHQQQRRRWLSSIAFAALHLFRKCPAPPPTCTAAWPSYSAASEISLPRRPEICECKSVSIGLFYSSIGSDFGWAQLRRCRGWGISGSLPSSTTRLTSRNSPLFSLYLLPFILFQTLRRLGLCLLSVTMPLDVSVICNLAAVCGRDGP

SEQ ID NO: 51096 - protein, 123 aa, Zea mays
  Clone ID: LIB3156-014-D3_FLI.pep
TWILRKHKLHIPTVQATSSPKKKYTRTPYLSAQTNPKLIKRLNQTRKKNIHISTGAIFFLLPRACCRSCHRDSALCSFGRANDSYDRPTRPGDHHDRKSWQCWTSTKGRACFRPTGKMSRASL

SEQ ID NO: 51097 - protein, 276 aa, Zea mays
  Clone ID: LIB3180-005-C10_FLI.pep
QKGVFETSGPTLKLKLKRPACAAMDVKCRRLEGKVAIVTASTMGIGLAIAERLGLEGAAVVISSRKQKNVNEAVEGLRAKGITAVGAVCHVSDAQQRKSLIETAVKSFGHIDILVSNAAANPSVDSILEMKESVLDKLWDINVKASILLIQDAAPHLRKGSSVIIISSIAGYNPEQGLTMYGVTKTALFGLTKALAGEMGPDTRVNCIAPGFVPTRFASFLTENETIRKELNERTKLKRLGTVEDMAAAAAFLASDDASYITAETIVVAGGVQSRL

SEQ ID NO: 51098 - protein, 424 aa, Zea mays
  Clone ID: LIB3180-005-G1_FLI.pep
LPLPPQMEVCDELRSFEATGVYRLDGTCSGAGATYLDPVRLLNASYQRFRIVPSAYYSRSFGPQHQEGEPEIERPEKRRKRKRNQKPKPRELNPMERIAEARHQEAKPLLLNAHESLVKAKHLLEYISKTIKGNEHTLDAGSGSENNFVELGTSWRAPFYEITLCFQKPHVLGNEEGFFHAQKTSFPLFNSIISVEGTDEAEGEFRNRRYILPRGSCFLMADFKRVRDLIPCSPNQGYNLIVVDPPWENGCVRQKEVYPTLPNKNFLYLPVQQLARPTGALLVLWITNREKLRAFVEKKLLPSWGVEDSTVFYWLKVKPDGSLIGDLDLFHHRPYECFLLGYINGNANAKQGSNFKLLERSQVIMSVPGAHSRKPPLEQLLSEYIPGPKPSRCIELFARELFPRWTSWGNEPLHFQDTMYFSEK

SEQ ID NO: 51099 - protein, 434 aa, Zea mays
  Clone ID: LIB3180-007-A7_FLI.pep
RPFGEQLLSDSDLSRADGLIPGRGVSAFDLDPDPGRRSWFIGGSEEAMIPSVRLSPGPAAFSGSSLRSKLPSIPSISSLKPSKYVVSSLKPLYLAPLDGPRTAELKSRRQPLEFRCSASAADDKESKTQVVPVQSEGAQRLKISIYFATWWALNVIFNIYNKKVLNAFPYPWLTSTLSLACGSAMMLFSWATGLVEAPKTDLDFWKVLFPVAVAHTIGHVAATVSMSKVAVSFTHIIKSAEPAFSVLVSRFFLGETFPIPVYLSLLPIIGGCALAAVTELNFNMVGFMGAMISNLAFVFRNIFSKRGMKGKSVSGMNYYACLSIMSLVILTPFAIAMEGPQMWAAGWQKALAEVGPNVVWWIAAQSVFYHLYNQVSYMSLDQISPLTFSIGNTMKRISVIVSSIIIFHTPVRAVNALGAAIAILGTFLYSQAKV

SEQ ID NO: 51100 - protein, 285 aa, Zea mays
  Clone ID: LIB3180-040-B10_FLI.pep
VDDLPTTYLLYLCSCAPVPTINQSDAIPIGFCSCERQGLHRAGPDVREHGGAGEAPGRGAAVRLGPLRLLPLRLRGVPGHAVRALAAPVLPRLPRRGHRRLRLRQRRRRVPGLRAPRAPPAARPEELRHRAGPPRRQHDHGLRLPVLQRLRPPRPPPPPAAAAAGPGQQRDRAPGHADVPRPALEALLPGGVHAVVHRRRGAPRGLARVGRGLRARHALLRGVRQHRPRRRRRRAGQVARLPRHDQPHRGRQLHRRAVHRGQHVVAAHRRQVHRRTHVLILSSNP

SEQ ID NO: 51101 - protein, 123 aa, Zea mays
  Clone ID: LIB3180-040-H11_FLI.pep
GAKLKDILGVPDTSLEARYITLHVCDLVAERGARLAAAGIYGILKKLGKDKLLGDFSQQRTVVAIDGGLYEHYKKFSACLEATLTDLLGEEVASSVVVKLANDGSGIGAALLAASHSQYAEAA

SEQ ID NO: 51102 - protein, 78 aa, Zea mays
  Clone ID: LIB3150-098-H4_FLI.pep
GVHLRTGLFQPFPSLPITQGSASSSSSQRSLSIPQGPPQSLVSLASFYKPPTLWRKFEWESKTPRANEHKDVAHTISQ

SEQ ID NO: 51103 - protein, 155 aa, Zea mays
  Clone ID: LIB3075-009-C11_FLI.pep
AGGHRKEEMASKRIQKELKDLQKDPPTSCSAGPVGEDMFHWQATIMGPSDSPYSGGVFLVTIHFPPDYPFKPPKVAFRTKVFHPNINSNGSICLDILKDQWSPALTIFKVLLSICSLLTDPNPDDPLVPEIAHMYKTDRHKYENTARTWTQRYAM

SEQ ID NO: 51104 - protein, 161 aa, Zea mays
  Clone ID: LIB189-004-A9_FLI.pep
LYMARSSETVNTKTPEREGWQSLYCCLALSVKELDSSVRRGGTCSPPLSGAEQPALHQFVCDQAVEVEVLQLMEGVVDLRVHRNATGSSSWTAAHRLEAVVSAGGHAGCVVDHIAWASTSWSSTLHRAVMVTGITVDMLSLLPSSSNVGNSNSWCKTAARF

SEQ ID NO: 51105 - protein, 358 aa, Zea mays
  Clone ID: LIB148-007-C3_FLI.pep
GAEEDSYGPPANQAVPPPNANAPGNRGGPRGPGAPRVGGPAKPVSIDVPAIPFDELKRITNNFSDRALIGEGSYGRVYNATLSDGRAAVIKKLDTSASQDSDTDFAAQIAMVSKLKNEYFLELLGYCLEDGNRMLTYQFATMGSLHNILHGKKGVQGAEPGPVLNWAQRVKIAYGAARGLEYLHEKVQPSIVHRDIRSSNVLIFDDFSSKIADFNLTSQGTDTAARLHSTRVLGTFGYHAPEYAMTGQINQKSDVYSFGVILLELLTGRKPVDHTMPKGQQSLVTWATPRLSEDKVKQCVDPKLDSDYPPKAVAKLAAVAALCVQYESDFRPNMTIVVKAITPLLNAPKPAAPAAPQS

SEQ ID NO: 51106 - protein, 182 aa, Zea mays
  Clone ID: LIB148-042-C7_FLI.pep
MGCAASAADGAELRRRGWARAGEPGHSEASTSGLLAPPHQQEGQEAESSSGGRRRGCKVAPEPKELEEGTAALPSMPGSPSFRYYCQKKTAAVDRIVADAIDADDTVRIRATARQLSNRSEITANKAQDSNEVSQPKGGTKWLRFSGLSIVAAAWHKHNLFSRQRSKPSPPPAATSDASSQP

SEQ ID NO: 51107 - protein, 305 aa, Zea mays
  Clone ID: LIB189-014-B2_FLI.pep
EKSILYYRVLCPGSEQIVCNFTNSLQATFLYKKILMILFPSQVRPANSAHACMDLLKLRTGRGRWRRHGTEARVASLLRRRVLFQRRRHLAVYHLAAHVFEIWVHGEGEPELVGEEVLRGDLAHVDAHPHAAAALQVPALLDAHPAALPDAADLHLHHLRGADEPAEEGHGQRRVELAGPPRRREQPPELRRRAGGQHGQQHLAHRLLLLRARAPQHHPPRHVHEALVVPLPHRPLLLRLRRRLLRRVLLHLAREQPHERALQRAVPVLRLLPHGRRRRAPYAHGAAAVPLLLRHACSRRCPPPA

SEQ ID NO: 51108 - protein, 322 aa, Zea mays
  Clone ID: LIB189-015-E1_FLI.pep
CSVRNCAKLPTSLGPPPSSSIDEIGGWGTVPTLESLGPSVTKSEKGMHFIGGESAALGRVHEYFWKKDQLKDYKVTRNGMLGPDYSTKFSPWLASGSLSPRYICEEVKRYEKQRVANDSTYWVLFELIWRDYFRFLSAKYGNAIFHLGGPRKVVSKWSQDQALFESWRDGRTGYPLIDANMRELSATGYMSNRGRQIVCSFLVRDMGVDWRMGAEWFETCLLDYDPASNYGNWTYGAGVGNDPREDRYFSIPKQAKSYDPEGEYVAYWLPELRSLAKERRNFPGASYIRQVVPLKFDGGNQRKDQQFNRQRRPNNVYIRQVK

SEQ ID NO: 51109 - protein, 309 aa, Zea mays
  Clone ID: LIB189-016-D8_FLI.pep
VSLPLSRPPHRRCLRHRHCSHHCHALTSTLPQTIHCHFVIGAPSFTQMWSPIPGTLMRTSSLPAVIEASGNDDWKKRKEAQSLKRLEVKKKRIERRNSLACNTSKEAAGQSPKEMNANTDKLVSSDETIVSANESHSSGKHLVKGLPPKYQATITSEDSSSAMRKKPNSAFKGTAITEEQNSSSSVPSSGEAISSVTAPSLPLLSLVPITATLGSREDQSILGRAGARANGMGDVERRMMQEMPGVFTKGLSNGSRVEGFLYKYSKGEVRIVCICHGSFLTPSEFVEHAGAGKVDNPLRHIVVSATPNL

SEQ ID NO: 51110 - protein, 213 aa, Zea mays
  Clone ID: LIB3066-005-D12_FLI.pep
MKNECKHSLHAMAPHAGVACVVHIMFARAMQLLAIWLSSLSNFPMGLGTPAWVKGRSHESKSWTASCSMILAVPVSLNVMARCAAPMVSCVFMYMVSQNVSACVCCGGMVRADLATCLRACAVRLANASTCMFSTARLSMTGYLDACRPAVDVHTSGNGVREQMPATCGLTAPPCPLPPLPLPSACGRRPADSSATTARRTSREACPMMFIIL

SEQ ID NO: 51111 - protein, 287 aa, Zea mays
  Clone ID: LIB148-032-D1_FLI.pep
RRPPAVTLALSRHAGSDGPRPPPSQLQRWQERRAFLTTITCSMARLPTSSGMAALLLLVAFVVLPSAALSSSSSLLHSPPESDETSGGSEQQAPPEDENKEKERQLAKEKAYAAEKVVQQEMLKYAKEKGLVSPTNGTGWYRGIAREFVDAHNELRARYGVPPMKWDNQLARQARRWSNAMRKDCQILHSGHEYGESVFRSYDDWNATAREAVFWWGKEEAIYDKEKEKCKYGKVFKECGHFALMVGKRSTKVGCARAECFKGGVFITCNYYATDLDKNKNKTPNNN

SEQ ID NO: 51112 - protein, 307 aa, Zea mays
  Clone ID: LIB3151-005-G4_FLI.pep
VATVQCLSGTGSLRVGGEFLARHYHERTIYIPQPTWGNHPKVFTLSGLNVRSYRYYDPATCSLHFEGLLEDLGSAPSGSIVLLHACAHNPTGVDPTIEQWEQIRQLMRSKSLLPFFDSAYQGFASGSLDKDAQSVRMFVADGGELLMAQSYAKNMGLYGERVGALSIVCKSADVAVRVESQLKLVIRPMYSNPPLHGASIVATILRDSEMFNEWTLELKAMADRIINMRQQLFNALKSRGTPGDWSHIIKQIGMFTFTGLNSEQVAFMRQEYHIYMTSDGRISMAGLSMRTVPHLADAIHAAVTQLK

SEQ ID NO: 51113 - protein, 513 aa, Zea mays
  Clone ID: 700354316_FLI.pep
LLRQEQNTKSSVKTETKILTVQEASLLSQLNQLNHNSQIIIDSGGPHDPKLSRPASGAGAGNEHISPPDHGQTAEESDAREDYPAMATTTPAEDGYSWRKYGQKQVKHSEYPRSYFKCTHPNCLVKKKVERSHEGHITEIIYKGAHNHPKPTQSRRPGVQPVHPFGDSAQADAADNLGSQANAVDANQPRRAGVQDGMDATSSPSVPIERCDSPASMQVDSAARFGSPEGADVTSVSDEVGGDDRVTRGSMSQGGADAEGDELECKRRKLESYAIDMSTASRAVREPRVVIQTTSEVDILDDGYRWRKYGQKVVKGNPNPRSYYKCTYPGCVVRKHVERASHDLKSVITTYEGRHNHEVPAARNSGHPGTAAATGAGGPRRLEHPSLRDGLMGHLGGCGVPFGLPPPRDPLAPMGNYPTYASSIPLGGAGPTSLPSLPVPAGTLSAVDGLKLPMLAPSSLQQHPLLRHRQAMQAAGLVAPKDDVKVEGNVAGGAAPSVYQQMMCSGLRLRQQM

SEQ ID NO: 51114 - protein, 302 aa, Glycine max
  Clone ID: 700908259_FLI.pep
LQFPMQIFIGRQGALVCFWLLSVFFVVTGFNNEEHRTVEVVGLGECADCRQNNIKNNHAFSGLRVTVDCKSRHGHFRTRGAGALDEYGNFKVSLPQDMVEDGELKEDCYAQLHSASAEPCPSHGNSKIVTRSVSEDTHTLAPAAGKLRFSSALCTSAFFWHFFKHHPEFPYPPKDDYSLPPPVPVYKEPLPPVPVYKKPPAPYKKPPISTPSPVVNKPCPPKEKTPSPTPIYKPLPPPTPIYKPLPPPTPIYEPTPTAPSPPYFKYFPPFHFKKPCPPLPKMEPPKFFYQHPWFGNWPPSHS

SEQ ID NO: 51115 - protein, 109 aa, Zea mays
  Clone ID: 700076450_FLI.pep
NSMQATLVASRKSLHKRKGVLEVTHELLERLEAHLRATAELMVTANMRGNSAEEVAERVLSQTSIWGLQVIIRNIITSNNHEFMIFLEVRTVNVLCVVLGQKYCFVLGN

SEQ ID NO: 51116 - protein, 242 aa, Zea mays
  Clone ID: 700085785_FLI.pep
LYKLVQLLAAHPSYRSALATLSPLHCIALHCISRGRSMAREMEKAKKATSSPKSSTISTGPKSPVRNGGGSPPHKKNTTTATEARGRKHEQQNVRKGGDTLSHDESKPRRSSSTAAQTSPKRSPRHEQPLSYNRLHTEERAIRRAGYNYQVASKINTQEIIRRFEEKLAQLMEEREIKLMRKDMVPKAQLMPAFDKPFHPQRSTRPLTVPKEPSFLRLKCCIGGEFHRHFCYNGVNNKAIKS

SEQ ID NO: 51117 - protein, 244 aa, Zea mays
  Clone ID: 700087862_FLI.pep
RHLRRLHRPLQVPVRGGHGRGPLLGLRGPHRQGVAEPHPRRGVRGPRHPRAALLRHERAPAPRRPPPAGRRRLLRQLLLHHARGVHGRQGVIVVRHRRGEDHQGGEEAAAVGVRAVGGGGGGRRRRGPLPDHLRLPDAAGVGLDAPRLRGGGLRVGPASPRGTADEPGLHRHVHPRQAMGPQARGEAHHAVRDARPRLALPRRHGGHELAPRLVLRSPPAVVSAGLPFVHGFLVFSPLSYCGNY

SEQ ID NO: 51118 - protein, 102 aa, Zea mays
  Clone ID: 700048496_FLI.pep
TDRQERRVIFGFVQPRIMEIQLDSPLLLHVLLNTHAHTPLLGAQKKKNKATTHHSTHAQSFPLSLSLSLLPSKQLHISPRHVSGLLLAAAPLLADNARGEGT

SEQ ID NO: 51119 - protein, 317 aa, Zea mays
  Clone ID: 700072089_FLI.pep
SEAALEKQNEQLLILQAGLDNLKDENETLQGSLADLNSKLSEKDSLLHQAEDELAKAQLVLSEALSQKGELELNLNSLNEQHGESKAFGENASQKIIELEAQIQAMRAAEEALNLELKEAEASVKAAEKKGSDLEQQLSEIENKLVASSEEIELLKERIQQEAAVSAERGMQLEETMTSAEGYKEKINELQCSLDSSMSKNQLLEQEVKELTDKCSEHQEQAHSVQQRSLELEDLLHTSKTHAEGAYSRTQELEQELNGTYEKLKGVEEELEQYKSKASQLSDDLEAYQTKAASLEAVVEAASEKEKELMESLSQIT

SEQ ID NO: 51120 - protein, 431 aa, Zea mays
  Clone ID: 700084070_FLI.pep
PMSSEDLFDGLPPPAAATAPAGGGAGAASLLQPPPPPPPPSLAQATAPKPALKSSLKRSKPSPSSDATPSSTPAPAAAAPESHVPEKRLRFRTTVDASETQVIEAMQKIASHIGNASKFSKASKLALQLIEAGSVKPGTIGHFFAILEAAMSSPGVCNEPSVRADYHKLFDAAQGVTELLNQEQKNRFNIWVLHAVVANDLFTDDSFVFSKAVGKIKDAISALPVATVDDDNDEAAALAAASKTDVATDNEAGHGVPAAASDSVVDDGAHAVALEPEEESSDPFGLDGLLEHRPKKTSGRAREKAVAALNRKTVEEEAKRVLKSQREALLKCLEIAARRYRIPWTQTAIDILAKQAYDDAARFTRRQRDAIAKLWNSIKEQQIRRKQGKSVSGKLDVNAFEYLQEKYSREKMSIRHSVGGGGDRRATQWLG

SEQ ID NO: 51121 - protein, 297 aa, Zea mays
  Clone ID: 700083219_FLI.pep
DVEAFIAACSTANGDVTVVEQAESIIQAIKSVRAQDAEFRYEPPAASEDIFSIFEELRPSEEPVIKEIEPCYKNSSAKCEPEIQEVSPMTDIFLEKKAKANSNKSPKDESDTEDGSSWETISHEDVQGSSGSPDGSEPSVSNKVCDGSIPWKSRNGFERMESEKLKDESADACLTNMNQPKKKESAISKLWKSSRPKNSEICKKDAVETVNARSSNVRLSVGTYSTVESGIQEIGLSPPCVEQWSSPDSMNVQFNRGFKGCIEYPRMSQKHSLKAKLMEARLESHKVQLRQVLKQKI

SEQ ID NO: 51122 - protein, 327 aa, Zea mays
  Clone ID: 700083617_FLI.pep
PGLRCGQGCRRYGCGGKRWRGRHVGERGRGPRVPALRRAPRCAVFEQILPFSLLLLVVFIRQHLQGFFVTIWIAAVMFKSNDILRKQTALKGERKISVLIGITVIFMIHVFGVYWWYRNDDLLRPLFMLPPKDIPPFWHAIFVIMVNDTMVRQAAMAVKCMLLLYYKNCRGRNYRRQGQMLTLVEYLLLLYRALLPTSVWYRFFLNKEYGSLFSSLTTGLYLTFKLTSVVEKVQSFLAAVKALSRKDVHYGSYATAEQVLAAGDMCAICQEKMHVPVLLRCKHIFCEDCVSEWFERERTCPLCRALVKPADIRSFGDGSTSLFFQLF

SEQ ID NO: 51123 - protein, 383 aa, Zea mays
  Clone ID: 700089103_FLI.pep
RRNAKREAAKPHLQFLRAPAPRRQFSMVAASVAERAYEAATRSALVALERNLIPDAVTRRLTRLLLAQRLRQGYLPSAPLQLQQLLQFVHSLEEMPIAIETDKAKAQHYELPTTFFKLVLGKNLKYSSCYFPGDSSTLEDAEVAMMDLYCERSKLQDGQSILDVGCGWGSLSLYIAKKYRNCSVTGICNSTTQKAFIEEQCRDNELSNIEIIVADISKFEMERSFDRIVSIEMFEHMKNYKSLLKKISRWMKEDGLLFVHLFCHKAFPYHFEDKNDDDWITRYFFTGGTMPSANLLLYFQEDVSVVDHWLVSGTHYARTSEEWLKRMDKSITSVRLIFEETYGKESTTKWIAYWRTFFISVAELFGYNNGDEWMVAHYLFRKK

SEQ ID NO: 51124 - protein, 343 aa, Zea mays
  Clone ID: 700089203_FLI.pep
GRARWGRDALQLWDKMRELKLPADSILCNTLLSMCADVGLVAEAEQLFNEMKDPECRDVPKPDKWSYTAMINIYGSNGDTDSALQLFAEMLKGGIEPNIMSYTIVIQCLGKAHRIQQAVEVLESGLEKGLKPDDRLCGCLLSVIALSSGEEMEMVLSSLEKVNQNLVKLIRVLGDAQVGGDDITKELKSVLNGAAPEVRRPYCNCLIDVCRNHGFPPQRAREVFHLAQTYGLYSKLQSRKDEEWSLDLRSLSVGAAKTAFDDWMQTVSERWAQQKDLPESFSVYTGSSTHKFAQGLASAFAAHLDQMAVPFHASESQAGSFISSRDDLVSWLQMSRSSAVVAG

SEQ ID NO: 51125 - protein, 394 aa, Zea mays
  Clone ID: LIB189-033-C9_FLI.pep
IRLRSERPSPRPPQSNPIQTARSPCPCQASRAQPPRASCSVLHAMAQKETNGSNGDHISTRPPPTPSPLRFSKFFQANLRILVTGGAGFIGSHLVDKLMENEKHEVIVADNFFTGSKDNLKKWIGHPRFELIRHDVTEPLLVEVDQIYHLACPASPIFYKHNPVKTIKTNVIGTLNMLGLAKRVGARILLTSTSEVYGDPLEHPQTEAYWGNVNPIGVRSCYDEGKRVAETLMFDYHRQHGIEIRIARIFNTYGPRMNIDDGRVVSNFIAQAVRGEPLTVQRPGTQTRSFCYVADMVDGLIKLMNGNKTGPINLGNPGEFTMLELAENVKELINPDVTVTMTENTPDDPRQRKPDITKAKEVLGWEPKIVLRDGLVLMEDDFRERLTVPKKTKA

SEQ ID NO: 51126 - protein, 276 aa, Zea mays
  Clone ID: 700156383_FLI.pep
QPRPTSQGECGVEAQGRMPREISRSPPPFRRRGSPPLRYASRRNRRDRSRSPYASRRKTRSPSPLWDRSNSPSPRRHRSPLSPRRHRRQRSRSTTSSLENNPSSPSHASEKINSSVKQRLEEEKKRRQKEAEFKLLEEELARRVEEAIRKNVEERLKSEEVKRDIEHRIEEGIRKLFDEVDAQLQKEKEVALYEARQKAEQERREREELDRMLEENRRKVEEAQRKEALEQQQKELERYLELERIQRQREEALRRKKMEEEEERANKLRLLGKNRG

SEQ ID NO: 51127 - protein, 308 aa, Zea mays; identical to SEQ ID NO: 42143
  Clone ID: 700101688_FLI.pep

SEQ ID NO: 51128 - protein, 255 aa, Zea mays
  Clone ID: 700161168_FLI.pep
ELRDNCQTITSPVVLKTKSGSIESKNPKVFDSWEWIEREYVLVPENCTSMEMSSLNIKSTKDDMDTRTVSYGRSTGKGSVQNQIRDFTDTATGVQSHGCAPVVISQESATVDCRRGKPPDYITRLHSLNQYVLVLADLAREKLSKGLYLEALSIELVLLTIWKEALDACSLLMDTSDGEKFSKSCQEHFLAKSGHSPMNVVQGLDFTRTASIFSWLESGFMKAYDRAEKISHVLRKSDDNTEMPDAVDVTFQTAL

SEQ ID NO: 51129 - protein, 293 aa, Zea mays
  Clone ID: 700152411_FLI.pep
QGQSHLPSTQAGSHTELSLRRIKSRSRGALAVAVGVAGLPQHGCLRDQRGHHVRVHVGRRPPVLEVAFAFLLGVAAHPHRRPAVRDAPDEGVDVGGLVAAGEAALVAVPVRGDVLPVPEAQLADRLLDHLVPAVTPHRLGAVVGVCTSAIPVPRNWLGVEGDNHAGDLGDPLKNVASHPELVAGRDADGRADLELPLPRHDLPVDATDVDAGVEAGLVVRVHDVPPVGLVRSDGAVVRSLRARVAAQRPTERPLGVLLEKGVLLLNPEPGFTQAQRKKNHFDEMSVRNRSVHF

SEQ ID NO: 51130 - protein, 321 aa, Zea mays
  Clone ID: 700152416_FLI.pep
RFRLEASDRTETFLCTVPMFHVYGLVAFATGLLGCGATIVVLSKYELPEMLRAINEYGVTYLPLVPPILVAMLAHPNRLPLGGLRKVLSGGAPLSKELIEGFKEKYPQVEILQGYGLTESTAIGASTDSAEESSRYGTAGLLSPSTEAKIVDPETGEALPVNRTGELWIRGPYVMKGYFKNVEATQSTLTPDGWLKTGDLCYIDEDGYLFVVDRLKELIKYKGYQVPPAELEALLLTHPEIEDVAVIPFPDREVGQFPMAYVVRKKGSNLSEREVMEFVAKQVAPYKKVRKVAFVAEIPKNASGKILRKDLIKLATSKSKL

SEQ ID NO: 51131 - protein, 80 aa, Zea mays
  Clone ID: 700096042_FLI.pep
SGVEKAHGAVLGSRSGTAPSVHRDRWTASLHVSCSKSGEGNQIRYRWSTAFQPPIRWGFSSPFFPFDWRVIHIHACYRVL

SEQ ID NO: 51132 - protein, 282 aa, Zea mays
  Clone ID: 700105068_FLI.pep
RIRRGAPRGVRDPGRDAAGPFRGGLRGPPQPPGAAQRAEPGRVRGDPARHVSAGPRPLGARRGAVRCGPALLRGHRARGPRGPAVRRLRLRRPRGRRGGAPPRGPRHAGGLTAIERCRKPVVAAVHGACVGGGVDLVAACDIRCCSRDASFVLKEVDMAIVADLGALQRLPRIIGYGNAADLALTGRKITAMEAKEMGLVTRVFDSKQDLDAGVAKIAKEIADKSAWAVMGTKAVLLRSRDATIEQGLEHVATWNAGMMRSNDLKEAIRAFLEKRKPVFSKL

SEQ ID NO: 51133 - protein, 414 aa, Zea mays
  Clone ID: 700105135_FLI.pep
ELERALAVDSATAASNPDPAGPMVSVDSLRAYLQIVDVASILRLDRDIADHAFELFKDCSSATCLRNRSVEALATAALVQAIREAQQPRTLQEISTASNLPQKEIGKYIKILGESLKLSQPLNSNSIAVHMPRFCSLLQLNKSAQELAAHIGEVVVNKCFCTRRNPISISAAAIYLACQLEDKRKTQAEICKVTGLTEVTLRKVYKELLENWDDLLPPDYTPATPPEKAFPMTNIYSGRSASGKDMYQDKIFESIKQKCPEPAEPDHMVVVKEEGDKKTAALGRPPTKLDHPELGKVFRPPNAPFSTSPKSDRDKTETSLRGFNLNEVSCAMDSDRTDITVKPTFGDRLSNDPNANPSPNRQPLPWQLKQGAPATAPSYSRLREQQSGLDLVAALKGVGKRSPGDSDVRDKEGK

SEQ ID NO: 51134 - protein, 247 aa, Zea mays
  Clone ID: 700160012_FLI.pep
RIPSFLLSVQVQQPARASLQETESIRVPKLAALPAKQEDSCGMELELGLAPPSARRPTPMTIDQQQQQQQRHLAEDELSSTSSDHHPCAARSGKRGFAEAFQEAAATTTTLPLFDDGSSCGGRSGGGKRPLVGWPPLSSARSRACGGGAAKYVKVKKEGDAIGRKVDLSLHASYDELLATLARMFPTNNGSQDDKEISSKSTAAATTTTSHRDVVVTYEDGEGDWMLLGDVPWDDFARSVKRLKLLG

SEQ ID NO: 51135 - protein, 443 aa, Zea mays
  Clone ID: 700165740_FLI.pep
ARLALVGGEADGAPGGVEADAGALLLHVPDDGHGRVRRREGQAVGAGSVHGDQVVLRRQPQRAAALEPQRHRGHLHARPVRQVVARVEQRHPGGPGQRRRALDEGVAERRVGGGLEPRHGGAGVHDDAARARRGVHGEGGCRDGQRLPAHRDARQRHVVEGARARAAHERRRHGARLGGAVAELERGRGRGVAVHEAVGEGGRGDLGREGERPAAQRQQPRGADEEALVVVAAPDGDVADRGGVPQRERLGGEVAHGVGAVAVGHLVEAGARGVAARRGVQVPAALGVAGDGGVGGGEGRVEHRVGLLVAVGAGLALHPGDVAAGVQHHVQLPRGAADAHAGEVLAAALPDAGHHGALDRRGRREHRRPVRGAQVQPGHGVRRQRRAGRHRRGARRVAAEAGEQERAVRLVPPLLLGQEVPGVEPQREAALPRSRGALRPGGG

SEQ ID NO: 51136 - protein, 199 aa, Zea mays
  Clone ID: 700166055_FLI.pep
CWRWPGAWRSWAGYAAFGSNAPGNILAAGGLGPLWLVDIANMCLILHLIGAYQVYAQPVFASVERWAASRWPEAKFMSSAYTVSVSIPLLQRGSVTVAPHKLVLRTAIVGATTAVALAIPFFNAVLGLLGAFSFWPLTVYFPISMHIAQGKIARGTKWWCLLQALSMVCLVISVAVGVGSVTDIVDSLKASSSPFKIVG

SEQ ID NO: 51137 - protein, 144 aa, Zea mays
  Clone ID: 700166193_FLI.pep
PADIQKNISINAETFGETKVKSLILHWDKEQASEMLNTFDIIVASDCTFFKQFHKGLARTVKSLLKHSATSQAIFLSPKRGDSLDKFLGIIKENGLSCELIENYDPTVWNLHKKLVAGEDRTWPNYDKEHCYPLLVRIGYFSEF

SEQ ID NO: 51138 - protein, 313 aa, Zea mays
  Clone ID: 700163911_FLI.pep
SIGSQRTPKCDKALNGLVSGLGDHPEKLHQACLVHAFLKRPFSCTVDGCPFSYSRKDHLNRHLLTHEGKLFVCPVEGCGRKFNIKGNMQRHVQEIHKDVSPCESKKEFICPKVNCGKAFKYASKLKKHEESHVQLEYTEVMCCEPGCMKFFSNMECLKAHNQSCHQYVQCDICGTKQLKKNFQRHHRMHEGSCVTERVKCHIEDCKCSFSKKSNLDKHVKAVHEQRRPFVCQFSGCGKRFSYKHVRDNHEKSSAHVHTEGDFVEADEQRPRSVGGCKRKPVSVESLMRKRVAAPDDGPAHADATEYLRWLLSV

SEQ ID NO: 51139 - protein, 71 aa, Zea mays
  Clone ID: LIB3157-012-D1_FLI.pep
NHIWSAPTTSTELSYLQRIPSFPFRVGECLLSHPCSFGVLSSPKILALPFNSCAYYDTCLRFLPLFLIPGF

SEQ ID NO: 51140 - protein, 82 aa, Zea mays
  Clone ID: LIB3158-001-E2_FLI.pep
ELPDSLESLAAHVASIEAIEISRRDTIGSQVIRPDYLGFLSARQPSPHTKDLKYCCFQSSSPRNLRFDTTVPQKPHVCHPIV

SEQ ID NO: 51141 - protein, 208 aa, Zea mays
  Clone ID: LIB189-012-A5_FLI.pep
ALVTVPRPAPDADGPERRRRSIRSSTSEHRPAAMEKGKGLARRWAVELPDASSSSPAVPDPPGFTRSAPDADDAAGARQRKDSEAAWKAQKAWEVAQAPFKNLMMMGFMMWMAGSTVHLFSIGITFSALWQPLNALRSVGKVFEPFKDPRVDTIAPKLLFIALNLAAMGLGIWKLNTLGLLPTNPSDWVSSLAPAREVEYAGGGLPLI

SEQ ID NO: 51142 - protein, 352 aa, Zea mays
  Clone ID: LIB148-061-F5_FLI.pep
AVQEAWASACGGTGKQTILIPKGDFLVGQLNFTGPCKGDVTIQVDGNLLATTDLSQYKDHGNWIEILRVDNLVITGKGNLDGQGPAVWSKNSCTKKYDCKILPNSLVMDFVNNGEVSGVTLLNSKFFHMNMYRCKDMLIKDVTVTAPGDSPNTDGIHMGDSSGITITNTVIGVGDDCISIGPGTSKVNITGVTCGPGHGISIGSLGRYKDEKDVTDINVKDCTLKKTMFGVRIKAYEDAASVLTVSKIHYENIKMEDSANPIFIDMKYCPNKLCTANGASKVTVKDVTFKNITGTSSTPEAVSLLCTAKVPCTGVTMDDVNVEYSGTNNKTMAICTNAKGSTKGCLKELACF

SEQ ID NO: 51143 - protein, 284 aa, Zea mays
  Clone ID: LIB143-035-C7_FLI.pep
VNPKISAFQKAQDCLLPMGITSENVAHRYGVTRQEQDQAAAESHRRAAAATASGKFKDEIVPVPTKIVDPKTGEEKEVVISVDDGIRPGTTASGLAKLKPVFKKDGTTTAGNSSQVSDGAGAVLLMKRSVALKKGLPILGVFRSFAAVGVDPAVMGVGPAVAIPAAVKSAGLEIGDIDLFELNEAFASQFVYCCNKLGLDRSKVNVNGGAIALGHPLGATGARCVATLLNEMKRRGRDCRFGVVTMCIGSGMGAAAVFERGDAVDGLSNVRDMQAHNFLSKDAK

SEQ ID NO: 51144 - protein, 398 aa, Zea mays
  Clone ID: LIB3066-047-C9_FLI.pep
VNIHRFKFSPGAVHMHLSMCRRARDELSQIAMPRTVCSVCRVLTYDRRSTSPPLHVGELLEELPGGGGGRVGHGTARGYDSAAAARRRGAVLVVPVAALPRALGRVGVLQLQRVLEVPQHVAHGDAVAAELGEALLGGLGELGERLRVDGAGELGVHDLLDEALALPLHAPLRQADLLPGQLRVDGGPRAQRLQQHHTEGVHVGLVRQLLAPEVLRVQVPEAALHGGAHVQLVHPGPVLGQPEVRHLGHEVVVQQDVGGLHVAVDDPLRRARVQVVQPPGGADADLQPLLPRQRRLPLAAVDVVPEHAVVHVLVHQDHLLVLVAVADQGHQVPVPQLRQHLDLRVELVDALLRLRAPALHRHLGAVVDLPDVHVAEPAHADDGLLVEVLGGRLDLREP

SEQ ID NO: 51145 - protein, 227 aa, Zea mays
  Clone ID: LIB3152-053-F8_FLI.pep
SILSLFLVSILRRPPFSRARRPPPPGARKSWEVFFGDEHPPGHISAMGDYTIQISTKLIDQLARDDEKVKRKARKPKPKKKPTVQPHEEPLEFPREPKTTSLATAPGWPLQPPPMFLPVTPAPPPPPATMPEVEAIRSVLKESEALLKKLENQETGARQELSKRAKELHDKEFKLPYQKPMPCTQERAGCLECYKTNTKDPLKCAEAVKRFEACALMAIKSTAAKAD

SEQ ID NO: 51146 - protein, 232 aa, Zea mays; identical to SEQ ID NO: 45078
  Clone ID: LIB3180-019-G12_FLI.pep

SEQ ID NO: 51147 - protein, 60 aa, Zea mays
  Clone ID: LIB143-022-H3_FLI.pep
NTNFLLSISVHFTKKILIFISDLRTHHFCESSNDSYQYLPYHTVKGHQHNTKPYVTLPSH

SEQ ID NO: 51148 - protein, 334 aa, Zea mays
  Clone ID: LIB143-068-F9_FLI.pep
PVYPEPLRYQIYNIAPPILAALLLGLTGRRFPHQGRRLLRGSGLLGRGLLRGGSGLLGHRRLLPWRVLGRRLRRLGGAAGFLSKWLWLSAGGLGLRLGSWLGLGLGGCLRFHYGFRLRGGLGLCGGLRLGGGLSFGLGSGLGLLSASLGLLRGGLGLGIRLGGGGRQLVRVLHLGQLAAGDELLELNVQKLAEVGRELVLVLVLHELGNRIAAGPRPLLERRDRLRDHLRTDHPLFSKIQTRRRGTHSTARQKDQREGTNYLGVRRVGRAGALLRRGGLLGLGRLRVGSRRRRGVGGRLWGRIHQRRGSLSHVGRHQSRTRTSTWKVGASLGVP

SEQ ID NO: 51149 - protein, 438 aa, Glycine max; identical to SEQ ID NO: 45927
  Clone ID: 700567374_FLI.pep

SEQ ID NO: 51150 - protein, 174 aa, Zea mays
  Clone ID: 700204550_FLI.pep
GREWWGFGMDIITQLQDQLDEMAVLAVNTFGTLQRDAPPDRLSSSYPDPLNPNPKPEDDSKPQVQAQPGAPPPPPAQAQAQAQPPAPDLTEQPKAMSRALVLAAKKFDALVAAVPLSSEEDQVKRIQELQAENEVVGLELQKQLEAAGNTIPTVSRVLTIICLITDVIALQKGS

SEQ ID NO: 51151 - protein, 141 aa, Zea mays
  Clone ID: 700206653_FLI.pep
KDPKASWTESKPKLEKDPQGRARNPDLGQGDAEKLFRDHVKDLYERCVRDFRALLSEVITPEVAARTTAEGKTAINSWSEAKGHLRSDLRYNKLPSKDKESIWRRYADDLTRKLRQSDTKEKDKSDTDGKQPRSSDPPRRR

SEQ ID NO: 51152 - protein, 69 aa, Zea mays
  Clone ID: 700220460_FLI.pep
FGSNSNQSYFNDSCSEHRSRESFISDILLEDYSMKWLPRRYGLKCAFVQLIDGLGKQHYVLIKTVYVHI

SEQ ID NO: 51153 - protein, 215 aa, Zea mays
  Clone ID: 700167620_FLI.pep
QEKVSAWTMRGLITAIRSSRLSTISNTIESFDDVDGMEQKDKEINSEWEAKAAAYAIFKNVAKPSYKHIEEVDLLRFFTKEEVHLVIPMFEGAPETGKIKKSALKNWVVKAYLDRKSLAHSLNDTKTAVMQLHNLISVIVIIIIIIVTLLLMGIATTKILVVISSQLLVAGFIFGNACKTVFEALIFVFIMHPFDVGDRCVIDGTQMIVEEMNIY

SEQ ID NO: 51154 - protein, 203 aa, Zea mays
  Clone ID: 700196383_FLI.pep
TVTKTTITELLLSYSSVIDNKVKHNRRPKCWVNKHRSTTTQQYSPTLSMKLTRSSTSVLDLLLGPQLVAVTTLLLAAVDSPRVQSCIAFAADHLVLVVLASERLQRGLNDSTAEPKHEVERRLLLDVIVRKGAAILQLLPGKDQPLLVRRDPFLVLDLGLDIVDGVAALDLEGDGLPCQRLHEDLHLVGPGRSPGCCDCWCGG

SEQ ID NO: 51155 - protein, 161 aa, Zea mays
  Clone ID: 700197008_FLI.pep
LTFCQAQWINFHVPKQGICEDRTLEFYLVTYDDIGGVTCRRFRDTQSQNSGYSPVFWTTDTTFLEPPFSEQELVNYASRDHIQGVTSNHAGAENRVVSRILRINSSYDVVDTHLSTPLDDGRSVEGRIWLYEDGTFGFGFVGSNSIIDLRHVSSAGCILDT

SEQ ID NO: 51156 - protein, 290 aa, Zea mays
  Clone ID: 700210416_FLI.pep
AAAEQCRASIVRAASEWGFFQVTNHGVPQVLLDELHQAQAGVFRRPFQLKAHQPLLDFSPESYRWGTPTATCLEQLSWSEAYHIPTTTTTTGNDDKTRLVVEEVSTAMSKLAQRLAGILVAELGEDSAAAVVSRCTRSTCFLRLNRYPPCAAAASGVVYGLCPHSDSDFLTILHQDGVGGLQLVKDGQWVAVKPSPGALIVNVGDLLQAWSNDRYRSVEHRVMASATRERFSAAFFLCPSYDTLIRPRCGAGGPPPRYESFTFGEYRNQIREDVRLTGRKLGLQRFRKAE

SEQ ID NO: 51157 - protein, 295 aa, Zea mays
  Clone ID: 700210471_FLI.pep
TRPTTMAAAALLLSPRLVSFPPHPSLAPLFTKRPPPYPLGGAGARLRAVGDGPGAGLPPEQATVYDGAYGPWTLEDSDVREVLLYRSGLVTAAASFVAAASAAFLPEGNPAASAVTGAADLLYAAGAAGLGLSLVLIHIYVTPIKRFLQALWAAGALGSVGTYLVAARPLDEGLVQYVLDHPAALWFVGPTFAALTGLVFKEGLCYGKLEAGILTFLIPGLLLGHLSGLMDNSTKAGLLGLWMLLFTIFAARKFQQPIKDDVGDKSVFMFNALPEEEKKAWIQKLERQKGQELFE

SEQ ID NO: 51158 - protein, 156 aa, Zea mays
  Clone ID: 700212664_FLI.pep
EEAHLLEDLASMDRKFAEHYNVLEQILAVLIQFVKDKKLEHQHQFDDLKKTWLIKRCRTMNAKLSYLEHHLLRDTYNKDTVPALHRIRKYLVEATKEASNSYNEAVSRLREYQGVDPRFDVIARQYHEIVKKLEGMQWTIHQVEMDLKPHHDHAAV

SEQ ID NO: 51159 - protein, 223 aa, Zea mays
  Clone ID: 700212756_FLI.pep
DQPSPNPTSRTRSSAPSPGPSMEVAAASARPVLRVAAICGSLRKASFNRGLLRAAAEVCEDSIPGLRIDELDISDLPIINTDLETGSGSGTVFPPAVEAFRAKVCQADCFLFGAPEYNYSIATPLKNALDWASRGKNCWADKAAAIVSAGGGFGGGRSQYHLRQVGVFLDLHFINKPELCVQAFQQPPKFDSDGNLVDAEIRERLKKVPLSLQAFTLRLQKED

SEQ ID NO: 51160 - protein, 162 aa, Zea mays
  Clone ID: 700219344_FLI.pep
IGLDLLRAVSLAEVFRSSEFSNLVVNHSVSETHIATAMAAHQDSAAAGGRPPRRPRVLLAASGSVAAIKFEVLCRSVAEWADVQAVATASALEFIDVASFPGDVPLYTDDQEWSSWKRVGDKVRSPLTTLPAARSPAGCATTSSPASCAPGTTASPFTSRRP

SEQ ID NO: 51161 - protein, 335 aa, Zea mays
  Clone ID: 700207483_FLI.pep
DVDEWLSSGVVVVSGVHCVGRLRLRSDGGWWHNANGIHFAVVLGDDEAVSAFLPAVEDVHLPRGLVPEAVEVVVHVLQLLQRLLHRERRHLEHLGAHHLGEHRLLVLSAHGRLQVVGLGHGGGQQVGRRDLVPDAVSVSAAAHLRLLLLDLAELALDDGGGEVDAGVGGLGVLLGAQDAMALGEEGDLAARRLGAPAELAAARGEAHVHLPDQVAVLGHRPTHLVLDVLLELLAQLRVPALHDEAHRRERTVPGHPHRHGDAAAPGGVHGHWHRGQHDAPQEARTAEGQGSSSTGTTSMDVASYCGRGGGGHSGCRHGCFLSSLISTEDEDYTMA

SEQ ID NO: 51162 - protein, 250 aa, Zea mays
  Clone ID: 700208013_FLI.pep
LSTTGLRPHATPNETASQPPFFSGSGAFRVLSCPVLMEAAMAATSSLLLASGSRRWPATLPPSPWPQQQRLVIFCLAARTRPLDSKRGSWRRSSSATGGRSTAVSSSSERWVLDPAGDGDWRHIGYKVARPGAIEIVSEDTAVTVGRVADKADIVLPIATVSGAHARLEKKGGSLLVTDLDSTNGTYINERRLNPGFPASVDPGSLLIFGDIHLAMFRVRKTVVVEAPSTSRSTEEAEGAQQETTAAEDI

SEQ ID NO: 51163 - protein, 300 aa, Zea mays
  Clone ID: 700209437_FLI.pep
PAPLLPPHAPTSCAAPGHCQVGHTMQPPQSLVSRARTAIHSAAARVLTDIKADLRDAEGSGGRSRAPSPRTSLDREAAEASATGREPDVKPPSPRDEVLEISPPENEDSSSIPTESTCSTKLTFPPASIVKQLVSAIENGKSFKSMSDMRYTGEQLLKDKGGLSLSVVKSLVRRDKEERSSSDFFGDEETQSLMYSLFKLEEQFSFEASQCFPELVHSRSVSKDLHGAPPGSFIHHLAVVIGSISSVHKMAFFWQSVVLELRKLWSDWQPVPRMPLEVAPDLNSCLLHQEIQVVNCCIAR

SEQ ID NO: 51164 - protein, 95 aa, Zea mays
  Clone ID: 700211587_FLI.pep
LFARIMKALLPRPVEAANKDRLTGTHVKDQRSYLFAVRSDGFFYPSDHNAETVPVFQRLDRGSMSFLVPLQEVVRLHDRPSSSVRHLCNSRGWVQ

SEQ ID NO: 51165 - protein, 401 aa, Zea mays
  Clone ID: 700211776_FLI.pep
GARGGRAEGGADLGRAAGGRRRAHGHGAAQVPPRARVQGEGGDGDAQVGGAVAQAVRHRRAPPGRRPRPAGAGGRGVLPRRRPRGPPGLLQRVRRVPGQGAVREGLRRRGEAGALPQVAHPAPGARHPGAARLLAQRHLLHGAGHRPQELAAHARQAPRRHAPGSRPATGQLPGVRGQEGVHQRAVVVPGGKQGDEPIPDSAHQEQDRLLQPRQVGGDPLQVHRPGASPRPVRRPVQGGRHRVLHLRRRHRAHRETVLQGDRRDPSHRELHRGVGAPRAGVGGELRRRVHPRRGGRLHRHRAEDAEGPRPRGAHHEGQLQGHRARQAGAGREQPGVEEEEAAVPVQGEERRRLMRGSLVWVPAGTACQLLAHQPDIYNSIDRQPGPYRHHLNEHAALHCIT

SEQ ID NO: 51166 - protein, 174 aa, Zea mays
  Clone ID: 700217393_FLI.pep
GLRLREPAAPAPVHRPASSLTFPHPFSTVRSLVVLGSQPEGRRPMMGGRTVAPPLVLALVTIIAIAAAEGDEVKCGGCSPCGGADCPVLYPSPPPPPYYYYSPPPPATYPGESSSYYQPPPPGAYIQIGSAPPGKGPLYPQDPGFIPAGAPGRAAPLAVVAALAPALACAWALL

SEQ ID NO: 51167 - protein, 264 aa, Zea mays
  Clone ID: 700167053_FLI.pep
NISISNFTQLRTRLNPSSRAAAPARRQPTGAGAAMKKIFGAKKDKGPPPSIQDATERINKRGETVDEKIKKLDEELARYKEQIRKTRPGPSQEAIKARAIRLLKHKRMYEEQRNMLYNQTYNLDQVGFAADGLKDAQQTMNAMKAANKELKGMMKTVKIDEIDNMQDEMTDLMDVSNEIQETLGRSYNIPDDVDEEELMGELDALESDMEFDSAAVPSYLQPDSDFDADLNLPAAPSRPAMVPAGGLQEDELGLPAVPRASLRS

SEQ ID NO: 51168 - protein, 299 aa, Zea mays
  Clone ID: 700167395_FLI.pep
GITKLVVLPLYPQFSISTSGSSLRLLESIFREDEYLVNMQHTVIPSWYQREGYIKAMATLIENELTKFQEPQKVMIFFSAHGVPLAYVEEAGDPYKAEMEECIDLIMEELEKRGITNPCILAYQSRVGPVEWLKPYTDETIIELGQKGVKSLLAVPISFVSEHIETLEEIDVEYKELALESGIKHWGRVPALGCEPTFISDLADAVIESLPYVGAMAVSNLEARQSLVPLGSVEELLAAYDSKRDELPPPVIVWEWGWTKSAETWNGRAAMLAVLALLVLEVTTGEGFLHQWGILPLFR

SEQ ID NO: 51169 - protein, 423 aa, Zea mays
  Clone ID: 700169575_FLI.pep
HGPPTVRGTCPRDHNLTPPATSCAALDSLTSRHHSRQYTAAGTGRVGVRRCCCRVRGDTTTHSQDSRAAGATELCVRGENRRRQQRREGARGRARRSSMGAGIRVLAALLAALAAATAGVTAQLRQDYYAAVCPDLESIVRAAVSKKVQAQPVAVGATIRLFFHDCFVEGCDASVILVSTGNNTAEKDHPSNLSLAGDGFDTVIQAKAAVDAVPACANQVSCADILALATRDVIELAGGPSYAVELGRLDGLVSMSTNVDGKLPPPSFNLDQLTSIFALNNLSQADMIALSAAHTVGFAHCSTFSDRIQPQSVDPTMNATYAEDLQAACPAGVDPNIALQLDPVTPQAFDNQYFANLVDGRGLFASDQVLFSDARSQPTVVAWAQNATAFEQAFVDAITRLGRVGVKTDPSLGDVRRDCAFLN

SEQ ID NO: 51170 - protein, 246 aa, Zea mays
  Clone ID: 700172012_FLI.pep
EVSPRSRLLVCVDLYFENVTTQQLTDITIESEEASSSVDFIDQTSEGYSGVPTIVPVEGIHSLAPQQMAKLVLQVHFHHHILPLKLSVFCNGKRHPAKLHPDIAYFVRPLPMDLNTFLCKENQLRGMFEYARRCAFKDHLQKLGHEDSAEHIDKNLQVAQSVASKILSNANIHLVSMDMPVTFSVDDASGLCWRFSGEILSTSKPCLITILAEGRASGPLDLAVKVNSEDTVFALNLLNRVVAIID

SEQ ID NO: 51171 - protein, 151 aa, Zea mays; identical to SEQ ID NO: 41374
  Clone ID: 700172093_FLI.pep

SEQ ID NO: 51172 - protein, 314 aa, Zea mays
  Clone ID: 700213496_FLI.pep
CTQASSEHPLAKAILDYALHFHFFGKLPSSKDGIEQRKDKVLSQWLLEAEDFSAVPGKGVQCSINGKHVLVGNRSLMTENGVTIPPEAETFLIDLESNAKTGILVAYDGDFVGLMGITDPLKREAAVVVEGLKKLGVHPVMLTGDNWRTAQAVAKEVGIEDVRAEVMPAGKADVVRSLQKDGGTVAMVGDGINDSPALAAADVGMAIGGGTDIAIEAADYVLVRNNLEDVITAIDLSRKTFSRIRWNYFFAMAYNVVAIPIAAGALFPFTGLQMPPWLAGACMAFSSVSVVCSSLLLRRYRKPRLTTVLQITVE

SEQ ID NO: 51173 - protein, 186 aa, Zea mays
  Clone ID: 700201609_FLI.pep
LARTLVIKCPLFSKCSLTIDTVTRPDNGCSENAHGLSGEQLAAREVEIIDIASVSRDYWSKAIGAPSVDLTAFKSQRTERGPLLKGWMDSCHPVMTTYKLVTMDAPIWGLGERLEDCIIAGERALFLACHRLCFAWIDEWYGMTVEQIREMERQTDMLLKKTLKKAGSKHEGNRKTLKDELVAVGS

SEQ ID NO: 51174 - protein, 140 aa, Zea mays
  Clone ID: 700238385_FLI.pep
SLSQMGGVLMSCCLCVAYFYPAVVDMYLNLKKLQVFQVGWSPKNETILASCCLGRRLMVWDLSRIGQEQTPEDAEDGPPELMFIHGGHTSKISDFSWNPCEDWVVASVAEDDILQIWQMAENIYHDEDDLPISDEPAKTS

SEQ ID NO: 51175 - protein, 183 aa, Zea mays
  Clone ID: 700241481_FLI.pep
ATSRCWRASRRWRRATRRAAARRACSRRCRTSGSASGRSSSRWPGATPCWWSGSAGCGASSARPASPRWRRTRATPRSTTSRRCWTWRTPAAWRGTRSRASTGRVASRATRTRTPRRRSRQGSSQTSAPPTTPTTPTCSRASSRPTASARSSPSPTPSSSRTDGGRLHPGTTYYSAAEGWAWG

SEQ ID NO: 51176 - protein, 215 aa, Zea mays
  Clone ID: 700241870_FLI.pep
EGGAPGLPDGVRARQRRHVARRQALPAEQGDERAEAGRRGREVAVGERGAGRRRVPPPERHAPGRPAEKVGSVARGKREDVGARHDAGARGLDVPLDGVDDLKAAHRVQVRPGGLLPSGVEKDRSVAALNEAVVEEEPEQRGAHPLLTCDGLGHRRPNDALQVGAGGRIERGRELCVGDTGEEGNGDQALHQGGRRHGKLLPVPARSVNEATCLS

SEQ ID NO: 51177 - protein, 293 aa, Zea mays
  Clone ID: 700243160_FLI.pep
MNLMATTSDCMKMQSKSVKQLCRLFPMRRVIKEGEKKDGYNGPYDSICGVRLPRGLDPHSISSEELSASLGHMLHFINIAVRILSAPALHVSGCKGSCSNIWQRSSYWSTRQSQSKVYPLFIPRKNVCTGGEETSLTESGSSNFGVDSVDSVKKPSFDPKRSNSFNFSGASSHSMERHQYLQRGISLLKTSVTAITTYYYNSLGLDVPSNLSTFEAFAKLLHMLSSSKALRTAFELDNCFKVREASAAAEQIDLEGKFCHIIGQQFYGQHAHNHYAQHSGQPPHELRREPVHW

SEQ ID NO: 51178 - protein, 176 aa, Zea mays
  Clone ID: 700243186_FLI.pep
KREDLEQEVMIDGWFHTGDIGEWQPDGSLKVIDRKKNIFKLSQGEYVAVENLENVYGVLQDIDSIWVYGNSFESSLVAVANPNQQALERWAEQNGVTGSFAELCEHPRAREHILAELTKIAKDKKLKGFEAIKAVHLDPLPFDIERDLITPTYKKKRPQMLKHYQGVIDALYKGMK

SEQ ID NO: 51179 - protein, 196 aa, Zea mays
  Clone ID: 700221779_FLI.pep
IPLPSHAPPLIMGLLSIIRKIKRKEKEMRILMVGLDNSGKTTIVLKINGEDTSVISPTLGFNIKTIKYHKYSLNIWDVGGQKTIRSYWRNYFEQTDGLVWVVDSSDIRRLDDCRAELHNLLKEERLVGASLLVFANKQDIQGALKPDEIAKVLNLEVMDRSRHWKIVGCSAYTGEGLLEGFDWLVQDVASRIYVLD

SEQ ID NO: 51180 - protein, 134 aa, Zea mays
  Clone ID: 700261160_FLI.pep
LSVLLTGHRLPHGSQYVQSLEHEALLCSLVDDGPRHACVAGGAVPADLPLRAREHLDLPHLHHGEGELVEEVSLAARELLDEGPGAGVAEEVLVGGEEPLTVHQVDVVLVVERVGRAHVQRRPAVGALGRAGPA

SEQ ID NO: 51181 - protein, 255 aa, Zea mays
  Clone ID: 700235634_FLI.pep
LGALALGCVSEAVDASEGSVSMALMAAGMDDHDEYAKLVRRMNPPRVVIDNEASDDATVIKVDSVNSHGTLLAVVQVIADLNLVIRKAYFSSDGNWFMDAFNVTDRDGNKVLDASTISYIQKTLEVDDWYYPGAHNTVGIVPSGDYTSIELTGTDRPGLLSEVCAVLAAMGYAVQSAELWTHNTRVAAVVHVTDAETGGAIEDSARIADISARLGNLLREHSDVRAGGGAGSLALHKERRLHQMMFDDRGVEGHV

SEQ ID NO: 51182 - protein, 332 aa, Zea mays
  Clone ID: 700235934_FLI.pep
EAAKAVEEERIRKEEESKKAAEAALHQKKLKEKEKKLLRKEKTRLRTLAAPVIADSHFGLSEANVESACASLDMEQLKKLCDGMDSKDAAGKARLLSNVLRNESSSKEAKKIEGNGVEPSAPKSNSTGGRATEASNSILNSYEKKERPWGKEEIEMLRKAIQKYPKGTSRRWEVVSEFIGTSRSVEEILKATKTVLLQKPDSSKAFDSFLEKRKPTQSIASPLSTRDEISSTEGAGTASSKAAAQSANSQTANEKAAADPVTDGGPSVSDPDAWTDAQVLALVQALKAFPKDASQRWERVAAAVPCKTVVQCKKKSSGNEREFPEQEKWGVG

SEQ ID NO: 51183 - protein, 318 aa, Zea mays
  Clone ID: 700244418_FLI.pep
ARSQQPAATSLSLLQLSSARELFDRSSSTMAAASSSQQPPRLLVLVAVSCLLLQSAITSSSAESSMQCHEEDQEALLAVNSALGSPYHFASWTPDTFCCDWYDVDCDNVTGRVVGLTVFGDGNLTGAIPDAIANLTNLRTLVLRHLPGISGGIPVSLAQLANLTQLTISSTGVSGPVPSFLSQLTELTLLDLSFNSLDGPIPETLADLPALSSIDLSRNRLSGPVPPLLLSKYVDDQAAYLVLSHNNLSGSIPAGFASVSFAYLDLSRNAFAGDASGVFGKGKPLQHLDLSRNGFAFSLTAVDLPEQLAYLDLSHNAI

SEQ ID NO: 51184 - protein, 182 aa, Zea mays
  Clone ID: 700244462_FLI.pep
ARQGSHRPSPQHTNTAQSNSHTGSSPPLRNALSPTSPASAPWLSSRWRSSSCWPWRRPRRPAAGATWISTWASSPLGNAGGSAAARWPSASPRSRMRRALTWLDPTAARSTAAGTSATARCGGTTCPAPAAAPATTTAARAARPTPTTAAAPASPAAAAEAAPDPPDCRGKVWSRSRPFRRQ

SEQ ID NO: 51185 - protein, 126 aa, Zea mays
  Clone ID: 700223074_FLI.pep
AGPAGDIGTAALASVAARIKGAVERMDDELVRSAIDYYEMAETNKRRTGTGILPRTDLNITSWLGRPQHDADFGWGKPQSMSRAESVRGGSMHLMNDDGGTGDVRVLVCLEAENIKELGRLLYAKL

SEQ ID NO: 51186 - protein, 144 aa, Zea mays
  Clone ID: 700223126_FLI.pep
RSLMIGSFLDGGTDENGDSERFIRRRQKADGELLPREENGGDFLASVGKGLALRPKSSNRPDMNKSQQNLFAMAEPLFGNGLQTVRKSSSTPEFQEPETNTSSSIWSASKWSINTDAFALPLPIPRFDNIPKPIAAWRNKPARD

SEQ ID NO: 51187 - protein, 113 aa, Zea mays
  Clone ID: 700237077_FLI.pep
SPAMATATRRLLPALLKTLAPAGARGLSTEKAVGAAAVVGSHTAKWMQDTSKKSPMELINEVPPIKVDGRIAVCEGASEGVGLGHPIEYICLDLEAPNVCKYCGLRYVQVHHH

SEQ ID NO: 51188 - protein, 484 aa, Zea mays
  Clone ID: 700262123_FLI.pep
YTKRSCYFHSSDRRLIPIYKHGAKLENSLYSRQIKHSTTGYTCRQTTEQKIKQQKYEAYRDGMGCDAMQCNAMQGPLVIWIWRPRFTPGSHDDLGLEDAGFDLLVREHDAAVAVDLVADVDVLAEDGHVLDARPLADGGVPADDAAGDAGVLLDARGAHDGAAGQAHPGLHHAAWPDRDVGPDEAAVPDDRGLVHQHVAQDVRARREPGGRLLPQRVQVQAQARDVVPRLPDVHPETRENHGEEGPVRRDAREHLLLDGRRLQLDAAEHGRVEQVDAGVDLVAHERLGLLHEPLHLAGALLHDHHAVLGRLVDLGHHDRGLAAVGPVELNELGERVLADHVAVEHEERVAGSVGELVAGQRQRACGPEGLRLLRAGDLDAKLALEVLEKVEHDLRLVIDGQDNLCNTNFLQSLDLVQDHGLVAEIHERLGHAERERAQAGAEASDENEGLHGCSSPPPNSAPTPCEKCSRQQEENSEILRPRWP

SEQ ID NO: 51189 - protein, 292 aa, Zea mays
  Clone ID: 700262142_FLI.pep
EKHASNSYAKMVIYIEACESGSIFEGLMPEDLNIYVTTASNAEESSWGTYCPGMEPPPPSEYITCLGDLYSVSWMEDSETNNLKEETIKEQYEVVKKRTSDFNSYGAGSHVMEYGDKTFKGEKLYLYQGFDPANANVTNKLLWSGQEAVVNQRDADILFLWKRYELLHEKSEEKQEVLREITGTVRHRKHLDNSINFIGKLLFGAEKGPSTLEAVRPPGQPLVDDWDCLKQMVRIFESHCGSLTQYGMRHMRAFANICNSGTPGASMKRASMGACGGYNSARWSPLAQGYSA

SEQ ID NO: 51190 - protein, 304 aa, Zea mays
  Clone ID: 700207823_FLI.pep
TPPARAAAGGEPSPIRASRGGSERAKVSGGGMGTLGRAIFTVGKWIRGTGQAMDRLGSTIQGGLRVEEQVSRHRTIMNIFEKEPRIHRDVFVAPSAAVIGDVEIGHGSSIWYGSILRGDVNSIHIGSGTNIQDNSLVHVSKANISGKVLPTIIGSNVTVGHSAVLHACTIEDEAFVGMGATLLDGVVVEKHSMVGAGSLVKQNTRIPSGEVWVGNPAKFLRKLTEEEIAFIAQSATNYINLAQVHAAENAKSFDEIELEKMLRKKYAHKDEEYDSMLGVVREIPPQLILPDNILPHNAQKAVAR

SEQ ID NO: 51191 - protein, 344 aa, Zea mays
  Clone ID: 700211931_FLI.pep
AKSPSTAVDMSEVLAAYTNDVVSRSVLGSTHRKKGRNTLFREMTMTNVDLLVGFNLEYYIPRWPLTDLLFRLVCWKVTRHLKRWDALLEEVIHEHVEMRKLSGDKEKESDDFIDIFLSRYEEYGFTMDNVKSLLMNVFEAAIETSYLVLESAMAELMNHRRVMKKLQAEVRAYGAEKKLDMIREDDLSSLPYLKASMKEALRLHPPGPLLLPHYSTADCQIDGYHIPANTRVLVNGWAIGRDPAVWEKPEEFMPERFMRDGWDKSNSYSGQDFRYLPFGSGRRICPGANFALATMEIMLANLMYHFDWEVPNEKEDGGGKVSMDETFGLMLRRNEPLYLVPRAV

SEQ ID NO: 51192 - protein, 152 aa, Glycine max
  Clone ID: 700897362_FLI.pep
VCTSNSLGVMWRERALLVILLLLLVQQICATKKQDHGCPLSSCGKITNITYPFRLKGHPKSCGDNRYELACENNVTVLHLYSGKYHVQAINYNNFTIRVVDPGVDQQTNCSSLPRYFLSRSNFTDTYSDIYNMDPYQAGQYSGHRNLFICYR

SEQ ID NO: 51193 - protein, 38 aa, Zea mays
  Clone ID: 700338918_FLI.pep
EAYFVRELKHDCSAAVNSWCSAVRSVRSFEWSSEYLIT

SEQ ID NO: 51194 - protein, 309 aa, Zea mays
  Clone ID: 700353143_FLI.pep
FNHSNSSAFSRYGNKRIEPSGEIQFFPSPCVIGQGHVNGKNPVFQPDGVLLPPNEHNTGESTRQARISLDSRTEGAAILCSTSAREDAGANSSSHRKDSMSHPSYGFIPVPIPVGATMPYHYGAILQPVYYPQSPLMHCDSAGINKAAIQHASGQPNYHEAPGKPSHVLIEHKQSEENHQLHHSRQILRESGEPIDMARAHVDRANQTASCSQGICKGSGCTCSGEADINANTMVALESGNESGIQNGDRSRREAALMKFRMKRKDRCFEKKVRYHSRKKLAEQRPRVKGQFVSQKLNSATTTDAEADS

SEQ ID NO: 51195 - protein, 379 aa, Zea mays
  Clone ID: 700427152_FLI.pep
EDPENPYGFLRFPQGYNPELDSLASKVRGDVRRACCVVSGGVYENVLFFPVVQMLKDRYPGVLVDVVASARGKQVYEMCKNVRYANVYDPDDDWPEPAEYTHMLGVLKNRYYDLIISTRLAGIGHALFLFMSSARDKVGYVYPNVNSVGAGLFLNEMFKAPTNNLADGGYHMYKDMLEWIGRPAKNVPQQPTQPLRVSISKKLRAYVEDKYSRAGVEKGKYVVIHGIASDSVANMKSRGDDDCLLPLGHWAQIAKEISSGDRGLKPLFVIPHEKHRDEIEEEVGDDTSILFITTPGQLTCLINDSAGVVATNTAAVQLANARDKPCVALFSSAEKARLFLPYVEGKSSCTVISSATGNLIDIDLNAVKNVVKDLEPAPS

SEQ ID NO: 51196 - protein, 295 aa, Zea mays
  Clone ID: 700333391_FLI.pep
GKNPHHTSFPLSQLLLHFPHRPPVISPPRREAPRPAPAAFLQKVSPVRPNHLLISFLAAAFHRGRDMPASAAPPAQPAAPPPPPPPASPAPPEDVEATAGSPSRASAVGTVNWGTATLVGVFAGLLYGGSREASASVSKDAEVMLKMGSTTDKREQYRLMRDAMEKRFIRVAKGSLVGGVRLGMFTATFFGIQNLLIDTRGVHDVFNIAAAGSATAAAFGLILPGSMMWRARNVLVGSALGAGICYPLGWVQLKLAEKANLEIANSKPSSDLTEGKENQSRVGAAIERLEGSLKK

SEQ ID NO: 51197 - protein, 243 aa, Zea mays
  Clone ID: 700356633_FLI.pep
QWSHSPRNASLSQSKGYYSERHRDGRLHNNMPKFSKGSPQAHANFGAKGRPAQSKSPRHTSYLDELPRTHGENNQFAASRVPNDWGIERHGADASSSLRFDMPSHQQTLEELEMEFKKEATQLARARDQEEDEENYRHRESLRVIRENYMERVITMRTVHARKWEEFLDTFKSQQQAQPSYIQTGYLGFEQRTAHISATHQPMDSKSTYPYASDSYSAPKAHAAYGEFQHERHDDLGRAYRRY

SEQ ID NO: 51198 - protein, 114 aa, Zea mays
  Clone ID: 700211560_FLI.pep
HTLVSGGVRGTLPWMAPELLSGKNNMVSEKIDVYSFGIVMWELLTGEEPYSDMRAAEIIGAIVNDSLRPQIPSWCDPEWKGLMESCWSSDPAERPSFTDISQRLRKMAAAMNVK

SEQ ID NO: 51199 - protein, 170 aa, Zea mays; identical to SEQ ID NO: 42753
  Clone ID: 700449968_FLI.pep

SEQ ID NO: 51200 - protein, 310 aa, Zea mays
  Clone ID: 700466170_FLI.pep
DSLTATLAEHRQHLVSIQGLINQLKEAIPAMQQSIDELSEEVNSVSINSMDQLNSRLPLPVQIAGFGTSEESSSEVSEINSKLSSTHLDKPGGSPALKLPPLFSLTPSSSGKGIQTQKRSALARQRSQDITSEQKTLTIPSTKDQMNGSMHENDDYSAHDIRRSVREAALSKPLKNTERPQDKNSDDGSEHFFIPLSISAAKKEMDSVANRCNQRLGLSPQMKFPKSTSYNADTPINKSPILLSELNGHDSISAMSFLDPAGGLAHQSFITDDALDQVFSPLLMESSLFHDADEDLLAPLSETDAALMEY

SEQ ID NO: 51201 - protein, 310 aa, Zea mays
  Clone ID: 700451428_FLI.pep
MTSVPEPLRYQIYSIAPPFLAALLLGLTGRRFPHRGRRLLRGSGLLGRGLLRGSSGLLGHRRLLPWRVLGRRLRRLGGAAGFLSKWLRLSAGGLGLRLGSWLGLGLGGCLRLHYGFRLRGGLGLCGGLRLGGGLSFGLGSGLGLLSAGLGLLRGGLGLGIRLGGGGRQLVRVLHLGQLAAGDELLELNVQKLAEVGRELVLVLVLHELGNRIAAGPRPLLERRDRLRDHLGVRRVGRAGALLRRGGLLGLGRLRVGSRRRRGVGGRLWGRIHQRRGSLSHVGRHQSRTRTSTWKEGASSGVPMGERRREL

SEQ ID NO: 51202 - protein, 112 aa, Zea mays
  Clone ID: 700432977_FLI.pep
LHFSRTSLHSGDARASKVSSRDAAAKEGDGKRPCSDELANQKTTKRNEPAKKRGVGRPPKSGQRIAGAQENSPIKGRKSSAGAQVDSPSKGRKRSVEAHDDSSSKGGKRSRR

SEQ ID NO: 51203 - protein, 322 aa, Zea mays
  Clone ID: 700223067_FLI.pep
PKVRRFPFSSPMESLASQARPAAVLWLAGFFQAARLHRVVSFCASSRALSIRIAQCFLLNGLIFLGSLLTLTSVVIPTLLWILPERCNQTAGHLCEHRAAISIYSFLRSGLVEIFYVFWFYPLYVFSFILSTIWYNDIAKHALDVVKSKSLVLTQSLDAHNVTETKEQPEGFDRVALGIGEQVYSILLLTIFFVEVSVIGYIPYFGKAMNFLLLSLMYKWNFFAVSLHERLDFFESNWAFFAGFGAPCVLPIFFFSPLISYGFLAILYPLFVLTAAGTQAEQVIDALKPAHRGKLQRIPVFFVAKRLTTKVLQLFPVAQKEQ

SEQ ID NO: 51204 - protein, 154 aa, Zea mays
  Clone ID: LIB3152-056-G2_FLI.pep
RSPQQSYLPWLLHSQFRCPSTLSLCHCRISVRRHLCHLALLRVQRYSPPAYYYTAYHRHNIMGILSTTRMMTSQHSFLHWFIITLHSKMVRHLGSKGWSRSSPEGHQTVVCCMKHIIYIYPPIKVRKYHMDILGIKSERMYNRTSTWPSYIVVY

SEQ ID NO: 51205 - protein, 147 aa, Zea mays
  Clone ID: LIB3159-019-E3_FLI.pep
LSIHASIEMYIYPGSRSHRDHRTRASSLLPMAMTRALAMVAMLATAALFFMSARAQQCGTQAGGALCPDCLCCSQWGYCGSTPDYCTDGCQSQCFGSGCGGGGGTPATPPSGPVSEIISESLFNEMLLHRNDVACPAIGFYTYDAFI

SEQ ID NO: 51206 - protein, 351 aa, Zea mays
  Clone ID: 700208534_FLI.pep
ANTESNPELLPDAVTYTTLLKGLGNSRDLYSVVKIVVEMKSSLISIDRTAYTAMVDALLACGSIDGALCIFGDIIKHAGKNNDLRPKPHLYLSIMRAFATRGDVDMVMRFNKRMWLDSVGSISRAAKEETHELLMEAAINNNQIDLARGLLRRIVNEKECFSWTSRVGLVAVKVESLSGFTNSLLRPHVFPQIILNDPVEKYMVPFQESRPLPADLILRKVVMRLLKERAVPLVDDWGGCIGIVHRDDCTKLDAPLISMSRGPPLCVPTSTTVEHVIDLLLRNKSEMVIVVKSGNMYEGSYTSSSRPLGVFSLAILWSFTGDYSSGSDDVPDAGISRAAKPKPDAEACNHS

SEQ ID NO: 51207 - protein, 102 aa, Zea mays
  Clone ID: 700553088_FLI.pep
REARVKRRRIGEIMDSSAIDSPGKNKDTILPGNNTPPSSHQISVEDTWQELERSNLHATQKGLHVQLKPEISKLYKLLQLPVLLHIFNSIAPSMTSCSLFIF

SEQ ID NO: 51208 - protein, 96 aa, Zea mays
  Clone ID: 700475478_FLI.pep
GGSKGGREDPLHELDAHERRWGSQLPNAGDPEESTADRSSGLALSPVCVICRTRISRGRCSALPRWNMCSNPRISGWGGWDEGEANGRWIKEMSMG

SEQ ID NO: 51209 - protein, 224 aa, Zea mays
  Clone ID: 700473796_FLI.pep
ETLATMLGMGLGMLLAQITRGHALSVWASFLSLTMFHMYANYKAVQSLSLTTLNYERASILLQYFKGCGEVLVPRKVSQQEHILPSWSNWRKLNRIKLPHERVHLGAKASMLTHSDMLVIAKTRYHYENANYFLLDKQGIVYVFIHKEATPADVLRSFVHGLVLASSTQNSKPQHLEARRWMDEMYTSFISKLQTEGYSTERLLSHSILWRAHWLHGQLDEKLK

SEQ ID NO: 51210 - protein, 76 aa, Zea mays
  Clone ID: 700571974_FLI.pep
RLRARPQQGARRRRPRRDLPAPRRQTATLGSPHPHSNHNRRPAALIIHRLFFWLFLAPVIFLLLFLLGNCRRRFDT

SEQ ID NO: 51211 - protein, 129 aa, Zea mays
  Clone ID: 700615179_FLI.pep
RHRSPMRPSPRRGRGSPSPRRRSPGPLRRRSPPPRRLRSPPRRPPPPRRYSRSPPRRPLRSRSISPRRGRGPLLRRGRSGSSYSRSPTPPPRKGPRRVSRSRSPRRPPRGRSISSDSRSSSSPSPRRGR

SEQ ID NO: 51212 - protein, 145 aa, Zea mays
  Clone ID: 700620849_FLI.pep
KEGLRLHPPLPLLLPRECRSSCQVQGFDVPAGTIVFVNAWAIARDPSHWDRPEEFVPERFESSSVDFKGTDFDYLPFGAGRRMCPGMAFGLVSMELALASLLYHFDWELPPGMTAADVDMTEKMGVTARRLHHLLLVPSARVPVT

SEQ ID NO: 51213 - protein, 117 aa, Zea mays
  Clone ID: 700548979_FLI.pep
KGLLVMRLVPVRLHLRHQREAQILLCLPLGVRLQEQCSGDAISKHDVPHVENCNTPTVAVCTTLKRVAEKVVSELVGSERMGSNNSAELLESMEKAENVCFGGNGVSQGGLPEELEV

SEQ ID NO: 51214 - protein, 191 aa, Zea mays
  Clone ID: 700579624_FLI.pep
LQNKLPKRRQPVRGGSMSRKGPLFWCRGGFIPCFGAGGGSPLCTSMYLEILQRPICSMNTALPLFWCGGGFIQQLGLSKRLLPLHSWHVSCSALLQSIRSRLAGLVPWARELLLNDLELCCCQGGSAHIPSSAWGILCKCCDGISGRKPCVATGSAFQLIAVSMTCMDNIRYANFLFAASLTSCISHLQFP

SEQ ID NO: 51215 - protein, 121 aa, Zea mays
  Clone ID: 700802144_FLI.pep
SAVQLCSTISRTLRLYSRLFSLNSLAASEFAGEFGFGSHSRDTVPRRIIRPEYDGVPEHDVVVVRRAADPGGRVLLQAPEVPHQPLPRRRRHLVHRSPAPQTLATVSISGGTLAASRSLAP

SEQ ID NO: 51216 - protein, 220 aa, Zea mays
  Clone ID: 700578946_FLI.pep
FNLFKYVESMSLISLNLQHHVLEICLCGVENADTIQTKVSKRKKEDQNVMAMHSSRTSAKRSELMYLSPPLGNTVTIILPLFSCLEATFKQAARFAPEEMPTSRPSSLASLLAFAMASSVLTVTVSSMTEVSRTSGRNPGPTPWILCLPGAPPEITGLSAGSTQMILTPGFCIFRYFPTPETVPPVPEPATNTSTLPAVSFQISGPVNLKWASEFALFVT

SEQ ID NO: 51217 - protein, 363 aa, Zea mays
  Clone ID: 700620740_FLI.pep
KIHFVPGDIVKVGETLLKMVVGDSQIVSPDNIVPSAGKSLGVESAVFSSEGNVPGGNLSTPAVRHLAKQYGISINEIVGTGKDGRVLKEDVLNYAVSKGVCKQQSLASEGNIGQVELLEEGKALLDEDFYEDKKILLRGYQRSMVKSMSLAAKVPHFHYLEEINCDSLVQLKTTFQNENKDQTIKHTFLPFLIKSLSMALSKYPMLNSSFIEETNEVVFKGPHNIGVAMATTHGLVVPNIKKVQSLSILEITKELARLHEMASQNRLSAADIEGGTITLSNIGAIGGKFGSPLLNLPEVAIIALGRIQKLPRFDDDENVYPSSIINVTVGADHRVVDGATVARFCNEWKSLVEKPELLLLHMR

SEQ ID NO: 51218 - protein, 84 aa, Glycine max
  Clone ID: 700658408_FLI.pep
SSSPLDRECQGTKAQKPSCGRKVSFILLHLDTKSPHAYPQGKSGPRLACGSLRRQAVSAPAQGCHSKSGPPRPVPLKKRGYDVT

SEQ ID NO: 51219 - protein, 281 aa, Zea mays
  Clone ID: 700617074_FLI.pep
VMGERGCLVSPQQCEDKFNDLNKRYKRLTDILGRGTTCRVVANPELLDGMANLSDKMKDAARKILSSKHLFYEEMCSYHNNNWFSLPEDPALQRSLQLALKCKDEHDARKRASGDADEDDQSADTDYEEENDDEHPITHANKGTLLTRKRLRYMPADMEDVGFGNSSSSHDCSWRSDPHSIAVDINKASPDGTNLASVQKDLATQSAEIEKQRMEIEVEALELAKQRLKWEAFSKKKDRELEKMRLENEQMKIENKRLELEVRYKELELEHKPQGHGSHAT

SEQ ID NO: 51220 - protein, 156 aa, Glycine max; identical to SEQ ID NO: 49116
  Clone ID: 700897588_FLI.pep

SEQ ID NO: 51221 - protein, 188 aa, Zea mays
  Clone ID: 700219193_FLI.pep
YGWFWVCPNGGKECHYRHALPPGYVLKSQMKALLEEESEKIAIEDEIEDQRKKTKTTTPMTTELFMEWKRRKAEEREAGQAALKAERAKNDRMSGRELFMADASVFVDDAEAYEVYEREESEANEESTNKSQNPGPSSSTSNGKEVEEPDDDDIDVDDDLDIDELNELEASLSRTSIQIREPGEGTSS

SEQ ID NO: 51222 - protein, 68 aa, Glycine max
  Clone ID: 700661887_FLI.pep
TGQKNRSQLMDEKIMGNQFEEPDQPMQSIDTIMQIISEATVPAVGTYSFDQFMEEQIYDLESDSASDS

SEQ ID NO: 51223 - protein, 533 aa, Glycine max
  Clone ID: LIB3051-032-B6_FLI.pep
LLVIFLGLLRREGIGMAVANSNSSNEPCASYNCYKVAGLTETILDISHISNLKDRYILGEQLGWGQFGVIRTCSDKLTGEVLACKSIAKDRLVTSDDLKSVKLEIEIMARLSGHPNVVDLKAVYEEEGFVHLVMELCAGGELFHRLEKHGWFSESDARVLFRHLMQVVLYCHENGVVHRDLKPENILLATRSSSSPIKLADFGLATYIKPGQSLHGLVGSPFYIAPEVLAGAYNQAADVWSAGVILYILLSGMPPFWGKTKSRIFEAVKAASLKFPSEPWDRISESAKDLIRGTLSTDPSRRLTAREVLDHYWMECNQTNPEQLSECKIRNCEEWNAGGSSFSASLMSRSQDISFGASSPTCDAQSPTFTCRSSFSSFLVEPVTPCLVSGGFSFKSAGDSPDLEFCSPVPSMLSFSFLSPSSVVEQKSCKLECSANMADVNAIAGETNLGKLLMLQDSPLCVGREVKETDRKPVEAKRASGMNGHKVLGIHSKRNRTIGLGECEQLDLMVTESVIRWSSCTQLPTSLRSSLVC

SEQ ID NO: 51224 - protein, 330 aa, Glycine max
  Clone ID: LIB3051-032-G11_FLI.pep
FLLLYPHEATIENIYHHWERVCLVDIGEQAVIPEGISKHVHRSRYFIAGGIAGAASRTATAPLDRLKVVLQVQTGRASIMPAVMKIWKQDGLLGFFRGNGLNVVKVAPESAIKFYAYEMLKNVIGDAQDGKSDIGTAGRLFAGGMAGAVAQMAIYPMDLVKTRLQTCASDGGRVPKLVTLTKDIWVHEGPRAFYRGLVPSLLGMIPYAGIDLTAYDTLKDLSKRYILYDSDPGPLVQLGCGTVSGALGATCVYPLQVIRTSITMILRLQAQPANSTSAYKGMSDVFWKTLKDEGFRGFYKGLIPNLLKVVPAASITYMVYESMKKSLDLD

SEQ ID NO: 51225 - protein, 380 aa, Zea mays
  Clone ID: LIB3075-027-G7_FLI.pep
GATGEREGMFLFGDSYRRRVFFKYEKRIRTRSPPEKIFEYFASVHSPEGEMYMLPTDLMRAVVPVFPSSESKNVREGRLKGERHPGELQCAPSEFFMLFDTNGDGVISFSEYIFFVTLLSIPESSFHVAFKMFDLDHNGEIDKDEFRKVMTLMRSYNRQGAAHRDGLRFGRKVGQPVENGGLVEYFFGKDGNEHLHYDKFSSFLKKLHDEIVRLEFSHYDVKSSNTIPVKDFALSMVASADMIYIDKLLDRVEDLDDNLDLKDLRITFEEFKAFADLRRRLEPFRMAIFSYGKVNGLLTKQDLKRAASHVCGVDLTDKVVDIIFHVFDANCDGNLSSEEFLRSLQKRESDIRQPATSGFLGVIACWLNCTKCSLQQMLSQ

SEQ ID NO: 51226 - protein, 814 aa, Glycine max
  Clone ID: 700906055_FLI.pep
HIDALTDRIGRNVVLELVSTEIDPKTKSAKKSNEAVLKDWSKKSNLKAERVNYTAEFIIDSSFGEPGAITVTNKHQKEFFLDSITIEGFASGPVHFPCNSWVQSRKDLPGKRIFFSNKPYLPGDTPAGLRLLREKELRNLRGDGKGVRNLSDRIYDYDIYNDLGNPDKGIELARPNLGGSDMYPYPRRCRTGREPSDTDMYAESRVEKPLPMYVPRDERFEESKQNTFTVKRLKAVLHNLIPGLKASLSSSNQDFNEFSDVDGLYSEGLLIKLGWGLQDDVLKKIPFVSKIQESSQGLLKYDTPKIISKDKFAWLRDDEFARQAIAGVNPVNIEKLQVFPPVSKLDPEIYGPQESALKEEHILNQLNGMTVQEAINENKLFMIDYHDIYLPFLEGINALDGRKSYATRTIFFLTPRGTLKPVAIELSLPHAGPNSRSKRVVTPPVDATTNWMWQLAKAHVCSNDAGVHQLVNHWLRTHANLEPFILAAHRQLSAMHPIFKLLDPHMRYTLEINALARQSLINADGIIENCFTPGRYAMEISSAAYKNFWRFDMDSLPADLIRRGMAVPDPTQPHGLKLILEDYPYAADGILIWSAIEDWVRTYVNHYYPHSSLICNDKELQSWYSESINVGHADLRHESWWPTLNNSEDLVSILSTLIWNASAQHAALNFGQYPYGGYVPNRPPLMRRLIPEEGDPEYASFHADPQKYFLNALPSLLQATKFMAVVDTLSTHSPDEEYLGERQQPSIWSGDAEIVEAFYDFSAKVRQIEKVIDSRNLDRTLRNRCGAGVLPYELLAPSSEPGVTCRGVPNSVST

SEQ ID NO: 51227 - protein, 785 aa, Zea mays
  Clone ID: LIB3068-056-E4_FLI.pep
GSCGDCAVLISVCCFCRNKNETLLCGDLMVKGELSEEDGVFSCNEVCGRTLACGNHACKDMCHPGPCGECELMPRKVSTCHCGKTRLQERRASCLDAIPTCDKICDKKLPCGVHKCKVNCHEGECPPCLVLVEQKCRCGSSGQMVECHKFSMEEFRCKKPCGLKKNCGRHRCSEICCPLSRKVAHLEGGNWDPHLCQISCGKKLRCGQHACQLLCHSGHCPPCLETIFTDLTCACGRTSLLPPLPCGTPTPSCPHQCSVPQPCGHPASHSCHFGDCPPCIVPVMRECIGGHVMLRNIPCGSKDIRCNQPCGKNRQCGIHACNRPCHPPPCDQTPANGDASSSSGGKAACGQVCGAARRECKHTCTAPCHPSSPCPDLRCEFAVTITCSCGRITATVPCGAGGSSMGDNMFEVSIIQKLSMPLQSVESNGRVPLGQRKLCCDEECAKMEKKRVLAEAFDITPSNLDALHFGENSSSSDLVSDLFRREPKWVLAIEERCKFLVLSKVRGSSSSNVKLHVFCHMMKDKRDAIRQIAGRWKLSVQSAGWEPKRFVTIHATPKSKPPARILGSKAGVPVTAAHPYFDPLVDMDPRLVVAMLELPRDAGVSALVLRFGGECELVWLNDKNAIAVFNDPARAATALRRLDYGSAYQGAAMFMPSSAQASSSSNVWIGEQKDGGITARNNPWKKPASAAEPDSPSGDWTGVAGHAPAPGRRGVNTASQVMGTTNRWNVLESDAAASSGPGDERKPAQRMDTAYSAIPNVGNAGPSMTKLQPDAEVDHWEEACE

SEQ ID NO: 51228 - protein, 162 aa, Zea mays
  Clone ID: LIB143-033-C10_FLI.pep
VETSDKKIIVLQRSYNVADFPGYYVFPGGHSEPQEIGIMGHQTDEEDFASLNERVSQEMFEGVIREVVEETGVPASSLTDPVFIGVSRREVNARPTAFFFTKCNIDSSGVSELYSRAQDGYESTKLYTVSVEELQGMRQRMPGCHNGGIALYELMRNAAKKK

SEQ ID NO: 51229 - protein, 143 aa, Zea mays
  Clone ID: 700580638_FLI.pep
FGYSAPEFAMSGIYTVKSDVYSFGVVMLELLTGRKPLDSSRERSEQSLVRWATPQLHDIDALARMVDPALNGMYPAKSLSRFADVIALCVQPEPEFRPPMSEVVQQLVRLMQRASIVRWQSGEELGFSYRVPEREGDLRDISL

SEQ ID NO: 51230 - protein, 202 aa, Zea mays
  Clone ID: 700582851_FLI.pep
LEELHQKSIIYRGVSADILMLDRSGHLQLVDFRFAKKLEGQRTYTICGIADSLAPEIVLGRGHGFPADWWALGVLIYFMLQSDMPFGSWRESELEPITKIAKGHLVMPVSFSAEVVDLITKLLVVDENARLGTSGAEAVKKHPWFDGTDWERIASGTCAAPEEITERINYCIETLNEDLSASPSVPIEDPDDLTAPEWIQDW

SEQ ID NO: 51231 - protein, 216 aa, Zea mays
  Clone ID: 700583620_FLI.pep
EADPPIFHRDVKASNILLDSKFVAKVADFGLSRLAPVPDVEGTLPAHVSTVVKGTPGYLDPEYFLTHKLTDKSDVYSLGVVFLEMLTGMKPIEHGKNIVREVNSACQSGAVSGIIDGRMGLYPPECIKRFLSLATKCCQDETDDRPSMWEIVRELELILRMMPEEDLILLETSETDSTDVSKSLSSSATRTLFVSSQASGSLDASSGMISGRVTPR

SEQ ID NO: 51232 - protein, 197 aa, Glycine max
  Clone ID: 700605267_FLI.pep
VENVAREKNRTAKNDMDRACSRGISDEEDAETARKKLRLSKDQSAILEESFKEHNTLNPKQKLALAKQLGLRPRQVEVWFQNRRARTKLKQTEVDCEVLKRCCENLTEENRRLQKEVQELRALKLSPQFYMQMTPPTTLTMCPSCERVAVPSSAVDAATRHHPMAQAQAQAQIRHRPIGPWASASPITHRPFDVFHH

SEQ ID NO: 51233 - protein, 455 aa, Glycine max
  Clone ID: 700731102_FLI.pep
DLRNNNLTGKIPQMGTLLNQGPTAFSGNPGLCGFPLQSACPEAQKPGIFANPEDGFPQNPNALHPDGNYERVKQHGGGSVAVLVISGLSVAVGAVSLSLWVFRRRWGGEEGKLVGPKLEDNVDAGEGQEGKFAVVDEGFELELEDLLRASAYVVGKSRSGIVYKVVGVGKGLSSAAANVVAVRRLSEGDATWRFKEFESEVEAIARVRHPNVVPLRAYYFARDEKLIITDFIRNGSLHTALHGGPSNSLPPLSWAVRLKIAQEAARGLMYIHEFSGRKYIHGNIKSTKILLDDELHPYVSGFGLTRLGLGPTKSATMAPKRNSLNQSSITTAMSSKVAASLNHYLAPEVRNTGGKFTQKCDVYSFGIVLLELLTGRMPDFGAENDHKVLESFVRKAFKEEKPLSDIIDPALIPEVYAKKQVIVAFHIALNCTELDPELRPRMKTVSENLDHIKIQ

SEQ ID NO: 51234 - protein, 146 aa, Glycine max
  Clone ID: 700731028_FLI.pep
DDFNAYLSDFGLARLLGTSETHATTGVAGTFGYVAPEYAMTCRVSDKADVYSYGVVLLELLSDKKALDPSFSSYGNGFNIVAWACMLLKQGRAKEFFTAGLWEAGPGDDLVEVLHLAVVCTVDSLSTRPTMKQVVRRLKQLQPPSC

SEQ ID NO: 51235 - protein, 234 aa, Glycine max
  Clone ID: 700731432_FLI.pep
AQQIFIHRDIKPSNILLGDDMRAKVSDFGLVRLAPEGKASFETRLAGTFGYLAPEYAVTGRVTTKVDVYSYGVILMEMITGRKAIDNSQPEENVHLVTWFRRMLLNKDSFTKLIDPIMDVDEETLPSFRTVAELAGHCCAREPYQRPDMSHVVNVLAPLVEIWKPSEADDDDIYAIDLDMTLPQALSKWQAIEGKNTFDVSCTSSMLTSGDTTQSSILTRPSGFADSFTSNDGR

SEQ ID NO: 51236 - protein, 360 aa, Glycine max
  Clone ID: 700732127_FLI.pep
QEMAVIPCHCYRTVGSDKPYLSGQSLRRRAPFPAVSVSFRRRISCVASSAIAHKVGLKDFLHLDDFDKDTILKMLDRALEVKALLKSGDRSFRPFEGKTMAMIFTKPSMRTRVSFETGFTLLGGHAIYLGPDDIQMGKREETRDIARVLSRYNDIIMARVFAHKDILDLAKYATVPVINGLTDYNHPCQIMADALTMVEHIGRFEGTKVVYVGDGNNIVHSWLLMASVIPFHFVCACPKGFEPDAKTVEKARKAGISKIEITNDPKEAVKGADVVYSDVWASMGQKEEAEYRRQAFKGFQVNQNLMDLAGSKAFFMHCLPAERGVEVTDEVIEAPNSIVFPQAENRMHAQNAVMLHVLAK

SEQ ID NO: 51237 - protein, 364 aa, Glycine max
  Clone ID: 700732503_FLI.pep
DLCSRMSYEEHKRLRRLTSSSINGMESLSLYLTYIEENVKNSLEKWANMGQIEFLTEIRKLTFKIIMHIFLSSESEPVMEALEREYTALNHGVRAMCINIPGFAYHKAFKARKNLVAIFQSIVDERRNLRKGYLPGKAKDMMDALIDVEDDDGRKLSDEDIIDIMLMYLNAGHESSGHITMWATFFLQKHPEYLQKAKAEQEEIIRRRPPTQKGLTLKEVREMDFLYKVIDETLRVITFSLVVFREAKSDVNINGYTIPKGWKALVWFRSVHLDPEIYPNPKEFNPYRWNKEHKAGEFLPFGGGSRLCPGNDLAKMEIAVFLHHFLLNYRFEQHNPNCPVRYLPHTRPMDNCLGRVRKCSSTTT

SEQ ID NO: 51238 - protein, 470 aa, Glycine max
  Clone ID: 700732968_FLI.pep
VKIMHLENNKLTGPLPSYLGSLPSLQALFIQNNSFSGVIPSGLLSGKIIFNFDDNPELHKGNKKHFQLMLGISIGVLVILLILFLTSLVLLLILRRKTSQQKRDEKGVSGRSSTKPLTGYSFGRDGNIMDEGTAYYITLSELKEATNNFSKNIGKGSFGSVYYGKMKDGKEVAVKTMTDPSSYGNQQFVNEVALLSRIHHRNLVPLIGYCEEEYQHILVYEYMHNGTLREYIHECSSQKQLDWLARLRIAEDAAKGLEYLHTGCNPSIIHRDVKTSNILLDINMRAKVSDFGLSRLAEEDLTHISSVARGTVGYLDPEYYANQQLTEKSDVYSFGVVLLELLSGKKAVSSEDYGPEMNIVHWARSLIRKGDVISIMDPSLVGNLKTESVWRVAEIAMQCVEQHGACRPRMQEVILAIQDASNIEKGTESQLKLSSSGGNSKPQSSRKTLLASFLEIESPDLSNSCLPSAR

SEQ ID NO: 51239 - protein, 207 aa, Glycine max
  Clone ID: 700733616_FLI.pep
FYIHCDGALFGLMMPFVKLAPKVTFKKPIGSVSVSGHKFVGCPMPCGVQITRLEYVNALARDVEYLASRDATIMGSRNGHAPIFLWYTLNRKGYRGFQKEVQKCLRNAHYFKGRLVEAGIGAMLNELSSTVVFERPHDEEFIRKWQLACKGNIAHVVVMPNITIEKLDDFLNELLDKRATWFQDGKDQPYCISSDVGEKNCLCALHK

SEQ ID NO: 51240 - protein, 245 aa, Glycine max
  Clone ID: 700733917_FLI.pep
LRGVNFIQIPTTVMAQVDSSVGGKTGINHRLGKNLIGAFYQPQCVLIDTDTLNTLPDRELASGLAEVIKYGLIRDAEFFEWQEKNMHLLLARDPSAMAYAIKRSCENKAEVVSLDEKESGLRATLNLGHTFGHAIETGVGYGQWLHGEAVAAGTVMAVDMSYRLGWIDDSLVKRVGDILKQAKLPSAPPETVTVDMFKSVMAVDKKVADGLLRLILLKGPLGNCVFTGDYDRKALDDTLRAFCKS

SEQ ID NO: 51241 - protein, 310 aa, Glycine max
  Clone ID: 700735386_FLI.pep
DGNGTVKTIAEAIKKVPEYSSRRIIIYVRAGRYEEENLKLGRKKTNVMFIGDGKGKTVITGGRNYYQNLTTFHTASFAASGSGFIAKDMTFENYAGPGRHQAVALRVGADHAVVYRCNIIGYQDTMYVHSNRQFYRECDIYGTVDFIFGNAAVVFQNCTLWARKPMAQQKNTITAQNRKDPNQNTGISIHNCRIMATPDLEASKGSYPTYLGRPWKLYARTVYMLSYIGDHVHPRGWLEWNTSSFALDTCYYGEYMNYGPGSGLGQRVNWAGYRVINSTVEASRFTVGQFISGSSWLPSTGVAFIAGLST

SEQ ID NO: 51242 - protein, 320 aa, Glycine max
  Clone ID: 700736472_FLI.pep
VQVVNEIEELALFERNKAEMYLKEPLWSETGKGDGSAKTEDYGAVSEVVKSLQQQRVYREVTLALRTGLRDARAEFSFLRVRALRSILKFLRSVAESDSTIDLFNQIQSIPQLQVVPVLFQHSLKESGDEYSENRVGDLSHILGVEPMKLTSPSTDAEVALALRVLEGCCLLHPHSTALAHQHNAIQVLMNILSTRGVLEQGACLDALISLMVDSSFNQMDFEKCSGIMEVADLLRDQQLDEDLRLKCGEFLLLLIGHVNGRDTPPLATIHEDTRRLLGEKSASLIWAASRQFDSTLDTEQRLTDLQIQARRVLESLDLY

SEQ ID NO: 51243 - protein, 437 aa, Glycine max
  Clone ID: 700737379_FLI.pep
NLKLSIFNFTMVRVKEALVVTPSEPTPNTVLSLSALDSQLFLRFTIEYLFIYRPGPGLDPTSTAARLKAALAKALVPYYPFAGRVRSRPDGPGLEVVCRAQGAVFIEASSERYTAHDFQKAPKTVAQWRKLLSLYVTDVLKGSPILVIQLTWLADGAAAVGVGINHCICDGIGSAEFLNYFSDLASHNNNVSVDPKPKPVWDRQLMNPDGRTRANLAMHAEFVRVPDLCGFMNRVTSGLRPTCIVFDERRINALKGACGMSSYTSFEVLAAHVWRSWARAMGFPKNQTLKLLFSVNVRKRVKPGLPEGYYGNAFVLGCAQTSAWELGERGVRYGSGLVKRAKERVDSEHVRRVVELVSESRASPDSVGVLILSQWSRLGLERVELGMGKPLHVGPICCDRYCLFLPVTGERASVKVMVAVPTTAVDNFHRFLRESNL

SEQ ID NO: 51244 - protein, 420 aa, Glycine max
  Clone ID: 700737719_FLI.pep
VTLNREQLKYLVIEALRGGCQGHRAELFAARVAKCLAALEGREKVYVDDLKKAVELVILPRSIVTENPPDQQNQPPPPPPPPQNQESGEEQNEEEEQEDDKDEENEQQQEQLPEEFIFDAEGGLVDEKLLFFAQQAQRRRGRAGRAKNVIFSEDRGRYIKPMLPKGPVKRLAVDATLRAAAPYQKLRRAKDSGNNRKVFVEKTDMRAKRMARKAGALVIFVVDASGSMALNRMQNAKGAALKLLAESYTSRDQVSIIPFRGDAAEVLLPPSRSISMARKRLERLPCGGGSPLAHGLTTAVRVGLNAEKSGDVGRIMIVAITDGRANISLKRSTDPEAAAATDAPKPSAQELKDEILEVAGKIYKAGMSLLVIDTENKFVSTGFAKEIARVAQGKYYYLPNASDAVISSATKEALSALKSS

SEQ ID NO: 51245 - protein, 207 aa, Glycine max
  Clone ID: 700897508_FLI.pep
PSGFGAEEDSVKPLPPFQAVLDKKRKIRREIEAAGIPYTSISANCFGAYFVNYLLHPYENVKDITVYGNGEAKAVLNYEEDIAMYTVKAANDPRTCNRVVIYRPQKNIISQNELTSLWEQKCGQTFHKAFISEEEIVKLSQSLPSPHNIPVSILHSIFVKGDLVRFEIEEDDLEASQLYPDYNYTSIDQLLDIFLVDPPPPASAAFE

SEQ ID NO: 51246 - protein, 101 aa, Glycine max
  Clone ID: 700897565_FLI.pep
YDVITHMNSFRQYKKSSSPMSAVFTGQQVLMLNNEQVSELNQDKNAGVYDIYVKLYFRIRFRLGDVISNDYKPKVKCHLKVPFSKNGTFTLFPTTKCDVDF

SEQ ID NO: 51247 - protein, 104 aa, Glycine max
  Clone ID: 700898536_FLI.pep
INIPYVITLGCFLIRKRQIAFSLQLQGNIITLHHRKLETSTQTKTNFAHGLNRCRLNVHQVTFSPSPPLQYNNHNTNIYTHKTTTIIPAGFQPHGVYSFAISPW

SEQ ID NO: 51248 - protein, 68 aa, Glycine max
  Clone ID: 700898942_FLI.pep
VAAWLPGSEGQGVADVLYGGYGFTGKLPRTWFKTVDQLPMNVGDPHYDPLFPFGFGLSTKPSKALYSS

SEQ ID NO: 51249 - protein, 168 aa, Glycine max
  Clone ID: 700901194_FLI.pep
TPLKQNESLDVFLFALFNENQKTGPTSERNYGLFYPTEKKVYDIPLTAEEIKEAPPSGVGKSQVPVSGEVSTTTSKGQTWCVASGGSSEKKLQNALNYACGEGGADCTPIQPGATCYNPNTLEAHASYAFNSYYQKKARASGTCDFGGTAYVVTQPPKYGNCEFPTGY

SEQ ID NO: 51250 - protein, 225 aa, Glycine max
  Clone ID: 700902334_FLI.pep
KWRMALHQVADLSGYHFKDGNRDSYEYEFIGSIVEEISRKFSRASLHVADYPVGLESEVTEVMKLLDVGSHDVVHIIGIHGMGGLGKTTLALAVHNFIALHFDESCFLQNVREESNKHGLKHLQSILLSKLLGEKDITLTSWQEGASMIQHRLQRKKVLLILDDVDKRQQLKAIVGRPDWFGPGSRVIITTRDKHLLKYHEVERTYEVKVLNQSAALQLLTWNAF

SEQ ID NO: 51251 - protein, 167 aa, Glycine max
  Clone ID: 700902987_FLI.pep
KATTFIEKIQASDGSWYGSWGVCFTYGAWFGVKGLIAAGRSFSNCSSIRKACEFLLSKQLPSGGWGESYLSCQNKVYSNLEGNRSHVVNTGWAMLALIDAGQAKRDSQPLHRAAAYLINSQLEDGDFPQQEIMGVFNKNCMITYAAYRNIFPIWALGEYQSQVLQSR

SEQ ID NO: 51252 - protein, 326 aa, Glycine max
  Clone ID: 700903880_FLI.pep
SFHMASPNPKEIVAEIPTYIRVFSDGTVERPRETPFVPPSIDDPQTGVSSKDIVISQNPLVSARIYLPKLTTINQVPILVFFHGGGFFFESAFSQLYHHHFNTFVSQTNCIVVSVEYRLAPEHPLPACYLDCWEALKWVASHSSENSPINAEQWLISHGNFQRVFIGGDSAGGNIVHNIAMRAGTEPLPCGVKLLGAIFAHPYFCSSYPIGSEPVTGHEQSLPYVVWDFVYPSVPGGIDNPMVNPVAPGAPSLAELGCSKIIVCVASEDKLRDRGVWYYEAVKKSGWKGDLELFEENGEDHVYHIFHPESENATKLIKRLGLFLNE

SEQ ID NO: 51253 - protein, 178 aa, Glycine max
  Clone ID: 700905716_FLI.pep
PCRSAHLKAMEVAREAGCLLSYDPNLRLPLWPSAEEARQQILSIWDKADVIKVSDVELEFLTGSDKIDDASALSLWHPNLKLLLVTLGEHGSRYYTKNFHGSVEAFHVSTVDTTGAGDSFVGALLSKIVDDQSVLEDEARLREVLKFANACGAITTTKKGAIPALPTEADALNLIKEA

SEQ ID NO: 51254 - protein, 207 aa, Glycine max
  Clone ID: 700906121_FLI.pep
QIPKWLSPGAQNMIRRILDPNPETRITMAGIKEDPWFKKGYIPANPEDEDVHVDNEAFSSHEEPNEAEQRNSGSPTLINAFQLIGMSSCLDLSGFFEKEDVSERKIRFASILSVKDLIDRIEDTVTEMEFRVEKKNGKLKVMRENKVHKTLGCLSVVVEVFEISPSLYVVELRKSYGDGSVYKQLCKKLLNDLGVPPKQGLVRSAAN

SEQ ID NO: 51255 - protein, 312 aa, Glycine max
  Clone ID: 700906939_FLI.pep
GNINMLLDNVTSTSTSTNTSKYPLLRRRRRLIVIALDLYDNNGAPEKKMIEMVQKIIKAVQLDPQTARVTGFALSTAMPVIETVEFLTSGNVQVNEFDALICSSGSQVYYPGINTEEGKLLPDPDYEVHIDYRWGCEGLKKTIWKLMNGDENSPIEEDLKSSNAHCISYKIKDLSKAKKVDELRQKLRMRGLRCHPMYCRGSSRMHVIPLLASRAQALRYLFVRWRLNVANMYVILGETGDTDYEEMISGTHKTIIMKGVVSKGSEELLRGPGSYQRDDIVPNESPLVASITETTHENIANALKQLSKSGGI

SEQ ID NO: 51256 - protein, 373 aa, Glycine max
  Clone ID: 700906963_FLI.pep
YWYLLQYPKVFFFFFITMSLLSDLINLNLSESTEKIIAEYIWVGGSGMDLRSKARTLPGPVSDPAKLPKWNYDGSSTDQAPGDDSEVILYPQAIFKDPFRRGNNILVICDVYTPAGEPLPTNKRYGAAKIFSHPDVAAEEPWYGIEQEYTLLQKDVNWPLGWPLGGFPGPQGPYYCGIGADKAYGRDIVDAHYKACIYAGINISGINGEVMPGQWEFQVGPSVGISAGDEVWAARYILERITEIAGAIVSFDPKPIPGDWNGAGAHSNYSTKSMREEGGYEVIKKAIEKLGLRHKEHIAAYGEGNERRLTGRHETADINTFSWGVANRGSSIRVGRDTEKNGKGYFEDRRPASNMDPYVVTSMIAETTILWKP

SEQ ID NO: 51257 - protein, 348 aa, Glycine max
  Clone ID: 700907521_FLI.pep
REYHGSNDWKGMLDPLDENLRREVVRYGEFVQAAYQAFHSDPAMSTEEPPHTQHVALPDRSYRMTKSLYATSSIGLPKWVDDVAPDLGWMTQRSSWVGYVAVCEDRREITRMGRRDIVISLRGTSTCLEWAENLRAHMIDMPDNDSSEEAQGKPKVECGFMSLYKTKGAQVPSLAESVVEEVRRLIDLYKGEELSISVIGHSLGATLALLVAEEISTCCPQVPPVAVFSFGGPRVGNKAFGDRLAAKNVKVLRIVNSQDVITRVPGIFVSEELEQKIRNVGGGVLEENTPLAYSHVGTELRVHTKMSPYLKPDADMACCHDLEAYLHLVDGFLASNCPFRSNAKRSLA

SEQ ID NO: 51258 - protein, 183 aa, Glycine max
  Clone ID: 700908266_FLI.pep
VVMLGGRILEILSINLGLREDFLLNAFGGENDLGACLRVNFYPKCPQPDLTLGLSPHSDPGGMTILLPDENVSGLQVRRGEDWITVKPVPNAFIINMGDQIQVLSNAIYKSIEHRVIVNSNKDRVSLAFFYNPRSDIPIQPAKELVTKDRPALYPPMTFDEYRLYIRTRGPSGKAQVESLTSE

SEQ ID NO: 51259 - protein, 212 aa, Glycine max
  Clone ID: 700909044_FLI.pep
EKVPESMYRVSKFYSNTNQSMPLIYVKLYMHQIFRGLAYIHTVPGGCHKDLKPQNILVDPLTHQVKICDFGSAKVLVKGEANISHICSLFYRAPELMFGATEYTTSIDIWSAGCVLAELLLGQVTQMKQEHDKRQASLIAEHNEQLKRTQLQAENELREKTMFMRNDHEAQIKALRCELEDECRKLEEELHLQKIQRRQAKGFVAVAVESDE

SEQ ID NO: 51260 - protein, 132 aa, Glycine max
  Clone ID: 700836955_FLI.pep
ETHLPELEARDGISITMEDIGTSRVWNMRYRYWPNNKSRMYLLENTGDFVRANGLQEGDFIVIYSDVKCGKYMIRGVKVRQQGVKPETKKVGKSQKNQHGTGTNASTTACTAANNGTPSSPKTKAEKSSKLI

SEQ ID NO: 51261 - protein, 172 aa, Glycine max
  Clone ID: 700846440_FLI.pep
LNFLSLQNSNLPLQIPNPNLTLSLHLLQPCQFPFQRLNPRLCLSQNLPQFSGIRPRLLCRSHLRYHIVVKPRHLRLQVRRPRGDNLRRFGSITRLRYFSLQLFNLLAPICTVAPQSVELRRQLLDLLLPRRVFAHQFVALALQRRDLSRRFFAVLIIDAAVGNTFIRHNRLE

SEQ ID NO: 51262 - protein, 120 aa, Glycine max
  Clone ID: 700832582_FLI.pep
GYRRRRRAAVQPLCLGEDAAVARGTAGTEDAVQRVRGSVQVGSARTRIPTRGEPHVRADSAFELAPQGHGAPSPEGAAPPPTTTTITTRAMPPSHSQPPRFQSLLTCPLSVLPSFIINDD

SEQ ID NO: 51263 - protein, 47 aa, Glycine max
  Clone ID: 700890070_FLI.pep
EIAWFITHSIEIFFQCGLWLNTAQMFYCLPLLFKLKNCELKKIMSYQ

SEQ ID NO: 51264 - protein, 236 aa, Glycine max
  Clone ID: 700894185_FLI.pep
LRWLRHEVGFQDFRFDFVKGFSPKYVKEYIEGAKPLFCVGEYWDSCNYKGSTLDYNQDSHRQRIINWIDGTGQLSTAFDFTTKGILQEAVKGNFWRLRDPQGKPPGVIGWWPSRSVTFVDNHDTGSTQAHWPFPKDHIMEGYAYILTHPGIPTVFYDHFYDWGDSIREQIVKLIDVRKRQGIQSRSSVRILEAKHDLYSAVIGEKVCMKIGNGSWCPTGREWTLSTSGHNYAVWHK

SEQ ID NO: 51265 - protein, 98 aa, Zea mays
  Clone ID: LIB3076-044-D8_FLI.pep
AEIDMHLFIHPHHEARASALAARDGDAAGGERAAGVGAVDVAAVRRVARVLAEARLLRAQVGAARRRGRRPADDRRGARRQLRRAALLRRRPARARRH

SEQ ID NO: 51266 - protein, 258 aa, Zea mays
  Clone ID: LIB3068-038-G11_FLI.pep
ARSVLGNQSADLSMAKDQNARAKSVENRHERSEGAMKPDVQQKKSTVASNGSDILIQSSSVQGKSSVVARAMDEPPKPVSDEGVKVSTKSTSEFETRATQKRAGNAGKVMKHDVAKEDAKAGKPTSWNVNQQVSTVDREVSHAADAAQETSTTISNGNLHPAPHKVSSSSQRNAVTHNGAANPSVESTDMIDSPVRQQKRPPVEEQDRSGKRRKGENEPDLSEHHVDKEKSLDSRGGDKFRSVDHEKSANEEQNLRAG

SEQ ID NO: 51267 - protein, 170 aa, Glycine max
  Clone ID: 700893088_FLI.pep
LLKEKDNLKAEVASLNEKVLARGKQEGHMKQQAESEEETKRLLHLQEQEPPQRLLLESVSEGEGSKVSSVVGGCKQEDISSARSDILDSDSPHYTDGVNSALLEHGDSSYVFEHDQSDMSQDEEDNLSKSLYPSYLFPKLEEDVDYSDPPESSCNFGFSEEDHALWTWAY

SEQ ID NO: 51268 - protein, 716 aa, Zea mays
  Clone ID: 700335606_FLI.pep
GSCDPYVEVKLGNYKGQTGHFEKKNNPEWNQVFAFAKERIQSSVVEILVKDKDLVKDDFIGRVIFDLNEVPKRVPPDSPLAPQWYRLEDRNGHKVKGELMLAVWMGTQADEAFPEAWHSDAASVPGDGLASIRSKVYLTPKLWYLRVNVIEAQDLIPNDKTRFPEVYVKAMLGNQVQRTRALASRTLNPLWNEDLMFVAAEPFEEHLVLSVEDRVAPGKDEVIGRTIIALQHVPRRLDHRLLTSQWYNLEKHVIIDGEQKKETKFSSRIHLRICLEGGYHVLDESTHYSSDLRPTAKPLWKPSIGILELGILTAQGLLPMKTKDGRGTTDAYCVAKYGQKWVRTRTIIDSFTPKWNEQYTWEVYDPCTVVTIGVFDNCHLNGGEKANGARDTRIGKVRIRLSTLETDRVYTHSYPLIVLTPGGVKKMGEVQLAVRFTCSSLLNMMHLYSQPLLPKMHYVHPLSVIQVDNLRRQATSIVSTRLGRAEPPLRKEIVEYMLDVDSHMWSMRKSKANFFRITGVLSPLFAVARWFDQICHWKNPLTTVLIHVLFMILVLYPELILPTIFLYLFLIGVWYYRWRPRQPPHMDTRLSHAETAHPDELDEEFDTFPTSRPPDLVRMRYDKLRSVAGRIQTVVGDLATQGERLQSLLSWRDPRATALFVVFCFVAAIVLYVTPFRVVVFLAGLYVLRHPRFRHKMPSVPLNFFRRLPARTDSML

SEQ ID NO: 51269 - protein, 320 aa, Zea mays
  Clone ID: LIB3062-014-E5_FLI.pep
DQKITSIKEILPILEKTTQLRAPLFIIAEDITGEALATLVVNKLRGILNVAAIKAPSFGERRKAVLQDIAIVTGAEFLAKDLGLLVENATEEQLGTARKVTIHQTTTTLIADAASKDEIQARIAQLKKELAETDSVYDTEKLAERIAKLAGGVAVIKVGAATETELEDRQLRIEDAKNATFAAIEEGIVPGGGAAYVHLSTVVPKIKEAIEDPDERLGADIIQKALVAPASLIAHNAGVEGEVVVEKIKESDWEVGYNAMTDKYENLMEAGVIDPAKVTRCALQNAASVAGMVLTTQAIVVEKPKPKPQVAEPPEGALTV

SEQ ID NO: 51270 - protein, 182 aa, Zea mays
  Clone ID: LIB3136-058-B3_FLI.pep
REAQAEHVDHEVRQRDVERERGHGAGDEREHDGLRLQVAEQALHEGEGEEARRLRADERRRGAGRLGLLPQEQEHRLREPPQRGDERRRGGRHDERRLQVEAQHAVQPRAVRLPAQRLQGAAQTGHERVAGDGGPGVAERGAGEVDVAELAREHHRHQRDAVVGHAGQHHRHREPQLRARLG

SEQ ID NO: 51271 - protein, 187 aa, Zea mays
  Clone ID: LIB3137-008-C5_FLI.pep
AMETLLISEERNHQLHHFSGRRKKALAASPQSTRSYHAGNCRAFHSGITVGILPSPPAQRVALTHSSPEPKTPKHQLHHGKKRSRAISINLSTSPPSRPELWAGPGFCNSPPPSSLPIPKFSLHQKRSVSLEFPPADRSDDEEVPVHAKSAPSSPTAGSGVTFFSGTDATIATENLRRILNLKIEDN

SEQ ID NO: 51272 - protein, 237 aa, Zea mays
  Clone ID: LIB3159-011-D3_FLI.pep
FFKKEKKRKETCPLCLRTERRQAKYGPPGLGILQKPVHVRDQPLDTLQRAEPLRPRRQQRRPAGVEGLHPADGLGGVQPPNKAAEHDVDEPHAVPSEEGLPLGALPERLLQRLQRRDGLPRRLRHLLRRPAPEHGYPRAVELVVDVGGPEASNGAVVGVGWKEIRCGGGESLVDVLHDDLGLADGLAVVDEHGHLLEHGVGAEEKLALVVEVLLGVCVGEAFEAERDARPEHERARP

SEQ ID NO: 51273 - protein, 296 aa, Zea mays
  Clone ID: LIB3150-094-B6_FLI.pep
KKAAVHASEKKTATKEPKTPTGSQSESTEVNTLFMGNVPWKAEFDDVKEFFEDVGEVVDVRFPTHDDGNRKGFCYVEFVSAEAAAKAYKEKQSKELHGREVRLDFAKGRSTQTPRSGNDGSFQKAARGNSSSIFIRGFDKNLSEDEIRSSLEQHFSDCGEMTRVSIPTDHESGAIKGMAYIDFKDQDSVSKALELSGSDIGGGYELYVDEAKPRGDGQRGGGRSGGRSGGRFGDRSGGRRGGGRFGERSGGRDGGGRFGGRRGGRDGGRGRGGRGFGNKHSAGTPSAGKKTTFGDD

SEQ ID NO: 51274 - protein, 747 aa, Zea mays
  Clone ID: LIB3150-094-A6_FLI.pep
DRPDLTAPESLQLYLDTRVEQLKVATELSLWQEAFRSVEDIHGLMTMVKKMPKPSILVVYYAKLTEIFWISDSHLYHAYAWLKLFNLQKSYNKNLSQKDLQLIASSVLLAALSVSPYDKKYGAFETENEKERNMRLSNLVNFSLDNKRENREMPSRPYLLSELASKGVLSCASQEVRDLYNLLEHEFLPLDLASKVQPLLLRISKIGGKLSSASSVPEVKLSQYISALEKLTTLRVLQQASCIFQSIKIDMLSRMIPFFDFSVVEKISVDAAKQNFVAIKVDHLSGVVQFGTVDIESDGLSDHLSVLADSLNKARIHICPPVKKPSKLGESLISLAAIVENEHKRLLARKSIIEKRKEELERQILEKEKEEEKKRMSSQKKTADEERVRLLNEQRQREQDRIRREIEEKNKAEAKKLLEDLNKAGKKHVVVEGELTKEAIMELARNEQLKERHEMEKKLQKFAKTMDYLERAKRQEEAPLIEQAFQKRLEEEKILHEQEQLREIELSKQHHASDLQEKNRLSRMLEHKNALQERIIQERAAEFGRLKKERDERMNRLISSRKRERETVRKLMFYLNLEEQRIEMLREEEEARKREAEERRKREEAERKAKLDAIAEKQRLREIELEEKAKATREKLLKGSEAVRAPDSAPVAQPPRESAAAPAAAAAAPAPAPSKYIPKFKRGGDSSSIPSGSRDEDRWGSRGPLRQDGPPARLDAPSSRQDTDRWRGSRFSSNSTSSSSTWSRSRN

SEQ ID NO: 51275 - protein, 411 aa, Zea mays
  Clone ID: LIB3150-108-G5_FLI.pep
DAVPTKTVSGQRNIQLSGVMPKGEGSKQLSKEKGEGISIDALHKLNQKNISAWNMKRLMRIVRFGTLTTMDEQIQQATGEGDESATHIRSEYEAKIAAKKIFHNVAKPGSKYIYLSDLIRFMRQEEAVKAMNLFEGAQEHSRVSKTSLKNWVVNAFRERKALALTLNDTKTAVNKLNQMVNVVVGIIVFVLWLLILGIATTHFFVFLSSQLLLAVFVFGNTLKTVFEAIVFLFVMHPFDVGDRCEIEGVQAVVEEMNIMTTVFLRYDNLKIYYPNSVLATKPIMNFYRSPDMGEAIDFSIHVATPVEKLALMKERILRYIDNKKEHWYPGAMVVLRDVDDTNKLKVSIWLRHTLNFQDMGMRFVRRELVLQEMIKVLKDLEIEYRMLPLDVNVRNAPPIQSTRMPTTWNYS

SEQ ID NO: 51276 - protein, 211 aa, Zea mays
  Clone ID: LIB3159-007-A7_FLI.pep
APVLPAPLPSKGPPPLDPVPELQGSNETDVTDAGAGEETEEGMHENRDEINALLDTDRQSGGAALSVESVASAGAGAGAAPPPAAKKRRLSSCTDKSVVDTASSAARPPERSMEQEQRVELANDRDAQSCCVGEVESGRRFALGEAEAEAAEGDSPDEQRRRRERIQETVAALRNMVPGGIAKDAAAVLDEAICYLQYLKLKVKTLGAVSL

SEQ ID NO: 51277 - protein, 367 aa, Zea mays
  Clone ID: LIB3180-001-C3_FLI.pep
LSPAVFVPPPAAAMPYLVRERLYFGGIKDAIAALTESSSTPDFTHVLSVVSSASISFITDCRPGLEIPTEEVLRVVAGEEGAAPTAAVPPGTLMRVVERAGHGLRVTRMAVPLRDTEEEDLLDRLEPCLEFIDEGRKVGNVLVHCFAGVSRSASIIVAYLMRAEQKSLEEALEALKEISESACPNDGFLDQLKLFEEMGFKVDTSSPLYKRFRLKLLGQSYISGEKISSYMFEDDPGLSLESGSCQDSSKVEQRKTAYRCRKCRRVIAVEGNVISHVPGEGESCFDWNRRKSGHPYNNKEHGCSSLFVEPLKWMTPVEDGALEGKLSCIHCGARLGYFNWSGIQCNCGSWVTPAFQIVKSKVDISTI

SEQ ID NO: 51278 - protein, 523 aa, Zea mays
  Clone ID: LIB3152-050-G8_FLI.pep
QRNTAAVGGLLSDLRARVSQVLRGGGAEAVRRNAARGKLLPRDRIDRLLDPGASFLELSQLAGSDVYDEALPSAGIITGIGPVHGRLCMFVANDPTTKGGTYYPLTVKKHLRAQEIASECKLPCIYLVDSGGANLPRQADVFPDRDNFGRIFYNQAKMSSDGIPQIAVVLGSCTAGGAYIPAMADESVIVKGNGTIFLAGPPLVKAATGEEISAEDLGGASVHCKVSGVSDHFAQDEIHGLELGRNIVKNLHLAAKGTNIQSSACGYQEPLYDVEELRSIAPADVKQSFDIRSVIARIVDGSEFDEFKKLYGTTLVTGFARICGQPVGIIGNNGILFTESALKGSHFIELCAQRHIPLIFLQNITGFMVGSKSEASGIAKAGAKMVMAVSCAKVPKITIIVGGSFGAGNYGMCGRAYSPNFLFLWPTARISVMGGIQAAGVLAQIEKNNKKRQGVEWSKDEEEAFKAKVVEAYDREGSPYYSTARLWDDGVIDPADTRRVLSLCLSASAKPVPEDTRYGVFRM

SEQ ID NO: 51279 - protein, 330 aa, Zea mays
  Clone ID: LIB3180-013-B12_FLI.pep
VRIPDATLAWWRHHPNPTIRICRSAAAMSRSERRLASAVVRLPGRSRVSASPSPRRRSQSPSPRRDRRRRDRSPIPYRDRSPSPYRARRRDRSPSPYRDRRDRSPSPYRDRRRQWSPYHNDRGRDRDRVLPVRSGGGAWSDDDDDDKELQGLSYFEYRRLKRQKLRKSKKRCIWNITPSPPRVEGDEENYGYSDVEEEKVSPKASPEASEEESKDASESESGESDSLSESSGSEASMRKKKGRNKSRRSSKRSRQRHRHRSYSSEIEDESKSDDDSVGSYDSEESRDRSKKRSRRHNRSKKRSRSSRRKKRRSQDTASEQSSEEEEEEDS

SEQ ID NO: 51280 - protein, 524 aa, Zea mays
  Clone ID: LIB3180-001-E6_FLI.pep
GGRAGGRATYLRPGGRRRCFGQAMIEQFVNFVIRPPRAEYNPDQYLWEPEFTLAGRKYKRLDLELTNERSQTLKCSHYVPAVIPENTSLPCVVYCHGNSGCRADANEAAVILLPSNITLFTLDFAGSGLSSGDYVSLGWHEKQDLKCVVSFLRKNKQVSCIGLWGRSMGAVTSLLYGAEDPSIAGMVLDSAFANLYDLMMELVEVYKIRVPKFTVKMAVQYMRCVIQRRAKFDIMDLNVVQFAPKTFIPALFGHASNDMFIQPHHTDHIHQAYAGDKNLIKFEGDHNSPRPQFYYDSVSIFFYNVLHPPQFPSTCTHKLDKYYNLGAFKGAAGTNESLLYEIINGLRAAGTDAGSSSAATASFTNATKSVVELLTERVNQLSVKNDNDLDFLLDENHNLTEMDGNTGECHLEDKSNRQTDECCSYTSSNRESWGRCSSLGGASDGLSSGEQPEIPNHKLKSLTLRALATPLRRVRRKPLAIPKEKNRSLWKRLKKERQQMGENISQRLRLCLQGQARHKRTKSS

SEQ ID NO: 51281 - protein, 143 aa, Zea mays
  Clone ID: LIB3152-014-E9_FLI.pep
AAAAMAIPHSTTAAKPVPAVRILRRRQRRQPVPGPVRRVPEAPVQPGGDALRLATVPGAAAAVLPPDQAGGAAAPVPGDIRCGPAVLPAAAAAGRARGADGGPGSAAADGDVRPAAAAARSLPLQRSCRRCLLLRKLCTVVIM

SEQ ID NO: 51282 - protein, 252 aa, Zea mays
  Clone ID: LIB3150-092-F4_FLI.pep
GHHPGEHPEGEVPADQAAQGRAAHLPGRRQEQGGEPPHGPEEAAVQLLRQDPAHLLRVGRRVGVPPLQVGALPRRRLRRGGRLPEAVVAVGRRLAPVQEARVRGRPRDERGGGRRAGPPEQGHLGPHPVQDAVRRPPPRRVRALAPHHAQAAVPAVVVGRGGAQRPVQAGGVVRLRAAAELPPHRPRHGALGSVSRLPVPSAAGLLQIQGWRALRGARRRRRRRSRLQVREIDGEDVVELMMNEMECRITVL

SEQ ID NO: 51283 - protein, 315 aa, Zea mays
  Clone ID: LIB3156-002-F2_FLI.pep
LGSVYWGQVWDGSQIAVKRLNNAKNGTEAEFASEVEMLGRIRHKNLLSFRGYCADGPERVLVYDFMANSSLYAHLHGPHSAECLLDWRRRASIAIGTARALLYLHRHATPKIIHGSVKATNVLLDSDFRAHAGDFGLARLIPDDGTDHEKIASSESQRGYLAPEYAAMSGKPTAGCDVYSFGIILLELASGRRPVERSGSGKACGIRSWVLPLARQGRYDEIADSKLGDKFSGPELRRMVLVGLACTRSEPEKRPTMLQVVPLLKGESKETLVKLEREELLFSPDSTTVSSQGTPTPDGSTDSAPPKKDQELVGA

SEQ ID NO: 51284 - protein, 114 aa, Zea mays
  Clone ID: LIB3156-010-F1_FLI.pep
RQGHAPRRLQDGQAGGALALRALRDGAAPLRAGRLRQEGPRRLRPQRRRRPHRRAARQGLLHRGPLHRRLQRREPQRLLRHVDPPTDPLFSFWTSGSRPQEVAAPSFFLSLAIS

SEQ ID NO: 51285 - protein, 48 aa, Zea mays
  Clone ID: LIB3157-006-E12_FLI.pep
RKGGMVLSFPCTRYQVLIGCDGVHSVVARWLGLSEPASSGRSAVRGLS

SEQ ID NO: 51286 - protein, 550 aa, Zea mays
  Clone ID: LIB3152-033-B3_FLI.pep
QFNDAPNKESEGYGESGRGKHGEKSLAESVGSLNIGIIDSEFMDSSPLIHDKESCFPLEPEGSVNEDNFTAVLSQFNDAPNKESEGYGESGCGKHGEKSLVESVGSLNIGIVDSEFMDSSPLIHDKESCSPLEPEDSVNEDNFTAVLSQFNDAPNKESEAYGESGCGKHGENSLDESVGSLNIGVIDSEFMDSSPLIHDKESCSPLEPEDSVNEDNFAAVLSQYSDGPNEGNEGYGESGHYKHEEKSLDESVGSLTIGIIDSEFMDSSRPIHDKESCSTGSAADQCSRTIPAKYELSSEESDSTGSHLVFDSGKNYLELNNHSVTDLERIYNGHATSVDQYVRGNGETLADHPKKEEAGLQKDTGTIAQHRDTLACDGESVCSSCEEPRRGLNGEPSDFSSESHSRLTPTHNTGGKLSMVSEHPVHNMESDMTGMASDSTNPELNPEASTRNEMDGSRSTDNPVEPENVAQDSATRGRPEGDAPRSGKGVLRSVAGGITLVGAVFFMFHLSAALLQKKQGGKLCDGHTISFGKICSEQRKGQEHGQRKRP

SEQ ID NO: 51287 - protein, 100 aa, Zea mays
  Clone ID: LIB148-060-G11_FLI.pep
SWLIRNPMRRRRRRRRGRRPVELRSVRPAKQGGQNRELIKGSIVCQATTVLAIIIYRYAKCGQAYPHACYCMPPNIYYPTRSCQIVSSTSLYIFHPFNLM

SEQ ID NO: 51288 - protein, 294 aa, Zea mays
  Clone ID: LIB148-002-B10_FLI.pep
AELRSMAAVCRSMRERCRGDHLWERHMTNRWGRVLGRAARDEWRTHLASASESRAAGGGGGGKRRRWLAALSCVCPVVSWMRPRADGGKSSAPVLDDSIMSWYLSVESGKFWFPAQVYNREHGHVGFMMSCYDAALSYDFHTDTFRARYPPHGRRTVVLEDGVQWDRVRAPPVDTLAHDLHTSDCLHELRPGDHIEIQWRRNKEFPYGWWYGVVGHLESCDGSEHFCRCHLSDTVVLEFNQYTPGSRWRQALVKRKEHREEGNEGDGFYGGIRKLRGNDDISKWRQLWPTDVLE

SEQ ID NO: 51289 - protein, 351 aa, Zea mays
  Clone ID: LIB148-016-A2_FLI.pep
PLRPEPADRGSAAGGPRRPPHHRVAQAARARRPARLLSLLRDGRRRRGRQQRGRAKDALGAGDLHVAVIGGRRRHGQQYTQRVPGARLRGAHARGAASAAGAVPAVPSRSDAPERVPVAPAAEPAVRAADDAGRGVPDRGAVVAARRRRRRAVVGLIELAADAAHRVVLLRRGRVVAPPPHRHALRLPRRPRVAVAAAERAVPAHAGGRAGAPDARAAPRARRPRGRAHRAGGREARRAGHRRRQRGHRHHRPRRVGAGGAHVDHVLQRQEGGLRGAAGPHRGGHRRAGDAVGRLHGRRRAPRQVGHGRPRRRDGVHARELRAHRRVPGLGVALHGRTARRRLPGARHLLR

SEQ ID NO: 51290 - protein, 427 aa, Zea mays
  Clone ID: LIB3066-037-C6_FLI.pep
KMANALLGGLWAIVVVAVVVGVVATVTHSGKKAGDDFTVPGEASIATSGKSVESLCAPTLYKESCEKTLSQATNGTENPKEVFHSVAKVALESVKTAVEQSKTIGEANASDSMTESAREDCKKLLEDAVDDLRGMLEMAGGDIKVLISRSDDLETWLTGVMTFMDTCIDGFVDEKLKADMHTVLRNATELSSNALAITNSLGGILKKLDLGMFKKDSRRRLLSEQDEKGWPVWMRSPERKLLAAGNQPKANAVVAKDGSGQFKTIQQAVDAMPKGQQGRYVIYVKAGLYDEIVMVPKDKVNIFMYGDGPKQSRVTGRKSFADGITTMKTATFSVEASGFICKNMGFHNTAGAERHQAVALRVQGDLAAFYNCRFDAFQDTLYVHARRQFFRNCVISGTIDFIFGNSAACSRTASSSRGGPWTTSRTR

SEQ ID NO: 51291 - protein, 101 aa, Zea mays
  Clone ID: LIB3157-009-H6_FLI.pep
ASNTVYFLLPFYVCISLGMSCETEYSSSQLSFLSTAKKKKGSEQERAGYCRPYTSRAPTPAMPITKLTITAIGGRAPPMAFPVAASYLANRFFGALHCGQP

SEQ ID NO: 51292 - protein, 278 aa, Zea mays
  Clone ID: 700047591_FLI.pep
SLPTSPPTSATRSYLEMSKQWKASPLPTEPVELFIGILSSANHFAERMAVRKSWMISTRRSSDVVARFFVALNGRNEVNEELKKEADYFGDIVIVPFMDNYDLVILKTIAIVEYGVMVVPAKHIMKCDDDTFVRIESVLDQVNKVPRGKSIYMGNINYYHRPLRSGKWSVTYEEWPDEVYPPYANGPGYVISSDIAQYILSEFDNKTLRLFKMEDVSMGTWVEKFHTTRQPVEYLHDVRFYQPGCFDGYFTAHYQSPQHMICLWRKLQAGSAQCCNVR

SEQ ID NO: 51293 - protein, 234 aa, Zea mays
  Clone ID: 700049036_FLI.pep
GSPSGPALQTGLQAPERLKSSIEQLVSCSPPPCLSTLTFFLSFSAPLPVPLLLLGPCLFCQSVSLPRTAWLCVLCDLVASLSAGAGASIPLGEARAPVWSVFLGTRALVLLLPRASLLPGCLRSSRLVCERNIPEARVLGPLCPQLAGCKSCPVPALSPCFHRKRQQLLPAWHLPSNSLYIQCSHEALVGSCCAVMFLCLVDRRRRPRSFPRRNGRHGLRPLRRSRAPRRVLRR

SEQ ID NO: 51294 - protein, 549 aa, Zea mays
  Clone ID: 700093639_FLI.pep
ISRMARRAASSLVSRCLLARAPAGAPPAAPSAPRRTDGMHRLLPGVLQRFSTAAAVEEPITPSVHVNYTKLLINGNFVDSASGKTFPTLDPRTGEVIAHVAEGDAEDINRAVAAARKAFDEGPWPKMTAYERSRILLRFADLIEKHNDELAALETWDNGKPYEQAAQIEVPMVARLMRYYAGWADKIHGLIVPADGPHHVQILHEPIGVAGQIIPWNFPLLMYAWKVGPALACGNTLVLKTAEQTPLSALYISKLLHEAGLPEGVVNVVSGFGPTAGAALASHMDVDKIAFTGSTDTGKIILELAAKSNLKTVTLELGGKSPFIIMDDADVDHAVELAHFALFFNQGQCCCAGSRTFVHERVYDEFVEKAKARALKRVVGDPFRKGVEQGPQIDDEQFKKILRYIRYGVDGGATLVTGGDRLGDKGFYIQPTIFSDVQDGMKIAQEEIFGPVQSILKFKDLNEVIKRANASQYGLAAGVFTNSLDTANTLTRALRAGTVWVNCFDVFDAAIPFGGYKMSGMGREKGVDSLKNYLQVKAVVTPIKNAAWL

SEQ ID NO: 51295 - protein, 259 aa, Zea mays
  Clone ID: 700071826_FLI.pep
NFREEERNEGITPCSAAAARAGSSTHTACTQALSSVSYLISVAVLVHQDVDRGRDGLVGGDHDLVPGHVPERVARELVAGDERVLHVADAVREQQHRREVERPGGPVALERCARGGGPDGHPRGGVLLHVHLVHGGEGAVQLHDVDALVPAAEDVADDLDAPGDAADGLEDDVGVAEEEGSGDVEQHGVLGDDAGVVHVAVADPRLREARDLEVDAGAAEARGLVVAVHAGDGVGRRGDHDPRGRGEDDDVGHGVVVAV

SEQ ID NO: 51296 - protein, 508 aa, Zea mays
  Clone ID: 700075769_FLI.pep
LRNALHTEGVVIHWHGIRQIGTPWADGTAAISQCAINPEETFTYRFVVDKPGTYFYHGHYGMQRAAGLYGSLVVDVAEGEEEPFQYDGELNLLLSDWYHESIHTQMVALSSRPFRWIGEPQSLLINGRGQFNCSLAAAHTQGATNQCAATAANTQCAPVVLPVQPNKTYRLRVASTTSLASLNLAIGNHKLTVVEADGNYVDPFVVDDIDLYSGDSYSVLLTTDQDTSSNYWVSVGVRGRLPKTAPALAVLNYRPNRASDLPALAPPVTPAWDDYGHSKAFTYRIRARAGTPPPPPTAARRIELLNTQNRMDGRIRWSINNVSMVLPATPYLGSLKMGLKSTLAAARPAETFSREYDVTLPPPNPNTTVGDNVYVLAHNTTVDVLLQNANALSRNVSEVHPWHLHGHDFWVLGYGDGAYRGDAADEARLNLRDPPLRNSAVIFPYGWTMLRFVADNPGVWAFHCHIEPHLHMGMGVIFAEAVDLVAKVPNEAVSCGATATALMAGGHL

SEQ ID NO: 51297 - protein, 330 aa, Zea mays
  Clone ID: 700077395_FLI.pep
SSMGNTFGFRGGLRADVADLMQDAGEHLRSSGVFVKRAVASQYQSNRTGNDEIDESSAEELRDAASYVQHNAMLIQVPVVGTARTFWRLSDEATRMIRKLALILRNHHSVCKCLAAPLQASNVWVGSAGNAKLRGARFTDKGFSVERVREDYRNLSRVLQQLISISGGDTSKLPPDYIDFLSLLTEDNLTNKDEFLVVNHAALLPLKNRTEAFLMLYDRIVKYLGKRNRAKMNRILSCLPYQDDWLDTATANAKINQWIVNVQNTKEYRKTTLDLLRLNRNVRSHLHEYGHDDDVEEILYCEWPMLLVVMEKMLHREGELQDTDIENKFG

SEQ ID NO: 51298 - protein, 348 aa, Zea mays
  Clone ID: 700050721_FLI.pep
DTRFEFCGIEITVSSSPSLYNLLPCFTRPSAQTKKNKEDEKLILAFSRLDNEPVAGGDGDGHRRRGRQGARPLDRARRVAVLALVRHHQHGRVVGGALHVLPRRASPHSAALVVAPWVRGALDRLLAVLPPRVLVRRDVGDLRADRRHSDAPLHAVLPSLGAVAPAAVGGGLGVGAGAGLPLVARQRRLPGGHEAPALGDAALAGRDRREEGRGGDGRGGRHGQVRLREVQRQALRRLRHADGRTGDDRRRRRRRRLDGPAAEAGVPRAVEDGDDLAELGDSLAGDLAERLISGPVRRGGLRGQGRHQQLQVAEPGRRRLLDGELVVGAARGVAAHQVHGHGSRCFAW

SEQ ID NO: 51299 - protein, 525 aa, Zea mays
  Clone ID: 700045010_FLI.pep
EDVYRGSDKGILADVELLRQITEASRGAITAFVEKTTNSKGQVVNVTNNLSKILGFGLSEPWVQYLSTTKFVRADREKMRVLFGFLGECLRLVVQDNELGSLKLALEGSYVEPGPGGDPIRNPKVLPTGKNIHALDPQAIPTTAALKSAKIVVDRLLERQKADNGGKYPETVALVLWGTDNIKTYGESLAQVLWMIGVRPVADTFGRVNRVEPVSLEELGRPRIDVVVNCSGVFRDLFINQMNLLDRAVKMVAELDEPAEMNYVRKHAQEQAEELGVSLREAATRVFSNASGSYSSNVNLAVENASWTDEKQLQDMYLSRKSFAFDSDAPGAGMKEKRKAFELALATADATFQNLDSSEISLTDVSHYFDSDPTKLVQGLRKDGRAPSSYIADTTTANAQVRTLSETVRLDARTKLLNPKWYEGMMKSGYEGVREIEKRLTNTVGWSATSGQVDNWVYEEANSTFIEDEAMRKRLMDTNPNSFRKLVQTFLEASGRGYWETTEENLDRLRELYSEVEDKIEGIDR

SEQ ID NO: 51300 - protein, 501 aa, Zea mays
  Clone ID: 700072384_FLI.pep
KEGEYVGGGGENACRRRAGRRRRGVPEAQEHGRGQAGERRQGGEPAARRQVPRLEGHAVHHRERDVREAGDARHVGEPAGVPDAGVPHAERGRGDATQRAQRHHQPRPHHRRLPLRRLPRPLPRARHRLRRLPHRHVPADDDGRREQPAPAGVQRGRDLREGDVVPVRGALRGLRVPGAGLGGDPPLQHALRRRPVRPQHGVWQARHQQLLQLVLLHLHGRHDDLRHRHHLRAEQRELAHRAGHPHGTHVPGMRALLHGHAPIRAGDARGEPLHQRRAGAIGRAQEAVAEAAQGPEAGPLRPAASFTVFAMLAQTLWIPFYDRLLLPKLRKITGKEEGFTLLQRQGIGIALSTVAMVISAIVEDRRRAIALSQPTLGTTITGGAISAMSSLWMVPQLMILGLSEAFNLISQIEFYYKEIPEHMRSVAGALAFCNLALGNYLSGFLVTIVHRTTGSGQNWLAQDLNKGRLDLFYWTIAGIGVFNFIYFVICARWYRFKGASN

SEQ ID NO: 51301 - protein, 566 aa, Zea mays
  Clone ID: 700094629_FLI.pep
AKAMAEPALLAPDPFADLPFPEFQAPIDGDSFALEDFDLEDLDLDVDFDLDLFASDGQPSQPPPLATSSSSAGSPVGGSSSSGAVGDGGGLRNEESSESSSRSASGTDGSGKGKGEEDEAKRRARQVRNRESAHLSRQRKKQYVEELEGKVKAMQATIADLSARISCVTAENAALKQQLGGAAGAAPPPMPMYPTMYSLPMPWMHPSYPMRGSQVPLVPIPRLKPPQPAPAVAEPPAKKARKTKKVASVSLLGLICVAMLCGCLIPAVNRMYDSVDAGEGAAYGPSHRGRVLAVEGPHDNVSDGVDPKPPQRASETLPALLYLPKNGKHVKINGNLVIKSIVASEKASLQMSGNDGKRPQNQEEETRLAIPGYVTPLKAGEVMESTEGMMNNELLALAPADGSMYREEDGLLPQWFSEAMSGPLLSSGMCTEVFQFDVSPSSAHPNGIIPVYSNAMSNSSQNFTQDLPPARVRTVKNRRISYSEAIPLRGSTSNDTEHLKSFGSTKPVSSVVVSVLADPREAGDGDGEGRISSKSLSRILVVVLIDSVKYVTYSCVLPFKSHSPHL

SEQ ID NO: 51302 - protein, 311 aa, Zea mays
  Clone ID: 700084995_FLI.pep
QAKKYGSLQVVCQYYQLQCPARGSTLAFHPLEHLHSLSFHRPGETVLHIAGSTIELRSRDTSLEVAEMRNALFAEEESTALSTWAVASICGCLRLEHVMTLFAAALLEKQIVIVCSNLGMLSASVLSILPLIRPYQWQSLLMTVLPNDMMDFLDAPVPYIVGVQNKTSDVLNRLTNAVVIDANRNQIKSSSVPQLPQHRELLSALRPYHSILVGESYLARKRPVYECTDAQVEGAKGFLAVLRDYLDTLCSNLRSHTITNVQSNNDKVSLLLKESFIGSFPSRDRPFMKLFVDTQLFSVHTDLVLSFYQKD

SEQ ID NO: 51303 - protein, 127 aa, Zea mays
  Clone ID: 700076642_FLI.pep
LGKEGDAENSKGEGKAKLMAEDQGKAKQMAEAPSKIESMRKWVVEHKLRAVGCLWLGGISSSIAYNWSRPNMKPSVKIIHARLHAQALTLAALVGSACVEYYDQKYGSSGPKVDKYTSQYLAHSHKD

SEQ ID NO: 51304 - protein, 528 aa, Zea mays
  Clone ID: 700086323_FLI.pep
KAHLVVVPASFFRCSCLITSSYFVLESNLPLSFYRFVISLLCLSCSFVALTMDAGSRSISSAKNRAAAVAAAPRPPLQEAGSRPYMPSLSSGPRNPSAKCYGDRFIPDRSAMDMDLAHYLLTEPRRDKENASGMAASPSKEAYRRLLAEKLLNNRTRILAFRSKPPEPENVSFADTTSSNLQAKPAKQRRHIPQSAERTLDAPELVDDYYLNLLDWGSNNVLSIALGDTVYLWDASSGSTSELVTVGEDSGPVTSVSWAPDGRHMAVGLNSSDVQLWDTSSNRLLRTLRGAHEARVGSLAWNNSVLTTGCMDGKIVNNDVRIRDHVVQRYEGHSQEVCGLKWSGSGQQLASGGNDNLLHIWDVSMASSMPSAGRNQWLHRLEDHMAAVKALAWCPFQSNLLATGGGGSDRCIKFWNTHTGVCLNSVDTGSQVCALLWNKNERELLSSHGFTQNQLTLWKYPSMVKMAELNGHTSRVLFMAQSPDGCTVASAAADETLRFWNVFGTPETPKPAAKASHTGMFNSFKHIR

SEQ ID NO: 51305 - protein, 246 aa, Zea mays
  Clone ID: 700089014_FLI.pep
VELSKQHHASDLQEKNRLSRMLEHKNALQERIIQERAAEFGRLKKERDERMNRLISSRKHERETVRKLMFYLNLEEQRIEMLREEEEARKREAEERRKREEAERKAKLDAIAEKQRLREIELEEKAKATREKLLKGSEAVRAPDSAPVAQPPRESAAAPAAAAAAAAPAPAPSKYIPKFKRGGDSSSIPSGSRDEDRWGSRGPLRQDGPPARLDAPSSRQDTDRWRGSRFPSNSTSSSSTWSRSRN

SEQ ID NO: 51306 - protein, 483 aa, Zea mays
  Clone ID: 700154401_FLI.pep
PHIEITPFPPSRPSVLCTVLPFGARVIIGRLLVLVPAGDDEVGKEVEKAEHGEQPEEVVEVAAVEVLRDPPDAAVPGGDVGDDGHQDRAEVVAERDGGERQRGAHAPHGVGRLVVEELQLPHEGEHLRAPDDEVLRYLPEDGDGHDVVLAVQAVPRDGAQPHDVQHARRHHGEDGDDEADAHALQLREPARPPGVGAHQGHDGAVVHGDPDDDADGVHHGQRRRGDLEPGPHALVQRVTLQHEHGAHLRVHRREHDPAGPDGQQPDHALELLHLRHRAQAPRARLRAVLGRHHGSPVEARQLLRVLQLAAPLDAGLPVHRLVQPRLVRGHGHVPLARARDEHLRDARQRAAPGLLVPVQRRAHEEAADGDGHDHGGDAEAPAPAHVRLHVHQHCGRHQRADVDGEVEPVEEGALALLLPLVVLVELVGAEGGHARLDPARAQRDEVQRHEHHRRLRVRRVAHILVAARRRHQPLHRRSHRQQR

SEQ ID NO: 51307 - protein, 345 aa, Zea mays
  Clone ID: 700165459_FLI.pep
LTRGRTRGGFCPAARRSASIRNGARLLHGGDPQPLLDPVEYNAMLKQKLEKDLAAIAMWRASGAAPPDLSATAASLPSVGAPHAAPLKPVGGTESLVQNMLAGAPVGGSGPHVVQIADIPVKQTTSSSSREQSDDDDMEGDAETNGNGNPVQQRQQRRKQSNRESARRSRSRKAAHLNELEAQVAQLRVENSSLLRRLADVNQKFNEAAVDNRVLKADVETLRAKVKMAEDSVKRVTGMNALYPAVSDMSSLSMPFNGSPSDSASDSTVPVQDDLNSYFANPSEIGCNNGYMPDIASSVQQDDNFVNGYQAAGKMGRTDSLQRVASLEHLQKRMCGGPASSGSTS

SEQ ID NO: 51308 - protein, 101 aa, Zea mays
  Clone ID: LIB3159-012-F8_FLI.pep
VSQPRRIDGKETGDQVGSSSHKSQDAQVGSLVNLLRNASPLRNPSNSSQISRAESSEVASASSVTSRRTSDALEELQSFKEIRERLLFRSSAKHQEPPGKP

SEQ ID NO: 51309 - protein, 268 aa, Zea mays
  Clone ID: LIB3159-008-G10_FLI.pep
TSKDQDRAQRSSSASRRRLLQPPPLLPTRAVRKKQEDTPMEVAAASAAGYGFKADDDVDSLRATELRLGLPGTEEEEAEESQNKAPPPPPSTPRGKKRDVVASSGPEDAPKKRDCETDTDAAPPPAAKAQLVGWPPVRSYRKSCFQQQAAAKNKPAAALAEEAPAAGGLFVKVSMDGAPYLRKVDLKMYKGYRELREALEAMFLCFSGAGAADAPAVNPSDFAVTYEDKDGDLMLVGDVPFGMFISTCKRLRIMKGSEARGLGSAKNN

SEQ ID NO: 51310 - protein, 377 aa, Zea mays
  Clone ID: LIB143-002-E1_FLI.pep
APSPLLCRRRAQARPLPASRLPPPTRVAVQPPAAPVATRIGSFDKVLEALIGGTDFSEEDAEATLKLLLDEKDEARISAFLVLLRAKGETFEEIVGLAKAMLSCCIRVDGLDDAVDIVGTGGDGADTVNISTGSTILAAAAGAKVAKQGSRASSSACGSADVLEALGVNIELGPEGIKQCVNEVGVGFMMSANYHPAMKIVRPVRKKLKIKTVFNILGPLLNPARVPHAVIGVYHENIVTKMAKAAQKFGMKRALVVHSKGLDEISPLGPGYILDVTPEKIEKMFFDPLDFGIPRCTLEDLKGGDPAFNAKVLQDVLAGQRGAIADALVLNAAASLLVSGKVKNLHDGVALAQETQRSGKAINTLESWIKKSNSSRD

SEQ ID NO: 51311 - protein, 506 aa, Zea mays
  Clone ID: LIB148-037-F5_FLI.pep
RIAQQEHQQQGGRHLRSGSHTAEMHESLSNGAGGTPPLPNGRAAAAGAARSRLGRDGPPSELDVMKEKFSKLLLGEDMSGTGKGVPSALALSNAITNLAASVFGEQRKLEPMAPDTKERWKREVGWLLSVTDLIVEFVPTRQTAENGTTMEIMSTAQRRDLAMNIPALRKLDAMLIGYMDNFVDQTEFWYEKGGDNKRDDDKWWMPTVKVPSEGLSDVTRKWLQYQKECVNQVLKAAMAINAQVLVEMEIPEIYIESLPKKGKTSLGDAIYRSITEETFDPLEFLAGMDLSTEHKVLDLKNRIEASTVIWKRKMQTKDSKSSWSSIVSFEKREQFEERAETILHLLKLQFPGTPQSQLDISKIQYNRDVGYALLESYSRVLESLAYSVMSRIEDVLSADAAAQNLTASEAARRALESTSAELPAARKLDAKEELEKLNEAPASMTLFDFMGWHFDQDELMKRREDGTLDADGEAMLLKKAPSMAPKKFSYVDSLSSGGMRSPSARH

SEQ ID NO: 51312 - protein, 179 aa, Zea mays; identical to SEQ ID NO: 44883
  Clone ID: LIB3152-023-F9_FLI.pep

SEQ ID NO: 51313 - protein, 139 aa, Zea mays
  Clone ID: LIB3180-036-A3_FLI.pep
AFLDYSSNQHKSIVVYRTSTTYNLGIGCTASYVHVSNSSLQEEQHLETIKARRQHPSVTFTTDARRQVAAAAAESAGLSCWFSPASSMAMASASRSADATRPSSDVRSSLSTGAGGTVAVLELPPPCSPARLVRPFCFM

SEQ ID NO: 51314 - protein, 149 aa, Zea mays
  Clone ID: LIB3158-006-F1_FLI.pep
RSAASGGRARGREDEEQHSVGDPSSPGPSGLCGRGQRTCRADDEEAVLVRRVHQLVGRVDLRRPPHQVRRHLQELRPRVHGQGGHQVQVPRLPPRKLRLQDPLETHPIPPWPRATAAQPMDPSMFLRPSALLQAGSHTNKLALVVVLYV

SEQ ID NO: 51315 - protein, 380 aa, Zea mays
  Clone ID: LIB3150-102-F10_FLI.pep
DTFFVPEDVKSHWSRHTPEGAALEADWNAKFAEYEKKYADDAATLKSIITGELPTGWVDALPKYTPESPGDATRNLSQQCLNALANVVPGLIGGSADLASSNMTLLKMFGDFQKDTAEERNVRFGVREHGMGAICNGIALHSPGFVPYCATFFVFTDYMRGAMRISALSEAGVIYVMTHDSIGLGEDGPTHQPIEHLVSFRAMPNILMLRPADGNETAGAYKVAVLNRKRPSILALSRQKLPHLPGTSIEGVEKGGYTISDNSTGNKPDLIVMGTGSELEIAAKAADELRKEGKTVRVVSFVSWELFDEQSDEYKESVLPAAVTARISIEAGSTLGWQKYVGAQGKAIGIDKFGASAPAGTIYKEYGITVESIIAAAKSF

SEQ ID NO: 51316 - protein, 83 aa, Zea mays
  Clone ID: 700201160_FLI.pep
AGSKQRGRREVSTMSALFNFNSFLTVVLLVICTCSYIKMQFPAILNDRTGFRGFFWKAARIGERLSPWVSVGCLAMGISTIFF

SEQ ID NO: 51317 - protein, 311 aa, Zea mays
  Clone ID: 700204547_FLI.pep
LIPSLPPTPAALRNGEKLVESSRAHGSFSYHHDTNRLIPSLAQEQHRLRPLFLPEPVERVVVRLLRLGLDFPRDPCWLRALDQILLVAVVAVLVPPPLLELRVAPAVAAASLVTWWWLWRGVGGAAEVEAAEALDLARDLACPLALLLQERAALQQLEHALRLARHRPSPVEASLVDVLEGGHPLDGLPVLLELDRDAAGPVREEVVQEEQRLVRLPPLPLPLPLPGVEAREAPVQDVRDPDVLVDLERLPGYEAHRLDVRRRRVPVRRLLRHELRRGDVGERQPRGADLAGEVGGGLPPELVEEGRVHGN

SEQ ID NO: 51318 - protein, 496 aa, Zea mays
  Clone ID: 700207027_FLI.pep
TQLPSLRSYPFVFVMAASVTVENLNPKVLKCEYAVRGEIVIHAQRLQQQLQTQPGSLPFDEILYCNIGNPQSLGQQPVTFFREVLALCDHPCLLEKEETKSLFSADAISRAKQILATIPGRATGAYSHSQGIKGLRDAIAAGIMSRDGFPANADDIFITDGASPGVHMMMQLLIRNEKDGILCPIPQYPLYSASIALHGGALVPYYLNEKTGWGLEISDLKTQLENARSKGIDVRALVVINPGNPTGQVLAEDNQYDIVKFCKNEGLVLLADEVYQENIYVDNKKFNSFKKIVRSMGYGEDDLPLVSLQSVSKGYYGECGKRGGYMEITGFSAPVREQIYKIASVNLCSNITGQILASLVMNPPKAGDESYASYKAEKDGILESLARRAKALEDAFNKLEGFSCNKAEGAMYLFPQIHLPQKAIEAAKAAKKAPDAFYALRLLESTGIVVVPGSGFGQVPGTWHIRCTILPQEDKIPAVISRFRAFHEAFLAEYRD

SEQ ID NO: 51319 - protein, 109 aa, Zea mays
  Clone ID: 700218535_FLI.pep
AGSWASCWTSTSSALARRPSWPEASSRSPTCPTCPTPTASPATRGPHASWSRAGTSASGGTPYPAATLGSGSRSCSARRPRRRPSDVDRSQIKAVAFAQAYVFGFCIIF

SEQ ID NO: 51320 - protein, 370 aa, Zea mays
  Clone ID: 700169969_FLI.pep
DGEREGFRVTHLGGGRPRAHVPLREGGGVPADPRRRLPRHQAHAPVPQAAAARRGAHLRGREPHPLRLQGDPPPHLPQVREAGQPVPDWHGRAGAGVHRAVAADGGAELRRAQRRDGLQPRLPAAHPAQAERQRQRRRVQRQGRHRRQQRRRVQRQARCGRVTAGGEPDQGERAEGGGDAEAVRAEEEGPGEAAGHLRAAPGGGHVPGRRQLHHRRPVAPALRGPPRLRPALPPHVRVPQERQQVVARRLRPRHLEVRQDPAAPAVHVHRRQRQERPAGPAAAPAVVHRRPRREDPTAGPERAALLAVAVPSRRRINYLRRRHRRHPSTWFLVLFVSFSYVIRVLLLLKLRSRVQGPTSPFRRLLILFVV

SEQ ID NO: 51321 - protein, 331 aa, Zea mays
  Clone ID: 700172529_FLI.pep
LLFPSPPAAAARRDAKREREETMSRWRAAAYSISAAAASRNSAAEAGALSRALAKAPSPPSLPLQTLTRNFAKSAAAATATSPGPGASSPPAGPRPEIRLKSMFLSKPCSLALPPDSPHRAVDPQYKGIKRFLLTLLLFYSKQSKSIRGANVVYDRITSQVDAPTIYDVFQLEKTFKTTFSLLVLHMWLVLRRLKEEGKDGVKFGQYIYEMYNHDVELRVSKAGVNLLLTKWMKELEKIFYGNIVKYDAAISPEARQDDLVNVIWRNIYAEEGSEAMDVAAAPAVQALARYTRREATCLSLTGKDSMFSGNFKFTALLPATPSPSPKKPVR

SEQ ID NO: 51322 - protein, 185 aa, Zea mays
  Clone ID: 700172629_FLI.pep
SCSDILVRLASSLIGCSVDPNRPSFSVIVYHMILPNKFALNLVGIYQGGVWKVRVELPDAYPYKSPSIGFINKIYHPNVDEMSGSVCLDVINQTWSPMFDLVNVFEVFLPQLLLYPNPSDPLNGEAAALMMRDRPVYEQKVKEYCEKYAKPEDAGITPEDKSSDEELSEEEDDSGDEAILGNPDP

SEQ ID NO: 51323 - protein, 247 aa, Zea mays; identical to SEQ ID NO: 37159
  Clone ID: 700208748_FLI.pep

SEQ ID NO: 51324 - protein, 261 aa, Zea mays
  Clone ID: 700212184_FLI.pep
RQPFFITYTMVDGWAGVAGEILRLKPLVIFHLKNFFLVKTEKDREEAMDPGSIGFDSSEPQIQLYFLLGLVYAAVTPFMLPFVLVFFGFAYVVYRHQIINVYNQEYESAAAFWPSVHGRIITALIVSQLLLLGLLSTKGAGQSTPVLLVLPVVTFYFHKYCNNRYKPTFVKCPLQEAMKKDTLERAREPGFDLKGYLMNAYIHPVFKGDGDDDKFSVADEPEAEQVLVATKRQSRRNTPVPSKYNGSESPSLPEIVNEQRL

SEQ ID NO: 51325 - protein, 516 aa, Zea mays
  Clone ID: 700214692_FLI.pep
FSYLVVRVLSNFSKLRQKDVPRKDYIKQLKTDIISYYGYNDFLVEALIEMFPAVELVELLEAFEKRPPECLRTNTLKTRRRDLAAALIPRGFNLDPIGKWSKVGLVVYDSTISAGATTEYMAGHYMKQGASSFLPVMALAPQEKERIVDMAAAPGGKTTYIGALMKNTGIIYANEFNEKRLHGLLGNIHRMGVTNTIVCNYDGKELPKVLGMNSVDRVLLDAPCTGTGTIWKDLQIKTSKDIEDIRNCAFVQKQLLLAAIDLVDANSKTGGYIVYSTCSIMIPENEAVIDYALKKRNVKLVPCGLDFGRPGFIRYREHRFHTSLEKTRRFYPHVNNMDGFFVAKLKKLSNTIPVTSEPSKASEEAAKVDGEDEKAISNEQETGVPDKDEKTVEIKNHKNVTNIRTSVTKENGSHKRESNKPGKHLKKNKNNATKEIDGSESSETNRGGKEEHREQTKKMSHKRKFASDRSKKSGPESFSGVKEKRQVSDKKRKKKWQFKLRRDWEAEKKGDKRRKV

SEQ ID NO: 51326 - protein, 346 aa, Zea mays
  Clone ID: 700205625_FLI.pep
QPEILRPSTQSAGSNPPSALDPRTSEIRPSPLRGQEMLLLLFFSVLAAVAAFLLFKFATVVDGDLTLVSRGPPLRERVDGKVVWITGASRGIGEVLAMHFANLGAKLILSARNKDALARVKKNILSKNPDSRVEMLPMDLSAGEESLKEVVHVAESFFSNAGVDYMVHNAAFERPKRRALEESEEGLKATLNVNVFGTITLTRLLAPYMLDRGMGHFVVMSSAAGKVPAPGQAIYSASKHALNGYFASLRSELCTKGIKVTVICPGPIETLQSSAAASSSQTHSAEKREKRVSVERCVELTIVAATHGLKEAWISYQPVLTVMYLVQYMPTIGYWLMDKVGAKRLD

SEQ ID NO: 51327 - protein, 372 aa, Zea mays
  Clone ID: 700221260_FLI.pep
VLSNTSQELSSSSNDGAAIEFSESTGSVKTEQTEKSDTDFFEALPRSIENISVSASTTNTGSLGGDGSEKSKPNLVLSNIDLREMPNKKLSASAPPFNPSPPSVLSPLSGNVGLPPPGAIPGVAPWPVNVSLHPGHSTMVPSGPPLCTSPHHLYPPAPRSPNLMHPVPFIYPPYSQPQVVPNTTFPMNTNIFRPNHYGWQPYMGPAPSEFVPMSAWSSSHTIDFIPTPHVVDPISQSLADKHIQSDAAVVSIGPSLDSSAVVAKEEMETPAVAVSGNLISNKHDDQDKQLKDATRIELSPEMQEDNKHDEGSFRIYVKGKSRRKQTLRIPISLLNKTYGSRSFKLVYNKVVRENDIFRPSSVSFAEVVSSGN

SEQ ID NO: 51328 - protein, 325 aa, Zea mays
  Clone ID: 700171701_FLI.pep
GSDSQNPMGCIGGKDGCQGRSMGSSVTISGMSTAAPAIWSTSRTPPSDCRRPASSAWRARSTALSPSTLPRSRSSAAVRACVAAFSACRRATSATSSSSRCCFRARDRRADSLLDSIRFRLRSSVVSLLSGLELRRDDDMDACLVGLNLFGGGWGGGRMGRNKSPRDGFKRLSKRERERERERETAKDQQVERGDAFMRRRRTSRGRRRRRSGSGGYGARSASSEHGGRQRNWWVNMGVGTVCSSDGRIYAGTGGGTGEQEFEETRGAGCKSSFTERRVLDLDGSQIERKKQEKREELRGPECKKKRGGRDLAEREERHSLSFIR

SEQ ID NO: 51329 - protein, 662 aa, Zea mays
  Clone ID: 700171733_FLI.pep
AAYNLTYSRLQLICPRGMATASAASSFLVPATAIAPTPSACPSTVPKNKKNAAGRRRRTLQCRASGRRGDDEDSRLLWLPRREVLTGLGGVAASFVGYPDLASIALEANPVESCRRGEKVTEKLVECSDPNRDFPCPPASRVPIVDFTPEARVTRVRRPAHLLDPEYQEKYREAVGKMRALDGSNPLSFAAQAAVHQSYCDGHYRLDPTEKNRPFDVHFSWIFAPWHRMYIYFYERALGQLIGDDTFALPYWNWDAPAGMGIPAIFKQGVSTADNPLYDPYRNMENMDALLDLDYLKKPRRDTIPFEPPTDPAARAKYDDAVQTNLCTIYLQQVRDGKGPRAFLGEKLCSESSFRVKEINERSKRRQADGQSSKVSPSKSQSQGTLERMAHTTVHVWTGRANPATCSAEQGGVVGHDGKPHCQVDMGFLGTAGRDPLFYSHHANVDRMWHIWSTRLGGKGFDDPEWLDTSFVFYDDYRSPRLVRMKFRDVLDATRLGYTYDKESEAALPWLNSKPTRFSGGGKAKAKAAPKVASEFPLTLTDEAVDVPAVAVPARQAGKDLVLLIEGIEYDPQINNKFDVVINVAREDAARVGPKDSEYAGSFSAVPSSNAAGGTLVGKFTLALDGVLADLGLAGASAVDIVLVPHTEGEIKLYLPPTIENA

SEQ ID NO: 51330 - protein, 277 aa, Zea mays
  Clone ID: 700213232_FLI.pep
AHLENELKKKSGQLDRSNATVQRLEMENAEIRAEMEAAKLSASETEKQCQGLLRKEKKDSKRLEVWERQKAKLKEDIAECKTNITQAERELAEVNKAIKNMEKKMREDTRVKEENMVLLEDERRKKEAAKADNDRRLEELRRKKEVESECYKDDLHRLQDELSRLQKSAGATQTAVPSANFPGTANRSAAQAAKQQAILRPQPASNRSLPPPAQKPSRRRDCVACKKAAACVILLQCAHQVLCVGCNKLHEDKGITRCPCCSAEVEERIRVFGASSN

SEQ ID NO: 51331 - protein, 641 aa, Zea mays
  Clone ID: 700213413_FLI.pep
VLTGHRRTPWVVRYHPLHSDILASGSLDHEVRLWDANTSDCIGSQDFHRPIASIAFHGSGEILAVASGHKLYIWNYNKRDGTSVPAIILKTRRSLRAVHFHPRGAPYLLTAEVNNIESADSPLTLARSSGYLNYPSALLVTNTNSRFCTLPESNVVSPCLLWPAYLRDGGILHVLGNDSSSTIVQQRSSLVQPSTSDTANVQLEQFATPMDVCPGEPTSSNDIPDAVTVPTSNGNEMHGAGGQSNSRLQGSSSTSNLERFSARDDLQVSSLSRTDPIPLTAGPSGSDLHRAMPLNMLLTGGLDVQMFLRNVGSGQQDHSLFGDSRNWEVPFLQGFLMAPNHAGASSSIPLTTGSSRGPNRRYASRSVPGVGNLLLGPQIDEAEAHAVSLGAGSEITASMLAPGTELPCTVKLRIWRHGTNEPCVPLEPEACCLTISHAVLCSEMGAHFSPCGRFLVACVACLLPQTEDDRGSQLPVSYEGAGSSPTRHPLPSHRVIYELRVYSLEAETFGDILASRAIRAAHCLTSIQFSPTSEHILLAYGRRHSSLLRSIVVEGENGVPVYTILEVYRVSDMELVRVLPSAEDEVNVACFHPSPGGGLVYGTKEGKLRILQHNGADMTNMGVGCFIEENMVEIQRYALEC

SEQ ID NO: 51332 - protein, 245 aa, Zea mays
  Clone ID: 700203247_FLI.pep
PVVHDSSFRPVHYVQLAPSLQLRSFVALQSSKNKKPRKQKEGISCNATTGRVTDLTVFALNISAPVPAAIANLTALQSVNLAYNQLYGSIPAFLGPRALPDLTFLRLDGNRLSGAIPPTATVFNLLLVGNRLTGPIPAAFAGAAFGDVELSDNQLTGDASALFGAEKPLNALSLSRNRFRFDLGRVELPEAMDILEIDHNMVYGSIPAAAAERKWLAFDVSYNQLCGPIPQGRYTHRFGAKHFAG

SEQ ID NO: 51333 - protein, 131 aa, Zea mays
  Clone ID: 700219964_FLI.pep
AEAKSCTHPVVGFQLQLQPAAAVHLFTNEISLDACLPRRLIGSPNNSHLERAWLITRRWSPCPSAAGSATATAATPRWRCSASPRASRPAPAPRTAGSTARPPPTAAAPPPWPGSAGRSPSPSAPTRRSGR

SEQ ID NO: 51334 - protein, 106 aa, Zea mays
  Clone ID: 700167208_FLI.pep
PRKPDMESSGKGSDGSCTSSVKSDFENGKDFGKRSRHRCFVVTARARSFLYHQVRLMVGLLKSVGTGDLTTADVERILDAKTVTAAPSMAPSCGLYLANVKYDLNT

SEQ ID NO: 51335 - protein, 165 aa, Zea mays
  Clone ID: 700195606_FLI.pep
NLSIPATTGDSRCRPTPGPQVYVGPFAAANTTRDLSLILQSSCQMASTGRSMLLSLLLFAVTLSLLEMYRAKFASSELMTIAGGFVCSLLFLLLLTFIGNYQEASGDRTGWGAVVVAQLVALIVAGTVHRVCITTCFLFSAGLLYEVDKLSGMILARSESKVRRH

SEQ ID NO: 51336 - protein, 113 aa, Zea mays
  Clone ID: 700212031_FLI.pep
TKVADVWLCGVMPYVMLTITIPEIRNHPWFLKNLLADQMDDNTMSKQYEEPEQPMQSMNEFMQILVEATIPAVGSRGLNQFLNDDIDLDDDMEDLDSDAGLDLESSGEIVYAI

SEQ ID NO: 51337 - protein, 228 aa, Zea mays
  Clone ID: 700213881_FLI.pep
YEKEIWPLPNFQSITLIVITITNRPSNESNASKQMTKSCPWIQFFPNRKPLLDTCRTNSDNLLFPLPPTHPALQIPTAFTLVLGSHFPLGHQTPKLSVCLRSPTCSVWLPSATFLLPSSSTTLRSLHTSTLNATTPACPGSSDTFSKPSRCFAGALCTAGGDENRNTVCPPDLSPAFRTRRCTSNARPSQCAPSASTDGHCSVRHVWPSASCRATCLGAETRWCAKLV

SEQ ID NO: 51338 - protein, 278 aa, Zea mays
  Clone ID: 700217784_FLI.pep
AAISPAPSNSRSLEASGDLTSSRQQQGFPSAASAAGAMNSSKQALIYSFVAKGSVVLAEHTAFSGNFSTVAVQCLQKLPPNSTRSTYSCDGHTFNFLVNRGFVFLVVADEAAGRSVPFVFLERVREDFMQRYGSSIDEEGQHPLADDADEDDFLFEDRFSIAYNLDREFGPRLKDHMQYCVNHPEEINKLSKVKAHLSDVKGIMMDNIEKILDRGEKIELLVGKTETLQSQADSFHRHGRELRRKMWLQNLRFKLMVGGGIAALILIIWLMVCRGFKC

SEQ ID NO: 51339 - protein, 272 aa, Zea mays
  Clone ID: 700217955_FLI.pep
EPCHSRARIILTMVIAIVTLLDDIFDSFATPQECEILTNCIESWDPKGAQDLPGCMKFALEKILDSYQTITNMLHREDKYRMTYLRHFTEDLVRIFNMEVKMLQKGYIPDSVEEHLKVSLRTGGCPILSCACFVGMDDIATKDFFDWISSVPKMVRALSIILRLADDLHSYEREQLIPHVASTIDTYMKKHNVSIEVAQENIYKLKEESWKDLNSEWLNPCNDVYPKQLLERIFNLARTMEFMYNQEDNFTNCHNLKDTIRCLLVEPYTIHI

SEQ ID NO: 51340 - protein, 244 aa, Zea mays; identical to SEQ ID NO: 38206
  Clone ID: 700201877_FLI.pep

SEQ ID NO: 51341 - protein, 164 aa, Zea mays
  Clone ID: 700205048_FLI.pep
RDAPVAPARPRLLGAGLRHRPLRPGGAPGVLQPQGPHSQEHRRGAPLRLDGAAVQGRQPRRLGVPLPHRVPFLHGDGHRLRGRRRPRRSAPATDHGVRENQGWPLTDVVQNLNSTTVDPFRSFVSYYYSPSNKICMGIFFITILYDSGTMPCASFYRHCTVLDR

SEQ ID NO: 51342 - protein, 204 aa, Zea mays
  Clone ID: 700218879_FLI.pep
AAAFTVHRLPLYSFLSLILSKNAEPRPTNSQQASSHGRPRNELPAEHAAAATARSVLGEELAAVRGARGAPGADGGGGGQGVQCADPGGRERGGGVHLSQVPAGGDARRRAAGDQAPPEVREQDRREEAQGARGRTPQPSQAYDGRAEVPRRRRRRDLQGSGRGQRQLGGRRHPVKQKERMQSTVQFHSVQMMHSTDPSNSSSF

SEQ ID NO: 51343 - protein, 302 aa, Zea mays
  Clone ID: 700220858_FLI.pep
DDFSLELSKLHTYDDVVERVARQLELDDPAKIRLTPHNCYSQQPKPQPVKYRGVVHLSDMLIHYNQTSDILYYEVLDIPLPELQFLKTLKVAFHHPTKDEVVIHSIRLPKNSTIADVIYDLKTKVELSSPNAELRVLEVFYHKIYKIFPLHEKIENINDQYWTLRAEEIPEEEKNIGPNDRLIHVYHFKKDINQTQQIQNFGDPFVLVVHEGETLAEVKKRIQSKLQVSADEFSKWKFAFISMNRPDYLQDSDVVPTGFQRREVYGAWEQYLGIEHADTAPKRVYTVNQNRHAYEKPVKIYN

SEQ ID NO: 51344 - protein, 117 aa, Zea mays
  Clone ID: 700168432_FLI.pep
KPDVRFVIHHSLSKSMETYYQESGRAGRDGLPSECILYYRPGDVPRQSSMVFYENCGLQNLYDIVRYCQSKRSCRHGAFFRHFGEVPQDCNGMCDNCASSIEQKDIDVTCMIYFASV

SEQ ID NO: 51345 - protein, 336 aa, Zea mays
  Clone ID: 700159716_FLI.pep
IMMPYPEDVTLSVQLLSFACGGFSVVWANNNLLNDGNAITMCVRMWSELARTGGSIATVGAVSVNHDRSMFRPRNPPAYSDALDAMFATYDDHRTVNALTAAASFVERLYYVEAADIAKLRDMATVTELQRPSRVQAVSAYLWKVLAAVVAACRVPEERCCMGWMVDARRRVKSPELIPAMRNYFGNVTAYALGGAAVEEIRRKPLAEVAAMVRDTITSIDYDEYLQELVDWVEVHKTEHVMEKGVLGLGSPTLNQTVFASFPLDTNFGFGDAALALPICDYGRLCSGYLSVGARPGGDGSWLLSAYIWPQMAAALESDGVFKPLTAEYLGLTVTP

SEQ ID NO: 51346 - protein, 331 aa, Zea mays
  Clone ID: 700052228_FLI.pep
AKKAKPDVTSPIGSLSEHKRSLPPEKHTNDRLNKETGNVSRDASRDSSPAMKGRPSAPGNLQRIDQSPNLPIPTMHSEGTKGNAVKSSSKKKSDKMQKPWHGIDGDFGSCYSHGVDHHANFDGSDDSSTRKRSRHENPLIDDKMLKHSKDTNANINSMNLTKSSREIVVPDEVTAFPESNESNGEPSNSQRDNVEKSPYGKKKLQRELSDLELGELRETSLENDDGRIRKQFERNSSSKSLDAKLTGVNNFYPSINDRKTPVTVFHDKRKPSPQEYGNRGHVNQEGFQRKAAVYAFDDNRPQQRENFPESLHLPKIDNSDSENIMYPDRSG

SEQ ID NO: 51347 - protein, 293 aa, Glycine max
  Clone ID: 700833812_FLI.pep
GRWRVDREEKKMSQQQRSTPAPFLTKTYLLVDDPATDDVVSWSEGGNTFVVWKHADFAKDLLPKYFKHNNFSSFVRQLNTYGFRKTVPDKWEFANEYFKRGQTDLLAEIRRRKVVSPVTGKSTGGGVNISASHSGGDDMGSTSTGSMEAATAAGADISGENEKLKKDNEKLSGELALAKKQCEELVAFLRDSLNVSPDVIERIIRQGTCVSSNNDAVRFDAIINNDLDDDENAVGECEPQQPPPKGDNGESLKLFGVWLKGQNGKENSIGKCRKRGRQDYPIAAPAKELKTLV

SEQ ID NO: 51348 - protein, 195 aa, Zea mays
  Clone ID: 700223753_FLI.pep
IAGIPEAHTYYNRLQNNDLQLIQPTTAEEEIQLSQPPNLEDKTVEELLNIDPDMFPEEGCTVTISSIVQNSRWWYPSCSRCHKSSSQTSTGYHCTSCGCTNIKFRYKLSFIATDGTCEAEFFCFDSIARKIVGEPWGNLVTAVTTSESPSSPSRYCVSEIYSCSCHQYVSLLCHEQSILYSIYFNKSWKTDLHTI

SEQ ID NO: 51349 - protein, 429 aa, Zea mays
  Clone ID: 700239741_FLI.pep
PSSEQEALSMSEYQRGVSAWNFDIEDLKAQASLICDDDPPEIKEDDDTGRITDIDKDTSSDDYFGKTAPSNGNNCSDRSSVPANPGQNGPEINEILSSNNGNAYSERKPDGRKNPESENDSLPSTSKHDADGKDYRCDFRQKQRTYSGPVLQSGPNNSSMTERGHIIERDAGVQSVSDKQKNGTRRANNLSGPLSLPTRASANSLSRANNLSGPLSLPTRASANSLSAPIRSSAGYVGSLGDKPKRTMVEIKGRFSVTSENVDLAKVQEIPGSSASRKLQEGPSLRKSASVGDWSANDKTTSTNHQRKELCNSSVSTSILIPHLQNLVKQTAFQQDLITNLLSSLQQNERVDAQSRVQSTTSDTVVEAATAEREHSLLVKIFELQSRMISLTDELIAAKLKHVQLQEELNVLYCQEEILDMREDESEEA

SEQ ID NO: 51350 - protein, 396 aa, Zea mays
  Clone ID: 700243054_FLI.pep
NKGGDMEEEGHGIVIVGGGICGLATALALHRKGIASVVLEKSETLRSDGAAIGVHANGWRALEQLGVAAELRETADLITGTHDVWQVANKTAQQVPVRKELRCLKRKDLMETMAKNIPAGSIRFGCHVVAIQQDPGTNGAILTTVDGGTIRAKVLIGCDGGSSAVAKYLGLSEPKAIPRTVLRGFTGYPHGHPFGTEFLRIRSGGEFAVGRLPVTRNLVHFFVTGPNPPTGMVTNKDVSATKDFMLEKLRGCAPEIVEMVQDSDPESLNVVNSIRYRPPWQVALGTFHRGAVTVAGDAMHAMGPFIGQGGSSALEDAVVLARSLSRAAAGAGGHGAAVREYVRERRPRVALLSLESFLAGTLLRARSLVGKLACLAVLALLGTRSLRHADYDCGRL

SEQ ID NO: 51351 - protein, 622 aa, Zea mays
  Clone ID: 700244389_FLI.pep
HGSKRPRRAEEEEQEEEEMEPLVGEEEEVAALEGEDYCFVCKDGGDLRVCDFRGCQKAYHPACVGKDSGFLNSDEEFICEWHTCFICKGRSRYYCFCCPWQAFCQNCVKQAEFVPVLRKTKGFCTNCLRMAIMIEKNVDVDSDGERVDFNDRATYEFLFKEYWEEIVKGKESMTLDKLEKAYAFLKEKLNCKQDLDLEKVHDEEHSSDDDFVGNSDDDDDNKPSSTTKFNGTSNTMKFFLREDRPMKNGYVGWGSKELMEFLSSIGKDTLNSLDQHGATEVVKVYIQQKGLLARDKKKLVICDDKLKILFRRSKVRYNRIYSLLGKHIAVNMTSEDETFANSDDNNETFVRKKARIGNYSSSTPKCTPEINKRCFAALVRHNIDLIYLKKSLVVDLLREPDTFGSKVIGCFVRIKIDLNDYSFYMHKKVHQHRKLYQLGLVTGTSKSPEEYKINDVSTDILLCISSIPDIKISSLSDEEYEEEECQDLRLLAKNESFKRPTVGDLEEKARSLRREIVNHWISKELQRLERLIDRASEKGWRKEKFEYLDKKQLLRKPSEQQRLLEEVPQVIPETEDNKDTEFQVTGQDKPIQKSTVALQGTNGESIVSLKKGSEEKCKHLLL

SEQ ID NO: 51352 - protein, 338 aa, Zea mays
  Clone ID: 700237487_FLI.pep
AAQRPHLPRSRLRLCPAGLRSPRRPPACPSLLAAMNNLLTDSFELPRRDSSRDADIEMGMHQADASDNLKDFLKKVDAIESIIAKLSNLLNKLQTANEESKAVTKASSMKAIKQRMEKDIDEVGKIARQAKTKVDELERDNLSNRQKPGCGKGSAVDRSREQTTGAVKKKLKERMDDFQTLREAIRQEYREVVERRVFTVTGNRPDEETIDDLIETGKSEQIFKDAIQHQGRGQILDTVAEIQERHDAVRDLERKLLELQQIFMDMAVLVEAQGDMINNIETHVSNATNHIQQGVSALQNAKKLQKNSRKWMCYAIILLLVIVAVIVVAVIQPWKKGA

SEQ ID NO: 51353 - protein, 296 aa, Zea mays
  Clone ID: 700169133_FLI.pep
GAAATSLPPQLSSPPPVLHTAPLLDVAGRINTKNRREEETPQPHYHERELGGPGLLPLHRLTLKMAAAASMAARSRALVASRRRMGGPPRLLVVSCDARTADAYCSLAAKILGPPTTFNAAKLKVEFAGEELRPPFPRAYTLTHCDLTANLTLGVMSSEQLRKSTLQRDDVVAEWKETAGEMTLQVHCFVSGANLLQELAAGFRYYVFSKELPLVLKAVVHGDAALFADRPELMEAKVWVHFHSSSRKYNRLECWGPLWEAATTTRRNHHLLELDQLQSAITKKKTIFNALLALLL

SEQ ID NO: 51354 - protein, 326 aa, Zea mays
  Clone ID: 700083474_FLI.pep
GDLKPENFLLATKEENAMLKATDFGLSVFIEEGKMYRDIVGSAYYVAPEVLRRSYGKEIDVWSAGVILYILLSGVPPFWAETEKGIFDAILHEEIDFESQPWPSISESAKDLVRKMLTRDPKKRLTSAQVLQHQWLREGGEASDKPIDSAVLSRMKQFRAMNKLKKMALKVIASNLNEEEIKGLKQMFMNMDTDNSGTITYEELKAGLAKLGSKLSEAEVKQLMEAADVDGNGSIDYVEFITATMHRHKLERDEHLFKAFQYFDKDNSGFITRDELESALIEHEMGDTSTIKEIISEVDTDNDGRINYEEFCAMMRGGMQQPMRLK

SEQ ID NO: 51355 - protein, 182 aa, Zea mays
  Clone ID: 700421620_FLI.pep
QIFCTSEWVLGTREDLVKDIVAELRPDLGEEWWTYVCMGPSDPQPNWHLGMRGTQHRAVMWRVWKEGGTGFLYWGSNCYEKAMIPSAEICFRRGLPPGDGVLFYPGEVFSSSHEPVASTRLERILSGMQDIEYLKLYSSRYGREEGLALIEKTGMYLGPDRYTLDHGPVDVMRGEVYRTCRS

SEQ ID NO: 51356 - protein, 358 aa, Zea mays
  Clone ID: 700168616_FLI.pep
PPPVATVPLGTGNNLPYSFGWGKKNPGTDYDSVISFLQLVRESREMNIDSWHIVMRMESPKDSPCDPIAPPDLPHSLHAFRRMPKTDPQDMEYSYTYRGGFWNYFSMGMDAQVSYAFHSQRKLHPEKFKNQLSNQKTYLKLACTQGWFCASLFHPMSRNIACLAKVKIMKKSGKWETMEIPQSIRSIVCLNLPSFSGGLNPWGTPSKRKQRKRDLVMPPLVDDGLLEVVGFKDAWHGLVLLSPKGHGTRLAQAHRVRFEFLRGATDHAYMRMDGEPWKQPLPTDDGKVVVEISHAGQVKMLATKDCIAKGVHDHESCPAISTVHPESIYNDMNDDFEEERRNFGAALSFRYLSDVNKQ

SEQ ID NO: 51357 - protein, 179 aa, Zea mays
  Clone ID: 700201269_FLI.pep
TLLAARVVWRGRREHGVGRGPVFNLEGHGQAEGQMRVQVAVHDPDARVVRCEADDGPATARDGDGVALLRVDEIVLADVPVRVEVARALRQHEEVEAVEVQRVVLGAKDGCVLQHHLHRLVVPQRLHLGALGREHERPVGRRGVAREVEHHRRPVGEVARVHAVRRAPHVRLQQRHGRR

SEQ ID NO: 51358 - protein, 58 aa, Zea mays
  Clone ID: 700470690_FLI.pep
RRGRWWGVVADAEAREGPPFLASYAMLAIASGDWFLARSRELRTCLLFCDADPSVSLC

SEQ ID NO: 51359 - protein, 239 aa, Glycine max
  Clone ID: 700847620_FLI.pep
GGSSWQAQYVLPAVQNVYQAIRAQGLHDQIKVTTVIDTTLIGNSFPPSQGSFRGDVRSYLDPIIGYLLYAGAPLLVNIYPYFSYSGNPRDISLPYALFTSPNVMVWDGQYGYQNLFDAILDSVHAAIDNTRIGYVEVVVSESGWPSDGGFGATYDNARVYLENLVRRSSRGSPRRPSKPTETYIFALFDENNKSPEIEKHFGLFNPNKQKKYPFGFGTKRNEKVVIDDFNATISLKSDM

SEQ ID NO: 51360 - protein, 137 aa, Glycine max
  Clone ID: 700850128_FLI.pep
TDNSGTITLEELKAGLPKLGTKVSESEVRQLMEAADVDGNGTIDYIEFITATMHMNRMEREDHLYKAFEYFDKDRSGYITMEELESTLKKYNMGDEKTIKEIIVEVDTDNDGRINYDEFVAMMRKGKPDLVTNRRRK

SEQ ID NO: 51361 - protein, 288 aa, Glycine max
  Clone ID: 700605438_FLI.pep
LTMAAFRWKSFEENEDRPAKPRHFGVTEIQSPHCTLFSHNLLQDIFESMGDYVDGLKFSGGSHSMMPKATIKQIIDMAHQHDVYVSTGDWAEHMISKSPSGFKEYVEECKQLGFDTIELNVGSLEIPEETFLRFVRLVKSGGLKAKPHFQVKFNESDIPKGGDRAYGAYIPPVPRSFELVEDVNLLIRRAERCLEAGADMIMIDADDVSKHADNMRADIIAKIIGRLGIEKTMFEASNQRISEWFIKQYGPKVNLFIDHSNVVDVECLRGRNLGRNLASFLGASDFLF

SEQ ID NO: 51362 - protein, 496 aa, Zea mays
  Clone ID: 700577916_FLI.pep
HGVPKVHYKGRQGDYYVMIMDMLGPSLWDSWNSLGQSMPSEMVACIAMESISILESMHSKGYVHGDVKPENFLLGQPSTPHEKKLYLVDLGLATKWRDTANGQHVSYDQRPDAFRGTVRYASVHAHLGRTASRRDDLESLAYTLVFLHRGRLPWQGYQGDNKSFLVCKRKMSTSPEALCGICPQPFKEFLEAVVNMKFDEEPNYSKLISLFDSLIGPIPSIRPINTDGAQKVGQKRARLLNDDDDHVKKKIRLGAPATQWISVYNSRQPMKQRYHYNVADARLAQHVEKGNEDGLLISSISSCANLWAIIMDAGTGFSAQVYELSSHFLHKEWIMEQWDKSFYISSVAGSNNGSSIVVMSKGTPYTQQSYKVSDSFPFKWINKKWKEGFHVTAMATSGNRWAIVMSRSAGFSEQVVELDFLYPSEGIHRRWDNGFRITAMAATMDQSALILSKPRRRPRDETQETLRTTQFPSQHVKDKWAKNLYLAGICYGRTVA

SEQ ID NO: 51363 - protein, 300 aa, Zea mays
  Clone ID: 700579019_FLI.pep
LVPYYLEEEANWNLDFANIRQAVAEARSKGITVRATVIINPGNPTGQCLSEANIRELVRYCYHENLVLLADEVYQQNVYQDERPFISARKVMFDMGPPISREVQLVSFHTVSKGYWGECGQRGGYFEMTNLPPKTVDEIYKVASIVLSPNVPGQIFMGVMVNPPKPGDISYPKFTAESKSILESLRRRARMMTDGFNSCRNVVCNFTEGAMYSFPQIQLPARAIEAAKRAGKAADVFYCLKLLEATGISTVPGSGFGQKEGVFHLRTTILPAEEDFPTIMSSFKKFNDSFMEQYEGYSRM

SEQ ID NO: 51364 - protein, 137 aa, Zea mays
  Clone ID: LIB3076-001-H6_FLI.pep
TLPTLSRCLVELEGLHHLPGEVGVVTAEVAVGGGLDEPVAALLQVEVDADHPGPEVEVLLHDLEDLLVGDRAGAVRVDEHGQGLRHADGVRHLHEAAAGEAAGHDALGGLPGHVGAAAVHLGGVLAGEGATAVGSPA

SEQ ID NO: 51365 - protein, 169 aa, Glycine max
  Clone ID: 700873548_FLI.pep
LMLCPWFMGQVFTEGKNMVYMTYMGWAIETSNGKGKVEYVGSPDIMVVVLPHLLFVVLPAILVTGALTAERAIYREHMLAFLVKKKDDICMDSRKSVLNGSMVSNVHLSKRLIRKLLFVVCLAICWKHFMNCRTLLKAYEMNPVLHFLGYGISIPLLLAHAISKTRSAE

SEQ ID NO: 51366 - protein, 460 aa, Glycine max
  Clone ID: 700841876_FLI.pep
HNSYLTGNQLSSDCSDVPIIKALQRGVRVIELDLWPNSTKDDIDVVHGRTLTAPVSLIQCLKSIKEYAFAKSDYPVIITLEDHLTPFLQAKVAEMIAQVFGDMLYFPQADSLTEFPTPESLKGRILISTKPPKEYLESKQFKDSDSERESTEEGSLSPCVIPELEAVDEKLNGSDLDEEGLNARDKKSDQQSAPEYKRLITIHAGKPKGHVKHHLNNVGGVKRLSLSEQELEKASATYGSDIVRFTQKNIIRVYPKGTRVTSSNYRPHIGWMYGAQMVAFNMQGHGKSLWYMQGMFRANGGCGYVKKPAFLIEKGPHNEVFDPKRALPVKKTLKVKVYMGNGWSSDFSKTHFDSFSPPDFYTKVCIVGVPADKANKKTKVIQDNWFPVWDEEFEFPLTVPELALLRIEVREYDKHEKDDFGGQTCLPISELRSGFRAVPLFDQKGEQLKSVKLLMRFQFK

SEQ ID NO: 51367 - protein, 172 aa, Zea mays
  Clone ID: 700582207_FLI.pep
ANIRIVNKFLNGEVGPKTIHVPTGEKLSVFDAAMRYKSEGHATIILAGAEYGSGSSRDWAAKGPMLLGVKAVIAKSFERIHRSNLVGMGIIPLCFKAGEDADSLGLTGHERYSIDLPTNLSEIRPGQDVTVTTDNGKSFTCIVRFDTEVELAYFNHGGILPYVIRNLAAAHN

SEQ ID NO: 51368 - protein, 185 aa, Zea mays
  Clone ID: LIB3067-036-E10_FLI.pep
LSKQTQVQCGFGRTGHLWAHEAYGVEPDIMTLAKPLANGIPIGVVLVKEKVAAAINYGDHGTTFGGGPLACQTAITVFDKITRPGFLAEVSRKGESLKLLLRAKLSGNPHVREVRGVGLLVGVELDVPAGPLVDACLDAGVVVLTAGKGNVVRLVPPLIVSEKELEHAADVIRDCLPALDVVAAA

SEQ ID NO: 51369 - protein, 196 aa, Glycine max
  Clone ID: 700898156_FLI.pep
NQLTVLVSVPVIRITRIWKLNQRFYALRAVVPNVSKMDKASLLGDAILYINELKSKLNVLDSEKTELEKQLDSTKKELELATKNPPPPPPPPPPPGPPPSNSVEPKKTTSKLADLELEVKIIGWDAMVRIQCSKKNHPAARLMAALKDLDLEVHHASVSVVNDLMIQQATVNMGNKFYTQEQLLSALSSKVGDELR

SEQ ID NO: 51370 - protein, 75 aa, Glycine max
  Clone ID: 700665357_FLI.pep
HCKSKFSSHVFTGTKSQQLRQHSSLDICRVVDLLILNRHPIRNFQFQARFCSNSHLPLQSNISPKPHITSHHQTV

SEQ ID NO: 51371 - protein, 225 aa, Glycine max
  Clone ID: 700751669_FLI.pep
RNVMEEISNISCQCYRNVVYENPEFLAYFHEATPEAELGFLNIGSRPTRRKSSVGIGHLRAIPWLFAWTQTRFVLPAWLGVGAGLKGACEKGYTEELKAMYKEWPFFQSTIDLIEMVLGKADIPIAKHYDEVLVSKERQELGHELRSELMTAEKFVMVISGHEKLQQNNRSLRRLIENRLPFLNPLNMLQVEILKRLRRDDDNRKIRDALLITINGIAAGMKNTG

SEQ ID NO: 51372 - protein, 198 aa, Glycine max
  Clone ID: LIB3055-012-B3_FLI.pep
KRGRKPANGREEPLNHVEAERQRREKLNQRFYALRAVVPNVSKMDKASLLGDAISYITELKSKLQTLESDKDGMQKQLEGVKKELEKTTENVSSNHAGNSSSCNNNNKLSNQKLIDVLEMDVKILGWDAMIRIHCSKKNHPGARLLTALMELDLDVHHANVNLVNDMTMLQATVKMGSRFYTQEQLRAALAAKVGDAR

SEQ ID NO: 51373 - protein, 140 aa, Glycine max
  Clone ID: LIB3051-039-A12_FLI.pep
VGYILLAMAMPGSLYIGSILVGMCYGVRLAITVPTASELFGLKYYGLIYNILILNLPLGSFLFSGLLAGILYDMEATTTEGGGNTCVGGHCYRLVFIVMTGACIVGFFLDILLSIRTKNIYTKISTSKKPKKSLGTSNRQ

SEQ ID NO: 51374 - protein, 176 aa, Glycine max
  Clone ID: LIB3051-039-B6_FLI.pep
YKAQITEELVMFTQASSRARTPGSCFPSRSSKLAPPPVEMWLILSARPTFSTAATESPPPMMVVTPFPLSSASFLAMASVPVANLSNSKTPIGPFQMTVWVLSNASPNVLMESGPISNPIHPSGMLDAGTVLLLASAANLSAMTTSVGSNKETPLALAFSRSVVARLSLSSSTRDE

SEQ ID NO: 51375 - protein, 92 aa, Glycine max
  Clone ID: LIB3050-012-F12_FLI.pep
IDRTKTMADVYGAFFDFASMLEPKVDKNGPNATKTLSRLEAIQKTCRESGLLSKRKSYIVNDESGYGSTMIVILVIMVSIIFAYLSANHHNS

SEQ ID NO: 51376 - protein, 285 aa, Glycine max
  Clone ID: LIB3030-010-C10_FLI.pep
AHWEESRKFSQSYTIERGSSTNKGTTSSSHSASVDQVEYHELPSDEGQVQVTSDDKLPREEEKNLLQAMCTVDFWMLFVIMISGLGSGLATINNMSQIGQSLGYSAIEINNLVSLWSMWNFLGRFGGGHVSDYIMHRKGWPRPLLMTVTLGIMILGHLIIASGFQGNLYLGPVLVGICYGAHWSLMPTITSEIFGVKHMGTIFNTIAAASPLGSYILSVRVVGYIYDKQADKEDHSCFGINCFMPSFFILAAVAFLAFLVGLALFFRTRRFYKQVVLRRLKHYAR

SEQ ID NO: 51377 - protein, 293 aa, Glycine max
  Clone ID: LIB3029-003-F3_FLI.pep
PLLYKNNISRQRPYLAPNMSSLNLGTWPRPTSMLNTPSHLLPPFHTLTLTTTLPKLASGTPKLISSFPLVSAVPTKEHTVTTQEIQLQDTPLNFDFKGYMIAKAHTVNQALDAAIALRDPHKIHQAMRYSLLAGGKRVRPVLCIAACELVGGTEATAIPAACAVEMIHTMSLIHDDLPCMDNDDLRRGKPTNHKVYGEDVAVLAGDALLAFAFEHVAASTEGVSPSRVVRAIGELAKSIGTEGLVAGQVVDIDSEGVANVGLETLEFIHVHKTAALLEAAVVLGAIVGGGSDE

SEQ ID NO: 51378 - protein, 101 aa, Glycine max
  Clone ID: LIB3050-014-E7_FLI.pep
RSENPQILDRQLHINLLVRIIAYELEISSHKRIYIFLLWIYLQSWKRLWLVMELLLQRPHVIAVNMSIPNNMNKITRNEITNMSNHACQKGIRCNIKWNAQ

SEQ ID NO: 51379 - protein, 454 aa, Glycine max
  Clone ID: 700839502_FLI.pep
VFVLPSTILLIKPLIIEIWKKGSEILATECVITEICLHPGLVLLMGACWSNRIKSVSPSNTGITSRSVSRSGHDVSSNSRSSSASISVASRSEGEILQSSNLKSFSYNELRAATRNFRPDSVLGEGGFGSVFKGWIDEHSLAATKPGIGMIVAVKRLNQDGFQGHREWLAEINYLGKLQHPNLVRLIGYCFEDEHRLLVYEFMPKGSMENHLFRRGSYFQPFSWSLRMKIALGAAKGLAFLHSTEPKVIYRDFKTSNILLDTNYSAKLSDFGLARDGPTGDKSHVSTRVMGTHGYAAPEYLATGHLTTKSDVYSFGVVLLEMISGRRAIDKNQPTGEHNLVDWAKPYLSNKRRVFRVIDPRLEGQYLQSRAQAAAALAIQCLSIEARCRPNMDEVVKALEQLQESKNMQRKGADHKQHHVRNSGPGRSNGGNGGSDVPRKASAYPRPSASLLRG

SEQ ID NO: 51380 - protein, 311 aa, Glycine max
  Clone ID: 700790448_FLI.pep
AASMAFRSSDPSYSETLLRNAAKAFQFADTYRGAYSDNANVRSGVCPYYCDFDGYQDELLWGAAWLRRATQDENFLNYIQSNGKTLGAEDNINEFGWDNKHAGLNVLVSKEVLDGNVMSLESYKTSAESFLCTLIPETSSSHIEYTPGGLIYRPGGSNLQHATSIAFLELVYANYLSRTSQTINCGNVYVNAQTLRQHAKKQVDYILGDNPMGMSYMVGYSNKYPQHIHHRGSSLPSIKDHPQFIACKEGSIYFNSSNPNPNVLVGAIVGGPGEDDVYEDDRADFRKSEPTTYINAPFVGILAYFVANPNP

SEQ ID NO: 51381 - protein, 549 aa, Glycine max
  Clone ID: LIB3051-037-C9_FLI.pep
PSPFLSFCWEMEVTLSACKSISSPSVPVAALFAGKAGTKSSQCSFLAGANKVRFPRQVGQVSHVRKQRQTRHCGALHATCSGDKILIANRGEIAVRVIRTAHELGIPCVAVYSTIDKDALHVKLADEAVCIGEAPSSQSYLLIPNVLSAAISRRCTMLHPGYGFLAENAVFVEMCREHGINFIGPNPDSIRVMGDKATARETMKKAGVPTVPGSDGLLQSTEEAIRLANEIGFPVMIKATAGGGGRGMRLAKEPDEFVKLLQQAKSEAAAAFGNDGVYLEKYIQNPRHIEFQVLADKYGNVVHFGERDCSIQRRNQKLLEEAPSPALTPELRKAMGDAAVAAAASIGYIGVGTIEFLLDERGSFYFMEMNTRIQVEHPVTEMISSTDLIEEQIRVAMGEKLRYKQEDIVLRGHSIECRINAEDAFKGFRPGPGRITAYLPSGGPFVRMDSHVYPDYVVPPSYDSLLGKLIVWAPTREKAIERMKRALDDTIITGVPTTIDYHKLILDIEDFRNGKVDTAFIPKHEEELAMPPQKMVLANRVNELAGSTA

SEQ ID NO: 51382 - protein, 543 aa, Glycine max
  Clone ID: 700791980_FLI.pep
VAAGLQVLQEKNLIHRDLKPQNLLLATTAATPVMKIGDFGFARSLTPQGLADTLCGSPYYMAPEIIENQKYDAKADLWSVGAILYQLVIGRPPFDGNSQLQLFQNILASTELHFPPDALKVLHSDCLDLCRNLLRRNPDERLTFKAFFNHNFLREPRPTMNVEQFQLHQSERLTNHQLGGSTSEKISESHSKYNPMVVSSAADETMLLQRKDGKITAGTTNAKVSHLMESIEKDYVFVNSHFASLEAFSDYFEASVQDSSSHRISLFPSKRTNMEVRDAKQTKDLPSSSTEGLENLKSNKLEACAASCEFAALRKEHQISPLHPSNRLQLLHQYVQIIAELSQEKYNTGLYLESLAVELVVLAIWKQTLEICSSWMASITKSELPGSSSANESISARDINLPQSTEQKINFSDPSSISLWAKHEFIDAVDRAEKLSCHVQNMDKATEMPDAMEIIFQKALLIGTSGAVDEYMEIRDRAAASYSKAMLLLSFIVAEAENLPLNPPFSLVATNKERISQYIHSLQSRKESSSESSSKKVLILLSK

SEQ ID NO: 51383 - protein, 263 aa, Glycine max
  Clone ID: 700788721_FLI.pep
FHGRTLGALALTSKVQYRMPFEPVMPGVTFLEYGNAQAAVELIKQGKIAAVFVEPIQGEGGIYSATKEFLQSLRNACDETGALLVFDEVQCGLGRSGFLWAHEAYGVFPDMMTLAKPLAGGLPIGALLVTERVASAINYGDHGSTFAGSPLVCSAALAVLDKISKPDFLSSVSKKGLYFKELLREKLGENRHVKEIRGVGLIIGIDLDVPASPLVDACRSSGLLVLTAGKGNVVRLVPPLIITEKELEQAAGILCQTLPVLDN

SEQ ID NO: 51384 - protein, 312 aa, Glycine max
  Clone ID: 700865705_FLI.pep
DMITVLSGPIGTLANQFFESRKLSQPTFSDLSLKPARISRKTLSLKMAQVAQNPSQQQKVIITNKYGNKLVGILHESGTKEIVILCHGLRSTKEDDIIKNLAAALENAGVSSFRFDFTGNGESEGSFEFGHYWREVDDLHDVVQHFHGANHKVIAIIGHSKGGSVVLLYASKHHDIKTVVNLSGRYDLKAGLEERLGKDYLERIMKDGFIDVMQSGSFDYRVTLESLMDRLDTNMHEACLQIDKECRVLTVHGSSDPVIPVGDASEFAKIIPNHKLIIIEGADHSYTNHQDELASVVVNRIKEALVHFSNDV

SEQ ID NO: 51385 - protein, 289 aa, Zea mays
  Clone ID: 700461154_FLI.pep
ALATLVVNKLRGSLKIAAIKAPGFGERKTQYLDDIAILTGATVIRDEVGLSLDKADKSVLGTAAKVVLTKESTTIVGDGSTQEEVTKRVAQIKNLIEAAEQEYEKEKLNERIAKLAGGVAVIQVGAQTETELKEKKLRVEDALNATKAAVEEGIVVGGGCTLLRLAAKVDAIKDTLENDEQKVGAEIVRRALSYPLKLIAKNAGVNGSVVTEKVLSNDNFKYGYNAATGQYEDLMAAGIIDPTKVVRCCLEHAASVAKTFLTSDVVVVDIKEPEAAPVANPMDNSGYGY

SEQ ID NO: 51386 - protein, 166 aa, Zea mays
  Clone ID: 700428444_FLI.pep
IVCTAYRNAARVLSIRVSHWLEVPVRDNCVERVGACHAEQPHHGVQRRGRRSAGRRQLPDHLGLREPLHALEVLRDELHAAVRGPVPPRADGLLVEHPVAEADDAHAPWLQHPEDLRENLFRGLQVLHADGAEHGIEGAALQLQPLLLVEVLDEEEVQARVPGELL

SEQ ID NO: 51387 - protein, 258 aa, Zea mays
  Clone ID: 700430121_FLI.pep
SIIRRAAGHLVHPASLPPLLLAALLLLLFRSALLAGTLRLASFADRDPALRSLLARLSSPNPPSPPPPPHHLPRRRSPFTSPSSSLSDDDILVSPLDPTASTPSSRRNASYHHVQFTSYSTVPKPYTLPLPASASPFFIAVYNETAPPKPASRRGSELGLLDLTRRDAAAIVNLLALLSSAHIFAILGYIAVHSIALGAVFASVAGHHRPGQRLVFLLTGAAKGAKRLTGFAFLRWATRDAVVQMLCLWFFADVHDQA

SEQ ID NO: 51388 - protein, 52 aa, Zea mays
  Clone ID: 700433234_FLI.pep
SCFIWQLGYANSKASNYDISTQKKIVMDLQFKCTEMKLLFGRQHYSHTIFQI

SEQ ID NO: 51389 - protein, 225 aa, Zea mays
  Clone ID: 700169450_FLI.pep
EFLVLKGEAASAVHGKEGGDDPVLQAIAASLLQRKWKEFKQSDESWKEAPRNFVNLGGIDEDISAMVGILKRGLGVGCIHSWLSSNQMQRATATGGLPGAHMVATGQFRTPAMNAMVQEAHRHLAREASAHDAGTSIVCKRAVELLDGINKRFDLWCKLDQELPRTNQPSPHQEEGHESRDLTAVLRGDINRARQHDIYLAADHAIKQWRSFLTSVEKTHGHGHI

SEQ ID NO: 51390 - protein, 101 aa, Zea mays
  Clone ID: LIB3159-007-F1_FLI.pep
KVIRKYKLTSTQEEISLQRSHVLVIHRIRSSQKAGIAELRYSWCYLIGCTELRSGPHVLALPSRTPTRLAKRGRDNGGNTFTTLPNRPINCCCPLSAPQSV

SEQ ID NO: 51391 - protein, 124 aa, Zea mays
  Clone ID: 700164355_FLI.pep
NRATEQATAMAFWQTRDFLFCGICGTLLTFDSVRSASCPLCGFKRDAKEIEGKEIQYTMTAEDIRRGLKTQTEDVVGQRPVTNKACPKCDHPKAEFYNIQMRSADEGETTFYMCKGCGCNFKDE

SEQ ID NO: 51392 - protein, 188 aa, Zea mays
  Clone ID: 700219818_FLI.pep
PRSAHGPRRDPAPSSSPPPPPPMAASTFSGDETAPFFGFLGAAAALVFSCMGAAYGTAKSGVGVASMGVMRPELVMKSIVPVVMAGVLGIYGLIIAVIISTGINPKAKPYFLFDGYAHLSSGLACGLAGLAAGMAIGIVGDAGVRANAQQPKLFVGMILILIFAEALALYGLIVGIILSSRAGQSRAD

SEQ ID NO: 51393 - protein, 290 aa, Zea mays
  Clone ID: 700170502_FLI.pep
EDPRERDCLKTILHRVYGKFMVHRPFIRKAVSNIFYQFVFETDRHNGIAELLEVFGSVISGFALPLKEEHKIFLWRVLIPLHKPKSVGVYLQQLTYCVTQFLEKDPKLASSVIIGLLRYWPITNCQKEVMFLSEIEEILESTSQAEFQKCMVPLFRRIAHCITSSHFQVAERALFVWNNDHIISLIAQNRQVIMPLVIPALEQNIQNHWNQAVLNLTVNVKKMLSEMDDDLFSSCLAKYKDEEEKRVSLEAKRRLTWEKLESAAAFQPVTGHTAVLVGHRPSANLIATMI

SEQ ID NO: 51394 - protein, 249 aa, Zea mays
  Clone ID: 700205641_FLI.pep
TQQREVTLQEENAAYEKAISECKQKIQEKQIEATQFLSNLEEMEVTEHNLKTQLENALKELEAAQHKASTATSGTAENALLEAKSVTDLKSKDLEEKKRELELLDNKVQTLEKEWSVVEEESLKKPTPAQREKVLERQLHSLIEQLTAKQAQAEILATDVHSKEKELERLNHLHRNLYGGANETGAPRSRLSRGLLSGPEDYYYDPKAGRKPYQAGVRTEGQNRLMILRSAIVLYVLLLHVIVFIKISV

SEQ ID NO: 51395 - protein, 234 aa, Zea mays
  Clone ID: 700196141_FLI.pep
LAQRKIGYGTKHRGIDGLFHQLTAMISPAHLAFAAAFLLVVRSSAPGAAAARPIFDGKPSPSEATATARWLAAQNTWGVLSTISSDLSGAPFGNVVSYSDGVPGEGRGIPYFYLTTLDPSARDALEDERTSFTLSEFPLGTCGEIDPENPTCAKLTLNGKLKMVDLQSSEADLAKSALFTKHPEMKDWPKNHHFKIFKMEIENIFLIDWFGGPKPISPSQYLEFGRNQGSLMYS

SEQ ID NO: 51396 - protein, 104 aa, Zea mays
  Clone ID: 700548926_FLI.pep
IRVRPYMYDGKKLLCESLSSSFACRRVLTRHNSICSQPVQLKVAPIRLVSDIGGSTALGYVNASDLHRVANPLRNVSRWKLHPQESSHEFWKSSFKNRHVEVST

SEQ ID NO: 51397 - protein, 192 aa, Zea mays
  Clone ID: 700550673_FLI.pep
LLLLDEDFEAVVGDFGLAKLMDYKDTHVTTAVRGTIGHIAPEYLSTGKSSEKTDVFGYGITLLELITGQRAFDLARLANDDDVMLLDWVKGLLKEKKLESLVDEDLDHNYIDVEVESLIQVALLCTQSNPMERPKMSEVVRMLEGDGLAERWEEWQKVEVVRQEVELGPHRTSEWILDSTDNLHAEQLSGPR

SEQ ID NO: 51398 - protein, 249 aa, Zea mays
  Clone ID: 700578273_FLI.pep
FLFEPIQGEAGVVIPPDGYLKGVRDLCSKHNVLMIADEIQTGIARTGKMLACDWENIRPDMVILGKALGAGVVPVSAVLADRDVMLCIRPGEHGSTFGGNPLASAVAVASLKVVRDEGLVERAAKLGQEFRDQLQKVQQKFPQILREVRGRGLLNAVDLNNDALSPASAYDICIKLKERGILAKPTHDTIIRLAPPLTISPEELAEASKALSDVLEHDLPQLQLQKQIKKPESEAEKPVCDRCGRDLYG

SEQ ID NO: 51399 - protein, 288 aa, Zea mays
  Clone ID: 700578467_FLI.pep
AFLCSNCDFGRHRDGGDPPLHDRCAVQPYSGCPPASDLAALLAVPLFDKPAAEDGAWWNIWEEPQVLSLEDLIVPTTPCHGFEPLLTPPSPKNRSISPDRKVNEEILRQLGELAESDGGMQASAGREEAEQAGGDQFPSWASPQYATGHGNFGTEDNHENGRWNNSEYHDLNDACKLEVTYDQAPVNSAEPCLSSFAPLSEICPSMSNGSSKEDNHQANPGIGMPMQGLPKRSGFDVVPCPDRDSVISRYKAKRKTRRFDRQVRYESRKVRADGRLRIKGRFAKANQT

SEQ ID NO: 51400 - protein, 160 aa, Zea mays
  Clone ID: 700621532_FLI.pep
KGGELGMKGSKVHEHEADVPASDLWAIYGSLRAAELLPELLPHVLAKVELVSGDGGVGTILQLIFPPGIPGLQSYKEKFIKVDNENYIKEAEAIDGDILKLGFEAYMIRFEIIPKGANSSVIRSTIEYVIADAHPELEAMVSTATLAETAQKFSEFAKAK

SEQ ID NO: 51401 - protein, 366 aa, Zea mays; identical to SEQ ID NO: 48474
  Clone ID: 700801749_FLI.pep

SEQ ID NO: 51402 - protein, 631 aa, Glycine max
  Clone ID: 700556144_FLI.pep
GGEKEYHCQRCKQKVKALKQLTIHKAPYVLTIHLKRFHAHDTGQKIKKKVQFGCALDLKPFVSGSNDGDVKYSLYGVLVHAGSSTHSGHYYCYVRTSNNMWYTLDDNRVSHVSEREVLNQQAYMLFYVRDRKSIVPRKPVDIAKKENMKTNLNVNRESSTSNHVLKEYPNGTVENKAEKGALVLQKHSVILAENLIQSKRHGSELSSEAQAQKDSPDGLSVAKSELGCLSSLDHSGKDYSLPHNLKSLAAPVGKNNLRNENVFSKEGIKDSPSIVPSSTNPQNVELTTEWKSQSLKKNLVKIVDVATPQDSSTNMTNGICPKTSLIHLKVNHQLGTSAIGSVCEKASSVVHEDLVGSQGLVLNKSVNTSLNTESLNQKPLKKSKKKFLKYQVSWMHLRPIFYYMAYLGPRKKNHKRIKRRTLSMKNPNKDKLDKLAFSSEDAKPDVFPCLSSCSDSKATKAGYRPSANFKSSDESLIETRAEGEFRKRIDHSCAVLASAAQIENISGSGSVVSQFEARQADSAQDSTRDQMHNGLMSMPNGGPEETVVARWDDIELPSSQHLESKNDKTVSIGYVGDEWDEEYDKGKRKKIRGFKHSFGGPNLFQEIAVEKSKFKRAKFDQSCSGNPPFRI

SEQ ID NO: 51403 - protein, 424 aa, Glycine max
  Clone ID: 700560157_FLI.pep
NYYGGPHGDHVVRMQQNGMGPGGGGWGAPPPPPPMMMSSAEFSSNYSTGPAPLPPPSPNLALGLKGGTFTYEELAAATNGFNDANLIGQGGFGYVHKGVLPSGKEVAVKSLKAGSGQGEREFQAEIDIISRVHHRHLVSLVGYSISGGQRMLVYEFIPNNTLEYHLHGKGRPTMDWPTRMRIAIGSAKGLAYLHEDCHPRIIHRDIKAANVLIDDSFEAKVADFGLAKLTTDNNTHVSTRVMGTFGYLAPEYASSGKLTEKSDVFSFGVMLLELITGKRPVDHTNAMDDSLVDWARPLLTRGLEEDGNFGELVDAFLEGNYDPQELSRMAACAAGSIRHSAKKRPKMSQIVRILEGDVSLDDLKDGIKPGQNVAYNSSSSSDQYDTMQYNADMQKFRKAVFSNSEEFGTSSGSSGEVSQKQQRL

SEQ ID NO: 51404 - protein, 86 aa, Glycine max
  Clone ID: 700665830_FLI.pep
DTTNVCSKKRLNHGVLLVGYGAKGFSILRLGNKPYWIIKNSWGEKWGEDGYYKLCRGHGMCGINTMVSAAMVPQPQTTPTKNYASY

SEQ ID NO: 51405 - protein, 682 aa, Glycine max
  Clone ID: 700664879_FLI.pep
NSRSKRNAASFVYPLQLPQLTVLVGKTMADVVQYRLERMVDELDDLEQRGLFSRREIAEIVKQRRKFEYRLKRPSPLKEDFLAYVEYETQLDALRRLRKKSVARELMKQGNKKLKKSKSDFAGLLRIMDIYELALKRYKGDIDLWFRYLEFCRLRKNGRMKKALANVIRFHPKVPGIWIYAAAWEFDHNLNVAAARALMQEGLRVCPTSEDLWVEYLRMELTYLNKLKARKVALGEDQGTLTRDPRSSDEKHWRDENSELFMPLGERGDGDGDDDRANVGSDESEKKQELFEERGMNIFQTVYGGAVEAVPSSLSLRKRFFEILEGTNLSHYEDMCKEILNDMKRDFSTQPEFWDWLARHECDLENDLEISEEGIIPQVEKAVQVYEEALENVPSGTMFCLYANFLTDIVAHKEGETNINGSSGHAANYISHLLLIYERAESMGCITEDLACKHVSLHLQLRQLDEARKLAAKLCSGKLAESVELWGLRITIEIRCTTKSSSPSDADLQSLFELLQQILMKVSVSKSENLWLKALKFYANQRQYFDKLVEISVVTLVRDGGSENGFSLSFAIVSFIFQKDGIQKTRDIYKRFLALPRPGLALYRHCIDLETNLASIGDKDGLINARKLYESALATYDQNVSLWQDYYRMETKMGTSEKANAIYWRARKVLKDASEFVTATDM

SEQ ID NO: 51406 - protein, 194 aa, Zea mays
  Clone ID: 700224522_FLI.pep
SIEQKEEGRGNEAHAASIRAYRSKIEAELARICDGILALLDSHLVPSAGGAESKVFYLKMKGDYHRYLAEFKSGAERKDAAESTMNAYKAAQDIALADLAPTHPIRLGLALNFSVFYYEILNSPDRACNLAKQAFDEAISELDSLGEESYKDSTLIMQLLRDNLTLWTSDTNEDGGDEIKEAAAAPKESAPEGQ

SEQ ID NO: 51407 - protein, 249 aa, Zea mays
  Clone ID: 700351691_FLI.pep
RGAAAGAAPGARLPRRGPRRRAPAPPPPRHPGATAEARAAGRRRADPAVRGRRGPLLGGVRHHAAADALLHHADGAVRHPQDQVGPGERRRPPAAPQDLGRPRRRRRRRRRGQPGRRGHGADAGGRAPAPRGAPELPRRRRRHRPDGARRGRAQPLARVLPDRQPRHDRHGVAAGHVRPGQGGHPGAPRPGRRRPRHARGRQLHRRHRRRRRVQPRRRRQDEDDEHEGGARRAPALRRRRRLRPQDRQV

SEQ ID NO: 51408 - protein, 262 aa, Zea mays
  Clone ID: LIB148-012-E1_FLI.pep
GQSGAPDGDPLHHALELVEVDAAVAVAVDVADHLPDVGHAAGLGEAELLEHLLQLSGGDEAVAIDVEDLERLPHLLLVLLGAGAGAGAVRRGGGVVLASQCAEEGVPERAVELVEVLEAEARGAVGHVGADGGGQPGAVGVQAQRIQRLRQLVHGDLAVPVAVEQVEHAAEAHRVQAPVAEPERRRRRPLGQRRLHRRRNHALLVRVHPTYDLHLDVRILLPCLASASGAGCPAPRSLIFSPLCVCVWCQNSFFCFGRDDDD

SEQ ID NO: 51409 - protein, 174 aa, Glycine max
  Clone ID: 700792484_FLI.pep
TYSYIYYILYTICTKDKQKWTQHHQQRPEENKLYICIFSHPYMEEIVVGLICHTSKGEEELGLFWPVFSYASDVDLLRKRKDSLAPEKGDTGGVEPAGEAGADPLGLWLPPGGFTIMILRVTLTASSGKSSPYDFTLPLSDSLPEADRKAKVWCFRSLPRPFSGRGPATVSSHK

SEQ ID NO: 51410 - protein, 94 aa, Glycine max
  Clone ID: 700792780_FLI.pep
KPPHTNASISRTEDRITLRKPQKKMSSECKGKSSWPELVGVEGTVAVATIERENPLVDANTVLKGTIVTPDFRCDRVWVWVTKDGIVYQVPTIG

SEQ ID NO: 51411 - protein, 291 aa, Glycine max
  Clone ID: 700759858_FLI.pep
KPGRFESFFLSSTEAQQSYLQGFSRNILEASYDTKFEEINKVLFSREEGQQQGEQRLQESVIVEISKEQIRALSKRAKSSSRKTISSEDKPFNLRSRDPIYSNKLGKFFEITPEKNPQLRDLDIFLSIVDMNEGALLLPHFNSKAIVILVINEGDANIELVGLKEQQQEQQQEEQPLEVRKYRAELSEQDIFVIPAGYPVVVNATSNLNFFAIGINAENNQRNFLAGSQDNVISQIPSQVQELAFPGSAQAVEKLLKNQRESYFVDAQPKKKEEGNKGRKGPLSSILRAFY

SEQ ID NO: 51412 - protein, 489 aa, Glycine max
  Clone ID: 700762905_FLI.pep
ALITMAKLVLSLCFLLFSGCFALREQAQQNECQIQKLNALKPDNRIESEGGFIETWNPNNKPFQCAGVALSRCTLNRNALRRPSYTNGPQEIYIQQGNGIFGMIFPGCPSTYQEPQESQQRGRSQRPQDRHQKVHRFREGDLIAVPTGVAWWMYNNEDTPVVAVSIIDTNSLENQLDQMPRRFYLAGNQEQEFLKYQQQQQGGSQSQKGKQQEEENEGSNILSGFAPEFLKEAFGVNMQIVRNLQGENEEEDSGAIVTVKGGLRVTAPAMRKPQQEEDDDDEEEQPQCVETDKGCQRQSKRSRNGIDETICTMRLRQNIGQNSSPDIYNPQAGSITTATSLDFPALWLLKLSAQYGSLRKNAMFVPHYTLNANSIIYALNGRALVQVVNCNGERVFDGELQEGGVLIVPQNFAVAAKSQSDNFEYVSFKTNDRPSIGNLAGANSLLNALPEEVIQHTFNLKSQQARQVKNNNPFSFLVPPQESQRRAVA

SEQ ID NO: 51413 - protein, 441 aa, Glycine max; identical to SEQ ID NO: 45632
  Clone ID: 700837254_FLI.pep

SEQ ID NO: 51414 - protein, 455 aa, Glycine max
  Clone ID: 700790383_FLI.pep
SCPIYVSDLDDSVLSLDLTSCTKMFDIVTPVSAYGMQRNSLDLRWSEANCSQCKAKGKKCKWKNNRGDIECFDCKDKRKTIHVPKSFIYSAPGSILLGFVVIVVFKIIYHFRQKQEDQARVEKFLEEYRAEKPARFTYADVKRITGGFKEKLGEGAHGAVFRGKLSNEILVAVKILNNTEGEGKEFINEVEIMGKIHHINVVRLLGYCAEGIHRALVYNFFPNGSLQSFIFPPDDKQNFLGWEKLQNIALGIAKGIGYLHQGCNHPIIHFDINPHNVLLDDNFTPKISDFGLAKLCSKNPSLVSMTAARGTLGYIAPEVFSRNFGNVSYKSDIYSYGMLLLEMVGGRKNVDTSSPEDFHVLYPDWMHDLVHGDVHIHVEDEGDVKIARKLAIVGLWCIQWQPLNRPSIKSVIQMLESKEEDLLTVPPNPFHSSTSTIPSGFTSARLPLELEVIQE

SEQ ID NO: 51415 - protein, 422 aa, Glycine max
  Clone ID: 700748001_FLI.pep
RQAPLNHHTSPRSRYPFLLFFYLSSFKSIKMAETFLFTSESVNEGHPDKLCDQISDAVLDACLEQDPDSKVACETCTKTNLVMVFGEITTKANVDYEKIVRDTCRNIGFVSNDVGLDADNCKVLVNIEQQSPDIAQGVHGHLTKKPEEIGAGDQGHMFGYATDETPELMPLSHVLATKLGARLTEVRKNGTCPWLRPDGKTQVTVEYYNDNGARVPIRVHTVLISTQHDETVTNDEIAADLKEHVIKPVIPEKYLDEKTIFHLNPSGRFVIGGPHGDAGLTGRKIIIDTYGGWGAHGGGAFSGKDPTKVDRSGAYIVRQAAKSIVASGLARRCIVQVSYAIGVPEPLSVFVDTYGTGKIHDKEILNIVKENFDFRPGMISINLDLKRGGNNRFLKTAAYGHFGREDPDFTWEVVKPLKWEKA

SEQ ID NO: 51416 - protein, 94 aa, Glycine max
  Clone ID: 700763445_FLI.pep
DEGDRVGSVLKALIGCGVEQQECFCWRHFHHFLDENQSFVRLGHVSLTPATFENHRLQSSQHGHFYFYFFSFVDCDLVPISILTLFFNFNTLKQ

SEQ ID NO: 51417 - protein, 111 aa, Glycine max
  Clone ID: 700832462_FLI.pep
HWYYMASFRAFWNSPVGPKTTHFWGPIANWGFVAAGLADLNKPPEMISGNMTGAMCVYSALFMRFAWMVQPRNYLLFACHASNETVQLYHFTRWAKAQGLLSEKKEEASSQ

SEQ ID NO: 51418 - protein, 331 aa, Glycine max
  Clone ID: 700871366_FLI.pep
QLNDPFIRNWIDLLSFLLAGVKANAVLSAEMIYMFAEWYKPGCCLEYPLHGSAAIIDALVRGLEKFGGRISLQSHVENIVVENDRAIGVKLGSGQFIRAKKAVVSNASMWDTLKLLPKEVVPKSYSDRVNTTPQCDSFMHLHLGFDAEGIRSDLGIHHIVVNDWKRGVDADQNVVLISIPSVLSPNLAPHGKHVLHAYMPGTEPFELWEGLDRRSAEYRNLKAERSEVMWKAVERAVGTGFSREKCEVKLVGSPLTHERFLRRNRGTYGPAVQAGSDAFPGHSTPIAQLYCCGDSTFPGIGVPAVAASGAIVANSLVSVSQHSKLLDAIGI

SEQ ID NO: 51419 - protein, 196 aa, Glycine max
  Clone ID: 700849043_FLI.pep
PNKVVDLSEFTQGSFMVQTKNGTVAVASAFAGHKEAIQQRDHKFLRIAVEEAYKGVDCEDGGPFGAIIVCNDEIVARCHNMVLRNTDPTAHAEVTVIRKACEKLNQIELSDCEIYASCEPCPMCFGAIHLSRVKRLVYGAKAEAAIAIGFDDFISDALRGTGFYQKAQLEIKRADGKAANIAEEVFERTKEKFRMY

SEQ ID NO: 51420 - protein, 153 aa, Glycine max
  Clone ID: 700898569_FLI.pep
AMSAYGYEIVQTLIVDIVPDEHVKKAMNEINAAARLRVATNDKAEAEKIMQIKRAEGDAESKYLAGLGVSRQRQAIVDGLRDSVLAFSGNVPGTSSKDIMDMVLMTQYFDTMKEIGASSKSNAVFIPHGPGAVSDVASQVRNGLLQGNATTES

SEQ ID NO: 51421 - protein, 122 aa, Glycine max
  Clone ID: 700907728_FLI.pep
SPMIRYELSRVSAILFVAMGTRKLQCPLEARSGLLQAWFGPMLLDFGWLQRCRKGLDMRTLEEAMGQTLLTLPLKQQYVLFMEWFRHFSRHGTECPNMSKAFQIWWRRSFLRGSETYAVESR

SEQ ID NO: 51422 - protein, 376 aa, Glycine max
  Clone ID: 700908902_FLI.pep
SNLPLFLLPPTSPSSSSIMSHFKGKYHDELIANAAYIGTPGKGILAADESTGTIGKRLASISVENVESNRRALRELLFTAPGALKYLSGVILFEETLYQSTAAGKPFVEVLKEAGVLPGIKVDKGTVELAGTNGETTTQGLDGLGQRCAKYYEAGARFAKWRAVLKIGPNEPSELAIHENAYGLARYAVICQENGLVPIVEPEILVDGSHDIHKCAAVTERVLAACYKALNDHHVLLEGTLLKPNMVTPGSNSAKVSPQVVAEHTVRALQRTVPAAVPAIVFLSGGQSEEEASVNLNAINQVNGKKPWSLSFSFGRALQQSTLKAWSGKEENVKKAQEALLVRAKANSEATLGTYKGNSKLADGASESLHVEDYKY

SEQ ID NO: 51423 - protein, 375 aa, Glycine max; identical to SEQ ID NO: 45592
  Clone ID: 700852454_FLI.pep

SEQ ID NO: 51424 - protein, 265 aa, Glycine max
  Clone ID: 700852504_FLI.pep
QQSAPSFLVQKGLPRNTQGVTGLGHAPISLPNQLASHFGLQRQFTTCLSRYPTSKGAIIFGDAPNNMRQFQNQDIFHDLAFTPLTITLQGEYNVRVNSIRINQHSVFPLNKISSTIVGSTSGGTMISTSTPHMVLQQSVYQAFTQVFAQQLPKQAQVKSVAPFGLCFNSNKINAYPSVDLVMDKPNGPVWRISGEDLMVQAQPGVTCLGVMNGGMQPRAEITLGARQLEENLVVFDLARSRVGFSTSSLHSHGVKCADLFNFANA

SEQ ID NO: 51425 - protein, 159 aa, Glycine max; identical to SEQ ID NO: 44151
  Clone ID: 700852844_FLI.pep

SEQ ID NO: 51426 - protein, 146 aa, Glycine max
  Clone ID: 700888142_FLI.pep
VLTNMVAYIQKEFPGNTLKFWRLQSPRYFYGGDWNQNGSCLFNKPLEEDELDLWFEPRNNGVNKEARVLNFVIEEALQAANIQLLDLTHLSELRADAHPAIWLGRKDAVAIWGQDCMHWCLPGVPDTWVDILSQLIHDGLGRTGRL

SEQ ID NO: 51427 - protein, 251 aa, Glycine max
  Clone ID: 700888434_FLI.pep
DFALWEPPHGPYKTFNYPWRSYVKVSGALRHCAFMVMAMHGCILSEIQAPPEKRLVFSIELQKVGTEGAKVLRQLGSKVENMEKLSNVDILLKVHEAAEQLQMKIDQQSFLLVNSESWQAAKKPKEVENHDNLLIDLKDPHEHKHSLISSLSETGVDSRLNINIEPSVPELHISQSLLSNKISWPRLSFYGDNMLLEQDSKVYESASSLSLATFASLLIEFVARLQNLVDEFQDLSEKANFKDPFNPPVLK

SEQ ID NO: 51428 - protein, 431 aa, Glycine max
  Clone ID: 700891270_FLI.pep
DSEVEAAFFLRVGMGSSCGCGVTLVLVFCLWGVLISLSSAARLSASRQKLEVAKHLNRLNKPPVKTIQSPDGDTIDCVPISKQPAFDHPFLKDHKIQTRPSFHPEGLFEENKLSEKPDAKTHTPITQLWHANGRCPEDTIPVRRAKEEDVLRASSVKRYGRKKHRAIPKPRSAEPDLINQSGHQHAIAYVEGDKYYGAKATLNVWEPRIQQPNEFSLSQLWILGGSFGQDLNSIEAGWQVSPDLYGDNNTRLFTYWTSDAYQATGCYNLLCSGFIQVNSEIAMGATISPVSAYRNSQFDISILIWKDPKEGHWWMQFGNDYVLGYWPSFLFSYLADSASMIEWGGEVVNSEPDGQHTSTQMGSGHFPEEGFGKASYFRNIQVVDSSNNLKAPKGIGTFTEQSNCYDVQTGSNGDWGHYFYYGGPGKNPNCQ

SEQ ID NO: 51429 - protein, 397 aa, Glycine max
  Clone ID: 700893202_FLI.pep
QQITMALSRLSHRSIGSTLTKPFSAAAASSRSISTSDTPLTIETSVPFTAHNCDPPSRAVATSSSELLTFFRDMALMRRMEIAADSLYKAKLIRGFCHLYDGQEAVAVGMEAAITKKDSIITAYRDHCIFVGRGGTLLEVFAELMGRKEGCSKGKGGSMHFYKKESGFYGGHGIVGAQVPLGCGLAFAQKYSKDESVTFAMYGDGAANQGQLFEALNIAALWDLPAILVCENNHYGMGTAEWRAAKSPAYYKRGDYVPGLKVDGMDVLAVKQACKFAKEHALKNGPLILEMDTYRYHGHSMSDPGSTYRTRDEISGVRQERDPIERVRKLVLSHDIAAEKELKDIEKEVRKEVDEAIAKAKESPMPDPSDLFTNVYVKGYGVETFGADRKEVRATLP

SEQ ID NO: 51430 - protein, 423 aa, Glycine max; identical to SEQ ID NO: 43754
  Clone ID: 700901534_FLI.pep

SEQ ID NO: 51431 - protein, 107 aa, Glycine max
  Clone ID: 700869926_FLI.pep
RTERIYRSIPDSTTQRTRELNWVRVLGKMKKRQVVVKRDYATSSPAVGNIRYGECQKNHAANTGGYAVDGCREFMASAGEGTNAALTCAACGCHRNFHKREVLHGVN

SEQ ID NO: 51432 - protein, 159 aa, Glycine max
  Clone ID: 700843161_FLI.pep
ERYQQEKKKRRVEIPFEEKMASHRQSYEAGQTKGRTEEKTNQTMGNIGEKAQAAKEKTQEMAQAAKEKTQQTAQAAKDKTCDTSQAAKEKTQQNTGAAQQKTSEMGQSTKESAQSGKDNTQGFLQQTGEKVKGAAQGATEAVKQTLGLGEHDQDNRRNY

SEQ ID NO: 51433 - protein, 150 aa, Glycine max
  Clone ID: 700843780_FLI.pep
KMPSDAELMRIAISDLNNVSTSLEDRHRALQELLELVESIDNANDLSKLGGLLAFREELYCSDPGIRTIAAWVLGKASQNNAIVQQQILELGVLSRLMKMVNSNSMEEANKALYAVSALIRNDLASQGLFYAEAGGWMLQTTEESCTSIG

SEQ ID NO: 51434 - protein, 134 aa, Glycine max
  Clone ID: 700843975_FLI.pep
LSSGNDMNEEDVFQRYLTMTSTNEANGWYGGSLLGDQDESSEIYKHYAELCQGPALELFQNDPEKEQHYADALSTSSYEIVNDAVVAAEMEAALKEYDQVGADLGIIPKSCKFYVDDPSWLTRWLTGDEKVPRI

SEQ ID NO: 51435 - protein, 304 aa, Glycine max
  Clone ID: 700847540_FLI.pep
LPTFYEHWPTPTLPLFSLSSFKLLTPMKIQCDVCNKHEASVFCTADEAALCDGCDHRVHHANKLASKHQRFSLLRPSPKQHPLCDICQERRAFTFCQQDRAILCKECDVSIHSANEHTLKHDRFLLTGVKLSASAMLRSSETTSDSNSNPSLLNFSHQTTLLPPSSTTTTTTSNNNNNKVAVEGTGSTSASSISEYLIETLPGWQVEDFLDSYSVPFGFCKNDEVLPRFDGEMEGHLSSFSTENMGIWVPQAPPTLMCSSQMDRVIVHGETNIKGSSRSRLKDDNFTVPQISPPSNSKRARFLW

SEQ ID NO: 51436 - protein, 412 aa, Glycine max
  Clone ID: 700847631_FLI.pep
LLFSTLNEPEHSEKDIMAVEYTCCSTAFFVHILVIVLLVLFAGLMSGLTLGLMSLSLVDLEVLAKSGTPQDRKHAEKILPVVKNQHLLLCTLLICNAAAMETLPIFLDGLVTAWGAILISVTLILLFGEIIPQSVCSRYGLAIGASVAPFVRVLVCICFPVAYPISKAGKGGELTHDETTIIAGALELSEKTASDAMTPISETFTVDINSKLDRELMNEILEKGHSRVPVYYEQPTNIIGLVLVKNLLTVHPEDEAPMKSVTIRRIPRVPESMPLYDILNEFQKGHSHMAVVVRRCDKTNQQSSQNNANDSVRDVKVDIDGEKPPKEKALKPKMPLHKWKSFPNTNKSSNRGSRSRKWSKNMYSDILEIDGSPLPKLPEEEEAVGIITMEDVIEELLQEEIFDETDHHFEDS

SEQ ID NO: 51437 - protein, 229 aa, Glycine max
  Clone ID: 700847651_FLI.pep
SKGNRGWRMSLMSLLPPLAAASYTNTVPKLKTHSPNLVLGQRVLPNLLSLALAVTLASPLPSYAIPSLNSQSPPISFTTPFSQSKNLELGLENGKIRPCPSINPGCISTNPKSSSFAFPWLIPSNSLDDAIQKLREAILKTQKNVKFQPVEDSPDGQYLQAEVDGGFGRDVIEFLVKGDVVAYRCVAMKVTYVYPFTTALGDSKGQEARLKQINDHLGWYAPSFDSMEE

SEQ ID NO: 51438 - protein, 313 aa, Glycine max
  Clone ID: 700903834_FLI.pep
VRKWLSSEENFFFFLSFMGFFVAHVVQGSALALLGLWHTIHTIRSYLVKGPANFTVRFWYQFNTTPQSRLKHLELVSILSFSILAFFDQILDFPHFHYAFKLDNFEHATMFIHLALFAGFSLSTELTDSLDLFSGFVGILASSVFSQELFLLHFHSTDHVGLEGHYHWLLQLIVLVSLVSSLAATIFPNNFNAALVLSISLIFQGCWFINMGFMLWIPSFVPEGCAVNLAKPSGHEIIGAVTCSSKEADFRARGLANLQFSWILSSILIFAGIICLKLSRKCTITTNRLEYERIQTKGATDSALANEGFKQAI

SEQ ID NO: 51439 - protein, 423 aa, Glycine max
  Clone ID: 700904153_FLI.pep
VKKKFTMLQTWPVRTPRPVASKLAADTPLLTGQRVLDALFPSVLGGTCAIPGAFGCGKTVISQALSKYSNSDAVVYVGCGERGNEMAEVLMDFPQLTMTLPDGREESVMKRTTLVANTSNMPVAAREASIYTGITLAEYFRDMGYNVSMMADSTSRWAEALREISGRLAEMPADSGYPAYLAARLASFYERAGKVKCLGGPERTGSVTIVGAVSPPGGDFSDPVTSATLSIVQVFWGLDKKLAQRKHFPSVNWLISYSKYSTALETFYEQFDPDFINIRTKAREVLQREDDLNEIVQLVGKDALAEGDKITLETAKLLREDYLAQNAFTPYDKFCPFYKSVWMMRNIIHFYNLANQAVERGAGSDGQKISYTLIKHRMGDLFYRLVSQKFEDPAEGEAALVAKFQKLHEDLTNGFRNLEDETR

SEQ ID NO: 51440 - protein, 82 aa, Glycine max
  Clone ID: 700889221_FLI.pep
KTVDLKAMHTCFYVFIWVFCEEKNVRCWTLFQTLTCALCVPGLLLRGMICTFIFLLLLRHVLMTLLKIEKLKSCYFNILYVL

SEQ ID NO: 51441 - protein, 427 aa, Glycine max
  Clone ID: 700891492_FLI.pep
PVELIRCLRSIKDHAFVASEYPVVITLEDHLTPDLQAKVAEMVTQTFGDILFTPNSESVKEFPSPESLKKRIIISTKPPKEYLEAKEKEKGDDSQHEKEKGDDSEHGKASGEDEAWGKEVPSLKGGTIEDYKDNNVDEDLNDEEEFDESDKSHHNEAPEYRHLIAIHAGKPKGGLVECLKVDPEKVRRLSLSEQQLEKAAINYGQQIVRFTQRNILRVYPKGTRIDSSNYNPLIGWMHGAQMVAFNMQGYGRSLWLMHGMFRANGGCGYVKKPNFLLETGPDDEVFNPKAKLPVKTTLKVTVYMGEGWYYDFKHTHFDQYSPPDFYTRVGIAGVPNDTIMKRTKAIEDNWLPTWNEAFEFPLTVPELALLRVEVHEYDMSEKDDFGGQTCLPIWELRSGIRAIPLHSQKGDKYNTVKLLMRFEFINN

SEQ ID NO: 51442 - protein, 197 aa, Glycine max
  Clone ID: 700893905_FLI.pep
NSEENLGEKMMITEDETTLTASKEQQSEMMNGDEDNHGSEDDNSKEWLNLSIGGTTTLLSTAVPPATAKVFSCNFCMRKFFSSQALGGHQNAHKRERGAARRYQSQRSMAIMGFSMNTLTMCRSLGVQPHSLVHKPCRDGIMVAPSFHDAYARIGMAWTPFWTEDQADMVWPGSFRLVPKQPQSPQEPLKLDLDLRL

SEQ ID NO: 51443 - protein, 358 aa, Glycine max
  Clone ID: 700893911_FLI.pep
HIDLCFQTWMYLAVPILLYAGERTLRFFRSGFYTVRLIKVAIYPGNVLTLQISKPSQFRYKSGQYMFVQCPAVSPFEWHPFSITSAPDDDYLSVHIRQLGDWTQELKRVFSAACEPPVAGKSGLLRADETTKKCLPKLRIDGPYGAPAQDYRNYDVLLLVGLGIGATPFISILKDLLNNIIKMEELADSVSDSSRGSDLSTGSADSISSNKISPKRKKTLKTTNAYFYWVTREQGSFDWFKGVMNEVAELDQRGVIEMHNYLTSVYEEGDARSALITMVQALNHAKNGVDIVSGTRVRTHFARPNWKKVFSRICSKHCNGRIGVFYCGAPVLAKELSKLCFEFNEKGQTKFEFHKEHF

SEQ ID NO: 51444 - protein, 231 aa, Glycine max
  Clone ID: 700894068_FLI.pep
LKAVSEENPNETVKRETVDLGNGSDVVYIQRLIPSDQSWKWFHYLDKHIPWTRPTIRVFGKSFLQPRDTCYVATPGLTELTYSGYQPHAYSWDDYPPLKDMLDAVHKALPGSSFNSLLLNRYNGGNDYVGWHSDDEKLYGPTPEIASLTFGCDRDFVLKKKPCKKSCDGSDEPASKRLKKGSHDADQHTFRLRHGSLLVMRGYTQRDWIHSVPKRAKAEATRINLTFRRVF

SEQ ID NO: 51445 - protein, 361 aa, Glycine max
  Clone ID: 700894095_FLI.pep
KYYYFIRLMGRKASHVALECTLQSHPNMVILGEEVAASKLTLSEIAKQITDAIQARAEQDKYHGVILLPEGLIESIPEVYALLKEIHGLLRQGVEVDKISSQLTPWASALFEFLPPFIRRQLLLYPESDDSAQLSQIETEKLLAYLVEVEINKRLKEGTYKGKKFNAICHFFGYQARGSLPSKFDCDYAYVLGHICYHILAAGLNGYMATLTNLKNPVNKWKCGAAPIASMMTVKRWSPNPGATSIGKPAIHPATVDLRGKAYELLRQKAQSFLMDDIYRNPGPLQFDGPGADAKVITLSVEDQDYMGRIKKLQEYLEQVRTIVKPGCPQEVLKAALSVMASVTEVLAAMSTSYTNTLASL

SEQ ID NO: 51446 - protein, 370 aa, Glycine max
  Clone ID: 700897515_FLI.pep
HKHKHMASSFFFLTLLLLSIISAATPCPPSERAALLAFKAALTEPYLGIFNTWSGNDCCRSWYGVACDPTTGHVTDVNLRGESQDPMFQKLGRSGYMTGKISPEICNLSNLTTLIVADWKAVSGEIPACVASLYTLQILDLSGNRISGKIPTDIGNLWSLTLLSLGDNEISGEIPMSVVNLARLKHLDLSNNRLTGEIPYDFGKLAMLSRALLSENQLTGSIPKSVSRINRLADLDVSSNRLSGSIPVELGKMKVLSTLKLDGNSMTGPVPSTLLSNTGMGILNLSRNGFSGTIPDVFGAGSYFMVLDLSFNNFSGRIPGSLSASKFMGHLDLSYNHLCGTIPIGSPFEHLDAASFSNNDCLCGNPLKAC

SEQ ID NO: 51447 - protein, 248 aa, Glycine max
  Clone ID: 700902209_FLI.pep
GLPILFILHSSLFTPNPSQTQTIHSFSSVTHLTMAASITLSRLVSSTLTTASFFPPITLPSKLSSLRLPTRRHPKPLRFSSSTITATISVGDKLPEATFSYLDSSGEVQTTTVSELTKGKKAVLFAVPGAFTPTCSQKHVPGFVEKSGELRAKGIDTIACISVNDAFVMKAWKEDLKVNEEVLLLSDGNGTFTKAIGVELDLSDKPVGLGVRSRRYALLAEDGVVKLFNLEEGGAFTFSGAQDILDVL

SEQ ID NO: 51448 - protein, 462 aa, Glycine max
  Clone ID: 700867504_FLI.pep
TSCTNTSNPSVMLGAALVAKKACELGLQVKPWIKTSLAPGSGVVTKYLQRSGLQKYLNELGFNIVGYGCTTCIGNSGDINEAVASAITENDIVAAAVLSGNRNFEGRVHPLTRANYLASPPLVVAYALAGTVDIDFDTEPIGIGKDGTKIFFRDIWPSSEEIANVVQSSVLPAMFRDTYNAITQGNPMWNNLSVPTGTLYAWDPTSTYIHEPPYFRDMSMSPPGSHGVKDAYCLLNFGDSITTDHISPAGSIHKDSPAARYLIERGVDRRDFNSYGSRRGNDEVMARGTFANIRIVNKFLNGEVGPKTIHIPSGEKLSVFDAAEKYKSEGHDMIILAGAEYGSGSSRDWAAKGPMLLGVKAVIAKSFERIHRSNLVGMGIIPLCFKPGDDADSLGLTGHERYTIDLPSNVNEIRPGQDVTVVTDAGKSFVSTLRFDTEVELAYFNHGGILQYVIRNMVNAKH

SEQ ID NO: 51449 - protein, 47 aa, Glycine max
  Clone ID: 700876593_FLI.pep
TRFHFSSHLRCVPQNPFHQSSNTKSCCTALLFIPHRTSHVNMHPLNL

SEQ ID NO: 51450 - protein, 126 aa, Glycine max
  Clone ID: 700845877_FLI.pep
LPLTATMVQRLTYRKRHSYATKSNQHRVVKTPGGKLVYQTTKKRASGPKCPVTGKRIQGIPHLRPAEYKRSRLPRNRRTVNRAYGGVLSGGAVRERIIRAFLVEEQKIVKKVLKIQKAKEKQASKS

SEQ ID NO: 51451 - protein, 280 aa, Glycine max
  Clone ID: 700849333_FLI.pep
SMKFPASVSPGQNMLSSLCPEGSGSLLNLSRSGQSLLTEQLPQQQWTQKYAPVQVNAYGSTVSHPQYSGKDSVMVLPHCNSDAQNSTLFGVNIDSSGLLLPTTVPGYTTSSADTNSSTMPLAESGFQGSLYGCMQDSSELLQSAGHTDPENQTQTFVKVYKSGSVGRSLDISRFSSYHELREELAQMFGIEGKLEDPLRSGWQLVFVDRENDVLLLGDDPWESFVNNVWYIKILSPEDIQKMGDQAVESLALGSGQRLNGTGAESQDIVSGPPSIGSLEY

SEQ ID NO: 51452 - protein, 554 aa, Glycine max
  Clone ID: 700906317_FLI.pep
RRNLRGPSNGSRGKVVLLFDDNPLSKIGVRFDKPIPDGVDLGGACEGGQGFFCNVTDLRLESSAVEELDKLLIHSLFEVVFSESRSAPFILFMKDAEKSIVGNGDSHSFKSKLENLPDNVVVIGSHTQNDSRKEKSHPGGLLFTKFGSNQTALLDLAFPDSFGRLHDRGKEAPKQNRTLTKLFPNKITIHMPQDEALLASWKQQLDRDVETLKIKGNLHHLRTVLGRCGMECEGLETLCIKDQTLTNENAEKIIGWALSHHLMQNSEAKPDSKLVLSCESILYGIGILQSIQNESKSLKKSLKDVVTENEFEKRLLADVIPPSDIDVTFDDIGALEKVKDTLKELVMLPLQRPELFCKGQLTKPCKGILLFGPPGTGKTMLAKAIATEAGANFINISMSSITSKWFGEGEKYVKAVFSLASKISPSVIFVDEVDSMLGRRENPGEHEAMRKMKNEFMVNWDGLRTKETERVLVLAATNRPFDLDEAVIRRMPRRLMVNLPDAPNRAKILKVILAKEELSPDVDLDAVASMTDGYSGSDLKNLCVTAAHRPIKEI

SEQ ID NO: 51453 - protein, 276 aa, Glycine max
  Clone ID: 700907362_FLI.pep
EKKKPLANTTIMATSAIQQSAFTGQTALKQLNEFVRKTGGAGKGRTNMRRTVKSAPQSIWYGPDRPKYLGPFSEQIPSYLTGEFPGDYGWDTAGLSADPETFARNRELEVIHSRWAMLGALGCTFPEILEKNGVKFGEAVWFKAGAQIFSEGGLDYLGNPNLIHAQSILAIWAVQVVLMGFVEGYRVGGGPLGEGLDPIYPGGAFDPLGLADDPDAFAELKVKELKNGRLAMFSMFGFFVQAIVTGKGPIQNLYDHVADPVANNAWAYATNFVPGQ

SEQ ID NO: 51454 - protein, 349 aa, Glycine max
  Clone ID: 700907439_FLI.pep
GMITGGAAATVFYNLRQKHPTLDMPVIDYDLALLFQPVLVLGISIGVAFNVIFADWMITVLLLIIFVGIATKAFLKGVETWKKETIIKKETARQSQFNGTERTAEVAYEPLPGGPNTSNHKEPKKSKETGSILENVRWKALGVLFTVWVLILASEIAKSHTTTCSVEYWVPVALGATSYQAVLLYTGKRVIASKGDQRTQWRAHQLIMYCSCGICAGIVGGLLGLGGGFILGPLFLELGIPPQVSSATATFAMTFSASMSVVEYYLLKRFPIPYTLYFVAVSTFAAFVGQVLVRKLVAILGRASLIIFILSSTIFVSAISLGGVGISNMIQRIANKEYMGFENLCTYSA

SEQ ID NO: 51455 - protein, 138 aa, Glycine max
  Clone ID: 700852414_FLI.pep
SYIERGALRVGAALIVRRKERQKGKMVCIRKATVKDLLAMQACNLFCLPENYQMKYYLYHILSWPQLLYVAEDYNGRIVGYVLAKMEEETTDCHGHITSLAVLRTHRKLGLATKLMTAAQNAMEQACHCPLSFPLDAT

SEQ ID NO: 51456 - protein, 312 aa, Glycine max
  Clone ID: 700889792_FLI.pep
LGWGVPNKIDMIALSFVRKGSDLVNVRKVLGPHAKNIQLMSKVENQEGVLNFDEILRETDAFMVARGDLGMEIPVEKIFLAQKMMIYKCNLVGKPVVTATQMLESMIKSPRPTRAEATDVANAVLDGTDCVMLSGESAAGAYPELAVKIMARICIEAESSLDYGAIFKEMIRSTPLPMSPLESLASSAVRTANKAKAKLIVVLTRGGSTAKLVAKYRPAVPILSVVVPVLSTDSFDWTCSDETPARHSLIYRGLIPILGEGSAKATDAESTEVILEAALKSATERALCKPGDAVVALHRIGAASVIKICIVK

SEQ ID NO: 51457 - protein, 119 aa, Glycine max
  Clone ID: 700889981_FLI.pep
SERMAPRSSSKDAQDLFRALWSAYAATPTNLKIIDLYVIYAVFTAFIQVVYMALVGSFPFNSFLSGVLSCVGTAVLAVCLRIQVNKENKEFKDLAPERAFADFVLCNLVLHLVIMNFLG

SEQ ID NO: 51458 - protein, 421 aa, Glycine max
  Clone ID: 700890029_FLI.pep
CMPPKCPSLPCEGEVVHKGHTEKVIILSEWWKSDTEAVINEALKSGSAPNVSDAHTINGHPGSVQNCASQGGYKLQVQPGNTYLLRIINAALNEELFFKIAGHQLTVVEVDAVYTKPFKTDTIVIAPGQTTNVLLKANRAAGKYLVAATPFMDSPITVDNVTATATLHYTGSLGSTITTLTSLPPKNATPVATNFTDSLRSLNSKKYPARVPQKVDHSLFFTVSLGVNPCPTCANGSKVVAAINNVTFVMPKVSLLQAHFFNISGVFTDDFPGKPPVVYDFTGTQQPTNLRTNRGTRVYRLAYNSTVQLVLQDTGMITPENHPIHLHGFNFFVVGRGQGNFNPKKDTKKFNLVDPVERNTVGVPSGGWTAIRFRADNPGVWFMHCHLEIHTTWGLKMAFVVDNGKGPNESLLPPPSDLPKC

SEQ ID NO: 51459 - protein, 196 aa, Glycine max
  Clone ID: 700890042_FLI.pep
TEPSRTQSFSLSILPQSIQLPFNFNPISALFFFFFFIFWVSLFTSFSVMASKRIVKELKDLQKDPPTSCSAGPVAEDMFHWQATIMGPPDSPYTGGVFLVSIHFPPDYPFKPPKVAFRTKVFHPNINSNGSICLDILKEQWSPALTISKVLLSICSLLTDPNPDDPLVPEIAHMYKTDRAKYEATARSWTQKYAMG

SEQ ID NO: 51460 - protein, 201 aa, Glycine max
  Clone ID: 700890120_FLI.pep
FLLSLAAKRNFPCSCSCVLLAAPKFYVVVEMVMITAWITDLFACMGGCFGCCVKPTPIIAVDEPAKGLRIQGQTVRKPHISDGFWSSSTCDLDNSNIQSQRSISSVSTSNQILYHSGGTSTPGANPEFVNPGLLLWNESRLQWVGSGKSRKHGQQKREPRLNWNATYESLLGTRQPFPKPIPLSEMVEFLVDVWEREGMYG

SEQ ID NO: 51461 - protein, 181 aa, Glycine max; identical to SEQ ID NO: 44160
  Clone ID: 700892840_FLI.pep

SEQ ID NO: 51462 - protein, 428 aa, Glycine max
  Clone ID: 700892843_FLI.pep
VGSFQKPDSDSGYVSYIKVSTDGGAGTGSGGGGGVHKHTIVVVVIVIIALVVICGLVFGGVRYHRRKQRLPESPREGSEEDNFLENLTGMPIRYSYKDLEAATNNFSVKLGQGGFGSVYKGVLPDGTQLAVKKLEGIGQGKKEFRAEVSIIGSIHHLHLVRLKGFCADGTHRLLAYEYLSNGSLDKWIFKKNKGEFQLDWDTRFNIALGTAKGLAYLHEDCDSKIVHCDIKPENVLLDDHFMAKVSDFGLAKLMNREQSHVFTTLRGTRGYLAPEWITNYAISEKSDVYSYGMVLLEIIGGRKNYDPSKSSEKSHFPTYAYKMMEEGKLRDIFDSELKIDENDDRFQCAIKVALWCIQEDMSMRPSMTRVVQMLEGICIVPNPPTSSSLGSRLYATVFKSSSEGATSSGPSDCNSDAYLSAVRLSGPR

SEQ ID NO: 51463 - protein, 293 aa, Glycine max
  Clone ID: 700894858_FLI.pep
WNLSIEGQIIECCVCINSTKATPPNSSSSNQDIANDPNSFFICSIKMSGSNDGSGSWSSRFLKVASAAAATAAVAGGLYAILSSSTSASSEMEVPFGSARRESKERDDGGSGSHPREGATTVSRWKKPEIGWVKLNVDGSRDPYKSSSAGCGGVLRDASAKWLRGFAKKLNPTYAVHQTELEAILTGLKVASEMNVKKLIVESDSDSVVSMVENGVKPNHPDYGVVELIRTKRRRFDWEVRFVSVSNKANRVADRLANDARKLACDDVCEEYLHPPANCNQLLLEDEIGCESF

SEQ ID NO: 51464 - protein, 139 aa, Glycine max
  Clone ID: 700894905_FLI.pep
CAIGYGPRLIQVITGSPPNCPRRRPLPENLNYPSFVAVLPVSSSLLSKTFFRTVTNVGPPSAVYRVRVETQAEGVAVTVRPSQLVFSEAVKKRSFVVTVTADGRNLELGQAGAVFGSLSWTDGKHVVRSPMVVTQAQPL

SEQ ID NO: 51465 - protein, 110 aa, Glycine max
  Clone ID: 700895020_FLI.pep
CEKTWLNRPDLVSEIWSVLEPFKATCIDTPPHLISKKLRRIPSHFVCPIVQEVMEDPYIAADGFTYEEEAIRGWLNSGHDTSPMTNLKLDHTDLVPNYALHNAILEWQQQ

SEQ ID NO: 51466 - protein, 189 aa, Glycine max
  Clone ID: 700895068_FLI.pep
NYYKGVTTMMITCASKIAQMQSLLLGSGLGDLGSGGVFLLNTLDDSDSHSLTHVPHSKTTKGRILRESFNHHGLGWNHLNHTCITILQKFGLLLKLLTRSPVNLGQDFRKLDSNVRSVAIKHRCVSISNLARVVHDNDLRCEVGSFLGRVILGVGCNKTTLEILDCNILHIKANIVTWKSLCESLMVHL

SEQ ID NO: 51467 - protein, 188 aa, Glycine max
  Clone ID: 700899574_FLI.pep
FVPSLVRSLHKPKTQQKNVHFSFSFLIKSMAGGSIKRHSFSEEDHGFASSMEPGYSGHNHHFHHGFVSRTLGYGTFYNRGVRSHSIFSPRSGRFYDARFEDHQPHFLQACSLCKKRLGDNSDIFMYKGDTPFCSEECRQEQMERDEAKEKNNNLSSSMKALRKKEQRNSVSPNKTQDYSFRAGTVAAA

SEQ ID NO: 51468 - protein, 112 aa, Zea mays
  Clone ID: 700377842_FLI.pep
RDCRQFQRIYHIDTPPPPTTKKNKVKGKHKTSSDPGKTTRYVQQQVPSTSGWWCCSWTTSSTSCSGSTSAAPTAHGRSDTASAWPSSSSPSPRSSSCCGRGGPRTAPPQHEL

SEQ ID NO: 51469 - protein, 403 aa, Zea mays
  Clone ID: 700205368_FLI.pep
ALSPAPSPSHVVSFLASDARFSPASPMETPLSTRRITRSLAAASAQKIVAAGMDSAAIFSLSKNAAAGETHAQTRAALHDITNDSPVVGLATGSLHATDTTPAKTRRRAPRCTPGSGEALLRGQVKALLHKVDEEQGCAAAGALVRPKRIQALLGVSRSPAQLLAPTPANTPQIGPVSAPREGVGLHDGATVVPCVIDEEELLIPKLQVIAGSLPPPQPEEKLGECQLNRALVFDDSPDNSDESSGSAVPSSVSLQEGSAGKTSSPEEGDSSSAWSTQVHASSEKGDQEELDVEELAADYTEEEEDFEEEDDWEEDSDDGCYDDLCDVMSRMTVLDEGEKKTGLPQFEGKHTRFIYNSDDEIEREEVADAAEARAELGALMLRGLPVPEGRHLRFHDDEDDEE

SEQ ID NO: 51470 - protein, 228 aa, Zea mays
  Clone ID: 700243602_FLI.pep
GVHTSKHLFIPSLFFLNVQHVLFYSATKQTKGRPQQQCSVIILTLLITKGPSDVAGKPQRLVELAQGVLPGGRAHGQRLQPEPGACWPPHRRAVLVGVAGEAAQVRSVEAAHVQVPVRLELIGPRDGLRHDAAQVGREQQPLRVRAEAHVVDPLLVRLRAALRPGHVHAAQPGAVGPHQVDAEHGRVRRVVTVRRERDQTPVRGPAGHRVDPLALRQPPDSAFLAARR

SEQ ID NO: 51471 - protein, 367 aa, Zea mays
  Clone ID: 701164791_FLI.pep
EIMGHSVTSTHHISNDARRPGGLLAARTGGSFRDTGEDDAGAEQLLADLGGECVVAEEELDEEEPADQHHEVLPGALLVVDAGVLGLTAVGPVHVLQQLAALLAEEAVGHEVPGGVAEHAGVLGGARLVAEQHLALPHLEHRVVALHQQVLLGVPVLELDGRVQAQRLPHHRLGQLHPLHRREGDLAAGVGHGAADLGHQPLVELLAAAGHVGQQAREQHLEAAVAVEGGGEEEVVAGLLARQAQALGGVQRLLRHRGEVLVQRPVVALDEERREVERVEQRLLQDHGEAERDQRVELPDEPLGRLARPALAELGRRGAHAEVGLADEVEGGDVVELVELGLAALGQLRLHGGEERGEVGAEGGDHV

SEQ ID NO: 51472 - protein, 107 aa, Zea mays
  Clone ID: 701183676_FLI.pep
LINTSSPAYDRAVRVAQTRALTAVENKQEKEMKVVARPVSWFSKTFGRADHNLQRNSWREKKMFVSNLPVLFGIGEPFRGLFIGQCKTPLRTLKMGIIKPGHFVPNV

SEQ ID NO: 51473 - protein, 76 aa, Zea mays
  Clone ID: 701182828_FLI.pep
RHAVVGLEERLRDGVLLGLRDVVAQAADVDELHQGGRRVVEVAEEGVLVPLEGPGLLRRLRAVGPDRELVGHDDGA

SEQ ID NO: 51474 - protein, 211 aa, Zea mays
  Clone ID: 701182983_FLI.pep
LGTSAPRETAAEASNFRGTSVCLTSEVQSSDEKPIQLVEDILEEFEDDEERDFSYLLDILIASGIHGTAEDQMYKVCQSLDHPAGDDVFEKLEKKYNKVVQWSRSDRKLLFDMANTILSQILAPCLNMQPWVYTTRNLAPLWGPDGLLEKVLQMLVQRREHLAPSETKPEKKGFDPKWPGLADCIDRAGRDIERMVKDDLLEELVVELLSS

SEQ ID NO: 51475 - protein, 145 aa, Zea mays
  Clone ID: 701185413_FLI.pep
LPLYSIHAEHARTQHRFHCLYCWGTARKGLKVSTSPMTSVRFRSRNTIWSPGKNAACWRFCAHENKIPATAGANALDRDIAVVAIPFAAPLCSCGHHSVVLQERCAGDSGDGEDAFEHRRDVERHTKPYSRQARHEGVSGDYRYG

SEQ ID NO: 51476 - protein, 261 aa, Zea mays
  Clone ID: 701160461_FLI.pep
TPSLVPAEASVLRRIAARLGVSSWDFTAGAGPCDHGDSGVHCDCSFSNGTVCHVTEIFLKGQNFSGELPPDFADLPYLLQLDLSRSLFHGGVPHQWARMKLQGLSLMANRLSGPFPMVLTKITTLTNLSIEGNEFYGPIPPEIGYLIRMEKLILSTNEFTGPLPAALSLFSNLTDLRISSTNFSGRIPDFWGNLKRLDKLQIEGSFLEGPIPSSLSELKNLSDLRISDLRGSGSSFPDLSGMTYMNKLVLRNCSISGSIPP

SEQ ID NO: 51477 - protein, 51 aa, Zea mays
  Clone ID: 701160966_FLI.pep
VVLHDKDCQSYYTIAMHVLQIQYRILSSICPFHRLPIQLPRLNIWIKTSHV

SEQ ID NO: 51478 - protein, 149 aa, Zea mays
  Clone ID: 701163441_FLI.pep
PAEQRVWRRRLLRPGRLQVPRLRQRPLRRLLAGIRVYTAVPRPATVSRSWLVFLLDQVFTYLILAAGAAAAELLYLAYNGDKEVTWSEACGVFGSFCRQARTSVAITFGTVLCFILLSLISSYRLFSAYEAPPSSALGSKGVEIAAYPR

SEQ ID NO: 51479 - protein, 132 aa, Zea mays
  Clone ID: 701163570_FLI.pep
PAQQKRTNQIRFLLLSSISPIRTAIGPWIPACLPLRLPLPNTRHAGSARRAMTPRPTRASPAGSTLPSSSAAATTTRRGTTSSATAILPTPPSSTTAAAPRTPTLPAAPLTCTVPTTTPKTSKPLLLPQASS

SEQ ID NO: 51480 - protein, 123 aa, Zea mays
  Clone ID: 701164125_FLI.pep
GKKGISGHINVDYKNEVLSVELTMPQDASRDTIRDTRGLSGGERSFSTLCFTLSLHGMAEAPFRAMDEFDVFMDAVSRKISLDTLVDFAVAQGSQWIFITPHDISMVKAGDRIKKQQMAAPRG

SEQ ID NO: 51481 - protein, 206 aa, Zea mays
  Clone ID: 701185792_FLI.pep
QVVGTLIAGSVYLGTIWWLLDTIPDVCNTELLPAGSPWTCPYDHVFYDASVLWGLIGPRRIFGDLGTYSAVNWFFLGGAIAPLLVWCTHKAFPAQKWIRHVNAPVLIGATTFMPPATAANYTTWILVAFLSGYVVYKYRRNWWERHNYLLSGALDAGLAFMAVLLYLCLGLENKSLNWWGNDLDGCPLASCPTAKGITVDGCPVHN

SEQ ID NO: 51482 - protein, 218 aa, Zea mays
  Clone ID: 701186234_FLI.pep
KLMHLQVRLPEKILVKFTGPNPCYGVAQIICQWLQVQGLRGGERVVGEREVHPGVRLAGAVRDDALPGRTSCVQGARRRQSLLAPINREHMCKSINFAVGWGNEHPVQAQLIGEQGSRFVREELSMDYVYDYMMHLLTEYAGLLRYKPAVPEKAVEICTESVACPAQSLHRDCMMDSMESHVAGFDLCTLPPPFTDEEAKAIADREAEVLRKVEKMED

SEQ ID NO: 51483 - protein, 65 aa, Zea mays
  Clone ID: 701161794_FLI.pep
KRQPNVEPANCPRSITLLMGALEHVRQHTGLDNLRNFFCRGPYIPEVDFLAILSKSNGLFLKINI

SEQ ID NO: 51484 - protein, 351 aa, Zea mays
  Clone ID: 701177121_FLI.pep
EVSQLTANHILGHKNMSSKRLHGVFTLLMLMVFNVSGAFVGITIGNDMSNIPPATDIVSILKAKKIQHVRLLDSDHQMLNALANTGIEVMVGVPNDQLLRVGQSRSTAADWINKNVGAYIPATNITYIAVGNEVLTTIPNAALVLVPALQFLQSALLAANLNTQVKISSPHSMDVISKAFPPSAATFNLTWSSIMSQYLQFLKNTGSSFMLNAQPYYGYVGGQGVFPLEYALFRSLNPNSQISDPNTNLFYTNMFDAIIDATYNSIQAMNFTGIPVLVTASGWPWRGGPSEKAATVDNALAYNTNLIHHVLNNSGTPSQPNNQPSTYIFELFNEDNRSGPVSEQNWGIMFP

SEQ ID NO: 51485 - protein, 263 aa, Glycine max
  Clone ID: 700944591_FLI.pep
AFSKQEKKMGKIMLVLGSLIGLCCFTITTYAFSPSGWTNAHATFYGGSDASGTMGGACGYGNLYATGYGTRTAALSTALFNDGASCGQCYKIICDYKSDSRWCIKGRSVTVTATNFCPPNFALPNNNGGWCNPPLKHFDMAQPAWEKIGIYRGGIVPVLFQRVPCKKHGGVRFSVNGRDYFELVLISNVGGAGSIQSVFIKGSKTGWMAMSRNWGSNWQSNAYLNGQSLSFRVTTTDGETRVFQDIVPASWTFGQTFSSPVQF

SEQ ID NO: 51486 - protein, 88 aa, Glycine max
  Clone ID: 701006450_FLI.pep
SQSAPLTTNHSSSAQHSSGSRNGTVVEPKPTTQTYQYDSSYQPAPEKIAEAHKAARFAVGALAFDDVSIAVDYLKKSLELLTNPSAGQ

SEQ ID NO: 51487 - protein, 275 aa, Glycine max
  Clone ID: 701061195_FLI.pep
IARMALRCLVMSLSVLFTLGLARESHARDEDFWHAVWPNTPIPSSLRDLLKPGPASVEIDDHPMQIEETQYPKTFFYKEDLHPGKTMKVQFSKPPFQQPWGVGTWLKEIKDTTKEGYSFEELCIKKEAIEGEEKFCAKSLGTVIGFAISKLGKNIQVLSSSFVNKQDQYTVEGVQNLGDKAVMCHRLNFRTAVFYCHEVRETTAFMVPLVAGDGTKTQALAICHSNTSGMNHQMLHQLMGVDPGTNPVCHFLGSKAILWVPNLSVDTAYQTNIVA

SEQ ID NO: 51488 - protein, 160 aa, Glycine max
  Clone ID: 701063243_FLI.pep
PVVAASSSLTYLSHYSSSLPLRSRTRRRPVSTNIHPTIVITTRIFSRIFTTTTTTTMVVVRVFKNLDITPICIIIINNTGINIITSSNINIITNNNIVIFFGEGVFVVMHPNLENASIDPNLVAELVNQILVPLLNLPPHFLRELVHLLLLLLTELRSET

SEQ ID NO: 51489 - protein, 188 aa, Glycine max
  Clone ID: 701013445_FLI.pep
PSTILPLFLHIQQSEGMDNKATILMQKYEVGHFLGQGNFAKVYHARNLKTGQSVAIKVFNKESVIKVGMKEQLKREISLMRLVRHPNIVQLHEVMASKTKIYFAMEMVKGGELFYKVSRGRLREDVARKYFQQLIDAVGHCHSRGVCHRDLKPENLLVDENGDLKVTDFGLSALVESRENDGLLHTIC

SEQ ID NO: 51490 - protein, 75 aa, Glycine max; identical to SEQ ID NO: 44604
  Clone ID: 701044955_FLI.pep

SEQ ID NO: 51491 - protein, 84 aa, Glycine max
  Clone ID: 701050725_FLI.pep
REQASQNPSSRSAFVFYIRMESQVKHALVVKVMGRTGSRGQVTQVRVKFLDDQNRHIMRNVKGPVREGDILTLLESEREARRLR

SEQ ID NO: 51492 - protein, 148 aa, Glycine max
  Clone ID: 700845740_FLI.pep
LSPSIFLSNVHKEKEKKRKVAIKMESSHNMRQSTMETEFEDLLPVMAEKLDVESFVSELCGGFKLLSDPETGLITSESLRTNSALLGMEGMSKEDADAMVRQGDLDGDGKLNETEFCILMVRLSPGMMEDAESWLEKAIDEELRKSSS

SEQ ID NO: 51493 - protein, 81 aa, Glycine max
  Clone ID: 700846257_FLI.pep
TQLFFFIKLRHLPSLAPHNRNIILPRKQEVKSKPTKVFIDAIHFNIHFPPDYPFKPPKVAFRTKVFHPNINSNGSICLDIL

SEQ ID NO: 51494 - protein, 260 aa, Glycine max
  Clone ID: 700907266_FLI.pep
ARSNKMKMKVLVLFVATVLVAYECHGSDYQKFPLQMKTGFGGQYSNEVACASWRLGVEANNVVKWQTVPAACGEYIADYVLGDQYRSDSKTVNQQAYFYAKSLKLTNKDVFVLDVDDTTLSNLQYFANHGFGVEPHNTTAFKNWVLDGEAFALPETLKMYNKLLALGIKIVFLSERPLSLGDVTAKNLKEVGFNTWEKLILRDPSEYSGKLSFEYKSAEREKLEKEGYRIIGNVGDQWSDLLGSNKGTRTFKLPNPLYYD

SEQ ID NO: 51495 - protein, 65 aa, Glycine max
  Clone ID: 700890182_FLI.pep
NIILITSKGLGELHETQTRRGFPHIFVLIIMVLPHFPLPVEQFLLHHFQVHCQELPSLAALPPTP

SEQ ID NO: 51496 - protein, 224 aa, Glycine max
  Clone ID: 700893121_FLI.pep
EYLPNGSLWDRLHTSRKMELDWETRYEIAVGAAKGLEYLHHGCERPVIHRDVKSSNILLDEFLKPRIADFGLAKLVQANVGKDSSTRVIAGTHGYIAPEYGYTYKVNEKSDVYSFGVVLMELVTGKRPIEPEFGENKDIVSWVHNKARSKEGLRSAVDSRIPEMYTEETCKVLRTAVLCTGTLPALRPTMRAVVQKLEDAEPCKLVGIVISKDGSEKKIGVNDK

SEQ ID NO: 51497 - protein, 196 aa, Glycine max
  Clone ID: 700899120_FLI.pep
RFHHSSNPQSPEPTPPRVESMPAPTVPEPPLFQVKAVLEVEKKVIEEDVVALKRKDSTEIPSPEEKPLVSARFTHRKFLKSSSEGGRALRVVAKAKRDETLESTWKAITEGRSMPLSRHMKKSDMWHNRNVTPQPQETFNDALSVSSGRLRKEPSLSQDELNRRVEAFIQKFNQEMRLQRQQSLEQYMQMINRGAA

SEQ ID NO: 51498 - protein, 78 aa, Glycine max
  Clone ID: 700864006_FLI.pep
AMEWSGQKQFGASGTVPFLVDGAEAGTLKSHGPLSFLKVYEAGHMVPMDQPKAALEMLRSWMQGKLTMTKSGDNVSPK

SEQ ID NO: 51499 - protein, 163 aa, Zea mays
  Clone ID: 700095226_FLI.pep
GLGIHAVACFTAASSRFLALGGFLAWGRAWWRRTSRIASLDWACRGPWKATTNKERGQEDGKGEERMRCWICSQTRNARGESKLRISDAAFSLSHARLSRSTSVAAVVATAAESPHPPSMDDDEEESDDVPPPPVRIRLGSRTESGDGSADAATTGEGIDFRA

SEQ ID NO: 51500 - protein, 330 aa, Zea mays
  Clone ID: 700215178_FLI.pep
LIAMMVAALSSRIAPAASAPSQLLADLCSVEQRAGSQLLQDLSPCFRVALHAASAAIVEAVGDHRAIHLVDFDVSFPQHAALIQYLADRRVQGRSLKVTAVTDPSSPFTQSLTASLPAIEERLKKLAERAGVEYRFTVVSCRAAELDASRLCCEPGEAVAVNLAFALSHVPDESVSPANPRDELLRRVRALGPQVVTLVEQELNTNTAPLAARFTDACAHYGAILESLDATLAREIAEKARAEAALSKKAANAVGRDGPDRLERCEVFGKWRARFGMAGFRPVSLGSSIAEELVGARVGHVPPGFTVKAENGVLRFCWMGRAVTVASAWR

SEQ ID NO: 51501 - protein, 159 aa, Zea mays
  Clone ID: 700222922_FLI.pep
VVLPVGCSARAPPLPAILRLVKQLAPKIVIAIDHGADRADLPFSQHFLNCFQSCMFLLDSLDAAGIDADSTCKIEKFLIQPRIEDAVLGRGKVDKPIAWRSAFAAAGFAPVPPSNLAEAQADCLLKRVQVRGFHVEKCGVGLTLYWQCGELVTVSAWRC

SEQ ID NO: 51502 - protein, 98 aa, Zea mays
  Clone ID: 700432359_FLI.pep
EEFIENAGSVFLGQWTPESVGDYASGTNHVLPTYGYARMYSGVSLNSFLKYITVQSLTEEGLRKLGPYVAKMAEVEGLEAHKRAVTLRLQEVEANVTV

SEQ ID NO: 51503 - protein, 150 aa, Zea mays
  Clone ID: 700477742_FLI.pep
RDRILRMVKSLSPKVVTLVEQEANTNTAPFFLRYMETLDYYTAMFEAIDVACPRDDKKRISTEQHCVARDIVNLIACEGAERIERHEPFGKWRARLVMAGFRPYPLSPVVNRTIKTLLDSYHSHYRLEERDGILYLGWKNRKLVVSSAWC

SEQ ID NO: 51504 - protein, 290 aa, Zea mays
  Clone ID: 700550649_FLI.pep
KKISHFFANQTIMNAVEKAKKVHIVDYGIYYGFQWPCLIQRLSTRPGGPPRLRITAIDTPHPGFRPAERIEETGRYLKDYAETFNVPFEFRAIPSRFEAVQIEDLHIAKDELLIVNSMFKFKTLMDESVVAESPRNMVLSTIRKMNPHLFIHGIINGSYNAPFFASRFREALYHYSAIFDMLETNIPRDNEQRLLIESALFGREAINVISCEGLERMERPETYKQWQVRYQRAGFRQLPINQDIMKRAREKVRCYHKDFLIDEDNRWLLQGWKGRIVLALSTWKPDHRSS

SEQ ID NO: 51505 - protein, 95 aa, Zea mays
  Clone ID: LIB3059-048-C3_FLI.pep
WRERLTYAGLTQVWFDPDEVDTLKDQLIHVTSLSGSGFNILVCDGSLALAWHNRPLYVATAWCVTGGNAASSMVGNICKGTNDSRRKENRNGPME

SEQ ID NO: 51506 - protein, 226 aa, Zea mays
  Clone ID: LIB3060-022-C11_FLI.pep
ILVADASTRTLLRDLAVAAALAMSIFEYNGSAVVAMVGKNCFAIASDRRLGVQLQTIATDFQRVFKVHDKLYIGLSGLATDAQTLYQRLVFRHKLYQLREERDMKPETFASLVSALLYEKRFGPYFCQPVIAGLGDDNVPFICTMDCLGAKELAKDFVVSGTASESLYGACESMYKPNMEPDELFETVSQALNSSIDRDCLSGWGGYVLIVTPTEVREHVIKSRMD

SEQ ID NO: 51507 - protein, 256 aa, Zea mays
  Clone ID: LIB3061-064-A11_FLI.pep
ICWNSYMKSHIASSDFEGIVQVWDVTRSQVFVGMREHERRVWSVDFSIVDPTKLVSGSDDGSVKLWDMNQAGSIGTIRTRANVCSVQFQPDTARSIAIGSADHKIYCYDLRNIRAPYCTLVGHTKTVSYVKYLDASTILSASTDNSLKLWDLSMNPGRIIDSPVQTFTGHTNTKNFVGLSISDGYIATGSETNEVFVYHKEFPMPVLAYKFSVTDPISGQEIDDQSQFISCVCWRGQSSTLLSANSSGNIKILEMD

SEQ ID NO: 51508 - protein, 44 aa, Zea mays
  Clone ID: LIB3078-002-E5_FLI.pep
RDFITCKYDKKLASQHEQLIKGFSCTNPQSSKRTDNSSPHELIT

SEQ ID NO: 51509 - protein, 55 aa, Zea mays
  Clone ID: LIB3078-045-D1_FLI.pep
SMEVIVLIMASVKLNCGSKKASSAKMGISSSTVAYRITLANHFQSCIQCFFLCSS

SEQ ID NO: 51510 - protein, 106 aa, Zea mays
  Clone ID: LIB3157-003-H2_FLI.pep
YSMTSAMHKQRSSIPCQSIVCRPRGNGVEHPPFPSLEKPLLILGDHETLVVFPAHLVPERPDNVTVQRQLPQPCPPAPGLPLLVAPSMVRTAGSLAGYGVHGAARE

SEQ ID NO: 51511 - protein, 125 aa, Zea mays
  Clone ID: LIB3279-186-C2_FLI.pep
RKGYKLVAIKLIVPSKGFAEKHYHDLKERPFFNGLCDFLSSGPVLAMVWEGEGVIKYGRKLIGATDPQKSEPGTIRGDLGVVVGRNIIHGSDGPETAKDEIALWFEPKELVSYTSNAEKWVYGVN

SEQ ID NO: 51512 - protein, 117 aa, Zea mays
  Clone ID: LIB3279-221-F4_FLI.pep
RAGFVDRFSNALLYYKPVFESLDVAMPRDSPERVRVERCMFGERIRRAIGPEEGAERTDRMAASREWQTLMEWCGFEPVRLSNYAMSQADLLLWNYDSKYKYSLVELPPAFLSLAWE

SEQ ID NO: 51513 - protein, 100 aa, Zea mays
  Clone ID: LIB3356-048-D4_FLI.pep
GCYDQHRHAETDTSSPRCQYSARPIPHFSTWNPRTCTRFKRQSACASARLLSGTGANPADVKTARQAIAFSAFRRPSTASSTLGWIRNLSILLAASALVP

SEQ ID NO: 51514 - protein, 173 aa, Zea mays
  Clone ID: LIB3592-058-G7_FLI.pep
RFSDGNNGAPGRCAARRPGGGLAPRGGDGHHAPHPTEAEHAVLRLDCEPGRHRADAGGDHLFRNARAERHRAEARHAEPGAPLAEDLAPLQPVGAIPADRVRRLPRQGRLGPGLLRSLPPQRRVQRLEDGAVVRARVREARRQRGRVGVQFLLDEGHHLRAQRAHAPEQLVAG

SEQ ID NO: 51515 - protein, 424 aa, Zea mays
  Clone ID: LIB3594-049-F7_FLI.pep
LMRQRSRTWSHESRQPSPGVVRTQLASGYPTASYEFRPEKRLRELREDPQSMVKQLLTKRAEALSEERIEEFLNLVQQARGVVSITGEPIQRLGAYLLEGLVARHANSGTNIYRALKCREPESNELLSYMKILYNICPYLKFGYMAANGAIAEALRNEDRIHIIDFQIAQGTQWITLIQALAARPGGPPHVRITGIDDPVSEYARGEGLDLVGKMLKSMSEEFRIPLEFTPLPGIYATQVTKEMLDIRSGEALAVNFTLQLHHTPDESVDVNNPRDGLLRMVKGLSPKVTTLVEQESHTNTTPFLMRFTETLDYYSAMFESIDTNLPRDNKERINVEQHCLAKDIVNIIACEGKDRVERHELLGKWRSRLTMAGFRPYPLSSYVNSVIRKLLACYSDKYTLEEKDGAMLLGWKNRKLISASAWH

SEQ ID NO: 51516 - protein, 104 aa, Zea mays
  Clone ID: LIB3595-039-G8_FLI.pep
TRRRCNLRRGCQLSQRRESFLGLVWKSHFFQEIFIFLKEISLFFFEKIEFPWEIRVSKRALNFVKLCPESIFPIGAPWSLNLQNYMVQTKYCFFIRVDVLCGIL

SEQ ID NO: 51517 - protein, 69 aa, Zea mays
  Clone ID: LIB3597-012-E12_FLI.pep
AGMSSMEATPWRTGRRRSLSGSLKVWHSGRATFIPGSTRLEQLSLDALPASMETRVLFEYYLLALAEES

SEQ ID NO: 51518 - protein, 350 aa, Zea mays
  Clone ID: LIB3607-007-A8_FLI.pep
HLAVLKTAANPRGDAEQRLVAMMAGALSSRIRRPPASHQHLAGLCGAEQRAEWQLLQHVSPCFGLALHGANLAILDAVADQRAIHLIDFDVSVAQHTALIDSLASRRVAGTCLKVTAVTDPTSPFTPALAQALAATGQRLKEHARQAGVEFRFRAVSCVAGEVEASRSRLGCDETGEALVVNLAFALSRVPDESVSPANPRDALLRGVRGLRPRVVTLVEQELGANTAPLAARFADACAHYGAVLESLDATLGRDSAQRARAEAALASKAANAVAREGPDRVERCEVFGKWRARFGMAGLRPVAIGQGVADRVKGRLGPAARPGFDVKLDSGRLAIGWMGRVVTVASAWR

SEQ ID NO: 51519 - protein, 156 aa, Zea mays
  Clone ID: LIB3632-012-A9_FLI.pep
LSSHLSGPSVHLAGLQLHRHHVTRCLMEELHQDPQAPDSSSSFRLSLSRWFSSPLCAAKTQLVETAKHEAAQDKARDQWRREMERENPPNNGAKLRGRDPSLTSPWPSRAAPAFERRPPYPTNAPCTRARPAARPPPPVPLSPPPPPSVLSLEEPM

SEQ ID NO: 51520 - protein, 222 aa, Zea mays
  Clone ID: LIB3732-015-D2_FLI.pep
EIKAFNLHAVFKEVMGFIKPIASIKRLSVSVMLAPDLPLCAIGDEKRLMQTILNISGNAVKFTKEGHITLVASIVKADSLREFRTPEFHPTASDEHFYLKVQVKDTGCGVSPQDLPHVFTKFAHPQSGGNRGFNGSGLGLAICKRFVSLMGGHIWIDSEGTGRGCTATFVIKLGVCDNTNTYQQQLVPLVWPSSADSNLSAPKVLPDGRGSVSLKSRYQRSV

SEQ ID NO: 51521 - protein, 176 aa, Zea mays
  Clone ID: LIB3600-036-E1_FLI.pep
RQTMQGNIWAVLDGQGLPESMTLVLRFQLQPSLASSNLLGGSFDQEHYSSLPSNQIAGLKVLLIDDDEINLVVARKLLERLGCTVSSGSGLMDSSSACASFQLVMVNLEMSAIDPLDAASRIRQQYRSSHWPLVMAMTSEQNVWEKCAQSGINGVLKKPLVLLEVKEELERILQNT

SEQ ID NO: 51522 - protein, 625 aa, Glycine max
  Clone ID: LIB3049-005-H6_FLI.pep
PFVLSQRKKTLAHRFKMQIFVKTLTGKTITLEVESSDTIDNVKAKIQDKEGIPPDQQRLIFAGKQLEDGRTLADYNIQKESTLHLVLRLRGGMQIFVKTLTGKTITLEVESSDTIDNVKAKIQDKEGIPPDQQRLIFAGKQLEDGRTLADYNIQKESTLHLVLRLRGGMQIFVKTLTGKTITLEVESSDTIDNVKAKIQDKEGIPPDQQRLIFAGKQLEDGRTLADYNIQKESTLHLVLRLRGGMQIFVKTLTGKTITLEVESSDTIDNVKAKIQDKEGIPPDQQRLIFAGKQLEDGRTLADYNIQKESTLHLVLRLRGGMQIFVKTLTGKTITLEVESSDTIDNVKAKIQDKEGIPPDQQRLIFAGKQLEDGRTLADYNIQKESTLHLVLRLRGGMQIFVKTLTGKTITLEVESSDTIDNVKAKIQDKEGIPPDQQRLIFAGKQLEDGRTLADYNIQKESTLHLVLRLRGGMQIFVKTLTGKTITLEVESSDTIDNVKAKIQDKEGIPPDQQRLIFAGKQLEDGRTLADYNIQKESTLHLVLRLRGGMQIFVKTLTGKTITLEVESSDTIDNVKAKIQDKEGIPPDQQRLIFAGKQLEDGRTLADYNIQKESTLHLVLRLRGGF

SEQ ID NO: 51523 - protein, 120 aa, Zea mays
  Clone ID: 700805385_FLI.pep
ATWTCSSTSPPSPSASACTPPGTTRTSSSSLSSGGSWRHWRAGSPARAAGPGTSSAGSRRGCAGPRSAPRTGPRRTSPGWSSSAGSLIGKPLFRHLLLTVICAQIMSLAVSVFVTLCLCV

SEQ ID NO: 51524 - protein, 752 aa, Glycine max
  Clone ID: 700756638_FLI.pep
DESFGIPGAFYIKNYMQSEFFLVSFKLEDVPNHGTILFACNSWVYNAKLYKKDRIFFANKAYLPNDTPTPLVKYRKEELENLRGDGRGERKELDRIYDYDVYNDLGNPDENDDLARPILGGSSKHPYPRRGRTGRKPTKKDPRCERPTSDTYIPRDENFGHLKSSDFLTYAIKSLTQNVLPQFNTAFGFNNEFDSFEDVRCLFDGGVYLPTDVLSKISPIPVLKEIFRTDGEQALKFPPPHVIKVRESEWMTDEEFGREMLAGVNPGMIQRLQEFPPKSKLDPTEFGDQTSTITKEHLEINLGGLTVEQALKGNKLFILDHHDAFIPFMNLINGLPTAKSYATRTILFLQDDGTLKPLAIELSLPHPRGHEFGADSRVVLPPAAVNSAEGTIWLIAKAYVAVNDTGYHQLISHWLNTHATIEPFVIATNRHLSVLHPIHKLLLPHYRDTMNINALARQSLINADGVIERSFLPGKYSLEMSSAVYKSWVFTDQALPADLIKRGMAIEDPCAPHGLRLVIEDYPYAVDGLEIWDAIQTWVKNYVSLYYPTDDAIKKDSELQAWWKEAVETGHGDLKDKPWWPKLNTPQDLVHICSIIIWIASALHAAVNFGQYPYGGLILNRPTLTRRFLPEPGSKEYEELSTNYQKAYLRTITRKIEALVDLSVIEILSRHASDEIYLGKRDSDDWTDDQKAIQAFEKFGTKLKEIEAKINSRNKDSSLRNRNGPVQMPYTVLLPTSEEGLTFRGIPNSISI

SEQ ID NO: 51525 - protein, 315 aa, Glycine max
  Clone ID: 700847560_FLI.pep
EMEKPGGGGVLSAKEAFEKLEKVGEGTYGKVYRAREKATGKIVALKKTRLHEDEEGVPPTTLREVSILRMLSRDPHVVRLMDVKQGQNKEGKTVLYLVFEYMDTDLKKFIRSFRQTGQTVPPQTIKSLMYQLCKGVAFCHGHGILHRDLKPHNLLMDPKTMMLKIADLGLARAFTVPIKKYTHEILTLWYRAPEVLLGATHYSMAVDIWSVGCIFAELVTKQALFPGDSELQQLLHIFRLLGTPNEDVWPGVSKLMNWHEYPQWNPQSLSTAVPSLDELGLDLLSQMLKYEPSKRISAKKAMEHAYFDDLDKRHL

SEQ ID NO: 51526 - protein, 309 aa, Glycine max
  Clone ID: 700863849_FLI.pep
GVEFAVKRISHENDGLREFLAEVSSLGRLKQRNLVGLRGWCKKDVGNFLLIYDYMENRSLDKWVFDCDESKMLSYEDRIRILKDVAFAVLYLHEGWEAKVVHRDIKASNVLLDKDMNGRLGDFGLARMHSHDQVASTTKLVGTVGYMAPEVIKTGRASTQTDVYMFGILILEVLCGRRPLEEGKSPLVEWIWQLMVQGQVECALDERLRAKGDFNVQEMERVMHLGLLCAYPEPKARPTMRQVVNVLEGKNEVDDSEIENMDTYLLQQLKSRDILSEYSQYFSYTSHPTFQDIRHSSSMSLTWSEVEGR

SEQ ID NO: 51527 - protein, 384 aa, Glycine max
  Clone ID: 700831977_FLI.pep
FDTICKVNSQLISNVCTDALSAEKYYYFIRLMGRKASHVALECTLQSHPNMVILGEEVAASKLTLSEIAKQITDAIQARAEQDKYHGVILLPEGLIESIPEVYALLKEIHGLLRQGVEVDKISSQLTPWASALFEFLPPFIRRQLLLYPESDDSAQLSQIETEKLLAYLVEVEINKRLKEGTYKGKKFNAICHFFGYQARGSLPSKFDCDYAYVLGHICYHILAAGLNGYMATLTNLKNPVNKWKCGAAPIASMMTVKRWSPNPGATSIGKPAIHPATVDLRGKAYELLRQKAQSFLMDDIYRNPGPLQFDGPGADAKVITLSVEDQDYMGRIKKLQEYLEQVRTIVKPGCPQEVLKAALSVMASVTEVLAAMSTSYTNTLASL

SEQ ID NO: 51528 - protein, 254 aa, Glycine max
  Clone ID: 700867273_FLI.pep
VKFVAQGESFLTASADKTVRLWQGSDDGNYNCRHILKDHSAEVQAVTVHATNNYFVTASLDGSWCFYELSSGTCLTQVYDTSGSSEGYTSAAFHPDGLILGTGTTESLVKIWDVKSQANVARFDGHAGPVTAISFSENGYFLATAAHDGVKLWDLRKLKNFRNFAPYDSETPTSSVEFDHSGSYLAVAGSDIRIYQVANVKSEWNCIKTFPDLSGTGKNTCVKFGPDSKYIAVGSMDRNLRIFGLPGEDAPTES

SEQ ID NO: 51529 - protein, 208 aa, Glycine max
  Clone ID: 700867615_FLI.pep
LSGPIPDFFAQLKNLDDIDLSFNNLSGPIPSSLGKLPKLAYLDLSRNKLTGSIPASFGSFQKPGPAIMLSKNQLSGRLPASLANLDSDRIDLSRNKLEGDASMLFGSNKRTWSLDLSRNNFAFDLSRVEIPHKTLARLDLNHNKIYGSLPVGLTKVEHFQLFDVSYNQLCGLIPKGGELQKIDKSLYSHNKCLCGSPLSPCNHKQMTV

SEQ ID NO: 51530 - protein, 282 aa, Zea mays
  Clone ID: LIB3070-005-H9_FLI.pep
KLTSESNQLTFWSDSPTGDGSSPYYHSIAGGMSPYRSYAVMSPSSKPNGSSGTGDKDDKASRSNGSGSFGKDHDRTSLVGSDDSSFKRSSSMSSGPDGTVHEDSMDHHRDTDSDTCHLGVLVHTKAALDANIYDTQPGGRKTVGNNLIVKDQVNDPLTEKIAELREPTFPLDDGKDLQRNASHELPQHLEDNDVAKKEIIPLQSLLPLPVPKSPSESWLSRTLPSVTNRSPLPSFLGIQVHSKKQAPWVITQPKENDHKPSRPRQIRFADVVEKPTSLDSEI

SEQ ID NO: 51531 - protein, 415 aa, Zea mays
  Clone ID: LIB3078-002-E3_FLI.pep
IDHNKMACIDNAMRALFLLALFCVVHGEKAKSKDNDAKASGPGGSFDITKLGASGNGKTDSTKAVQEAWASACGGTGKQTILIPKGDFLVGPLNFTGPCKGDVTIQVNGNLLATTDLSQYKDHGNWIEILRVDNLVITGKGKLDGQGPAVWSKNSCVKKYDCKILPNSLVMDFVNNGEVSGITLLNSKFFHMNMYKCKDMLIKDVNVTAPGDSPNTDGIHMGDSSGVTITNTVIGVGDDCISIGPGTSKVNITGVTCGPGHGISIGSLGRYKDEKDVTDINVKDCTLKKTANGVRIKAYEDAASVLTASKIHYENIKMEDSGYPIIIDMKYCPNKLCTANGASKVTVKDVTFKNITGTSSTPEAVNLLCSAKIPCTGVTMDDVNIKYSGTNNKTMAVCKNAKGSAKGCLKELACF

SEQ ID NO: 51532 - protein, 252 aa, Zea mays
  Clone ID: LIB3078-014-F6_FLI.pep
GKAIPIPGVHEVSGEMEGIVTDPFLRPVPDYIRMVDDEVGRALSRDSIYDMDSEDEQWLIQLNHSDSDPNSYQRNHISYEDFEVLISIFEKDAYNNPQGKNDLSELLSRYPALLKDDNVHAVYGYWTSKRSKRAAPLLRVFQGAPIRRGHLPQKSAMKRKRSFKRQKSRAGRGKHEALLQDNAEDEAALQRVAQADRAAKRALETAIQLRNRAQSLMTNAELAAYKSIMALRIAEAARISDSSRDIVCTILD

SEQ ID NO: 51533 - protein, 210 aa, Zea mays
  Clone ID: LIB3075-018-H8_FLI.pep
LAGGTETTSSAAEWIMSELMRNPEAMAKAQAEVRRVLDGKSPQDHEGQMDKLSYTRMVVKEGLRLHPVFPLLLPRLCRETCDVGGFEVAQGTKVIVNAWALARSPEHWKHPEEFWPERFADDTSVAAAADYVGSQFEYIPFGSGRRMCPGNTFGLAALELMVARLLYYFDWSLPDGMRPDELDMDTVVGSTMRRRNHLHLVASPCKEIES

SEQ ID NO: 51534 - protein, 537 aa, Zea mays
  Clone ID: LIB3075-019-D2_FLI.pep
LPAPLPARRLLQAPAPRGHPVRTTAARPMAYPAAPHTSAAFLASFATPLPARCASPPTRRRAVSAAAIATTTTCVFADAPRGIKEEQADSGAQAAAAAAARRDVSPDTVASIILGGGAGTRLFPLTRTRAKPAVPVGGCYRLIDIPMSNCINSKINKIYVLTQFNSQSLNRHIARTYNFGEGVGFSGGSVEVLAATQTAGESGKKWFQGTADAVRQFLWLFEDARLKCIENILILSGDHLYRMDYMDFVQKHVDSGADISVACVPMDESRASDFGLMKADRNGHITDFLEKPKGADLESMQVDMGLFGLSPEFASTYKYMASMGIYVFKADVLRKLLRGHYPTANDFGLEVIPMAAKDYDVQAYLFDGYWEDIGTIKSFFEANLALTDQSPNFYFYDPVKPIFTSPRFLPPTKVLNSIVSHGCFLTECSVEHSVIGIRSRLEPGVQLKDTMMMGADYYQTEAERLSELSVGKVPVGVGENTKIRNCIIDKNARIGKNVVIMNSENVQEADRPAEGYYIRSGITVVLKNAVILNGTKI

SEQ ID NO: 51535 - protein, 265 aa, Zea mays
  Clone ID: LIB3075-043-E4_FLI.pep
SFKKTKCSRKTPSCSYRPSSPPFQFREQGRRSQPGTMCSVARLAFVLALAIAASSITVAESRDFNIFAQGSLPDATKGSSGLAATSGKLCQLCEQYSSEALLYLTQNETQTEILSILHHECASLAPLKQQCITLVDYYVPLFFLEVSMVTPEKFCESMHLCKKGMKISLPTREGTCGLCHHVVVEILIMLKDPNMQLEVIDLLTKTCSKAQNYEQQCKRLVLKYIPLILVKGQKFLETTDVCSVIHACKAGTQASMEAMPLSAML

SEQ ID NO: 51536 - protein, 313 aa, Zea mays
  Clone ID: LIB3070-013-E6_FLI.pep
VNVLMENNHKDCSTLLRPVDAEDSLRLHNMFLPFTFWSSLFTGMLQIGVKYSQETIRTDALSIMILIVRTTDPIEERQKFGFTSVMTRLHLLLQKENGLLVKKHSVRLLFLLLNCPVMLKLLCSGGKDGSKQMGSEACESDRSQEVISSVLVDLSDCLTCGETCSLGIELCRLVIILLAYIASSGKLGYEVLLVPVSARGASFLEMIMEVLASQMQYETRELLKERCLVMREALILLNRLASHANYSKPTLEVLTRSKLCATWTIDVANRLPHTRMANDLAELAQKFRSRVYAFIEEKPLTSDGTNLGASNKR

SEQ ID NO: 51537 - protein, 365 aa, Zea mays
  Clone ID: LIB3078-033-H8_FLI.pep
EKDEFSRLLKAKINELGMSDRIECTPNDSPSGKLTVPVLQELISALATDMSTSISQCSNYSGASAPLRCNGNVDCINPAHCIFSNEQSPDFQKCYQGEQDVDSSATSLNNEPNQPSPTSVLEASFSNDTSLGSPVEKNEGKDFIVSIENKMEDLFNLESDIVDLAMSIDTRKTDAEEAHHGNDKLSCLQNFLAHDFNILESRLCSIREAISNAELLLGISLLHSTTSGLPLHPFIVETLENTMDMFSGGEYSDFTEDKKYQHTNFLFDCIIESLDSKFCNLGKCGYKAWLKLPHSLSKDLLKRQLLENISNWRESSGTALRQVSDKEVDQVTDRWDANLEAFDISIAIENDILEALVGEFAVDLW

SEQ ID NO: 51538 - protein, 178 aa, Zea mays
  Clone ID: LIB3078-046-F5_FLI.pep
LSEPTSGSICIQKYDDTGNPIGLPELLTSQRVGIVFQFPERYFLADTVLEEVTFGWPRQKADLLLKEQLALNLQNAFNSVGLTTISLDENPQALSGGFKRRLALAIQLVQIPDLLLLDEPLAGLDWKARADVVNLLKDLKKHHTILVVSHDLRELYPLVDRSWRMEMGGSLKEEALPV

SEQ ID NO: 51539 - protein, 340 aa, Zea mays
  Clone ID: LIB3076-047-G4_FLI.pep
LTRLLITMQQRIGAAKTDMEDLIARLNQEAAVKEYLTTKVKDLEVELEAAKQKGRETLQQAILTERERITQMQWDMDELRRKYSEMESNLKAEQNEKTRAESEKTTASDKNETLLEELEIKRKEVETLKHHLVEAEAKSKADKKVLVKEVKSLRNSQTEMKKVLNQYLEQKTGLERVIIRDKQRSARAKLCRVKFLHECRLLHERLLECSAKFLAEEQGNFTIDPSSLPDALDLLATSDNRVRLLIAEAQLLARDDEQGSSDDGDNSDSISSLTMSWEDAKVTDEDATKILSDLLIDNAQLRLRLNAVIRNAVNTAVKPEKEGSGEVLPKKTVLNWLLDR

SEQ ID NO: 51540 - protein, 95 aa, Zea mays; identical to SEQ ID NO: 50424
  Clone ID: LIB3075-012-C6_FLI.pep

SEQ ID NO: 51541 - protein, 227 aa, Zea mays
  Clone ID: LIB3078-011-D1_FLI.pep
KSGQNESRTDYKMPQLRTASRPALASNSAGGFFIRRRVASPGTSQAKGAAKPLARRVRTPAARAKPKRRSPLPDWYPRVPLRDITSIVKALEKRNRLEEDAAWQHIQSNEDSSQPVDPTTAEHSDPDSQSTQTQETPGAVASGPSSTSAVANRVASVAEGKQEATDCSLQVAPSKPNDPSPADLEKKLSGSIEQIEKMVRRHMKETHPKAAQPSKVVVQRRILMSMR

SEQ ID NO: 51542 - protein, 237 aa, Zea mays
  Clone ID: LIB3075-004-H2_FLI.pep
VAADKLIYARETIKSIARKHGLVATFLPKPDLDDFGSGSHVHLSLWENDQNVFMGSSKDNFHGMSKTGEQFLAGVYHHLPSILAFTAPHPNSYDRIQPDTWSGAYLCWGKENREAPLRTACPPGVPLDLVSNFEIKSFDGCANPHLGLAAIVAAGIDGLRRHLKLPEPIESNPSDHSSKLKRLPQNLQESVESLSADKVLHELIGDKLVTTAIAIRKAEINHFAKNPGALKDLIHRY

SEQ ID NO: 51543 - protein, 102 aa, Zea mays
  Clone ID: LIB3078-020-C9_FLI.pep
ATMFRDSSMGGPLGEVLAKNGNVEARNYLSAPLNLLTDYWDSSHGMESSPVGVLQKTTAFGSVSSSTGSSPRVENHGAYDGFGNLRDDLGSIVVRHPSIRLV

SEQ ID NO: 51544 - protein, 250 aa, Zea mays; identical to SEQ ID NO: 43448
  Clone ID: LIB3075-042-E8_FLI.pep

SEQ ID NO: 51545 - protein, 114 aa, Zea mays
  Clone ID: LIB3075-054-G1_FLI.pep
RSGREEGQGKATDGGGRRRRLGGAVRVEDVHDGGGPRDGRGDRLGQRQQQLRRRRPLRLLADAAPRALQAQQLLQLRPPAQHLCQLNHTLQLAKLIAVSLLRAEPCSWESAGSV

SEQ ID NO: 51546 - protein, 299 aa, Glycine max
  Clone ID: 701014851_FLI.pep
VHAGLTMEPSLELFQEKFPDRFFDVGMAEQHAVTFASGLACGGLKPFCVIPSSFLQRAYDQVVHDVDQQRIPVRFVITSAGLVGSDGPLRCGAFDINFMSCLPNMIVMAPSDELELMHMVATATRINNQPICFRYPRGALVGEGYTIGDGIPIKIGRGRVLVEGKDVAFLGYGSMVQNCLKAHSLLAKLGIEVTVADARFCKPLDIMLLRQLCKHHSFLVTVEEGSIGGFGSHVAQFIAVNGLLDGRIKWRPIVLPDRYIEHASPNEQLDQAGLSGHHIAATALSLLGRTREALLFMCS

SEQ ID NO: 51547 - protein, 415 aa, Glycine max
  Clone ID: 701011035_FLI.pep
FRFPLKYFILGYQGASLSKAMPEDKLYPLINAADAKAANKPVENATLCMRGTIDPEKARGKILVCLRGVTARVEKSLVALEAGAAGMILCNDELSGNELIADPHLLPASQINYKDGLAVYAFMNSTKNPLGYIYPPKTKLQIKPAPAMAAFSSRGPNTVTPEILKPDVIAPGVNIIAAYSEGVSPTNLGFDKRRVPFITMSGTSMSCPHVAGVVGLLKTLHPDWSPAVIKSALMTTARTRDNTGKPMLDGGNDAKATPFAYGSGHIRPNRAMDPGLVYDLTNNDYLNFLCFSIYNQSQIEMFNGARYRCPDIINILDFNYPTITIPKLYGSVSVTRRVKNVGPPGTYTARLKVPARLSISVEPNVLKFDNIGEEKSFKLTVEVTRPGETTAFGGITWSDGKRQVRSPIVVGGVRG

SEQ ID NO: 51548 - protein, 348 aa, Glycine max
  Clone ID: 701059105_FLI.pep
QEQAARALANLAAHGDSNSNNAAVGQEAGALEALVQLTRSPHEGVRQEAAGALWNLSFDDRNREAIAAAGGVQALVALAQACANASPGLQERAAGALWGLSVSETNSVAIGREGGVAPLIALARSEAEDVHETAAGALWNLAFNASNALRIVEEGGVSALVDLCSSSVSKMARFMAALALAYMFDGRMDEYALVGTSSESISKSVSLDGARRMALKHIEAFVLMFSDPQAFAAAAASSAPAALAQVTEGACIQEAGHLRCSGAEIGRFITMLRNPSSILKACAAFALLQFTIPGGRHAMHHASLMQSLGAPRVLRGAAAAATAPLEAKIFARIVLRNLEYHQIEQTLL

SEQ ID NO: 51549 - protein, 82 aa, Zea mays
  Clone ID: LIB3957-024-E4_FLI.pep
EVVVDATDKGNVARLINHSCTPNCYARIMSVGHDESRIVLIAKKKVCAGDELTYDYLFDPDEADERKVPCLCQTANCRKFMN

SEQ ID NO: 51550 - protein, 128 aa, Zea mays
  Clone ID: LIB3061-066-F3_FLI.pep
IKMIILENILVELISHKEADKRGKIYDRANSSFLFDLNDQYVLDAYRKGDKLKFANHSSNPNCYAKVMLVAGDHRVGIYAKEHIEASEELFYDYRYGPDQAPAWARRPEGSKKDEASVSHRRAHKVAR

SEQ ID NO: 51551 - protein, 229 aa, Zea mays
  Clone ID: LIB3592-094-A9_FLI.pep
ACWMDGCDCIEPLWPTDDLLVKYQYISDFFIALAYFSIPLELIYFVKKSSFFPYRWVLIQFGAFIVLCGATHLINLWTFTTHTKTVAMVMTIAKISTAVVSCATALMLVHIIPDLLSVKTRELFLKNKAEELDREMGLIRTQEETGRHVRMLTHEIRSTLDRHTILKTTLVELGRTLGLEECALWMPSRSGSSLQLSHTLRHQITVGSSVPMNLPVVNQVFSSNTDLLH

SEQ ID NO: 51552 - protein, 171 aa, Zea mays
  Clone ID: LIB3606-020-G12_FLI.pep
PRVREQEEEVDELLAALGYKVRSSDMADVAQKLEQLEMAMGMGGACPTADDGFVSHLATDTVHYNPSDLSSWVESMLSELNAPPPPLPPATPAPRLASTSSTVTSGTAAGAGYFDLPPAVDSSSSTYALKPIPSPAVAASADPSPDSAREPKRMRTGGGSTSSSSSSSSSM

SEQ ID NO: 51553 - protein, 78 aa, Glycine max
  Clone ID: 701105029_FLI.pep
SLTNLSYFSFKAYSKSFVLFFSLQELIGLGARTLMVPGNLPIGCSVIYLTIYETIDKTQYDQFGCLKWLNEFGEYYNH

SEQ ID NO: 51554 - protein, 105 aa, Glycine max
  Clone ID: 701065932_FLI.pep
GATSSLSSIFIGPTAIQITELAAQPLGNNKIVLDSDDALFGGFSRLNHAAEYFTSEGWYDDRPRSFLIYAPSRTAVVYALADEAEPALADATEPEPVDLDDKLLG

SEQ ID NO: 51555 - protein, 68 aa, Glycine max
  Clone ID: 701129720_FLI.pep
FFSFFPIIPFNLFLFLPLFLIGKLMAPTPFKPSPPLLFGHRPNPKPSWSHRNHHKSDAKMETITCVRG

SEQ ID NO: 51556 - protein, 332 aa, Glycine max
  Clone ID: 700850325_FLI.pep
HARKHGYMDRDDNRVESHRSFKCNRFSASHSQRHEQDLRTTEAIDCSQQAMLMTTPVDAETWEGCPVQSLDGVEIKRAKKRKRKSRWDQPADTNSHSDAVMSSIGESQNIPEDGPPGFSCPVGSLNASLNSGNLALQNASRSGCPSDIVIGHPKEKFNSHLPVSYGMPWSAQQYGTPHAEFPECWVTAPGMPFNPFPPLPPYPRDNKDCQPSNTTNAMIIDQPAEVKQGDTSGMVNCCSDDMIPSTTGVNSEDSNLLFEDDKHISKRLKGDSNDLGTRYFRQQKIHRPWFKRNAWKCDENNSCGDMCSIDVGDVPKESKVTCDAEDAICREE

SEQ ID NO: 51557 - protein, 280 aa, Glycine max
  Clone ID: 700891386_FLI.pep
NKNKEKKKPLANTTIMATSAIQQSAFTGQTALKQLNEFVRKTGGAGKGRTNMRRTVKSAPQSIWYGPDRPKYLGPFSEQIPSYLTGEFPGDYGWDTAGLSADPETFARNRELEVIHSRWAMLGALGCTFPEILEKNGVKFGEAVWFKAGAQIFSEGGLDYLGNPNLIHAQSILAIWAVQVVLMGFVEGYRVGGGPLGEGLDPIYPGGAFDPLGLADDPDAFAELKVKELKNGRLAMFSMFGFFVQAIVTGKGPIQNLYDHVADPVANNAWAYATNFVPGQ

SEQ ID NO: 51558 - protein, 189 aa, Glycine max
  Clone ID: 701155231_FLI.pep
TFRKLIGARIFLKSREAGGGKVDQTLRSGRDLVGHGTHTLSTAGGNFVPGANVEGNGNGTAKGGSPRARVVAYKACWNKLDEGGCYDADILEAFDHAIYDGVDVTSASLGGSNPYPEALFTDGISIGAFHAVARNIVVVCSAGNDGPAPLSVTNVAPWSFTVAASTMDRDFRSRISLSNNQSIIVRDII

SEQ ID NO: 51559 - protein, 248 aa, Zea mays
  Clone ID: 700570694_FLI.pep
QELNHHGFVIKALPLASTRAMEHLFDQVIIVIREGLRSGSCKLSFMLLLHGHINLHFRWLQSNGFDKVKVLIPCQLPCEVKEGLLKVVIALGRNLIVLQVLLPVECNLLGFDLPVLYINLVSAENDGDVLTHPAQVPVPCWNILVCQPRSDIKHNDGTLTMNVVAIPEATELFLPSSVPAIETNFATVSAKIERVNFNTNGGLIFLLKLASKMPLHKCGFASSTVANDDELEAGVIHNLLIRQRHFCG

SEQ ID NO: 51560 - protein, 535 aa, Zea mays
  Clone ID: 700450428_FLI.pep
LRRMAVGGTQPVLRKYLGALKDTTTVSLAKVNSDYKELDIAIVKATNHVERPSKEKYIREIFHSISAARPRADVAYCIHALARRLSKTRNWAVALKTLIVIHRALREVDPTFREELISYGRSRSHMLNMAYFKDDSSAEAWDYSAWVRIYALYLEERLECFRVLKYDVETDPPRTKDLDTVALLDHLPSLQQLLFRLLACQPQGASSYNVIIQHALSMVALESIKIYTAISDGTINLVDKFFEMQRNDAVRALDVYKRATNQAERLSEFYEVCKTIHIGRGEKFLKIEQPPASFLNTMEEYVRDAPTGQKEKAILAIEYKKEPEEEEKPSSPPAAPEPEPEQVPEPEPEPVKEEAPEAEPDLLGLNEPNPAATAIEEQNALALAIVPIDDAPKAAPTFGNGVTGWELALVTAPSSNETAVAPSKKLAGGLDLLTLDSLYDEANRRASQPASYNPWEATPAAPAPMMTMAPVMHDPFYASNGYAAPHGVQMAAMAQQQQAFMLQQQQMMTMAPAQPVVHHPMQMQQNPANPFGNPF

SEQ ID NO: 51561 - protein, 231 aa, Zea mays
  Clone ID: 700210472_FLI.pep
LPFIHSPFPSEEDERSVLRCAMDSPSCRLFGAQRSPHDLLGGGAVADVVLWRKKEVATGTLAAVVASWALFYCVPGYTLLSFLAQVLMILLTVLFVWAKAAQLLNRAPPPIPLMKISDESMSEAAEMVGSFINKVLKDFENIALGKDNSLFYKVAFVLLLASIVGRLTDLITLVYTSAIIALTVPALLEKSEEHIARFFKKTSIYVQAFGRACKEYKCKMTNMISETKKLR

SEQ ID NO: 51562 - protein, 161 aa, Zea mays
  Clone ID: 700210688_FLI.pep
RCFSILRLLASLQGQGRAGDGEPGGGAETAAALPGQEGRAAAARCRRRWRRHGDDLLGAQGQGSQGEGHRAGHHGRRSSYGRGRRQQGTGRSGGGEGGQQQQQQARRGARAWLRRRGHRNLAVPGRRAGEAVRRVRAGPALLRGLDDAVDGPVPGVPGGVP

SEQ ID NO: 51563 - protein, 167 aa, Zea mays; identical to SEQ ID NO: 37637
  Clone ID: 700215195_FLI.pep

SEQ ID NO: 51564 - protein, 161 aa, Zea mays
  Clone ID: 700217802_FLI.pep
HGNLLLFSSSHTTIRHQAQKSYRSTTGLVLHLNKLVSGCQSCASKAETPLTTPEGHGSAGADDDVVDGDEDELDKEADESHDDEADRSARGDLGELLAVGLVAALDEADAVLGELAERVDHRVNSVHSGAGRERRSRGGVGRRSSLAWRRRRGGGFCACFA

SEQ ID NO: 51565 - protein, 380 aa, Glycine max
  Clone ID: 700856474_FLI.pep
HPLFSLSIPSQLFIEEAMDFLNFLLNLLVPPGSMITLAFSWPALCFLNFCEWLCNSIYGEDMDNKVVIITGASSGIGEQIAYEYALRRANLTLVARREHRLRGIAENAKRLGARHVMIMAADVVKEDDCRRFVNETINVFGRVDHLVNTVSLGHTFCFEEATDTSVFPVLLDINFWGNVYPTFVALPYLHQSNGRIIINASVESWLPMPRMSLYAAAKAALVNFYETLRFELKDEVGITIATHGWIGSEMTRGKFMLEEGAEMQWKEEREVQVTGGPVEEFARLIVSGACRGDAYVKFPSWYDVFLLYRVFAPRVLNWAFRLLISPQGTRRASSYVGTGKHIEAVGMVRPMAMLEGTSPTHNAIGPLTFSGQLISQHKLD

SEQ ID NO: 51566 - protein, 129 aa, Zea mays
  Clone ID: LIB189-002-D1_FLI.pep
VPKIVCFHNVTTYIYHICMDRYNASPAAPATRVVSSRDYKQQSTIRVDRFFITAKLIPAALPVVAVDGSVHAVLCIFHQVAGGRQTGRQTELVGFCSHGCSDVRRDLSDAGEGWEDGALLEVVLCGLIS

SEQ ID NO: 51567 - protein, 288 aa, Zea mays
  Clone ID: LIB3179-001-F9_FLI.pep
APFVLHTDCPHYWRYHLPGETEEDFATRLATNLENLILKEGPETIAAFIAEPVMGAGGVIPPPKTYFDKVQAIVKKYDILFIADEVITAFGRLGTMFGCDYYNIKPDLVSLAKALSNAYVPIGATLVSPEISDVIHSQSNKLGSFAHGFTYSGHPVACAVAIEALKLYRERDIPGHVKQIAPKFQDGIRALADSPIIGEIRGLGMIMGTEFTNNKSPTDLFPAEWGVGAIFGEECQKRGMLVRVAGDAIMMSPTLIMTPGEVDELVRIYGEALKATEERVAALQSKKN

SEQ ID NO: 51568 - protein, 416 aa, Zea mays
  Clone ID: 700042586_FLI.pep
CAAAAWLARSLARASHQQPGRHERRVAAGADGGEAEGGHQRVRPHRAQLPAVLARARRRLAPRRHRHQRHRRCQAGVPPAQVRLHARHLRRRRQARRRQRHLRRRQGHQGRVRPQPQQPAVGRARHRPRHRGHRRLRRPRGRGEAHPGGGQEGAHHGARQGRHPHLRRRRQCRPVQPRRAHHQQRLLHHQLPRAIRQGARPKVRCVSIFFTQLESSAANLMLPPCDYCKSDKPIITVYIYIYIYICMDQGIIKGTMTTTHSYTGDQRLLDASHRDLRRARAAALNIVPTSTGAAKAVSLVLPNLKGKLNGIALRVPTPNVSVVDLVVQVSKKTLAEEVNQAFRDAAANELTGILEVCDVPLVSVDFRCSDVSSTIDASLTMVMGDDMVKVISWYDNEWGYSQRVVDLADICANQWK

SEQ ID NO: 51569 - protein, 156 aa, Zea mays
  Clone ID: 700046458_FLI.pep
PLCVLAVKASSPVVSAGAGAVLEMVEALVVPDDDLAAGDLGNELDGVVAVAADAEVLHDAERRPGRRAHQPEGDGQALAVVHERAGLGVLVDVVEHVARVRHVPCRTDLRVELPHLSVRLSPLGLDRRVVLPRRTPPCTLLEDPPRVAAGAELEVQ

SEQ ID NO: 51570 - protein, 467 aa, Zea mays
  Clone ID: 700072352_FLI.pep
VRLSLSLSLRINQSHGLPAASSAAPILRILPRLDLPVPRVPTEGGGRLMGTGAGSARALAVAFAVSLLACSGAVAVARAQDTERIEGSAGDVLEDDPVGRLKVYVYELPTKYNKKMVAKDSRCLSHMFAAEIFMHRFLLSSAIRTLNPEVADWFYTPVYTTCDLTPWGHPLPFKSPRIMRSAIQFISNRWPYWNRTEGADHFFVVPHDFGACFHYQEEKAIERGVLPLLRRATLVQTFGQKDHVCLKEGSITIPPYAPPQKMKTHLVPPGTPRSIFVYFRGLFYDTANDPEGGYYARGARASVWENFKNNPLFDISTDHPPTYYEDMQRAVFCLCPLGWAPWSPRLVEAVVFGCIPVIIADDIVLPFADAIPWEEIGVFVAEDDVPRLDTILTSIPMEVILRKQRLLANPSMKQAMLFPQPAQAGDAFHQILNGLARKLPHGEDVFLKPGQKVLNWTEGPRGDLKPW

SEQ ID NO: 51571 - protein, 138 aa, Zea mays
  Clone ID: 700149734_FLI.pep
ITGFTLPAATAGHTFFSTSLTISALLARLLLRSPAACMVKRRASTACRFTSAAMPPWKPMMKSLPSTPKLFRLRWRYDPPMLSRITSTPGSEFQITVRDVALFDDNARYILAAKKESIEVVPFPLVSCLIRSTKSSVL

SEQ ID NO: 51572 - protein, 279 aa, Zea mays
  Clone ID: 700150134_FLI.pep
CFASLIVFLCSLCQCSGGTSYIIPLPILSFLQAGNCADAEVIYRFLEANQIGQGHAIYYMSYASLLESKNKLRKANEIFDLGIARKAKPLEKLEAVYRAFLRRSIKKREQEDDTVDDDLPKRSFGNNLKRDENRNQQAGNSHLGRPRALQRPLSVYKDESPLPNQGLDRVRSKENNTSWRVLGTRAERNKENNMMPAKWTSHKIPQKLGARGAVQSTRASCSIEVFVEEDCTQEPARPVPKSPNPSVLKLRQTTSKSLKKETELLKENPLRNFPLSRLR

SEQ ID NO: 51573 - protein, 291 aa, Zea mays
  Clone ID: 700097592_FLI.pep
ERIRGRESKQAKMMRANREQRVAFSSTKEAAAVPKEEVWEVRPGGMLVQKRSPDADPPPGGAPVPTIRVKVKFNGVYHEIYINSQASFGNNASSSVLRLCMCCSCFFLLSEFEPVNACSCRRAQEAAVGEDGPAPGRPEGGVQGQGEGLQGVPGHGRRQGPLQDGHARGPRRQGQAPPRGAPDRQGRARRQGHRPRRPRRRQARNQGVGAGDDREQGRQGRGRGRGDADRGADERAGEAGLRRRRRGGEGGAAGAGEAGAEVRGDAGRHPRQEQGGGGGGAGQGPQRQQQG

SEQ ID NO: 51574 - protein, 359 aa, Zea mays
  Clone ID: 700099622_FLI.pep
TMCNTVSGLNKINTSLLLQAAGWPCMNHDRCNASGSFTTRMHLAFHSKQLAAAAAAAGMLMHHVLVELEAGEHVVVDGVGEVVEQVLERADAGDEPLDEVTEDGEHGEPAVLDLLELELIHLLLGLAEAERVEEGPAGVGRVAGAGEELLEAEEVLLAHGARVVPVLEAAVLGEAHERHVEDEERVGVGPVVVGARGRDDARLEPRQRGLRGDDAHLAEDLRGDGAHRAQHGVAAVDHLAIGQPLGLDEAPGALRVREAQRVEAIVAGQRAIEVGEGLLGREPQLPVGTLLGWRAGAGPDDEGRLPRRRPRDGRLHGAAQQLPAGEESLGRHRSGTGASSNLSFRQRTCLRSRSCRWLA

SEQ ID NO: 51575 - protein, 256 aa, Zea mays
  Clone ID: 700106210_FLI.pep
ENRPAPDWPQVGRVDLKDLKIRYRQDAPLVLHGITCSFHGGDKIGIVGRTGSGKTTLIGALFRLVEPTGGKIIIDSIDITTIGLHDLRSRLGIIPQDPTLFQGTIRYNLDPLGQFSDQQIWEVLGKCQLLEAVQEKEQGLDSLVVEDGSNWSMGQRQLFCLGRALLRRCRILVLDEATASIDNATDAILQKTIRTEFRDCTVITVAHRIPTVMDCDMVLAMSDGKVVEYDKPTKLVETEGSLFRDLVKEYWSYTSN

SEQ ID NO: 51576 - protein, 168 aa, Zea mays
  Clone ID: 700163948_FLI.pep
SIESKESALVWHYLDADHDFGSFQAKELQGHLERVLSNEPVVVKCGHYIVEVKPQGVSKGLAVNKLIHTLVKNGKAPDFLMCVGNDRSDEDMFESINGMTSNAVLSPTMPELFACSVGQKPSKAKYYVDDTSEVIRLLKNVTRIPSQRQDVSASHGRVTFRGVLDYVD

SEQ ID NO: 51577 - protein, 128 aa, Zea mays
  Clone ID: 700086168_FLI.pep
KGSVVNITSIAGLNRGHLPGSTGYASSKAAVHYATKIMALELGADRIRVNSIAPGLFKSEITAPLFQKRWLSTVASKIVPLKEHGATDPALTSLVRFLIHEASSYVTGNIFIVDSGATIPGVPIFSSL

SEQ ID NO: 51578 - protein, 111 aa, Zea mays
  Clone ID: 700162367_FLI.pep
ASPGTLLNSELPAFARGAGPDLTIMQASDRFNINSQLEHLQAKYVGTGHADLSRFEWAVNIQRDSYASYIGHYPMLAYFAIAENESIGRERYNFMQKMLLPCGLPPERDED

SEQ ID NO: 51579 - protein, 190 aa, Zea mays
  Clone ID: 700165253_FLI.pep
SLFLLKKELYLWGLGRTQSYFLFHSSAEVMAHLLGLAICGGRGRRVQLIPGLDPGDHGVTELDKVGVNRAQLLLHLSREVDVALLDGVAVLGDGHVLEEGDDVLLPEDALVFLLQVNEGVASLAVPDVWQASLDSQAQVVADDLHTPSCPHVVVATDGLAITHETKVHSRANEIPVEGKVHATHGEQGSL

SEQ ID NO: 51580 - protein, 115 aa, Zea mays
  Clone ID: 700072840_FLI.pep
TPAATGSARCSRRAAARGAASTTTRTARGAACRARPRAPARRRTSAGTASTSPRPPTSRSPTAGSTGPTAAPPSSTAKLSEGRAINFLLLPCYLYLCLRCREKSVPAAACMCCLL

SEQ ID NO: 51581 - protein, 128 aa, Zea mays
  Clone ID: 700074151_FLI.pep
DRVSAHSFRRVVSRSWKVWLPEDPTSLSLVADWETKNFSSSFVTYHSIVKNLTPTLQAIVEHRGVLPLAMIRRSHTKYYHVLHQFWKLLEENVRNIKKLLLSRCSLVVSVCLLQCNQTPGRCALGSGM

SEQ ID NO: 51582 - protein, 342 aa, Zea mays
  Clone ID: 700098538_FLI.pep
DIFITDGASPGVHMMMQLLIRNEKDGILCPIPQYPLYSASIALHGGALVPYYLDEKTGWGLEISDLKKQLEDARSKGIDVRALVVINPGNPTGQVLAEDNQYDIVKFCKNEGLVLLADEVYQENIYVDNKKFNSFKKIARSMGYGEDDLPLVSFQSVSKGYYGECGKRGGYMEITGFSAPVREQIYKVASVNLCSNITGQILASLVMNPPKVGDESYASYKAEKDGILQSLARRAKALEDAFNTLEGFSCNKAEGAMYLFPQIHLPHKAIEAAKAAKKAPDAFYALRLLESTGIVVVPGSGFGQVPGTWHVRCTILPQEDKIPAVITRFKAFHEAFMAEYRD

SEQ ID NO: 51583 - protein, 209 aa, Zea mays
  Clone ID: 700100759_FLI.pep
LRVIARHQSITFGLDAMQQNYFDSEPLELFSHILFTTQVSCPSPCRYILFASSAEFPSHTQTHIHTRTAQCEVCAENSCPEIQWMGNKRLTRAAGGYMSRRNRLYAEMREQTPNAANAMKDMAMEPFAIVGKGSLPQLSIRSLTRAVADDDDDIRRYASTWSMVKSKRPRLRWGIKCLFLLMSSTSATNWNTEYRKPITFTASEYRNWV

SEQ ID NO: 51584 - protein, 168 aa, Zea mays
  Clone ID: 700100932_FLI.pep
AHLLAQPLSLSLPSKLRILYIGFERLLVKIQVGLRDLGQEAASLLEPLRSAVALDDSPVGQLHRLEAVLDHVADDLPGLAEHLQAGVTPDERVVGHGAGGHAVGDHLREDPLGLFHQPLLAEPVYDRVVGHHVGLHRLGALELVQYLLGLPRLAALGVHVHQAVVGDE

SEQ ID NO: 51585 - protein, 224 aa, Zea mays
  Clone ID: 700102725_FLI.pep
GTAGPPARAISAARPPSSTRHQPSLAAARSQAGASPSQGPGAHSCSRRWTTRAATARTAAPSSPAAPASSPTPWPRTPRTRSTATTSGTAGLEWRATSPAPALLFTSNPASAPRRQAGAWRTRVSGTRGCKRRWTTRAAMARTAAPSSPGERASSRTTRPPMPRTRSTATTSATTGLEWRATSPAPALLFTSNPRWETVCFHRTPADQLEKQNYITFSLLEATI

SEQ ID NO: 51586 - protein, 328 aa, Zea mays
  Clone ID: 700102734_FLI.pep
LLIAQAKHQNPMYSTEAEDTEMVDSMMMDVSALRAATGDFDESNKLGEGGFGAVYKGVLPDGEEIAVKRLSSSSSQGVQELKNELALVAKLKHKNLVRLIGVCLGQQERLLVYEFLPNRSLDLILFDTESEERGRRRLDWAQRYKIINGVARGLQYLHEDSQLKRVHGAGVHDAGELLRQVGRVQLRRHGAGDRDGEEEQRRWLQPLGHSMDALGGRDGGAAGGTEQYGRQLPGGRRAAVRPHRPAVRPGRPCGAAGDVVGRHDARQRHRHPPGSIQAGVLRQEQQRQRSRVDGVTGSLASQQAMGSSPEIGNIYLYRYSVTKMYDSS

SEQ ID NO: 51587 - protein, 165 aa, Zea mays
  Clone ID: 700090059_FLI.pep
EGLAQLFDQAGVVEVAEVIYNKETGQSRGFGFVTMSTIEEADKAIEMFNRYDISGRLLNVNRASPRGTRMERPPRQFAPAFRAYVGNLPWQADDSRLVQLFSEYGEVVNAAVVYDRETGRSRGFGFVTMVSKEELDDAISALDGQELDGRPLRVNVAAERPQRGF

SEQ ID NO: 51588 - protein, 107 aa, Zea mays
  Clone ID: 700164411_FLI.pep
FLSCSLVLLFINLLDDVMSRSRNLTHGGKLAIILHLEAKRVEHHVGAAAHVEVEHGEAVALEPQHQAQQLPRPAPGQHPQVGVALHHCRLDVGHGRRLRPGRLLLGD

SEQ ID NO: 51589 - protein, 137 aa, Zea mays; identical to SEQ ID NO: 41719
  Clone ID: 700045979_FLI.pep

SEQ ID NO: 51590 - protein, 424 aa, Zea mays
  Clone ID: 700075887_FLI.pep
PSHYHPSRRPPIRSGSSNPGAVMATKRSVGTLGEADLKGKKVFVRADLNVPLDDAQKITDDTRIRASVPTIKFLLEKGAKVILASHLGRPKGVTPKYSLKPLVPRLSELFGVEVVMANDCIGEEVEKLAAALPEGGVLLLENVRFYKEEEKNEPEFAKKLASVADLYVNDAFGTAHRAHASTEGVTKYLKPAVAGFLMQKELDYLVGAVANPKKPFAAIVGGSKVSSKIGVIESLLAKVDILILGGGMIYTFYKAQGYSVGKSLVEEDKLELATSLIEKAKAKGVSLLLPTDIVVADKFAADAESKIVPATAIPDDWMGLDVGPDATKTFNEALDTTKTVIWNGPMGVFEFEKFAAGTEAIAKKLAELTTTKGVTTIIGGGDSVAAVEKAGLADKMSHISTGGGASLELLEGKTLPGVLALDDA

SEQ ID NO: 51591 - protein, 250 aa, Zea mays
  Clone ID: 700076481_FLI.pep
FCQVFEKLGPSLYDFLKRNRYQPFPVELVREFGRQLLESVAYMHELRLIHTDLKPENILLVSSEYIKVPSTKKNSQGEMHFKCLPKSSAIKLIDFGSTAFDNRDHNSIVSTRHYRAPEIILGLGWSFPCDIWSVGCILVELCSTHENLEHLAMMERVLGPLPEDMIRKASSSAQKYFRRATRLNWPEGAVSRESIRAVRKLDRLKDLVSRNADHSKVALVDLLYGLLRFEPSERLTAEEALDHPFFRNPT

SEQ ID NO: 51592 - protein, 134 aa, Zea mays
  Clone ID: 700151641_FLI.pep
TFGDILASRAIRAAHCLTSIQFSPTSEHILLAYGRRHSSLLRSIVVEGENGIPVYTILEVYRVSDMELVRVLPSAEDEVNVACFHPLPGGGLVYGTKEGKLRILQHNGANMINMGSGCFIEENMVEIQRYALEC

SEQ ID NO: 51593 - protein, 345 aa, Zea mays
  Clone ID: 700152522_FLI.pep
LFRSIDGGAAFGFPETPDEAARAGLVSGKDQIIDRSIQDAYINAIRRAKNFIYIENQYFLGSSYDWKPEGIKPEDIDCLHLIPKELSLKIVSKIEAGERFTVYVVVPMWPEGVPESASVQAILDWQRRTMDMMYTDITQALEANGIQTNPKDYLTFFCLGNREVKQEGEYQPEEHPEPGTDYIRAQEARRFMIYVHAKMMIVDDEYIIIGSANINQRSMDGARDSEIAMGAYQPYHLATRQPARGQIHGFRMSLWYEHLGMLDDVFQRPESVECVQKVNKIAEKYWDLYSSDDLEQDLPGHLLSYPIGVTADGTVTELPGMENFPDTRARVLGNKSDYLPPILTT

SEQ ID NO: 51594 - protein, 84 aa, Zea mays
  Clone ID: 700102047_FLI.pep
LSSPAPDDPQDAVVAQQYLRDYPTFAATARYWTEAFAKSASTGMEEKVQKLVEMGFPEDQVRSALKSVDGDENMALEKLCSGSG

SEQ ID NO: 51595 - protein, 92 aa, Zea mays
  Clone ID: 700083979_FLI.pep
NRSPAGTQSSQFYTVAVLRLLPFSCRLTSRLSKLFLKESTPSSSSCFPTSPQSMPSFSKALYTPSASDTFASTVLETVPWSTRCPTKLCTHS

SEQ ID NO: 51596 - protein, 159 aa, Zea mays
  Clone ID: 700162852_FLI.pep
FCEQKVAGLCWGRHVTRCTKLVRTQHIRFLPSLSNYKLTILDSMYASSSSPAKPSLVSCKFITLVLVMYWSNAPSPRRILAPQPGLSTEPIASSSTTTASTRSFPVFSSGTSYMASKRTVSKMALKPRAPVLLAIAFLANNLSAPSVKCSLTLFRLNIF

SEQ ID NO: 51597 - protein, 264 aa, Zea mays
  Clone ID: 700162853_FLI.pep
SYCCSPASGRPIGCRFAKDMEDASGSSSSPAVLRNKYWVLRHGRSVPNERGLIVSSLENGTKPEFGLAPQGVEQARAAGEKFRKELDEIGVPVGSVKIRYSPFSRTTETARVVAGVLGIPFEAPSCEAVLGLRERYFGPSYELLSHDKYADIWSVDEAHPCMAPEGGESVADVASRFSAVLLSAETQFHGSAILIVSHGDPLQIFQAVLTGAKENMSFLDDLTNLKVKDTDVLTNLEVKDTMVASILSQHRKFALITGELRRVV

SEQ ID NO: 51598 - protein, 264 aa, Zea mays
  Clone ID: 700163352_FLI.pep
DSPITIFKEQLNQAVSGQLSPEAIVELRLQAYNEITKNIVNDNIFSQYMHKILPTGNYLWTFKKQFAIQVALSCFMSYMLQIGGRAPNKILFAKNTGKIFQTDFHPAYDPNGMIEFNELVPFRLTRNLQAFFSNFGVEGLIVSAMCSAAQSVVSPKQSQHIWHHLAMFFRDELLSWSWRRPLGIPSVPVAAGMINPSDFQQKVVNNVEHVISRIKSISPHCLAEEEENATEPPQSVQRGVTELVEAALSSRNLCMMDPTWHPWF

SEQ ID NO: 51599 - protein, 586 aa, Zea mays
  Clone ID: LIB3180-022-E6_FLI.pep
KPLSMARGIILLLLVIPLVVRIEGSVMGERSNSFSQDSNNSSPAENKLQPGEKSFASEAYAVNWNEPPDLQMQDSFERPELYRKQSVQGEKSFASEAYPVKWSISPSLGQQSQESFEPEAYPMKWKEPPPSGQQSQDSFEPEAYRVKWNKSPPPHQQSQDSFEPEAYRVKWNKSPPPLQQSQDSFEPEAYRVKWNKSPPPHQQSQDSFEPEAYRVKWNKSPPPLQQSQDSFEPEAYRVKWNKSPPPLQQSQDSFEPEAYRVKWNKSPPPLQQSQDSFEPEAYRVKWNKSPPPHQQLQDSFEPEAYRVKWNKSPPPLQQSQDSFEPEAYWVGWKQHAQGETDVADGTTPARGHGLHVATGMLFTRKSLLPGTALPEGTRFSGHGFPDPQRFALRADADAIPFSYSQLDAILRMFRIPRGSKKAEQVADTLRACEAESSDAHACATSEQAAADFAASSLGVRASDLVSVVTAVHGGKDATRYVVAPDGVTRIGKAAGAATAVPCHPMPYPYMVHYCHRPTDVEALRVELTGLGDDGATIAIAMCHANTMSWDDRYFQMLNATRGEEICHFMPWNYVLWLPAADLLANN

SEQ ID NO: 51600 - protein, 220 aa, Zea mays
  Clone ID: 700235682_FLI.pep
KEGLELLKAAIEKAGYTGKVVIGMDVAASEFFGEKDKTYDLNFKEENNDGSNKISGDSLKDLYKSFVSEYPIESIEDPFDQDDWSTYAKLTDEIGQKVQIVGDDLLVTNPTRVAKAINEKTCNALLLKVNQIGSVTESIEAVRMSKRAGWGVMASHRSGETEDTFIADLSVGLSTGQIKTGAPCRSERLAKYNQLLRIEEELGDAAVYAGAKFRAPVEPY

SEQ ID NO: 51601 - protein, 155 aa, Zea mays
  Clone ID: 700222827_FLI.pep
KRTNSIRLQIALLHPSAATGAGREIRLRALAADAAGELDVFGHDGDALGVDGAEVGVLEQADEVGLGGFLEGQDGVALEPQIRLEVLSDLTDQALEGQLPDQQLRALLVLADLAQSHRPGPVPVGLLHAAGRRRRLPRRLGGELLARGLASGGLA

SEQ ID NO: 51602 - protein, 237 aa, Zea mays
  Clone ID: 700166662_FLI.pep
GNSIKVLNCHDSVIYILAPLKYATVYGCSDATVVLGAVGKVVKVEHCERVHIIAAAKRICIANCRECIFYLGVNHQPLVLGDNHKLQVAPFNTCYPQLQDHMMQVGVDPSVNKWDQPFVLGVVDPHDSLSHPAGVADVKAESATCLDPDLFTSFLIPSWFGDEGQEPINCNPFPLPEIYEAFQSKKRSALEDIQKMIRELQLDENRKRELAAALHAQFKDWLYASGNIRQLYCLQGD

SEQ ID NO: 51603 - protein, 301 aa, Zea mays
  Clone ID: 700166791_FLI.pep
LALSCMHLLILLRVGGVCGRHPFSITSAPGDDCVSVHVQTRGDWTQELKRIFVENYFTPCVPRRAAFGDLAGAVDHKTKSPPRLLVDGPYGAPAQDFRNYDVLLLVGLGIGATPFISILRDLLNNIKLADELMDLAMETGRAEDSASNLSASTASGGNKRRAYRTTCAHFYWVTREPGSFEWFKGVMNEVAEMDKKGVIELHNYLTSVYEERDARTTLLSMVQALNHAKHGVDIVSGTRVRTHFARPNWKEVFTRIASKHPNSTVGVFYCGRPTLAKELKKLSLDMSHRTGTRFDFHKEYF

SEQ ID NO: 51604 - protein, 113 aa, Zea mays
  Clone ID: 700167036_FLI.pep
NKALDTFNLAIVSPIYYVMFTTLTIVASGIMFKDWAGQSLSSIASELCGLITILSGTILLHTAEEGANNSAALLPWPLDKGSISWCINLSSDNLLKNVEEDYFTALQSSPAPV

SEQ ID NO: 51605 - protein, 126 aa, Zea mays
  Clone ID: 700196809_FLI.pep
LISWFNRTRYQIASATHFLFSYPHAGGCLPELPFPLPVKLKRKQQRQQHRPVRWQSFYGRVTFTVLPKPVHILQTVVSSLRNTLLVLFSSSSHHGIASMYFLQWSSDVSIDSKYADLVHVWQFCHN

SEQ ID NO: 51606 - protein, 189 aa, Zea mays
  Clone ID: 700209373_FLI.pep
GRAIVDGRSARNAAAEQPAPVRVDEDKEAEVPEAVFDSGRPATEEALFSEDEEEEEEDAPPVAPPPPPPPVIAVPVSEKPEASRQQQSAEQAGTSKDTQPEQSSERDAPAQQGGQKRPRTVEGAGEGTADLESKLVEILDRNSRLVAAQLEAQNQNCELDREQRKDQANSLVVVLGRLADALGRIADKL

SEQ ID NO: 51607 - protein, 133 aa, Zea mays
  Clone ID: 700239732_FLI.pep
PKDMIDQNCKSLSSFSTDSKRGKKNKIPDETKLVVKIKDQRINPGCCHTKLYQSLSRSVAPTWLAAAIAICQSLLHHLSLHSSSMEQSSQSLIKHTSRGGSSSSNPCRYQQSQTKMNLMSSELPNTFLSGCLL

SEQ ID NO: 51608 - protein, 200 aa, Zea mays
  Clone ID: 700244310_FLI.pep
RTLPWMAVNTHLEPIIATVIHDITYYTWHGNSRYYIKSTDFMKIREGACSGMFRSSSLFCNLVLRFRQQIAQGDDRSLGASTLFNRLEFLQLLEVLPWLLPDLSFIELIDFAILHFNSEIVHRASNHLCLGLHKLLEPQKSIGLLVVLIDGEARELLELEVVLVRRHVLDAACQHPGVVSRGLLLCAARGGNGGEGKQHE

SEQ ID NO: 51609 - protein, 169 aa, Zea mays
  Clone ID: 700221588_FLI.pep
SLPCDHGAVSKIKRVVMDRDTYPRKWGLGPVALKKKKLVAEGLLDKHGKPNEKTPTEWLRNVVLPTGGDVSIASIAAAPEPEKVKVEPDTAVTEEVKEKKKKRQKDDAEDTDASVPAKKIKVEEATEAVEGEKSEKKKKKKKDKGESEPAEVVEGKEEVATGDEKGSEK

SEQ ID NO: 51610 - protein, 87 aa, Zea mays
  Clone ID: 700169261_FLI.pep
HLLTEYAKLLKFKPTKPPDAIEVCSESLACQAEGLEKKFLMESMVKFPRDACDLPPPFNPHELKLLKQKKENSIKQIHMWEQKDWGA

SEQ ID NO: 51611 - protein, 155 aa, Zea mays
  Clone ID: 700208517_FLI.pep
VVELRLPGAGLMGNLPSGVLGNLSALRTLSLRYNALTGPIPDDLSRLSELRAIYFQHNSFSGEVPAALFELKNLVRLDIAGNKFSGKISQDFNKLIRLGTLYLDGNSFTGEIPKLQLPALEQFNVSYNQLNGSIPNTLRKMPKDSFLGNTGLCGG

SEQ ID NO: 51612 - protein, 208 aa, Zea mays
  Clone ID: 700211130_FLI.pep
TYSEMENDRRQLGQIDPRRARFPCCVVWTPIPFITWLVPFIGHIGICREDGVILDFSGPHFVSVDNFAFGAVARYIQVNCDECYKLIEPEGDATWDGALKKGTQEFQNRNYNLFTCNCHSFVANNLNRLFYSGHDEWNVVSLAAVMFLRGRWVSTASVVKTLLPFAVVLSIGTFLGGTTFLTGLLAFAAAMTVWFLVGTYCIKGLIEL

SEQ ID NO: 51613 - protein, 205 aa, Zea mays
  Clone ID: 700204365_FLI.pep
IAPPPPQRTASTQSHSSLLLPSPRVLSFSRRRGRKSSAGGWGLLGSPVMAKLYVQAFPPADLNKNTEWFMYPGVWTTYIIIVFFSWLLVLSVFGCTPGTAWTVVNLFHFAITYHFFHWKKGTPFADDQGMYNTLTWWEQMDNGKQLTRNRKFLIVVPVVLYLIALHTTDYQQPMLFLNTLAVSVLVVAKLPNMHKVRIFGINAES

SEQ ID NO: 51614 - protein, 135 aa, Zea mays
  Clone ID: 700236706_FLI.pep
LAGVGPPPALPRDHAPAPLVSFFASSIAGFGGHGRRQRPEVQDGAREERREEQGRQRQPAGGQQEGHEHPVQDLHADLHLHHLRGQVQRTCGGEASQERPLPVLPPPQELVSSRSICSAQLKDKYYIYIYTLCVN

SEQ ID NO: 51615 - protein, 215 aa, Zea mays
  Clone ID: 700242952_FLI.pep
DPARDGVSLLKIWNMNKFTGVLGVYNCQGAAWNSVEKKNTFHQTGTEALTCGVKGGDVHLISEAATDAEWDGDCAVYRHADGDLVVLPHGAALPVSLKVLEHDILTVSPIKELAPGFRFAPIGLVDMFNSGGAVEGLTYHLLGGDGSTLGSEAVALACMEVKGCGRFGAYSSVRPRKCTLGSAQIEFKYDSSSGLVILQLDAMPKERVHKIVIEL

SEQ ID NO: 51616 - protein, 216 aa, Zea mays; identical to SEQ ID NO: 47321
  Clone ID: 700223264_FLI.pep

SEQ ID NO: 51617 - protein, 119 aa, Zea mays
  Clone ID: 700223276_FLI.pep
APCVKKYKNVYVVSTISEFSSSLETAGGHWRVDCLLRAKGMPSYFAVLDQGARSVSSDMDLGGFLHIRKAGRAFLNSDFFANSGVMVKQSFVCMYQQLKCKHDIIIVEYRNNYLLYLIA

SEQ ID NO: 51618 - protein, 152 aa, Zea mays
  Clone ID: 700223452_FLI.pep
VIGSLKGLQERKRATAFSIRPITDFNEVTLHFIQCVRMHIENTELKAGSPARINSSMGVSFSNGFSESSTPTSLKSSPAPVTSGSSDTDLHTQVLNFFNEPANLESEHGVHVDEVLKRFKLLPKKQITDAIDYNMDSGRLYSTIDEFHYKAT

SEQ ID NO: 51619 - protein, 162 aa, Zea mays; identical to SEQ ID NO: 46064
  Clone ID: 700168195_FLI.pep

SEQ ID NO: 51620 - protein, 150 aa, Zea mays
  Clone ID: 700206733_FLI.pep
PLQHRLIGSTHHSHPKLKLHNSFKHSNGAHLQTKVTLEQTSLTPQKKHSLWLDTLNLLDSQTWRERLLELVGLVGVVDAEGVEVPGAAHLELDGVLGPLDPHRPCVLPPRSQQEVLDLVDLLRHGGSPGGRHCDANPKIRDESPRRWRRI

SEQ ID NO: 51621 - protein, 168 aa, Zea mays
  Clone ID: LIB3150-098-A5_FLI.pep
DDSYLESYISTIGVDFKIRTVEQDGKTIKLQIWDTAGQERFRTITSSYYRGAHGIIVVYDVTDQESFNNVKQWLNEIDRYASENVNKCDLAENRVVSYEAGKALADDIGIPFLETSAKDATNVEKAFMTMAGEIKNRMASQPAASGASRPATVQMRGQPVSQQSSCCS

SEQ ID NO: 51622 - protein, 122 aa, Zea mays
  Clone ID: 701161490_FLI.pep
HDILVFTYVTFRASNWGGEDKNKCLNETEPIYKTGYKAATTDYSLMAKAKHYFRTLEPKGIHVQILNITELSDYRKDGHPTVYRKQFAPLTKEQIADPASYADCTHWCLPGVPDVWNEFLYG

SEQ ID NO: 51623 - protein, 137 aa, Zea mays; identical to SEQ ID NO: 37561
  Clone ID: 700211032_FLI.pep

SEQ ID NO: 51624 - protein, 279 aa, Glycine max; identical to SEQ ID NO: 49643
  Clone ID: 701006617_FLI.pep

SEQ ID NO: 51625 - protein, 237 aa, Glycine max
  Clone ID: 701037394_FLI.pep
KKMALYMDEEEIWKCPKHPSKRRRSGICPTCLRDRLVTLCPDCANVRPCSCYATSSSSSSSSSSSLSRFSGAGDGVGSVGRVHNLIEQEPGLRRSRSMAIPFLRSRSRFSGGGDRVSDLDSTRDSPAMNGSRSARSFWSMFKSQKSSRHGGGGGGAPEQEWEAKKILAEERDGDGGINPMMVRSRSVAVTAVTVVSGDGELRPRTKGRGWFFPSPMKAFRQSKVSKVIQEGSPLYRG

SEQ ID NO: 51626 - protein, 197 aa, Zea mays
  Clone ID: 700242667_FLI.pep
VMTIVLNHVSLRNFQPSKFDCDYAYVLGHVCYHIIAAGLNGYMATVTNLKNPVNKWRCGATPISSMMTVKRWSRGPSATQIGKPAVHMASVDLKGKAYDVLRQNSSSFLLEDVYRNPGPLQFEGPGADSKPISLCVEDQDYMGRIKKLQEYLEKVKRIVKPGCSQDVLKAALSAMSSVTETLNIMTSSSTGQTPLSH

SEQ ID NO: 51627 - protein, 410 aa, Glycine max
  Clone ID: 700568369_FLI.pep
DAAPAKTEEEQAETKEEEEKKEEVKETNEEAAVDDDGAKTVEAIEETVVAVSSTVQPQAEEKASSPLPPEEVSIWGIPLLADERSDVILLKFLRAREFRVKEAFTMLKNTIQWRKEFGMEELMEEKLGDELEKVVFMHGFDKEGHPVCYNIYGEFQNKELYKKTFSDEEKREKFLRWRIQFLEKSIRKLDFNPGGICTIVHVNDLKNSPGLAKWELRQATKHALQLLQDNYPEFVAKQVFINVPWWYLAVNRMISPFLTQRTKSKFVFAGPSKSTETLLRYIAPEQLPVKYGGLSKDGEFGNIDAVTEITVRPAAKHSVEFSVTENCLLSWELRVIGWEVTYGAEFVPSSEGSYTVIVQKARKVASSEEPVLCNSFKVGEPGKVVLTIDNTSSKKKKLLYRLKTKPSPSD

SEQ ID NO: 51628 - protein, 621 aa, Glycine max
  Clone ID: 700660709_FLI.pep
VCGMAAVRVTAKDVVFWFRSHTAAEIRWGGAKHEAGEKDDGRRMHPRSSFKVFLDVVKARSLPWKEYEIDAMHSLQLILRNAFKDTESMDLNTKAINTRLSDLKIEGMQELEAVTSEIVRLIETATVPILAVDVDGLVNGWNIKIAELTGLPVGEAMGKHLLTLVEDSSTDRVKKMLNLALLGEEEKNVQFEIKTHGSKMDSGPISLVVNACASRDLRDNVVGVCFVAHDITAQKNVMDKFTRIEGDYKAIVQNRNPLIPPIFGTDEFGWCCEWNPAMTKLTGWKREEVMDKMLLGELFGTHMAACRLKNQEAFVNLGVVLNKAMTGLETEKVPFGFFARNGKYVECLLSVSKKLDVEGLVTGVFCFLQLASPELQQALHIQRLSEQTALKRLNALSYMKRQIRNPLCGIIFSRKMLEGTALGTEQKQLLRTSAQCQQQLSKILDDSDLDSIIDGYLDLEMAEFTLHEVLVTSLSQVMTKSNGKSIRIVNDVAEQIVMETLYGDSLRLQQVLADFLLISINFTPNGGQVVVAGTLTKEQLGKSVHLVKLELSITHGGSGVPEALLNQMFGNNGLESEEGISLLISRKLLKLMNGDVRYLREAGKSAFILSAELAAAHNLKG

SEQ ID NO: 51629 - protein, 403 aa, Zea mays
  Clone ID: LIB3076-008-D12_FLI.pep
PIECYFYFLTTKPQHALIVVSSTKDLNNRLQSNNRLIFSNPVCSVTTPVAAVLVLSAMAGAALLHLALKSKYDDEIHRKVEMFLETYRTLKPRRYTFSEVRKMTRRFSSRLGQGGFGSVYKGELPNGGVPVPVAVKMLEDSTGEEEFISEVATIGTIHHANVVRLLGFCSERSRRALVYEFMPNASLEKYIRCSSQEQSLIPTASKMLEIATGIARGIEYLHQGCDQRILHFDIKPSNILLDYNLNPKISDFGLAKLCARDQSVVALTAARGTMGYIAPELYSRNFGTVSCKSDVYSFGMVVLEMVVVSAKRRKYSPAETEDQNDDVCVPEWIYEEIVTGQEPREMARGERDMVRKLAIVALWCIQWNPPNRPSMTTVVNMLTDSLQSLKIPPKPFVSSFVGQ

SEQ ID NO: 51630 - protein, 183 aa, Zea mays
  Clone ID: LIB3076-034-E1_FLI.pep
LSSSPSLRSLPPKSLGPPPPSSRSAGGHRPAMTSTVTTTVGCGGLPVRPLSTATRGRPRRCAVRAQAAGADASNDKSVEVMRKFSEQYARRSNTFFCADKTVTAVVIKGLADHRDTLGAPLCPCRHYDDKAAEVAQGFWNCPCVPMRERKECHCMLFLTPDNDFAGKDQVISFEEIKEATSKF

SEQ ID NO: 51631 - protein, 250 aa, Zea mays
  Clone ID: LIB3075-049-B9_FLI.pep
LICGVSYCHSMQICHRDLKLENTLLDGSPAPRLKICDFGYSKSSLLHSKPKSTVGTPAYIAPEVLSRREYDGKTADVWSCGVTLYVMLVGGYPFEDPDDPKNFRKTIGRIMSIQYKIPEYVHVSQDCKELLSRIFVANSAKRITIREIRNHPWFLKNLPRELTEAAQAMYYKKDNSAPTYSVQSVEEIMKIVEKARTPPPSSTPVAGFGWAEEDEQEDSKEPDEEHEDGEDEYEKQVKQVHASGEFHLSC

SEQ ID NO: 51632 - protein, 472 aa, Glycine max
  Clone ID: 700568585_FLI.pep
RPCMEWRMALWSQILCIVTLLLCSDCAASFAKEQQKDRVGRLPGQGFNISFAHYAGYITVNEKAGRTLFYWFIEALEDPHSKPLVLWLNGGPGCSSIAFGQSEEVGPFHINSDSKTLHFNPYSWNRVANILFLDTPVGVGFSYSNNKSDMLINGDERTAEDNLVFLLNWFERFPQYKRSNFFISGESYAGHYVPQLSQVIVKYNSVTKENAINLKGFMVGNALTDDFHDQLGMFEFMWSSGLISDQTYKLLNLLCDFQSVEHPSHSCEKIWEIANEELGNIDPYSLFTPPCQHANVSQLSRLVRRKHRIGRLSAEYDPCTEKHSIVYFNRPDVQTVLHVDPDHKPATWETCSDEVFTNWKDSPRTVLNIYHELIQMGLRIWVFSGNTDVVIPVTSTRYSIKALDLPTVSPWRAWYDDGEVGGWTQEYAGLTFVVVRGAGHEVPLHSPKLALTLFKAFLAGTSMPNLELVGAS

SEQ ID NO: 51633 - protein, 380 aa, Glycine max
  Clone ID: 700833336_FLI.pep
KRKLVKLREKYFQQNGGSILLQQLSTSENSSRITQIFTEEELKKATNNFDESLIIGSGGFGTVFKGYLADNRVVAVKKSKIVDESQKEQFINEVIVLSQINHRNVVKLLGCCLEREVPLLVYEFVNNGTLYDFIHTERKVNNETWKTHLRIAAESAGALSYLHSAASIPIIHRDVKTANILLDNTYTAKVSDFGASRLVPIDQTEIATMVQGTFGYLDPEYMRTSQLTEKSDVYSFGVVLVELLTGEKPYSFGKPEEKRSLTNHFLSCLKEDRLFDIVQIGIVNEENKKEIMEVAILAAKCLRLNGEERPSMKEVAMELEGIRIMEKHPWINTDQNVEETQHLLHEASSSIYELGDSSSHQYAGYDSIRDHVLIALDDGR

SEQ ID NO: 51634 - protein, 474 aa, Glycine max
  Clone ID: 700565227_FLI.pep
DVGLSLKDGSVYRAWITYDGPQRRMDIRLGKANQEDYPSKPMFSESMDLSPYLNEYMFVGFSASTGNHTQIHNLLSWNFTSTSQAFLHLPSSESCQGKILLENSTAATEPTNSQKSSKNEPPRSFLIFVAAVALALALFLGFYFISKHRRNAAKLNTSVETELHMPRPPNKPRRFAFSQLSTATRSFSEIELLGSDNRGEYYRGKLSGGSQVAVKRFSAQFLSTHGSDKKRLLKEIKGISHVRHPNLLPVRGWCQDNHEIMVAYDFVPNGSLDKWLFGAGVLPWTRRFKVIKDVADGLSFLHTKQLAHKNLKCSSVFLDVNFRAVLGDFGFVLMGAESKHFESQVCQGADVFEFGVLVLEVIAGRVRDEKEEGNPEERNLLGYAWNLHQIDEKVKLVDKRMGSLINLEQAIRALEIGLLCTLNENKGRPSMEQVVDFLLNMDKPIPELPRTRPVALFPYNSANTGLCNAYSCTF

SEQ ID NO: 51635 - protein, 365 aa, Glycine max
  Clone ID: 700559223_FLI.pep
FSRGGSMPPQYQPLDSTNSSFGNYGLSGYAGNPALASLMTNQLGTGNLPPLFENVAAASAMASPGMRSRILGGGLASGAAAPSDVHNIGRMGNQIPGSALQAPFVDPMYLQYLRTSEFAAAQLAALNDPSVDRNYLGNSYMNLLELQKAYLGSILSPQKSQYNVPLGGKSGSSTPHGYYGNPAYGVGMSYPGTPIANSVVSTSPVGSGSPVRHNELNMRFASGLRNLAGVMGPWHVDTGNIDESFASSLLEEFKSNKTKCFELSEIVGHVVEFSADQYGSRFIQQKLETATTEEKKMVYQEIMPHALALMTDVFGNYVVQKFFEHGLASQRRELANKLLGHVLTLSLQMYGCRVIQKAIEVVDLD

SEQ ID NO: 51636 - protein, 634 aa, Zea mays
  Clone ID: LIB3078-029-F9_FLI.pep
AKTLNPCWSAYNIADRRAPPVYVNLFTGQATTQFPSMTETVRGGILADAMGLGKTVMTIALILSNPRGEFSNCIKGDTRYLGDRATRGYTSTSSVRGGTLVVCPMSLLGQWKDELEAHSAQGALSVFVHYAGDKTSSLMLMAQHDVVLTTYGVLSAACKTECNSIFHRMDWYRIVLDEAHTIKSPKTKSAQAAYRLKSECRWCLTGTPLQNNLEDLYSLLCFLHVEPWCNAKWWQRLIQKPYENGDDRGLKLVRAILRPLMLRRTKETKDKIGNPILVLPPARIEVVECEQTDHERDFYEALFRRSKVQFDKFVAQGSVLNNYANILELLLRLRQCCDHPFLVISRADPKKYADLNQLAQQFLEGVQQSSSGRQNVVPSLAYVEGVVEEIRQGATMECPICLESASDDPVLTPCAHRMCGECLVSSWRTPEGGPCPLCRRHISKSDLIVLPAQSRFQVDAKNNWKDSCKVKTLVTMLESLQRKQEKSIVFSQFTSFFDLLEIRFTQKGIKFLRFDGKLSQKHKEKVLKEFSESQDKLVLMMSLKAGGVGLNLTAASNVFMMDPWWNPAVEEQAIMRIHRIGQKREVRVRRFIVKGTVEERMQQVQMRKQRMVSGALTDEEIRGARIEHLKMLFK

SEQ ID NO: 51637 - protein, 619 aa, Zea mays
  Clone ID: LIB3067-017-H3_FLI.pep
QPLQPGTVLRFGSLEFMSFDRSYDMILLPPPRDNDNGDRQPARRRRNRRRLPRVAEEQPSSSSRLLPRRRRGRQGNQGQAGGSASSAVEQVDSASTPTGGAPGIDFALETKTSAVSPRHTNPEQADDASMLAKSLLDVTLVPETTVRSVPDVTLSPLVDQEVPTDSHPTSFGFSLNPPSDLALAGALVEVSPNPLGFRMRSPWDRLTDVSTYGPSGSKEDDEPSICWDFSGLGNPSAMRDFMTACDYCLFDCSDGSRSLGDEDCGPSRECFHVDLGGPSEGNHLGMPEDGDLPRPVPRVDIPRELAVVPVQAGGHDPQLEQIRGVQARLDEGAGALEPIRRDVGQAWAGQPPAGEIRHLPQGFQHRVADDVRVRSPPASSGVGQNLAAAAMLLRAMPEPSTTEGRRIQGELKNLLEGAAVQRAESSASRRQGYPSEPHAATSRFMREASVYTGRTRNTAPAAPGRLGNEHHHRDRRAHLDERVRRGYHPRRGGRYDSGEDRSPSPEPPGPQAFSRAIRRAPFPTRFRPLTTITKYSGETRPELWLADYRLACQLGGTDDDNLIIRNLPLFLSDTARAWLEHLPPGQISNWDDLVQAFAGNFQGTYVRPGNSWDLRSCRQ

SEQ ID NO: 51638 - protein, 217 aa, Zea mays
  Clone ID: LIB3079-031-G5_FLI.pep
NFSFQCQCELPESYEAYRKQQHRWHSGPMQLFRLCFVDIIKSKIGFWKKFNLIFLFFLLRKLILPFYSFTLFCVILPMTMFVPEAELPAWVVCYIPATMSILNILPSPKSFPFIVPYLLFENTMSVTKFNAMVSGLFQLGSAYEWVVTKKSGRSSEGDLVALVEKHSKQQRVGSAPNLDALTKESKGTEEEKNKKKRKKKHNRIYRKELALSFLLLT

SEQ ID NO: 51639 - protein, 366 aa, Zea mays; identical to SEQ ID NO: 48474
  Clone ID: LIB3151-022-A5_FLI.pep

SEQ ID NO: 51640 - protein, 768 aa, Zea mays
  Clone ID: LIB3180-013-D11_FLI.pep
SLYYEMTDESLKNYKGERDGNQYLINLIDSPGHVDFSSEVTAALRITDGALVVVDCIEGVCVQTETVLRQALGERIRPVLTVNKMDRCFLELQVEGEEAYQTFSRVIENANVIMATYEDKLLGDVQVYPEKGTVAFSAGLHGWAFTLTNFAKMYASKFGVDETKMMERLWGENFFDPATKKWTTKNTGSPTCKRGFVQFCYEPIKQIIKTCMNDQKEKLWPMLQKLNVTMKADEKELIGKALMKRVMQTWLPASTALLEMMIFHLPSPAKAQKYRVENLYEGPLDDVYATAIRNCDPEGPLMLYVSKMIPASDKGRFFAFGRVFSGKVATGMKVRIMGPNYVPGQKKDLYVKSVQRTVIWMGKKQESVEDVPCGNTVAMVGLDQFITKNATLTNEKETDACPIRAMKFSVSPVVRVAVQCKVASDLPKLVEGLKRLAKSDPMVLCTMEESGEHIIAGAGELHLEICLKDLQEDFMGGAEIIVSPPVVSFRETVLEKSCRTVMSKSPNKHNRLYMEARPLEEGLAEAIDDGRIGPRDDPKVRSQILSQEFGWDKDLAKKIWCFGPETTGPNMVVDMCKGVQYLNEIKDSVVAGFQWASKEGALAEENMRGICFEVCDVVLHADAIHRGGGQVIPTARRVIYASQLTAKPRLLEPVYLVEIQAPENALGGIYGVLNQKRGHVFEEMQRPGTPLYNIKAFLPVIESFGFSSQLRAATSGQAFPQCVFDHWDMMGSDPLEAGSQAAQLVLDIRKRKGLKEQMTPLSEFEDKL

SEQ ID NO: 51641 - protein, 338 aa, Zea mays
  Clone ID: LIB3180-001-C8_FLI.pep
SPPPTTTRTGVRACGQRSRPLRQGDHRRARENTGSARLVGRLARRRPRPHGAAAAARPHRPRRLRLRVRVCRPPAAGRGGCPGGRRAGRFPGHAARSGRRAAGPAAELGHAGSVPGQLLLLVRRVVPRQRLRAGPAAGAARPVGWRARPVRPRRAPGPARAQPLRQRAHRRLPQRVRARRAQDALPVAEPPVRRHPRGHVQAHAWTPQAAPLLQRVLRPRPGVHHLAAPAGAVARQQPLRGPAAGLLPAGAQVRRRLQQQPLRAHTGRAQPLQCKHVRRQQAPLRQTTRSGMRQLGVAAHRHVDHDEDRHRAHHPWRAALRRGHHHGRPRQPEKEAEA

SEQ ID NO: 51642 - protein, 414 aa, Zea mays
  Clone ID: LIB3156-011-A2_FLI.pep
SKNRKIFGGEGMMLEGKSYLVSRSVPSSCEPETEWEYLAHAVLSGKRPAPEDDVEVEDPDETGSGGKRSKPASPQPHTPDICEGHGSNRHATGSGEQRITGSNPMTSIGRDLTLNCLLRLSRSDYGSVASLSRDFRSMVRSGEIYRLRRQNGVAEHWVYFSCNVLEWDAYDPYRERWIQVPKMPPDECFKCSDKESLAVGTELLVFGMARIVFRYSILTNSWSRADPMNSPRCLFGSTSVGGKAFVAGGTDCVGNILSSAEMYDSETHTWTPLPSMNTARKMCSGVFMDGKFYVIGGVANSNRVLTCGEEYDLKRGSWRTIENMSGGLNGVTGAPPLIAVVSNELYAADYGEKDLKKYDKKNNRWITLGKLPERSVSMNGWGLAFRACGDRLIVIGGPRTYTGGTIELNSWIPD

SEQ ID NO: 51643 - protein, 307 aa, Zea mays
  Clone ID: LIB3152-035-F7_FLI.pep
PASQDPGTSLLGSDYPEPLLLGSLFTADSTNFLSASGSISNQQNSGSSSSSMLRPAVNVGTQVPEFNVSQPSTTLRGSSDVFRRSLISAGISHSRSSSIPLQHRGNSSTSHEIRNHQPGSSSRAHQQHPLRPGHSSVDRQSSGYLDLQSFMQTIASREGGRPMSEIRNVFDQIRQGRNARLEDLLLIDRSLIMRRANLIDRHRDMRLDVDNMSYEELLALGERIGYVNTGLTEEKILSNLKQWKCVLKSLDDPPTSVEPCCICQEDYVEGEDLGRLDCGHDFHTACIKQWLVIKNLCPICKKTALDT

SEQ ID NO: 51644 - protein, 1125 aa, Zea mays
  Clone ID: LIB3180-008-H9_FLI.pep
GFIRHPRRPSLPQHPSAMVRKKRTGPGESSGEASGAPGHGSSQRPQATQQGTRGGGQHQGRGGYLGPGVLPSQHPGGGPPEYHQPLDYQGRGGYQGRGGPPSQHPGGGTPPGSQLRGYQGHGGYQGRGGPPSQYPGGGTPPGSQPRDYHGRGGPRPRGGMPQSYRGGHVGGSVIPSVPSGPSRPVPELHQAPDVQHQAPVVATPSSPGAGSSSQPGKAEVSTGQVQQQFQQLAIRNQSLASQAGQMAPASSKSVRFPLRPGKGTHGSRCIVKANHFFAELPNKDLHQYDVSITPEVTSRGVNRAVMAELVKLYRHSHLDGRLPAYDGRKSLYTAGALPFASKTFEITLQDEEDSLGGGQRRQRVFRVTIKFAARADLHHLAMFLAGRQPDAPQEALQVLDIVLREMPTAKYCPVGRSFYSPKLGRPQQLGEGLETWRGFYQSIRPTQMGLSLNIDMSSTAFFEALPVIDFVSQLLNRDISVRPLSDSDRVKIKKALRGVKVEVTHRGNMRRKYRISGLTPQATRELSFPIDDRGTVKTVVQYFLETYGFSIQHTTLPCLQVGNQQRPNYLPMEVCKIVEGQRYSKRLNDKQITALLKVTCQRPQAREKDILETVYHNAYSKDPYAQEFGITIDERLASVEARVLPPPRLKYHDSGRERDVLPKVGQWNMMNKKMVNGGRVSSWACINFSRNVQDGAAGGFCHELALMCQVSGMDFVLEPVLSPCYARPELVERALKGRYQDAMNILGPQGRELDLLIVILPDNNGSLYGDVKRICETNLGLVSQCCLTKHVFKVNKQQYLANVALKINVKVGGRNTVLVDALARRIPLVSDIATIIFGADVTHPHPGEDSSPSIAAVVASQDWPEVTKYAGLVSAQAHRQELIQDLFKVWQDPERGTVSGGMIRELLISFWRATGQKPKRIIFYRDGVSEGQFYQVLLYELDAIRKACASLESDYQPPVTFVVVQKRHHTRLFANNHNDNRAVDKSGNILPGTVVDSKICHPTEFDFYLCSHAGIQGTSRPAHYHVLWDENNFTADGLQTLTNNLCYTYARCTRSVSIVPPAYYAHLAAFRARFYMEPDTSDSGSMASRGPPPGGRNTKAAGVGNVAVRPLPALKENVKRVMFYC

SEQ ID NO: 51645 - protein, 410 aa, Zea mays
  Clone ID: LIB148-018-H10_FLI.pep
ASDEAVQYSTSTTSKCVSSAYCCSKTCLAMERPRGWGTPLAESPYISSITNGSVDHSNASKNMDSDSSVATPHSSTQGQNSIPCDQQKGGNSKADKQSKVRQPRKNQSDEASVDGLPGSPKGSTAPEPNQSQPSSSSLPSSDLQDEGGAQVVQLNTQKNQPSSQPKKPVKSTLSHQKSVPHDFYHGKKPGASTDSSSKNGAPEVTNNGRPRQQKPQSSKQPRQQKPVNHRPHGGSSGNFQSSNSHRSNSCPALAGHNGIPTAPMQFWPSGPHYHGPPINYPDTDRLNISEYPSGIHNNQGLHANYHPNHPGAHHIIQPGYNGYSYRPPTRPNMPSNMQNIGHWGANPGCPQPSSDPQDLVRYILGALEVLKTEKIPPTEQYITDCICYGDANLPKFDVKKALQVAMQHQA

SEQ ID NO: 51646 - protein, 252 aa, Zea mays
  Clone ID: LIB3159-007-F12_FLI.pep
EFVHSFITDHCTLACLFYSHPWVLPQIKCLNDNEEESKTRGMEERNHDLRILHCGFAGGDPLVSPPPPPRPDSKSPSSFCGCCCCCCCAGGGAAVAPPQPSSRRRAATLAASTTAATPAMGPAAATGCDGAAPAPRVLTAPSWEPKKRTLVGKLGESGSASGARGAASSPATARRRHSGQVEWERSHMSTHSTWNAWPQRGSTRAASPAASSPMHTAQSPPAAAASSLGSAAMAASSSPPWHPAPPANTKRG

SEQ ID NO: 51647 - protein, 663 aa, Zea mays
  Clone ID: 700072620_FLI.pep
STGPRGRGGNAMVARRFVVRHGPAAGGSAEAAEEQQHEVEYDTEHGLDVLRLQIFSLTAVPPDLQKIVVEADGSVVDDGTDLEAVSERLRLLAIGEEGEDDGAAARAQEKSDEEFARMLQAEEEALLLQQYNIQNDGGDVFRQRVEPYMHQVLMYEDSVGQEAAQKTVPICELEEKALVSLAKEGNFNPSKDEEKHAFLLQLLFWFKQSFRWVNAAPCDSCGRETSNVGMGTPLTSEIKFGASRVEMCNHCSSITRFPRYNDPRKLIQTRRGRCGEWANCFTFYCRAFGYDARLILDFTDHVWTECFSNLYGRWMHLDPCEGVYDNPLLYEKGWNKKLNYVIAISKDGVRDVTKRYTRKWHEVLSRRIITSEETVVSVLSSITGKYRTGLSPDALSVIENREKEESEELRKSAYLQVETALSLPGRLSGSVEWRKARSELGQADSLSCSSCPIRKCVDGHVSNIYDALSAFLSHFFDKKIPKERIIEAFEALKTLMLTLKSSNFKSRSATLDQKAHHLFEEIFPSIERLLSAISLKAELGTAGYQSVTVSGNPVHSSLALPVALDAVNEILSNYKNNTFFTEGNHFPRGNRVCSGSVLASREQLPIGIATAAFDGIHSSKWEEPDGAKGCWLIYTMQDGKSCELESYDLMSANDAPERDPMDW

SEQ ID NO: 51648 - protein, 215 aa, Zea mays
  Clone ID: 700087870_FLI.pep
GLQDRSPLPVLRRRRAAGGLEAEIGLEVLRDLTDEEKERERHRLGLGEKEMMSRERKKAAALQEKLKILRSITHSHALSNTSIIMDASAYIKELKQKVVRLNQEIACAQDALRHKSSSSYPTVTVEALGVQGSSFLVNVFSDKSCPGLLVAVLEAFDELGLSVLQATASCADSFRLEAVGGENVADNVDEHVVKQAVLQAVRSCSEGGSEHDDEE

SEQ ID NO: 51649 - protein, 420 aa, Zea mays
  Clone ID: 700092738_FLI.pep
QGQSHLPSTQAGSHTELSLRRIKSRSRGALAVAVGVAGLPQHGCLRDQRGHHVRVHVGRRPPVLEVAFAFLLGVAAHPHRRPAVRDAPDEGVDVGGLVAAGEAALVAVPVRGDVLPVPEAQLADRLLDHLVPAVTPHRLGAVVGVCTSAIPVPRNWLGVEGDNHAGDLGDPLKNVASHPELVAGRDADGRADLELPLPRHDLPVDATDVDAGVEAGLVVRVHDVPPVGLVRSDGAVVRSLRARVAAQRPTERPLGVLLEKGVLLLNPEPWFLSLDVRVAKDLRGPMPLVARDRLPVRLVAVAHDQYVLPLPERVPEDGPRAKDDFAVVARSLAGAGAVEVPLRKLAGVINRSGQRPGFAPDVHPGTANPDVLGDDLPGAVREVEVDEVGEQSHGSDEKLVGRSPEKAEHARAGQWPRVSV

SEQ ID NO: 51650 - protein, 535 aa, Zea mays
  Clone ID: 700093329_FLI.pep
TMALQAAYEYLQQAVGHGAWSSTQTLTLLLIAVPTVLLLLASLAKSTSSSGRGKPPLPPSPPGTLPIVGHLHHIGPQTHISLQELVAKYGHNGFLFLRAGAVPTLIVSSPSAAEAVMRTHDHIFASRPWSMASHILRYNTCDVAFSPLGEYWQQTRKLMNTHLLSNKKVYSFRHGREEEVCLVVDNLREAAAKSPSTAVDMSEVLAAYTNDVVSRSVLGSTHRKKGRNTLFREMTMTNVDLLVGFNLEYYIPRWPLTDLLFRLVCWKVTRHLKRWDALLEEVIHEHVEMRKLSGDKEKESDDFIDIFLSRYEEYGFTMDNVKSLLMNVFEAAIETSYLVLESAMAELMNHRRVMKKLQAEVRAYGAEKKLDMIREDDLSSLPYLKASMKEALRLHPPGPLLLPHYSTADCQIDGYHIPANTRVLVNGWAIGRDPAVWEKPEEFMPERFMRDGWDKSNSYSGQDFRYLPFGSGRRICPGANFALATMEIMLANLMYHFDWEVPNEKEDGGGKVSMDETFGLMLRRNEPLYLVPRAV

SEQ ID NO: 51651 - protein, 679 aa, Zea mays
  Clone ID: 700083042_FLI.pep
AEGARDVPVGNSVLAMYVKCGELGRARAAFDMMGQRDLCTWNSMIFGCCRSNEWEEARRLLDDMRRQGTEPGLVTWNTLVSSYARSGELDVAMEMLEQMEESGVAPDVVTWTSLVSGFVHGDRGGEALWCFARMRLAGVEPNGMTIASAISACASLRLLSQGMELHCHAIKVGSVNNVLSGNSLVDMYAKCGEIIAAKRVFDEIPEKDIFSWNSMVAGYAQAGYCGKAYELFCEMESLGVRRNVITWNIMISGYIRNGDDERAFELFQMMESCGVKRDTASWNALIAGSVHNGHSDRALRIFWQMQSLLVRPDFITILSIIPAFANLAGFWKVREIHACIYHNNLEMDGKIANALINAYSKSGDLAGACAVFDRHSSRNIISWNCIILAHLLHGSPSEALDRFCEMKQEGVRPDHTTLTAVIKAYGLQGKVSEAKRIFHNMTHDYNIIPDLDHYTAIVDLLGRSGSLQEAYEFIGNMPLIPNLAVWEALLTAATIHGNARLANLTARELSSLDPSDPRIQRLVFNYWGLTGKSVDVPLMTVYNGGRELEDVDSCSVEIKNNVYLFSTGDNLALESTVAELKLIMIQIRMSLLNISNETNAEEEKEELSGIHCEKLAIAFAISNSPPFRSIRIIKTLRMCSHCHIFAKLVSEKYERQILIKDSNCLHKFEDGKCSCEGYW

SEQ ID NO: 51652 - protein, 553 aa, Zea mays
  Clone ID: 700083227_FLI.pep
DLEAVVCVCELAAEWRQTFHSDVVVDLICYRRFGHNEIDEPSFTQPKMYQVIKNHPSSLKLYEQKLLGTGEVMKEDVQRIHDKVNRILNEEFAKSKDYVPNKRDWLSAYWTGFKSPEQISRVRNTGVKPEILKRVGQAITTLPENFKPHRAVKKIFELRAAMIESGQGIDWAVAEALAFATLIVEGNHVRLSGQDVERGTFSHRHAVLHDQETGAKYCPLDHVAMNQNEELFTVSNSSLSEFAVLGFELGYSMENPNSLVLWEAQFGDFANGAQVMFDQFLSSGEAKWLRQTGLVVLLPHGYDGQGPEHSSARLERFLQMSDDNPFVIPEMEPTLRKQIQECNWQVVNVTTPANYFHLLRRQIHREFRKPLIVTAPKNLLRHKDCKSNLSEFDDVEGHLGFDKQGTRFKRLIKDRNDHKQVEEGVNRLILCSGKVYYELDEERKKSERGDVAICRVEQLCPFPYDLIQRELKRYPNAEIVWCQEEPMNMGAYSYISPRLFTAMKALGRGSFEDIKYVGRAPSAATATGFLSVHAQEQSELVKKALQAEPIKFL

SEQ ID NO: 51653 - protein, 801 aa, Zea mays
  Clone ID: 700085021_FLI.pep
DLKEKQRTHNKTLVLVKSYWERLIADLGIVSVCKNESSRSSCSTGNNNIRKDFLNGLLEAGATESSGSPNCQLGNDVSSEQSTTIDILQKLFLPSSGPWHVNNEFVSAALMKLPENEHSRQLHNATSDVLSKLHVVMRTVDNLHLKHRQLAANYQKQRDSSAWNRAEQKRLKEELTSVVAKLEGSKQKLAVLKAQGDNKQATPILVPTLGNKNMTAEKVRDKQTELQDLEATHKELMELISKRLEEIRRLHTERIEILNKLATFQNILTDFKSIHSSKAFQLVNDQLQKSQAELDDHQTLLEKLQVEMDTFVWRERQFNQKVDLAEIPQKVSAYCVSRIADLEKDVQKLCNEKNMLVLKLEEASREPGRNQVISEFKALVSSLPREMGAVQSELSKHKDASLQLHSLRAEVHSLSSIQTRKEQEIEEMSFRSAHAGSDISQLQSLVRELRENTQELKLFVELYKHESTDSRQLMESRDRELAEWARVHILKYSLSESKLEQRVISANEAEAISQQRLATAEAEIAELGQKLETSRRDLVKQSDILKSKHEECEAYVVEIESIGHAYEDIMSQNQQLLQQIIERDDHNTKLFMEGVKSKQSHDALHLEVRSLQRNLQHASTLMDLCNQKTIRLEDQLRGWSERLRRLSEDGMQQSISLGNYQKKLSGMHGEAPKLRQSMDVLQAKAGSNRLEIAELLIELENERFGKKRLEDDLDLMSSKANSLREKTDNSAVLQKLLHEAKEYRGILKCGICHDRQKEVVIAKCYHLFCSQCIQKPLGSRQKRCPSCGLSFGVNDVKPIYI

SEQ ID NO: 51654 - protein, 372 aa, Zea mays
  Clone ID: 700074963_FLI.pep
HGREAACIAGVVRTQQQLALAVHRSDDGEKDGAGGAAGGRRPRRRRAGAAQGGVLRLLLPTGGEDRQGLREGAHPPRARRRLHPAPHPLPRLLRQGLRRVSAAQRDGRQRGGEGRGAQPDAARLRLHRPHQGAAREGVPRRGVLRRHRRARRPRLRRRHRRSVLERADGEARRHRVHQAGGAGPDPRAHHELHPTPPVLPEQEPQPRRPRLALRGSHDRHLPMQLLQRAPVQLHGARRARRRGPVAGPAVRREVAAQVQDADGQHDDRGDGPRQLPHLRPELLPRRAQAAGPVPVRRRAHHRRRLQGRHPQRDQRAARGVLPGLRGLHGQDGRHRGQDRLRGRDQEALRPRQQALGGGIHAGDGSIARKKSL

SEQ ID NO: 51655 - protein, 130 aa, Zea mays
  Clone ID: 700152520_FLI.pep
DSALFNRSLLHRPWYPLSTHCHWLLSWRSLPSPCPCTSQRFQIFGQTKIFSLFHRHPGLDFGGGPSEQAFLLSRTKRPFTPSQWMELEHQALIYKYLNAKAPIPSSLLVSISKSFRSSNRGMHACSQPQD

SEQ ID NO: 51656 - protein, 454 aa, Zea mays
  Clone ID: 700106776_FLI.pep
SDLSPWISTSAWLLRSASLAMASSTGSLEHGGFTFTPPPFITSFTELLSGAAADMVGAAGADHQERSPRGLFHRGATRGGGVGVPKFKSAQPPSLPISPPPMSPSSYFSIPPGLSPAELLDSPVLLHSSSNFFASPTTGAIPAQRFDWKQAADLIASQSQQDDSRAAVGSAFNDFSFHAPTMPAQTTSFPSFKEQQQQQVEAATKSAVPSSNKASGGSGGSTKLEDGYNWRKYGQKQVKGSENPRSYYKCTYHSCSMKKKVERSLADGRVTQIVYKGAHNHPKPLSTRRNSSGGVAAAEEQAANNSSLSGCGGPEHSGGATAENSSVTFGDDEAENGSQRSGGDEPDAKRWKAEDGENEGCSGAGGGKPVREPRLVVQTLSDIDILDDGFRWRKYGQKVVKGNPNPRSYYKCTTAGCPVRKHVERACHDARAVITTYEGKHNHDVPVGRGAASR

SEQ ID NO: 51657 - protein, 549 aa, Zea mays
  Clone ID: LIB3150-095-C11_FLI.pep
PKSPPQPPPPSAMAADTSKPFFPAAPHSALRPSRSAASRAFPESSYWRAFRSSELLSDAGFPVTDLTFASSVEDRAAPTLAASWSTSVHVFSSDPLEKLRRISVAGDLAFSPSFRCDGALLATGDKKGVVRVFRADKAATGALRTLRAHAAETRVVRYPVAGGDKLHLLTAGDEALLAYWDVPSETPVFSIPAAHQDYIRGGAASPADHNIFATGSYDRSVKLWDARTSNTGPSLSFSHGELVESVLFLPSGGLLATAGGNVVKIWDVIGGGRLVHSVESHVKTVMDLTLGKMVNTGEMRLLSAGIDGYVKSFDFGKLKMTHSLRYPQPLLSVAVSPCGSVVVAGSAKGKIYMRNRKKKAVDEEEQGMKSVGGEIDWVSPEPEKSVLRPNYFRYFRRGQNEKAKEGDFVIEKPKKVKYAEHDKLLRKFRHKDALVSALVKNNPRSVVAVMEELVSRRKLIRCIGNLDNEELGLLLEFLHRNATLPRYAKLLLCLANKVVEMREADIRSDEKLKVHMRNLKRMVAEEIQIQHMLQGIQGMISPMLALATR

SEQ ID NO: 51658 - protein, 400 aa, Zea mays
  Clone ID: LIB3180-030-F5_FLI.pep
DIQNINILKVTGWVVQYQENLIGLGVDESLAQVCSESGALDPLMNMYVERMQATTKKWYSNILEADKTQPPKSTEDGKLYTPAAVDLFRILTEQVQIVRDNSTDVMLYRIALAVIQVMLDFQAAERQRLEEPASDVGLESLCALINNNLRCYELSSELSSSTLEALPQNYAEQVNFEDTCKGFLEVAKEAVLQTVSVIFEDPGVQDLLVKLYQKDWLEGMVTEYLVATFADYFGDVKMYIEERSFRRFVEACIEETIVVYVDHLLSQKNYIKEETIERMRLDEEVLMDFFREHINVTKVESRVRILADMRELASAESLDSFTLIYTNILEHQPDCPPEVVEKLVAMREGIPKKEAKEVVQECKEIYENSLVDGNPQKSGFVFGKLKCLTAKKGIWRKLGQ

SEQ ID NO: 51659 - protein, 161 aa, Zea mays
  Clone ID: LIB3150-109-H5_FLI.pep
SSIIHSITATPPAAFIFAMIASASSFVSDCFRTTGAFSTSSLASFSPRSVNVLISLMILIFAAASNFSNLTSKTVFSAFFSAFPEPAPEPTWAPKPWPDTACGGSWFNLRRSAGAICLISSGGRAAMRSASSTTFSEGGGIGPYGSYTSGYLYFLAPMSFA

SEQ ID NO: 51660 - protein, 483 aa, Zea mays
  Clone ID: 700204456_FLI.pep
KALLAKNTVFCSLYFLCSADGQWLAVPLLEALEQRIDVLALVDGNEHLVQLLAGRARLLAGEVHGSELLAHEAVERVGAAVGDSVRYPCRAVLDSRPCSLHRLGQRRTQVVLELGDLGEHGCLRVELGSAVGEGALHEHVAKLLHQRVVSAAGVVGIREHRLALNLLEQVLLAEAGDVETTGGVGAQGLLRHRHHTALDSALDVLLDVAQVHGLAQGDHERRGHELQDLDGLSSLPGGDESQRVDVLVVLLRALHVVGDRVPQELQLGAVGRHGDLGTLKAIVQAGVAPTGQVGGQAVVVVVVDELRELRKHELADGCDGETGVVHGHPDGRALEVATVKSLASGDIDERVVVDGVDLALNGLGGGADNLNLRAKPLRRRAERVPVLLGLHQGVELAELLGKLHEGAALQDVLHDSSSLDLSRVVLELVGQVVGVLRLAVHDLAEHGGQDLGEDGKDISLEEHSGGKARAHGRAVHHRKTLLG

SEQ ID NO: 51661 - protein, 394 aa, Zea mays
  Clone ID: 700212580_FLI.pep
TKLHGAALPAGTPTHGPKPPGHANDPRRDRNPAHKRRRAPKHHGKQGKQSGGRGRNKRKEKKERRKKKKRGGRRKGGGEGRKRRRGGRESKREEKFFFLRVGGRVGEAFAGRAKIVHIDIDPAEIGKNKQPHVSICADVKLALQGMNTLLEGSTSKKSFDFGSWHDELDQQKREFPLGYKIFNEEIQPQYAIQVLDELTKGKAIIATGVGQHQMWAAQYYTYKRPRQWLSSAGLGAMGFGLPAAAGAAVANPGVTVVDIDGDGSFLMNIQELAMIRIENLPVKVFVLNNQHLGMVVQWEDRFYKANRAHTFLGNPENESEIYPDFVAIAKGFNIPAVRVTKKSEVHAAIKKMLEAPGPYLLDIIVPHQEHVLPMIPSGGAFKDMILDGDGRTVY

SEQ ID NO: 51662 - protein, 181 aa, Zea mays
  Clone ID: 700202213_FLI.pep
PWAPELLLGTKEYSTAIDMWSVGCIMAELLAKEPLFNGKTEFEQLDKIFRTLGTPSEKIWPGYAKLPGVKVNFVKQPYNRLRDKFPAASFSGRPILSEAGFDLLNRLLTYDPDKRISADDALKHKWFSEVPLPKSKDFMPTFPALNELDRRTKRYLKSPDPLEEQRLKELQGNIGNRGLFG

SEQ ID NO: 51663 - protein, 216 aa, Zea mays
  Clone ID: 700202452_FLI.pep
PRQAQQPPQHISLSISAMAEVEQQQDTPKLFNRWTFDDVQVNDISLNDYLAVNATKHAMYLPHTAGRYSKKRFRKAQCPIVERLTNSLMMHGRNNGKKVMAVRIIKHTLEIIHLLTDANPIQVVVDAIINSGPREDATRIGSAGVVRRQAVDISPLRRVNQAIYLLTTGARESAFRNIKTIAECLADELINAAKGSSNSYAIKKKDEIERVAKANR

SEQ ID NO: 51664 - protein, 542 aa, Zea mays
  Clone ID: 700221523_FLI.pep
PIKLWERYVEWLYQHKELGIFVDVSRMGFTEEFLRQMEPRMQQAFVDMRELEKGAIANPDEGRMVGHYWLRDPALAPNSFLRNKIETALDKILAFSQDVISGKILSPSGRFTSILSIGIGGSALGPQFVAEALAPDNPPLKIRFIDNTDPAGIDHQIAQLGPELATTLVIVISKSGGTPETRNGLLEVQKAFRDAGLQFSKQGVAITQENSLLDNTARIEGWLARFPMFDWVGGRTSEMSAVGLLPAALQGIDIKEMLVGAALMDEETRNTVVKANPAALLALCWYWASEGIGKKDMVVLPYKDSLLLLSRYLQQLVMESLGKEFDLDGNRVNQGLTVYGNKGSTDQHAYIQQLREGVHNFFVTFIEVLRDRPAGHDWELEPGVTCGDYLFGMLQGTRSALYANDRESISVTVQEVTPRAVGALIALYERAVGIYASLVNINAYHQPGVEAGKKAAGEVLALQKRVLTVLKEAICENPTEPLTLDEIADRCHCPEDIEMIYKIIQHMAANDRALIAEGSCGSPRSVKVYLGECSVDEDMQAA

SEQ ID NO: 51665 - protein, 647 aa, Zea mays
  Clone ID: 700221631_FLI.pep
LVKAKEQLLDNEKEKCRVLAELERAKKVADEANAKLQDALDVQRRAIEAQEADKLPAGESEQASIHDQQEADDTVLRSTVEQLEKARYELANAIDAKNEALSQVDDAVRASEAKTQEVEHLIAEVTHLKGLVDSKVDGNRKKTAERIQNLEEENFALKLELQKKKAAEEKAIRLERMIDELQSDVDDARNFGSKSKQLADEWQKKAQLLEVRLEEADQSNILKGESLNSAMEELDSTSSLLRDRESEVAALRDKVRFLEDELTKLKNDIVVSGQRADAAEKEAADLWTEVEGLRLKLHTVEEEKIEALNSDKSTSLEIETLNEQKNQLADKLEANKDELEKTKKAMEGLASALQEMSAESREAREKYLLKQDEIERAQAQVEELSLSLKNTKENYELLLDEANYENVCLTKTVERLKAEAKSAHDEWHSKELSFVNSIKNSEEEIVAIRVQLDRTLEVVKEKENENTELQEKLQQLESQLMEANRIREEASAETIRWKENILDQENELQNIKQENDDLQAKELAASEKVRALSFQLANVKDSMINGNSKEGDNEKEGTEEVDEPVVVVAKMWENGKFADYDSSKEKDNDGDSQVDLESNKGDAGLDSNGLHSTKESSGMVSTKQPQQHKKKPLLKRFGGLLKKKSEN

SEQ ID NO: 51666 - protein, 719 aa, Zea mays
  Clone ID: 700207818_FLI.pep
HNYHHKMPGITEDGVVAEEVPNGVNFSPQNESLPAPKSTAASTMAGSMQSEALEMHVEASGAGEPSIEQLYNNVCEMESSSEGGSPSRESFGSDGEESRIDSELRHLVAGEMEAMKVIEEEEENGSVANVVPPAPAENGTPVKEHSSSSSKKSKKASKSQLESDASVGLNGKASTEEGESEVSKPASRVGRRRKSNANPQSGTEDAGLDNPDLGPFLLKHARDLIASENPRRALKYALRATKSFEKCAGGKPSLNLVMSLHVVAAIYCNLGKYEEAVPVLHRSIEIPVIEEGQEHALAKFSGCMQLGDTYGMLGQTAHSLQWYASGLEIQKQTLGEQDPRVGETCRYLAEAHVQALQLDEAQRLCQIALDIHREHRETASLEETADRRLMGLICDTKGDHEAALEHLVMASMSMVANGQETEVASVDCSIGDIYLSLGRYDEAVFAYQKALTVFKTSKGENHATVASVFVRLADLYNKTGKLRESKSYCENALKIYQKPIPGTSLEEIATGLTDVSAIYETMNEHEQALKLLQKALKMYNNSAGQQSTIAGIEAQMGVLHYILGNYGESYDSFKSAIAKLRTCGEKKSAFFGIALNQMGLACVQRYSINEAAELFEEARTVLEQEYGPYHPDTLGVYSNLAGTYDAMGRLDEAIEILEYVVGMREEKLGTANPDVDDEKRRLGELLKEAGRVRSRKAKSLENLLETNPYIATKRNAVAA

SEQ ID NO: 51667 - protein, 479 aa, Zea mays
  Clone ID: 700217249_FLI.pep
SRTWIVALKTLVVIHRLLREGGPAFREEFLTFTQRVRILQLSNFKDDSSPVAWDYSSWVRTYGLFLEEKLECFRVLKYDIEAARLSKQGQGPEKGHSRTTELNSQDLLEQLPALQQLLYRLIGCRAEGVAKNNYLVQYALAQVLKESFKIYCAINDGIINLIDKFFEMPKHEALKALDVYKRAVHQAGNLSDFYESCQGLELARNFQFPTLREPPQTFLSTMEEYVKEAPRMMPVVEPLELPERLLLTYKPEEEVRDTVPIVAEKLQVVEEIAPVPSSQIALPPKPEIADTGDLLGLGDSTPTVLAIEESSALALAILPTGIDNSTTTTQQDSGFDPTGWELALVTTSSNAIPLSMESNLGGGFDKLTLDSLYDDGTYRQMQQQQLYGSAPPNPFMASDPLAVSNQVAPPPSVQMAAMATQPQHLPMMIEPNPFGPPQQHHAGVAPAANPFLDAGFGAFPAVNGMHPQTNPFGGAAQLL

SEQ ID NO: 51668 - protein, 916 aa, Zea mays
  Clone ID: 700169029_FLI.pep
PSALLGWGRSRRPGAEPQKQTRKSPGPSRSGEATPLHLHYRSHGQRFAASREPALASASASSSAGSSRRGIPVRMSSGGGGGGARGPSGPVPASARKLVQGLKEIVNRPDAEIYAALRECNMDPDEAVSRLLSQDTFQEVKSKRDRKKEVKETPEPRSRGASNSSRSSRGGVDRAGRGNSVQSGSSGTDYMASRSSILGPAVAATNAMQKPTVPSLSTNKDVVPNGSVGAQQSSSGFQHNWFGVPGQMSMADIVKMGRPQVRSSGKPMAAGDTSYAGQTPSLSSSINQNSKQSASTALPTTFDQGFPALPDPIPHTVNSSHGSAGNNHTHENDWFPQDDLPSGVQPTCIEASGDQSLFVASLDQSMLVADASYSQEISHAEENNSTAVEATLSSERHLEIVEDDNHFNDGLLQNSSAYQAQVHSYVDNEVGISNVDAESASMNFQHLSLQNEDIAATKSAEDNPAVILPDHLQAANADCAHLSFGSFESGAFSGLLSSKVPKGSLEDDEVLIPDESRSVNRIDVRNQDYYDDDALNSSENVDVETRIGNMDNIDGPSVSESDALRQGAIDVPGLQYDLPSVSSHAYSNTTQPSTMEEPQGNTQAQPLSHFSGLLQANTLPNNLLGSNLTPLREFDFSQFLQTQSATKYNPSVAPNNLPPISMQETSKQGGFPNTQSTQHVPSTSISSGLPLPQQLPVYSQPTLPLGPFTSLVGYPYLPQNYYLPSAPFQQAYSSNGPFHQSAAPAVPGAGMKYPMPQYKSSPPASTLPQPSSLSGYGGFGSANNIPGNFSQNQGAPAAPTTLGFDEALGTQFKHPNHYAALQQSDNSTMWLHGGAGSRTISAVPPGNFYGFQGQSQHGGFRQAHQPSQYGGLGYPSFYQSQTSLPQEHPQNPTEGSLNNPQGVPSQPSHQLWQHIY

SEQ ID NO: 51669 - protein, 178 aa, Zea mays
  Clone ID: 700208278_FLI.pep
SSDRTIKVWDLQTGFCKSTIMSASNPNSLAFIDGDTICSGHRDGNLRLWDIRSGKCTTQIAAHLDVTSVCVSRSRNFVLTSGRDNVHNLFDVRTLEICGTFRAMGNRVVSSWGKPSISPDENCIAAGSSDGSVYIWSRLKNGTPTILEGGHSSPVLASAWCGLGALATSDRNHIYIWS

SEQ ID NO: 51670 - protein, 456 aa, Zea mays
  Clone ID: 700210222_FLI.pep
HTQAQMAEHKGNVLLHKYEMGKLLGQGTFAKVYHARNTATSESVAIKVIDKEKVMKVGLIDQIQREISVMKLVRHPNIVQLYEVMATKTKIYFVLEHVKGGELFNKIQRGRLKEDAARKYFQQLICAVDFCHSRGVYHRDLKPENLLLDENSNLKVSDFGLSALAECHRQDGLLHTTCGTPAYVAPEVINRKGYDGAKADIWSCGVILFVLLAGYLPFHDKNLMDMYKKIEKADFKCPSWFSTDVRRLLQRILDPNPSRRISVKKIMENPWFRKGLGAKLLRYDLQNKNAPHVDKKADFDSLSTNVTTESKQHEEKKPTNMNAFDIISLSTGLDLSGLFEESNKKRESKFTSTNTSSTIISKIEDIAKNLRLNLTKKDGGLLKMEASKPGRKGVMGIDAEVFEVSPNFHLVEIKKTNGDTLEYQKVLNQEMRPALKEIVWAWQGEQSKQKQEQQSC

SEQ ID NO: 51671 - protein, 157 aa, Zea mays
  Clone ID: 700201886_FLI.pep
HSKNIVHFDLKCDNLLVNLKDQSRPICKVGDFGLSKIKRNTLVSGGVRGTLPWMAPELLNGSSNKVSEKVDVFSFGIVMWEILTGEEPYANMHYGAIIGGIVNNTLRPHVPASCDPEWRRLMEQCWAPDPAQRPAFTEIAGRLRSMSVAANQAKATK

SEQ ID NO: 51672 - protein, 233 aa, Zea mays
  Clone ID: 700218665_FLI.pep
RMMLLAKLGAPSVPGKRRVEEDAISCRIETYHGCVMDRRKLLLVPAISMAIASFQYTFVKGIAKAEFADMPALRGKDYGKTKMRYPDYTETESGLQYKDLRVGDGPSPKKGETVVVDWDGYTIGYYGRIFEARNKTKGGSFEGGDKDFFKFKVGSGQVIPAFEEAISGMAPGGVRRIIVPPDLGYPDNDYNKLGPKPTTFSGQRALDFVLRNQGLIDKTLLFDIELLKIIPNQ

SEQ ID NO: 51673 - protein, 618 aa, Zea mays
  Clone ID: 700220913_FLI.pep
ETMGPAPREPMKQRVNRCLLRLSDRDTEAMAAAELDAIARELDADELPVFVAAVSDARPTDRTPLRRHSLRLLALVAGEHPRDAVAPLVPRLLAAALRRVRDPDSSVRAALVDAARAAAGAAASPPAALAPLADAVLHEQDQCAQLAAALAAAAAVEASEPTDDLAAYLRGLLPRLYKLLRSAAFKAKPALISLIGAASAASGGGAASAAVPCLRDALTADDWAARKAAAEALALLALEHGDDLVSHKSSCITVFEAKRFDKVKIVRESMNRLIEAWKEIPDLDEEVCSLPSSQSRSSLTDTASDGRYPADSSGSTSSPSITRRNSWPTNRQPQPDGSNNAINRKGSPPSIVAKKNLPPSRRSTDQFKKSEDRVVVTTAPDATPIKMVAEEKLLKEGNVRERLEARRVLFQKTGDKGYKKVAGPKSGSRVVPYSGEGDGDSEEPAETEDAPEEFQSAHKDEDLSKIRMQLVQIENQQASLLNLLQKFMGSSQNGIRSLETRVNGLEMVLDEISRDLAASSGRIPNSEPDTNACCILSPKFWRRHDGGRYTSRYPISDAANYSEESRSPYKWDRQQKFGVHGGFVTNPLAEPNDSSVRSIAGSQQGRRRDSAQYRSRLS

SEQ ID NO: 51674 - protein, 96 aa, Zea mays
  Clone ID: 700197413_FLI.pep
EALPDTGGRREGGGELQRARRQGRAHRQQVPGRLKHQRGGWFPCQVLEGSAVINLALFFLDKSTNNLEAGIVVVAGSAPLFFYFTSNLNSFGVHNQ

SEQ ID NO: 51675 - protein, 208 aa, Zea mays
  Clone ID: 700052422_FLI.pep
CQLKELELELTEIRDVLRCILHTIFFHRTLSLVRPKDVDCDFLDITYVQCGLPELEKEVDEKIDQFSAWVEKHPNRRSQICLSFFDEKHRHPGWFVNKTERIYWEQWFINLQVMFPKRYSKSNSSKGLTNIQANAVEETSTRRAALEASINEVLFQIIKFANEKKDHIPAIPDRIFNHEIMIPSSDSVFGWNTDVIRRVLNSGHPYSL

SEQ ID NO: 51676 - protein, 115 aa, Zea mays
  Clone ID: 700047470_FLI.pep
CLLAWRLFLSDKEFNLDHPAANPLAPGRGGPPLKCMPPTLTVIAEHDWMRDRAIAYSEELRKVNVDSPVLDYKDTVHEFATLDVFLKTPQAQACAEDIAIWMKKYISLRGHEFSY

SEQ ID NO: 51677 - protein, 171 aa, Zea mays
  Clone ID: 700201353_FLI.pep
QEYLYQEIQKVCGNKTVTEDHLPELPYLNAVFHETMRRHSPVPLVPPRLVHENTNLAGYEVPAGTEIIINLYGCNMNKNDWAEPEEWKPERFLDGRFEAVDMHKTMAFGAGRRACAGSMQAMNISCTAIGRFVQEFAWRLEEGDEDKVDTIQLTTNRLYPLHVYLAPRGRK

SEQ ID NO: 51678 - protein, 520 aa, Zea mays
  Clone ID: 700208731_FLI.pep
KRERSNLDVYKDFNRLPGADPCHSHGHGHGQTTAGASDQSGRIGRKRKEMHSDEEDDGEENDFQEGDEPSAAKKPRVVWSIELHRKFVAAVNQLGIDKAVPKRILELMNVEKLTRENVASHLQKYRLYLKRLSAVASQQASIVAAFGGRDPFLHMGAFEGLQSYQPFAPCAALSSFIPHHGSLGRTTAAAFGVPELAPAITVQAAASNGMISHCAGDASKFQLSGIQENQQPNLGQGSATSLGLPQLQQKWIQQETGDLSAVFSGSALANTLSGALQRVASSPLPPQELLEGVQTKVSAQPPITMASVSSELVERTVGVSANLQDSGISPQGTLPINDGFTADKLQLQDPFDSNGGTNFSVNMPVCPSGSLTASSNAKGGASSCSPVLLAPDTGRHSNYLQFGVAGNSGHDMNDIKQDHLHQGLSTGGFNHDFGTCMTEQTDPNVPYLMPQMKPNTLSSEDKLKQRNIYDLGIPKLHGGFSSSSCNFDGLLNSMIKAEKDDLSFTDSDLGCDFFPLGACI

SEQ ID NO: 51679 - protein, 748 aa, Zea mays
  Clone ID: 700212365_FLI.pep
RRRKTRPDTASCGTASIEDKISNYLLLSLIGICANLNSDNVQHSNGQELLSTLLKNLGSVAKSLEPKELCKLLEAYQSLQNGSNAGTSGTANATEEAAGPSNSKLPFVNGSHCGHASSSVVPVQSKATIVVTPEPASCKLKDFDLNDTCNDMEGFEDRQEGSPTPAFKTADSPNCASWMQQDSTQSPPQTSGNSDSTSTQSLSSSNGDAQCRTDKIVFKLFDKVPSDLPPVLRSQILGWLSSSPTDIESHIRPGCIILTIYLRLVESAWQELSENMSLHLDKLLSSSTDNFWASGLVFVMVRRRLAFMLNGQIMLDRPLAPSSHHYCKILCVKPVAAPYSATINFRVKGSNLLSTSSRLICSFEGRCIFQEDTDSVAENDEYEDRAIECLSFCCSVPGPRGRGFIEVEDSGFSNGFFPFIIAEKDICFEVSELESIFESSSIEHADANDNAREQALEFLNELGWLLHRANRMSKENVTDTSVATFSMWRFRNLGVFAMEREWCAVIKMLLDFLFIGLVDVGSRSPEEVVLSENLLHAAVRRKSVNMVRFLLRYRPNKNSKGTAQTYLFRPDALGPSMITPLHIAAATSDAEDVLDVLTDDPGLIGISAWSNARDGTGFTPEDYARQRGNDAYLNLVQKKIDKHLGKGRVVLGVPSSICSVITDGVKPGDVSLEICMPMSASVPGCLLCSRKARVYPNSTSRTFLYRPAMLTVMGVAVVCVCVGILLHTFPRVYAAPTFRWELLERGPM

SEQ ID NO: 51680 - protein, 333 aa, Zea mays
  Clone ID: 700235561_FLI.pep
LLISVSAQDLASIVNSLFEFLMGPRHLERFKCIFHFTQLTLKYLIHCFECPMRLIVQLPPHYSVHFSGESQSMKWTMRLRVVLCLAEALEYCTNRGRALYHDLNAYRALFDDDCNPRLSCFGLMKNSRDGKSYSTNLAFTPPEYMRTGRITPESVIHSFGTLLIDVLSGKHIPPSHALDLIRDRNFNMLLDSCLEGQFSNEEGAEMVRLASRCLHYEPRERPNVRSLVQVLTPLQRDVETPSYVLMGVPRGGASSIQPLHLSPLAEACSRKDLTAIHEILEKTGYKDDEGTANELSFQMWTNQMQDTLNSKKKGDNAFRQKDFTTAIDCYSQV

SEQ ID NO: 51681 - protein, 457 aa, Zea mays
  Clone ID: 700267284_FLI.pep
QQTTGAMKVPVLLLLVSLCFSLALAWQTDTESGSGRPYHYGEESFRHWTRSRQGRFRVLERFTHELLEDAVGNYRVAELEAAPRTFLQPSHYDADEVMFVKEGEGVIVLLRGGKRESFCVREGDVMVIPAGAVVYSANTHQSEWFRVVMLLSPVVSTSGRFEEFFPIGGESPESFLSVFSDDVIQASFNTRREEWEKVFEKQSKGEITTASEEQIRELSRSCSRGGRGSRGEGGDSGSSSSSKWEIKPSSLTDKKPTHSNSHGRHYEITGDECPHLRLLDMDVGLANIARGSMMAPSYNTRANKIAIVLKGQGYFEMACPHVSGGRSSPRRERGHGREEEEEREEEQGGGGGQKARSYRQVKSRIREGSVIVIPAGHPTALVAGEDKNLAVLCFEVNASFDDKVFLAGTNSALQKMDRPAKLLAFGADEEQQVDRVIGAQKDAVFLRGPQSHRVSSV

SEQ ID NO: 51682 - protein, 379 aa, Zea mays
  Clone ID: 700047325_FLI.pep
AIYNDTTMSSVQEELNNTQDMLQGYVELYNYSLSYVKTMAIGCAIQLGIPSAIHRRGGAATISDIITETGVDPSKLPYLRRLMRVLTVSSILATTGTDETETESDDSTVYKLTPASRLLVSGAGAPTSCDISPMLDLLMRPTTSVATYFSLEEWFKDAGATATLFEVAHGMSPWSLTKNDALYNKTLNDGCAADSNFAMDTLLREPRAAGIFRGLGSLVDVGGGHGAAAMAIARAFPHIRCSVLDLEQVVSGAPDDGTVKFIAGDMFESIPAADCVLLKYVLHCWDDESSVKILRQCKRAIPARDAGGKVVIMNMVVGYGSSDRFVKETQVMCDMWMMRYVGVEREEHEWKRIFLEAGFSDYRITPTALGFQSVIEVFP

SEQ ID NO: 51683 - protein, 784 aa, Zea mays
  Clone ID: 700466916_FLI.pep
LLSPLPLAAALLIWWRLASLPPSAAAGSSSSSLLTPSFKLVLPAYLSVGRERERGEGSVGRSGALGSRRCLPVSSLGSRSLRAMAAVATPPAPAPAAPAPAPAPAAAPAPVTVAPAADQTTDLLQKLSLDSQPKAAGATEPAAAAAKEGAVTSQPLSVAIPPERSITPVLQDFMDPNLFYLPAYYYGGYDSSMSEWDDYPRYLNSDGVEIAPAVYGDIYGYGYAPYGAYSPATSPVPTVDGQMFGAQHYQYPTTYFQPPTPIPSTTQSNLQSSNNPEKPAAKADPAKATANGVPNGTGHTHSYSGTVPSQQSSALTPDGTYRAPLLGGVPSAGYLDTTYYGYDSTGAQFAWYDGSAYANGQQRTTTTNRFPSSSFSGNGSSAIYQNKSSTTQQMGMQNRRPTTTSAAPTYPNRMYPSPRPYTQYGNSVKTGLPYGSNGYDSRIYGRCGLGNGMDNRYRPRACSGYYGYGNESQDGTIELNRGPRSGRFKNQKLYGHTVTIAVKGQSLPSSESKNDSAVPDRAKYNRDDFPVQYDAAKFFVIKSYSEDDIHKSVKYNVWASTTNGNKKLDAAYQEAQSKGSACPIFLFFSVNTSGQFVGVAEMTGAVDFEKTLEYWQQDKWNGSFSVKWHIVKDVPNNILKHIILENNENKPVTNSRDTQEIRLEQGLQMLKIFKDHVSKTSILDDFAFYESRQKLMQDKRSKQQQLQKQVWDTRTPVSVTGERPQEPADGKPNPSVPDGVTAEVKAVKAPSENGITAPVVSYAAKVAQTAPEKPVLSNGVAKTG

SEQ ID NO: 51684 - protein, 636 aa, Zea mays
  Clone ID: 700469710_FLI.pep
AGYPGAASLGDMICGMAVAKITSKDILFWFRSHTAAEIKWGGAKHDPSDEDDSRRMHPRLSFKAFLEVVKMKSLPWSDYEMDAIHSLQLILRGTLNDALKPAQSSGLDNQIGDLKLDGLAELQAVTSEMVRLMETATVPILAVDGNGLVNGWNQKVADLSGLRVDEAIGRHILTLVEDSSVPIVQRMLYLALQGREEKEVRFELKTHGSKRDDGPVILVVNACASRDMHDHVVGVCFVAQDMTVHKLVMDKFTRVEGDYRAIIHNPNPLIPPIFGADQFGWCSEWNAAMTKLTGWHRDEVIDRMLLGEVFDSSNASCLLKSKDAFVRLCIIINSALAGEEAEKAPIGFFDRDGKYIECLLSVNRKVNADGVVTGVFCFIHVPSDDLQHALHVQQASEQTALRRLKAFSYMRHAIDKPLSGMLYSRETLKGTGLDEEQMRQVRVADNCHRQLNKILADLDQDNITDKSSCLDLDMAEFVLQDVVVSAVSQVLIGCQGKGIRVACNLPERSMKQKVYGDGIRLQQILSDFLFVSVKFSPAGGSVDISSKLTKNSIGENLHLIDFELRIKHQGAGVPAEILSQMYGEDNREQSEEGLSLLVSRNLLRLMNGDIRHLREAGMSTFILTAELAAAPSAAGH

SEQ ID NO: 51685 - protein, 528 aa, Zea mays
  Clone ID: 700442608_FLI.pep
KNRKSLPSTIDRASMAAKRRARQPSTEDSKELGLNGGNEGSDEEEEESSKSDALKRAEQPSPPSPEDAEAERSGEASPQRSKPRGWVAMKTKTTTSKRVKKPSPASEKEDEAGDSGDLSPASDPLPDNIVDAGDNKRPATLKPGKKRSPTPQQEEERPEKRAAGSDGETVATSSPQRKKKSKRSVDKDRRKKKNRNQIRKALTQEDEDHDTVMAEQEQSNTSLPQDEHAAREEEQEEKMAQQEHAGDTSHPHDKDMRSAHGEEQQDANQEHADDTSPAEDNHSVDEEEQQVEPIPQQEQPNDTSPPQEKNRAQEDEETRAQVNGKALEGRNAPSTKLRSFESEKKPAVERSWSYDDELKILNALVEHAQSHNGSLPDSSHVLANLTFDKIDANEDKLTDKIRKLRTRYRRWLLQGCTPSVSGSQLFKLSEILWGQADEDEQVEPTSRDFSVVSKLYPHLAKEVKAYAETHSSGDLIMGMVMTICDKKARDLDAKCKKQQIETFKLELGQANLTNELLSALSSQTHVKF

SEQ ID NO: 51686 - protein, 375 aa, Zea mays
  Clone ID: 700428236_FLI.pep
ASEVVRREMGLEWMLKPASSSQTEGTGVRKVDNVEKDESAHEEIMRPNPKELNPYLKDNGTGYPEESTPSNAGSQLLASSVVGDGGASWRLKALKRAKEQAAREGRKLEEVVEERWSSLGDLAVSVSASRAAHSHAHLHAIRGRKSGNADNSEERVKRNPEGQLDGSSGRREYLRDVSSQHHAMRKPKPDSVPWKKRRQNISSEDQALISSAVASLNKFSDDGSFMEKISNVESKNTNVSTASASADEQRDNGQKTPKESSNKVQLVSTQKLNANQMAAKILQLRMKGKHQEAEQLSREMEALLENQDTAHEKPGHGKERSSIRPTLKPTAADHRRREDDADLHLANKIMHNKQYNMSKSIEDEYDFGDAPTKKD

SEQ ID NO: 51687 - protein, 560 aa, Zea mays
  Clone ID: 700220141_FLI.pep
NSDIGGNKHDLTDGTEELFWGSPITVQNEILPSKSFPEEHDADKAESQFSSLSSDPHSMASQRAWKQPTQGLRLKSLLEIQAEEQLRAQKGLTTETAKPAASVPSISWNGISISSEQHYGGSNISLGSMESAVERNKRSQLHDLLAEEVLARSSIADNENNANDAFFSPLSPAAVQADAPALDDNDFIEAKDKKNKKRSAKTKASTVKAPSPVVSFDPPAISMPSEKGKSAKQAQQELEILPAPPSGPSFGDFVLWKGDQTSSVPAPAWSNDSAKVQKPLSLRDIQREQERRTVSIQQQAPSPTPAKVAPNQRSHVNASSWQASGPPPSQAVAPVQMSSNAPSHSRSSAEDDLFWGPSEHSKQDTKQSEFPSLLSQSRSSMMKDHSALNRQKSQAGRLPVPSAATANQSGKGKAEATNKQTEAMDFRDWLESEWAKLTGTNDVSFLEFCIKQSTTEAEILLHENIGSLDRNHEFIDKFLNYKAFLSADVIHMAFQAPSSRGDGAGRANPAAAARGGTVIDADLDGGGKKKGKKGKKVSAAVLGFNVASNRIMMGEIQNVD

SEQ ID NO: 51688 - protein, 321 aa, Zea mays
  Clone ID: 700206523_FLI.pep
AMAASVSASCLIGLSSLAVVLVALASAASAQLSSTFYDRSCPNALSTIRSGVNSAVRQEPRVGASLLRLHFHDCFVRGCDASLLLNDTSGEQRQGPNLTLNPRGFVVVNSIKAQVESVCPGIVSCADILAVAARDGVVSLGGPSWTVLLGRRDSTASFPGQTSDLPPPTSSLRQLLSAYNKKNLNPTDMVALSGAHTIGQAQCSSFNDHIYNDTNINSAFAASLRANCPRAGSTALAPLDTTTPNAFDNAYYTNLLSQKGLLHSDQELFNSGSTDSTVRSFASSTSAFNSAFATAMVKMGNLSPQTGTQGQIRRSCWKVNS

SEQ ID NO: 51689 - protein, 668 aa, Zea mays
  Clone ID: 700201658_FLI.pep
EAAQPGQRKRGRPEPSPGFLPRRILEIKRMGSLEARYRPAGAAEDTAKRRTQKSKSFKEVEKFDVFVLEKSSGCKFRSMQLLLFAIMSAAFLTLLYTPSVYEHQLQSSSRLVNGWIWDKRSSDPRYVSSASIQWEDVYKSIQNLNVGEQKLSVGLLNFNRTEFDAWTHMLPESDFSIIRLEHANESITWQTLYPEWIDEEEETEIPSCPSLPDPSFQRATHFDVIAVKLPCSRVAGWSRDVARLHLQLSAAKLAATTARGNSGIHVLFVTDCFPIPNLFSCKDLVKREGNAWMYKPDVKALKEKLRLPVGSCELAVPLNAKARLYTVDRRREAYATILHSASEYVCGAITAAQSIRQAGSTRDLVILVDDTISDHHRKGLQSAGWKVRIIQRIRNPKAERDAYNEWNYSKFRLWQLTDYDKVIFIDADLLILRNIDFLFALPEITATGNNATLFNSGVMVIEPSNCTFRLLMEHIDEITSYNGGDQGYLNEIFTWWHRIPKHMNFLKHFWEGDEEEVKAKKTRLFGANPPVLYVLHYLGRKPWLCFRDYDCNWNVEILREFASDVAHARWWKVHNRMPRKLQSYCLLRSSLKAGLEWERRQAEKANFTDGHWKRNVTDPRLKTCFEKFCFWESMLWHWGEKSKSNSTTTRNSAVPAATTTPAASLSSS

SEQ ID NO: 51690 - protein, 121 aa, Zea mays
  Clone ID: 700348055_FLI.pep
ILFLRTFVSRRPPTPGMIGSIDCMHWEWENCPTTWQGQYRGYYKKPTLILEAVASHNLWIWHAFFGMPGSCNDINVLHHSPVFDNLANGVGPSVSYQLNGQQYHMAYYLADGIYLSWTTLI

SEQ ID NO: 51691 - protein, 751 aa, Zea mays
  Clone ID: 700477144_FLI.pep
VYLLMWLHRCHLSLSAGMSRYPAPYPMIRPGFVPRPMPPPGVVPIQRPTIISGIRAIPPLVAPTARPPAPAVKLADKPPTAVYVGKIAPTVDSDFLLSLLRLCGSVKSWKRAQDPSNGKPKGFGFCEFESAEGILRATRLLNKLSIDGQELVININDATKEYLKKHVEGKKRAQEKEKETEDASGDGTTAVAENESSKPVPDELDETGDAGDKYREDNTDKFGIVTDEDSQTDKDVAEKISNMIEEWLKTRPPPPPSPVQPSADSSGVDKAKNDSDDKNAADADKRAANETERSETASPDKRKDREHDKDKRDKDLERHDRERERVRRDREKDHKHREADRLYRDRLKEWESREREREYQRYSEKEKERDRDHNRRREILKQEDESDDEDNRKRKRRSISSLEDRKRRRQREKEEDLADKIREEEEIAEARRLAVELQRQADEAAAAAAAAAEESASLMEIDGDDEKETDAQNKSAVVEADNISSFANGVGAGRLSKGNNGEETCMTPGQTADTKQNNNVPAKKLGFGLIGLGKRTSVPSVFAVEDDENNVDKSIRPLVPIDYSTEELQAVHANSSTGANVTAAAEFAKRISVSNSKEEKAEAEKDRNRRSSEARPNDERREKLHDREKDKPKSENKKILDAKQLIDMIPRTKEELFAYDINWAIYDKHELQERMRPWISKKIIEFLGEEESTLVDYIVSCTKDHVQAEKMLDLLQSIFDVEAEMFVLKMWRMLIFEIKKVESGLSGRAKS

SEQ ID NO: 51692 - protein, 549 aa, Zea mays
  Clone ID: 700477419_FLI.pep
TVETRTSLDNNVDRDDLQRKIVRPPANLLVFEGDVLDSEASELDSYLLSTCDFYGDFLLLDPCDAPSVFDFLQGKHSGKENSVARQGSPAPSKSQANVFTSPNARSAGTGCKAASGKVLGGLDSTQKNPDQPSTQETSPDDKHWSDPVEPNFTDDVEKPHPDDIGDPVGDYSDDEDPWKPLNPHEPGSLKIRPYRRVKGSLRGVIGTLRKKTLTSIFPVAKMVGVIIPEHAKSFEAQQSQQEEHYGSQSPPRFEKYLASFEFGEENSNVFGDLKDDNGSDIGINFDYNDPDMPNDIDVDPDVPTYPDEIIAATPKGTHGTQDDRDTRESLDDLCRSHLNALLASIAEVEKQSEMDARVSTWKERIEIALEEQDKNPPFDIGSYGEQILDALSSRTDSTGTASFSEIVCGRPKYEVARTFSALLQLVNSRSVYLDKGQATNELVCYTAENPFHVRLISPNRRPEMEAHFARKRVKSPLRNAGKGGESSLARHECPKKPLHKNGKIQVKTAIRLTPDGKRRRRSVTHLMQPINLESADECQWQTDSWASRA

SEQ ID NO: 51693 - protein, 384 aa, Glycine max
  Clone ID: 700672815_FLI.pep
STFFVFLSIPIIATSSFFKFQSQRMGGEELCLMENSGKGKRLWKKVKYQLVEYHSLPGYLRDNEYILGHYRSEWPIRQVLLSAFTIHNETLNVWTHLIGFFIFLALTIYTAMNLNSLQQFPDMLKKADLHKLQSEILTCLPSMPDLHILREGISSWHIKEYLYNCLPHSVKDDLANIIAPLMIRPITRWPFFAFLGGAMFCLLASSICHLLSCHSARMAYIMLRLDYAGIAALISTSFYPPVYYSFMCYPFFCNLYLGFITVLGISTILFSLLPVFQNPEFRTIRASLFFGMGLSGAAPILHKLYLFWGQPEVFHTTGYEILMGVLYGIGALVYATRIPERWMPGKFDIAGHSHQLFHILVVAGAYAHYRAGLVYLRWRDLQGC

SEQ ID NO: 51694 - protein, 562 aa, Glycine max
  Clone ID: 700675638_FLI.pep
LRFVPLLRFVFDLRFHSAFVHIMATASVAFKSREDHRKQIELEEARKAGLAPAELDEDGKEINPHIPQYMSSAPWYLNAERPSLKHQRKWKSDPNYTKSWYDRGAKIFQADKYRKGACENCGAMTHDSKSCMERPRRVGAKWTNKHIAPDEKIETFELDYDGKRDRWNGYDASTYARVIERYEARDEARKKYLKEQQLKKLEKSNQNGEDAASDEEEEEDEDEDEDDLRVDEAKVDESKQMDFAKVEKRVRTTGGGSTGTVRNLRIREDTAKYLLNLDVNSAHYDPKTRSMREDPLPDADPNEKFYLGDNQYRNSGQALEFKELNIHAWEAFDKGQDVHMQAAPSQAELLYKNFKVMKEKLKYQTKETIIEKYGNAADEDKLPRELLLGQSERQVEYDRAGRIIKGQEVALPRSKYEEDVYINNHTTVWGSWWKDHQWGYKCCKQTIRNSYCTGAAGIEAAEAASDLMKANIARKEAATEDPTPVEEKKLATWGTDVPDDLVLDEKLLAEALKKEDQRKREEKDERKRKYNVRWNDEVTAEDMEAYRMKKVHHDDPMKDFLH

SEQ ID NO: 51695 - protein, 306 aa, Glycine max
  Clone ID: 700741027_FLI.pep
SILDNPAAHPQYSTIVDFISQKHRIWLPKGFSFIPLLLEEFHSTPTGGHMGITKTLARVTQNFMWQGIKDDVRSFILYCLHCQQTKYNHRKSPDLLCPLPVLARPWEDLSLNFIGGLPSFRGFSIILVVVDRFSKGVHLGMLHSNHTASTVAHLFLDIVVKIHGMPHSLVFDRDPLFLSKFWQELFKLFGTKLRMSSAYHPQSDGQTEVLNRVNEQYLRSFVHQRPSSWGKFLLWAEWSYNSSIHTTTEMAPYEVTFGKPPPPIPHYLFGTSNIDAVDDFFTSCEAVFALARKKLLKAQQTMKHFA

SEQ ID NO: 51696 - protein, 367 aa, Glycine max
  Clone ID: 700761573_FLI.pep
RHQKIYNFREGDLIAVPTGVAWWMYNNEDTPVVAVSIIDTNSLENQLDQMPRRFYLAGNQEQEFLKYQQEQGGHQSQKGKHQQEEENEGGSILSGFTLEFLEHAFSVDKQIAKNLQGENEGEDKGAIVTVKGGLSVIKPPTDEQQQRPQEEEEEEEDEKPQCKGKDKHCQRPRGSQSKSRRNGIDETICTMRLRHNIGQTSSPDIYNPQAGSVTTATSLDFPALSWLRLSAEFGSLRKNAMFVPHYNLNANSIIYALNGRALIQVVNCNGERVFDGELQEGRVLIVPQNFVVAARSQSDNFEYVSFKTNDTPMIGTLAGANSLLNALPEEVIQHTFNLKSQQARQIKNNNPFKFLVPPQESQKRAVA

SEQ ID NO: 51697 - protein, 582 aa, Glycine max
  Clone ID: 700790355_FLI.pep
TIVTTLRTLVDAFYLLHMALQFRTAYIAPSSRVFGRGELVIDSAQIAKRYLQRYFIIDFLSVLPIPQIVVWRFLQRSKGSDVLATKQALLFIILLQYVPRFLRMVPLTSELKRTAGVFAETAWAGAAYYLLLYMLASHIVGAFWYLLAIERNDSCWQKACSDIRCNKNFLYCGNQHMEGYSAWNKTSEDIQSRCSADGDPAHFDYGIFGQVLSSGIISSKKFISKYCYCLWWGLQNLSTLGQGLQTSTYPGEVIFSIALAISGLILFALLIGNMQTYLQSLTIRLEEMRVKRRDSEQWMHHRLLPQDLRERVRRYDQYKWLATRGVDEENLVQSLPKDLRRDIKRHLCLALVRRVPLFESMDERLLDAICERLKPCLFTENTYIVREGDPVDEMLFIIRGRLESVTTDGGRSGFFNRGFLKEADFCGEELLTWALDPKSGSNLPSSTRTVKALMEVEAFALTADELKFVASQFRRLHSRQVQHTFRFYSQQWRTWAACFIQAAWRRYSKKKIMKLRQKEDESDGAHENVGGSSYSFGAALLASKFAAHTLRGVHRNRLAKTARELVKLQKPPEPDFSADDAN

SEQ ID NO: 51698 - protein, 280 aa, Glycine max
  Clone ID: 700757806_FLI.pep
EDEDEDDEDEQIPSHPPRRPSHGKREQDEDEDEDEDKPRPSRPSQGKREQDQDQDEDEDEDEDQPRKSREWRSKKTQPRRPRQEEPRERGCETRNGVEENICTLKLHENIARPSRADFYNPKAGRISTLNSLTLPALRQFQLSAQYVVLYKNGIYSPHWNLNANSVIYVTRGQGKVRVVNCQGNAVFDGELRRGQLLVVPQNFVVAEQAGEQGFEYIVFKTHHNAVTSYLKDVFRAIPSEVLAHSYNLRQSQVSELKYEGNWGPLVNPESQQGSPRVKVA

SEQ ID NO: 51699 - protein, 212 aa, Glycine max
  Clone ID: 700833285_FLI.pep
ITMTFIREDDDDQVDDDHDHDHVDGGGSQNSASNITEIVTTPEGENLGEWLSLGLKGDINMPAEEQNSSSRPLHSNNNKVFSCNFCMRKFYSSQALGGHQNAHKREREAARSYHQSHHHRIGFSYTTSLATRSLGIKPHSLVHRPNRERSAMVARFSSSDAINVGVGSVASSWTPFMLEQAVDFYWPGSFRGDLLPKQESSDVKKIDLDLRL

SEQ ID NO: 51700 - protein, 414 aa, Glycine max
  Clone ID: 700837684_FLI.pep
ACWASSKDEVQAAIVTCGGLCPGLNTVIRELVCGLHHMYGVKKVLGINGGYRGFYARNTITLTPKSVNDIHKRGGTVLGTSRGGHDTKKIVDSIQDRGINQVYIIGGDGTQKGASAIFEEVRKRGLKVSVVGIPKTIDNDIPVIDKSFGFDTAVEEAQRAINAAHVEAESVENGIGVVKLMGRNSGFIAMYATLASRDVDCCLIPESPFYLEGPGGLYEYIEKRLKENGHMVIVIAEGAGQELVSESVQSMSKQDASGNKLFQDVGLWISQKIRDHFAAQKTLPITLKYIDPTYMIRAIPSNASDNVYCTLLAQSAVHGAMAGYTGYTSGLVNGRQTYIPFYRITERQNHVVITDRMWARLLSSTNQPSFLDAKGDNEEKEEEEALNQLPDGHCAKDTSLASKEINSSIYPTAC

SEQ ID NO: 51701 - protein, 263 aa, Glycine max
  Clone ID: 700875302_FLI.pep
LTSIPDELIKNAKYIATPGKGILAADESTGTIGKRLSSINVENIEANRQALRELLFTAPDALQYLSGVILFEETLYQKTSDGKPFVEVLQENNVIPGIKVDKGVVELAGTNGETTTQGFDSLGARCQQYYKAGARFAKWRAVLKIGPTEPSELSIQQNAQGLARYAIICQENGLVPIVEPEILTDGAHDIAKCAAVTETVLAAVYKALNEQHVLLEGTLLKPNMVTPGSDSPKVTLNIFKIIHPYVWIHSIVEYLLVFEIKLE

SEQ ID NO: 51702 - protein, 266 aa, Glycine max
  Clone ID: 700875793_FLI.pep
SILERETLFQFSLSLSKMADDPMPTRWSFQDFKLCYDAKFGRKKVAENGDDAAGKAVSNGNGNSVTVAIVSNGNKRASEMAVYEQFRSEGQNQIHTNGFVPTLTDERPQKSLLPPFESAEMRALAESLSRDIIRGSPDVKWESIKGLENAKRLLKEAVVMPIKYPKYFTGLLSPWKGILLFGPPGTGKTMLAKAVATECNTTFFNISASSVVSKWRGLLLTTFSPSSLEYFYFVNLNLGNLIVLIFNGSVYYFLKENRMISIWKMV

SEQ ID NO: 51703 - protein, 344 aa, Glycine max
  Clone ID: 700852028_FLI.pep
RDCHSYLGEQRRPRLLQPSSGDALRVPAGTTYYVVNPDNDENLRMITLAIPVNKPGRFESFFLSSTQAQQSYLQGFSKNILEASYDTKFEGINKVLFGREEGQQQGEERLQESVIVEISKKQIRELSKHAKSSSRKTISSEDKPFNLRSRDPIYSNKLGKLFEITPEKNPQLRDLDVFLSVVDMNEGALFLPHFNSKAIVVLVINEGEANIELVGIKEQQQRQQQEEQPLEVRKYRAELSEQDIFVIPAGYPVVVNATSDLNFFAFGINAENNQRNFLAGSKDNVISQIPSQVQELAFPGSAKDIENLIKSQSESYFVDAQPQQKEEGNKGRKGPLSSILRAFY

SEQ ID NO: 51704 - protein, 443 aa, Glycine max; identical to SEQ ID NO: 45886
  Clone ID: 700873423_FLI.pep

SEQ ID NO: 51705 - protein, 487 aa, Glycine max
  Clone ID: 700908878_FLI.pep
MGFQFAGKAVYSAVWIAAFSLFMELLGFSTQKWVTAGGLGTVLLTLAGREIFTNFLSSVMIHATRPFVVNEWIQTKIEGYEVSGTVEHVGWWSPTIIRGEDREAVHIPNHKFTVNVVRNLSQKTHWRIKTHLAISHLDVNKINNIVADMRKVLAKNPQVEQQRLHRRVFLDNINPENQALLILVSCFVKTSHFEEYLCVKEAILLDLLRVIGHHRARLATPVRTLQKIYSDADLENIPFADSTFGHGAGTVPHRPLLVIEPSYKINGDDKKSRAARPAVDQDNKTATQTKVDTKTHNVARGTQDDTEGDNKVLTPNSDANGNSKTVVTPKPDPEVGENKPLKSDSNKENVEVPESPSKSKVTGLVVDNSAQKDVDVKQSKVQITKNIKPNIDSDNVVSSSTNNADKIGGFNTNMPMKQQGEKKPAAQAHASRTVLEENIVLGVALEGSKRTLPIDEEIDNVTCREAKEMAALQGGNGSPKASDGNDK

SEQ ID NO: 51706 - protein, 588 aa, Glycine max
  Clone ID: 700888113_FLI.pep
LNISSNFIYGGIPQSLSSMRNLRSLVLVDNLFNGSVPDLQRLTSLEELNLGGNNLGAQFPSVGKNLVTIMLRNNSLRSHIPPQLVHFDKLQVFDVSSNNFFGNIPSFLISLPSLQYLNLASNHLSGNLSVNMACSSSLTFVDISHNLLVGKLPSCFGSVSSKAKVLYSGNCLSTEKRLNDQQHPFSFCKREGALAVKPPAKNLKKESGSGAKLGLMLGIIVGIVLIGGLLVLLVVCIFRKSKAERSHPKMDKSVANKYSISVSPRPIGTRHIPQAMKQAAVGLPPYRIFTSEEIEDATNNFDPSNLIEEGSLGQLYKGWLRDGSVVLVNCVKIKQKGLPHSIMQQVEVLHNLRHRHMVSVLGHCIITEQEHPQTTSTVFIVFEYISNVSLRDQLSDGRKREMLKWPQRMAMSIGIARGVQFLHTGVAPGIYGNNLKIENILLDDSLNAKVSRYNIPLPSKIAHIEQNATNHIGSTNDAEKEDIYQLGIILLEVITGKQITSSSEIEELKEELENGSSEATSVIRSAIDPSLRGTYAYESMKTAVQITINCLSKVSSQRPSIEDVLWNLQYAMQVQESWTSSGNLSTKL

SEQ ID NO: 51707 - protein, 390 aa, Glycine max
  Clone ID: 700890767_FLI.pep
LELVTPFSKLTTLLSSFHYLVLNSLHPLPLKEMGSLEAERTTVGLAARDPSGILSPYTYNLRNTGPDDVYIKVHYCGICHSDLHQIKNDLGMSNYPMVPGHEVVGEVLEVGSNVSRFRVGELVGVGLLVGCCKNCQPCQQDIENYCSKKIWSYNDVYVDGKPTQGGFAETMIVEQKFVVKIPEGLAPEQVAPLLCAGVTVYSPLVHFGLKESGLRGGILGLGGVGHMGVKIAKALGHHVTVISSSDKKKQEALEHLGADQYLVSSDATAMQEAADSLDYIIDTVPVGHPLEPYLSLLKLDGKLILMGVINTPLQFVSPMVMLGRKSITGSFIGSMKETEEMLEFWKEKGLSSMIEMVNMDYINKAFERLEKNDVRYRFVVDVKGSKLVDQ

SEQ ID NO: 51708 - protein, 115 aa, Glycine max
  Clone ID: 700904656_FLI.pep
GPQATPKHHLLSHSFLHQQRMFEQDQNSNFKPHTIFLVRRSKRKKGKKDTSYTLLVTTATTTLCQQVCVCWNRFSSFPFFFFLFNSNAFLVGHLEYERIVGMVVMVDATLSGARA

SEQ ID NO: 51709 - protein, 355 aa, Glycine max; identical to SEQ ID NO: 45731
  Clone ID: 700849916_FLI.pep

SEQ ID NO: 51710 - protein, 441 aa, Glycine max; identical to SEQ ID NO: 45632
  Clone ID: 700850956_FLI.pep

SEQ ID NO: 51711 - protein, 441 aa, Glycine max; identical to SEQ ID NO: 45632
  Clone ID: 700852895_FLI.pep

SEQ ID NO: 51712 - protein, 502 aa, Glycine max
  Clone ID: 700889069_FLI.pep
LSSLLLLEKFCSYREEAKETLIIFIIIIMDQATTFNKYAFACAAVASMVSIISGYDTGVMSGAMIFIKDDIGISDTQQEVLAGILNLCALGGSLAAGRTSDYIGRRYTILLASLLFMVGAILMGYGPNYAILMLGRCIGGVGVGFALMIAPVYSAEISSASSRGFLTSLPELCIGIGILLGYISNYFLGKLTLRLGWRLMLGVAAFPSLALALGILGMPESPRWLTMQGRLGDAKKVLLRVSNTEHEAKLRFREIKVAMRINDCDGDDNNVKPSYKSQGEGVWKELLVRPTPEVRWMLIAAVGIHFFEHATGIEAVMLYSPRIFKKAGVTSKDKLLLATVGIGLTKIIFLVMALFLLDKVGRRRLLQISTGGMVCGLTLLGFSLTMVDRSSEKLLWALSLSIVAIYAYVAFFNVGLGPVTWVYASEIFPLKLRAQGASIGVAVNRTMNAVVSMSFISVYKAITIGGSFFMFAGISIVAWVFFYFFLPETKGVPLEEMEMVFS

SEQ ID NO: 51713 - protein, 366 aa, Glycine max; identical to SEQ ID NO: 37097
  Clone ID: 700846330_FLI.pep

SEQ ID NO: 51714 - protein, 363 aa, Glycine max
  Clone ID: 700849389_FLI.pep
DYTGDNVTTENLFAVILGDKSKLKGGSGKVINSKPEDRIFIYYSDHGGPGILGMPNMPYLYAMDFIDVLKKKHASGSYKEMVIYVEACESGSVFEGIMPKDLNIYVTTASNAQENSWGTYCPGMDPSPPPEYITCLGDLYSVAWMEDSEAHNLKRESVKQQYKSVKQRTSNFNNYAMGSHVMQYGDTNITAEKLYLYQGFDPATVNFPPQNGRLETKMEVVNQRDAELLFMWQMYQRSNHQSENKTDILKQIAETVKHRKHIDGSVELIGVLLYGPGKGSSVLQSVRAPGSSLVDDWTCLKSMVRVFETHCGTLTQYGMKHMRAFANICNSGVSEASMEEACLAACEGYNAGLLHPSNRGYSA

SEQ ID NO: 51715 - protein, 267 aa, Glycine max
  Clone ID: 700849403_FLI.pep
ICDSNFHILLDLSMEWEMRPGGMFVQRREAAADNGGGGNGNMTTTVLITVVHASSHYDLHLPTNSTFWDVKSLLVHRTGLQPEEQQLFFGGKEKDNEDNLHEEGVRDKSKLLLLEDASSEERKREEIRKHNEMLKASEAVAEVRAEVDKLAERVSVLEVAVDGGTRVSDKEFLMSTELLMRQLLKLDSIEAEGEVKLQRKAEVRRVQNFVDTLDSLKAKNSNPFTPIGKAVSVATQWETFDSGMGSLNAPTSMSSSRNVSQDWERLD

SEQ ID NO: 51716 - protein, 277 aa, Glycine max
  Clone ID: 700892272_FLI.pep
NFKEYDIWLAAENGMFLNPSKGEWMTTMPEQLNMEWVDSVKHVFDYFTDRTPRSYFEEREASLVWSYRHADAEFGRLQARDMLQHLWTGPISNASVDVVQGSRSVEVRAANVTKGAAIDRILGEIVHSKFMTTPIDYVLCIGHFLTKLQQDEDIYAFFEPELPSIGVGLQRSKGTEGVKFPVERVSSLKNPASRNGAAKSSSQKKGQRPVSNNEKKRNNHVCRGPRRLAPEKISWNVLDLKKENYFSCAVGRTQTNARYTLGSPDEVVAFLKELANV

SEQ ID NO: 51717 - protein, 330 aa, Glycine max
  Clone ID: 700894941_FLI.pep
GFGNFSYYYVRKDFSLPRFAQMMWRLNFFVAFCCIVLNNDYMLYYICPMHTLFTLMVYGALGIYNKYNEIPSVMAAKILACFLVVILVWEIPGFFDIFWSPFALFLGYTDPAKPDLPRMHEWHFRSGLDRYIWIIGMIYAYFHPNVEKWMEKLEESDTKRRVTIKTGIVSVALFVGYLWYEYIYKLDKVSYNKLHPYTSWIPITVYICLRNFSQRLRNFSLTLFAWLGKITLETYISQFHIWLRSNMPNGQPKWLLSLIPEYPMLNFMLTTAIYVFVSHRLFELTNTLKTVFIPTKDNRRLLHNFITGVTLCISLYCIALILLLIPHSTV

SEQ ID NO: 51718 - protein, 310 aa, Zea mays
  Clone ID: 700208060_FLI.pep
MMFLRFYVVIEHKVIFIVVFRDAKILLSATHEDVSVEKLNLDKITIYVEHPEPYDPPAEPAPPPPQPLKLTKKEQKKLRTQRRLAKEKDRQEMIRQGLLEPPKPKVKMSNLMKVLGSEAVQDPTRMEMEIRTAAAEREQAHVDRNIARKLTPSERREKKERKLFDDPTNTVETIVCVYKIRDLSHPQTRFKVDVNAQENKLTGAAVITDSISVVVVEGGKKSIKRYNKLMLNRIDWAAAVGGDEDAEAEAEADKPVNSCELVWQGSVAKPTFHRFTVHNCRSESAAKKIFVDASVPHYWDLAVNSSEGSP

SEQ ID NO: 51719 - protein, 444 aa, Zea mays
  Clone ID: 700240305_FLI.pep
LLLFVPLVFPFGSMAGSSSYSVLPDQTMDNDDAQIGVAKTQGKYWGIFICWLLGNGCLFGFNGMLTIEDYYVYLFPKYHPTRIITLTYQPFVLATTAIFTYHEAKVNTRVRNLAGYTLFFLSSFGVIILDVLSSGSGGIAPFVGICTIAAAFGIADGHVQGGMTGDLSLMCPEFVQSFFGGVAASGAITAALRFFTKAVFENSRDGLRKGAMLFSSISCFFELLCVLLYALVFPKLPIVKFYRSKAASEGSQTVTADLAAGGIKSLPNPLAEEDGVVERLNNKQLLHQNMDYALDMFLVYVLTLSIFPGFLAEDTGSHSLGSWYVLVLIASFNVSDLIGRYLPLVEQMKLTSRTGLLIAAISRFLLVPAFYFTAKYGDQGWMIMLTSLLGLSNGHLTVSVLTEAPKGYKGPEQNALGNLLVLFLLAGIFVGAVSDWLWLIGKGW

SEQ ID NO: 51720 - protein, 210 aa, Zea mays; identical to SEQ ID NO: 44277
  Clone ID: 700807182_FLI.pep

SEQ ID NO: 51721 - protein, 323 aa, Glycine max
  Clone ID: 700981844_FLI.pep
SSTGKISLHDMSDERAVHPDCRNASNPYHECSDYCFRVIAEAKIRSQQQESEVGQASGGNNSKQAIPDESYVEKEIHNGRPDLEENSDSDPDQPAVQEAEQEVDYTKLSARQKKWMELRSKMQEAKKRNQIEIAAEKKRMEAPTESRGVSKQKWLEDRKKKIGKLLDANGLDMTKAYMLDTQEAAEEKYKKWEKDPAPFGWDVFNQKTLYNAYKKRTKNVEVDVEEYNRMKEADPEFYRDASSLQYGKAPKISEEKIDRMVRELKDRDEKRNSFSRRRRFHEEKDIDSINDRNEHFNKKIERAFGKYTLEIKNNLERGTALPD

SEQ ID NO: 51722 - protein, 498 aa, Glycine max
  Clone ID: 700989702_FLI.pep
EFARETLAGVNPYSIQLVKEWPLTSKLDPQIYGPQESTITREVIEPQIITYGTIEEALKEKKLFMLDYHDLFLPYVSKVRKIKGTTLYGSRTLFFLTDQGILKPLAIELTRPPMDGNPQWKQVFQPSCDSTNLWLWRLAKAHVLAHDSGYHELISHWLRTHCVVEPFVIATHRQLSSMHPIYRLLHPHLRYTMQINSLAREALISANGVIEISFLTNKYSMELSSVAYDQLWQFDSQALPNDLISRGMAVADPNAPHGLKLTIEDYPFANDGLLIWDAIKQWVTDYVNHYYPTPSIIESDQELQAWWKEIKTVGHGDKSEEPWWPNLNTSKDLIDIITTIAWVASGHHAAVNFSQYAYGGYFPNRPTIARNKMPTEDPSEEEWGNFLNKPEQTLLECFPSQIQATLVMVVLNLLSDHSLDEQYIGKYMEPSWAENPTIKVAFERFNRRLKEIEGIIDSRNGNSNLKNRHGAGIMPYELLKPFSGPGVTGKGVPYSISI

SEQ ID NO: 51723 - protein, 555 aa, Glycine max
  Clone ID: 700991832_FLI.pep
EDIKRSNNMLEKIGLPSKPSLRGNNWVVDASHCQGCSSQFTFINRKHHCRRCGGIFCGSCTRQRMVLRGQGDSPVRICEPCKKLEEAARFELRHGRRPGRGSLKSAPRDEDEVLNQILGQTSDKVPSGQRSVGVASSSSNSNFDEDIQKIVSNDKPNVLGIDLGSTTPDELRKQALEEKKKHKILKGEGKSDEALRAFKRGKELERQADALEIQLRKSHKKSLPSGNLSDVLNKGIPAESDRKTKSLSHVGREKNDLTSELRDLGWSDMDLHKEDKKSSNLSLEGELSSIIGEVFTKSGEQKGSKIDKSQVVALKKNALMLKREGKLAEAKEELKRAKILEKQLEEQELLAEAEDSEDELSALIRGMDDGKELPNLHDRGHDFDFERLLAISDDLDGNFEVTEEDMMDPEIAGALESLGWTEPENTSSKSQTFDKEHLLSEIRFLKREALNQKRAGNTEEAMAFLKKAKLLERSLNSSEPEDYNSVSQKSTAIRKSVSSEVAGKGSDSIHERNTSATNNVSSTVAPKSRLMIQRELLSLKKKALTLRREGKMNEA

SEQ ID NO: 51724 - protein, 421 aa, Glycine max; identical to SEQ ID NO: 45874
  Clone ID: 700961178_FLI.pep

SEQ ID NO: 51725 - protein, 175 aa, Glycine max
  Clone ID: 701041256_FLI.pep
DVISMLDDTVSVSLGIEEETEAAAAEEDAESEVSILEWQVLLNSTNLEGPNSEPYFGDSEDFVYTAEYEMMFGQFNDNAFNGKPPASASIVRSLPSVVVTEADVANDNNVVVVCAVCKDEFGVGEGVKVLPCSHRYHGECIVPWLGIRNTCPVCRYEFPTDDADYERRKAQRSVM

SEQ ID NO: 51726 - protein, 114 aa, Glycine max
  Clone ID: 701045904_FLI.pep
IPFKEISFPLFFNQSPMAPSFTYVKIFSSLVADGFSNALTRRGYAVASQSATKGGVASMSGKMAPKSGEDNKGVSTYKVSWVPDPVTGYYKPENINEIDPAELRAMLLGKKFNN

SEQ ID NO: 51727 - protein, 245 aa, Glycine max; identical to SEQ ID NO: 44625
  Clone ID: 701046646_FLI.pep

SEQ ID NO: 51728 - protein, 83 aa, Glycine max
  Clone ID: 701057391_FLI.pep
RLSLSMDLSDLNSAEMQKFYSEEQQRAMVNEMVAKLTSECWDKCITGTPGNKFSSSESNCLSNCAHRYLEMSMLIMKRFQSMQ

SEQ ID NO: 51729 - protein, 408 aa, Glycine max
  Clone ID: 701061133_FLI.pep
HGLLSIHMPAYSDSIIKGVSTVMVSYSSWNGVRMHANRDLVTGFLKNTLKFKGFVISDWQGIDRLTSPPSSNYTYSVQASIEAGVDMVMVPFEYGKFIQDLTLLVKSNIIPMERIDDAVERILLVKFTMGLFENPLADTSLVNELGSQEHRDLAREAVRKSLVLLKNGKNESASLLPLPKKVPKILVAGSHADNLGYQCGGWTIKWQGFSGNSDTRGTTILNAIKSAVDTSTEVVFRDNPDNEFVKSNNFEYAIVVVGEPPYAETAGDSTTLTMMESGPNVINNVCGTVKCVVVIISGRPIVIEPYISSIDALVAAWLPGTEGQGMTDVLFGDYGFTGKLARTWFKSVDQLPMNVGDPHYDPLFPFGFGLTTESVKDLVARSTSAAVGARACIFTIIVTLIISLYLPG

SEQ ID NO: 51730 - protein, 625 aa, Glycine max
  Clone ID: 701000102_FLI.pep
EFNMCFLDLVIRLVVYPLSLLYLLTHLQTPLLLTNMAAAIGSMLDTNGLTVQVITGRWFVVFASFLIMAAAGATYMFSLYSGDIKSALAYDQTTLNLLSFFKDLGGNVGVLSGLINEITPPWVVLAIGSILNFFGYFMIWLAVTKKIPKPHVWHMCLYICLGANSQSFANTGSLVTCVKNFPESRGVVLGILKGYVGLSGAIITQLYFAFYYDDSRSLILLIGWLPAAISFLFLRTIRYMKPLRQQPNELSVFYKFLYISLGLAGFLLVMIIVQKQVHFSQSEYGVSAGVVLFLLFLPLAVVFVEQYKIRESQKLAFINPSAVKIVATEGESNTPISRKIDEEIITSTRWWQKVFSPPPRGEDYTILQALFSLDMILLFFAGTCGVGGTLTAIDNLGQIGTSLGYPKASISTFVSLVSIWNYMGRVFSGFVSEHFLKKYKFPRPLMLTLTLLLSCVGHLLIAFDVANGLYVASVIIGFCFGAQWPLVFAIISELFGLKYYSTLYNFGGAASPIGLYVLNVRVTGYLYDKEALKQLAATGISRKIDTELTCVGSSCFKLSFIIITAATFFGALISLILVARTIKFYKGDIYKRYREQAEEEATAVTEMAVVQNRAEKLEETKVIGA

SEQ ID NO: 51731 - protein, 261 aa, Glycine max
  Clone ID: 701000182_FLI.pep
IASALCLVNKIEEAGSNKEKDVDFLSSIEVLIIDHADVISMQNWSHVHTVIEHLNRLPSKQLGTDVMRIRPWYLDDHARFYRQTIILGLYSNPDVNASFNHQCLNYEGKVKLISEYKGVLHKVVPEIRQIYERFNVDSIVEADDARFDYFVKKVFPRIKDLDQGGTMLFTNSYFEFIRIRNFLKSQNASFCLLGEYTTQSDISRARLWFYEGKRKIMVYTERSHFYHRYKIRGVQNLIIYSLPERKEFYPEIVNMLDGSDK

SEQ ID NO: 51732 - protein, 306 aa, Glycine max
  Clone ID: 701003350_FLI.pep
GRRQRRGEDVVHPLKVSLEDLYLGTSKKLSLSRNVICSKCSGKGSKSGASMKCAGCQGTGMKVSIRHLGPSMIQQMQHACNECKGTGETINDRDRCPQCKGEKVVQEKKVLEVIVEKGMQNGQKITFPGEADEAPDTITGDIVFVLQQKEHPKFKRKAEDLFVEHTLSLTEALCGFQFVLTHLDSRQLLIKSNPGEVVKPDSYKAINDEGMPMYQRPFMKGKLYIHFTVEFPDSLNPDQVKALEAVLPPKPSSQLTDMELDECEETTLHDVNMEEETRRKQQQAQEAYDEDDDMPGGAQRVQCAQQ

SEQ ID NO: 51733 - protein, 279 aa, Glycine max
  Clone ID: 701043546_FLI.pep
FIFSLFDQIPFPWSLSLQLIPFSFPQIPNPFSLRSQSNWVMDMASSPRTVEEIFKDYSARRTSVIRALTHDVDEFYGLCDPDKDNLCLYGHPNEAWEVTLPAEEVPPELPEPALGINFARDGMNRRDWLSLVAVHSDSWLVSVAFYLGARLNRNERKRLFSLINDLPSVFEVVTDRKPVKDKPTADSGSKSRGSAKRSSDGQVKSNPKFVDEGYEEDEDEHNETLCGSCGGNYNADEFWICCDICERWFHGKCVKITPAKAESIKQYKCPSCSLRRGRP

SEQ ID NO: 51734 - protein, 258 aa, Glycine max
  Clone ID: 701048573_FLI.pep
KIESADSIPNLHSIITASDGAMVARGDLGAELPIEEVPLLQEEIISICRSMGKAVIVATNMLESMIVHPTPTRAEVSDIAIAVREGSDAIMLSGETAHGKFPLKAVKVMHTVALRTEATIPGGQMPPNIGQVFKNHMSEMFAYHATMMSNTLGTSTVVFTRSGFMAILLSHYRPSGTIFAFTDQKRIQQRLALYQGVCPIYMEFSEDAEETFTRALDLLQKQGMVKSGEEVALVQSGRQPIWRFQSTHNIQVRTVKTK

SEQ ID NO: 51735 - protein, 264 aa, Glycine max
  Clone ID: 701054978_FLI.pep
RYDHHQKGFEEVFGHGFSTKLSSAGLVYKHFGKEIIAKELEVDEEHRDVHHIYLAVYKSFMEAIDAIDNGINQYDTDQPPRYVNNTHLSSRVGRLNLDWTDPDQSPEKENEAFQRAMALAGSEFLDSVRFHVNSWLPARSIVMETLAARHTVDPSGEILVLTKFCPWKLHLFELEGELKNDPAVKYVLYQDERSKHWRVQAVAVSPDSFQSRKALPSQWRGLRDEELSKKSGIPGCVFVHISGFIGGNQNFDGALAMAKAALKM

SEQ ID NO: 51736 - protein, 151 aa, Glycine max
  Clone ID: 701055548_FLI.pep
NSFNKNSHSNDSIGCTCNPWPQISTLFSNGTSDSRTFHFSFGIDNNTSIIFEIHVDAVLSAPWLALANNDSWQNLLPQIGFPLLHGGHHHVANASRGETVQTPFDPFHRYDVEVLRPRIVGAVHRRRHRQTQRHPELVPRRTTASSLRHLA

SEQ ID NO: 51737 - protein, 309 aa, Zea mays
  Clone ID: 700570679_FLI.pep
ALKCKEPRSSDLLSYMHFLYEACPYFKFGYMSANGAIAEAIKGEDRIHIIDFHIAQGAQWVSLLQALAARPGGPPFVRVTGIDDSVSAYARGGGLELVGRRLTHIAGLYKVPFQFDAVAISGSEVEEEHLGVVPGEAVAVNFTLELHHIPDETVSTANHRDRILRLVKGLSPKVLTLVEQESNTNTAPFAQRFAETLDYYTAIFESIDLALPRDDRERINIEQHCLAREIVNLVACEGEERVERHEVFGKWKARLMMAGFSPSPLSALVNATIKTLLQSYSPDYKLAERDGVLYLGWKNRPLIVSSAWH

SEQ ID NO: 51738 - protein, 308 aa, Zea mays
  Clone ID: LIB3354-054-E10_FLI.pep
ISTSSNEIGSWSPQEQDASLSSARVAKEFCFAARDVLLLYRAIVPVQLEKQFDSLSQVAAIVHNDFYHLSQEILGLAFQYRADFPSDLQKQVVFVDLAPIFSQMADAILRRQIQLTVDTISEAIDGAEGFQNTHQPQHYESAKFSIEQVVFILEKIRIMWESILPRSIYRKSMCNVLGSVFSRITRDMLLIDDMAAEETLQLQGLIHLALENLSSLFLSLVENNDGSTKFLDHDAWIQLDGILPSLKKFRKLAELLDMSLKSITSCWESGDLVRCGFTSSEVQNFIKAIFADSPLRKECLGWIVRTPA

SEQ ID NO: 51739 - protein, 452 aa, Zea mays
  Clone ID: LIB3357-021-B1_FLI.pep
HFPSAMGKEKTHINIVVIGHVDSGKSTTTGHLIYKLGGIDKRVIERFEKEAAEMNKRSFKYAWVLDKLKAERERGITIDIALWKFETTKYYCTVIDAPGHRDFIKNMITGTSQADCAVLIIDSTTGGFEAGISKDGQTREHALLAFTLGVKQMICCCNKMDATTPKYSKARYDEIVKEVSSYLKKVGYNPDKIYFVPISGFEGDNMIERSTNLDWYKGPTLLEALDLINEPKRPSDKPLRLPLQDVYKIGGIGTVPVGRVETGVIKPGMVVTFGPTGLTTEVKSVEMHHEALQEALPGDNVGFNVKNVAVKDLKRGYVASNSKDDPAKEAASFTSQVIIMNHPGQIGNGYAPVLDCHTSHIAVKFAELVTKIDRRSGKELEKEPKFLKNGDAGMVKMVPTKPMVVETFSQYPPLGRFAVRDMRQTVAVGVIKSVEKKDPTGAKVTKAAAKKK

SEQ ID NO: 51740 - protein, 514 aa, Zea mays
  Clone ID: LIB3689-244-B4_FLI.pep
RDSVEHMAALASAARSRRRLLPYLYRLLHSASTTAVSPSPSTSRFLRHASPVPRTPDHSPYLRFPAARVSTLPSGLRVVTQAYPVATRIASVGVWVDAGSRFELPGTNGTAHFLEHMAFKGTRRRPNAQVLEVEIEDMGARLNAYTSREQTTFFADVQARHVPAALDVLSDILQHPRFPERAIQRERGVILREMEEVQGMMEEVIFDHLHAAAFQGHPLGDTILGPEENIRSISKKDLEQYISTHYTCPRMVVSAAGSVSHDEVVDQVKELFTEFSTDPTTADQLVQANPAIFTGSEVRVENAEFPLAHIAIAFKGSSWTDPSSIPLMVIQSILGSWNRSIGVGNCSGSSLARGISNANLAESLMAFNTNYRDTGIFGIYTIAPPDTLQDLSRLIMAEFRRLASQVSETEVARARNQLKSSLLLHIDGSTAVTENNGRQMLTYGRVMPFLELFARIDAVDCATVMETAKEYIIDKDIALAAVGQLTELPELSWFRSETCSDDDFTRRILFGNAK

SEQ ID NO: 51741 - protein, 299 aa, Zea mays
  Clone ID: LIB3078-033-B5_FLI.pep
RYGNKRIEPSGEIQFFPSPCVIGQGHVNGKNPVFQPDGVLLPPNEHNTGESTRQARISLDSRTEGAAILCSTSAREDAGANSSSHRKDSMSHPSYGFIPVPIPVGATMPYHYGAILQPVYYPQSPLMHCDSAGINKAAIQHASGQPNYHEAPGKPSHVLIEHKQLEENHQLHHSRQILRESGEPIDMARAHVDRANQTASCSQGICKGSGCTCSGEADINANTMVALESGNESGIQNGDRSRREAALMKFRMKRKDRCFEKKVRYHSRKKLAEQRPRVKGQFVSQKLNSATTTDAEADS

SEQ ID NO: 51742 - protein, 186 aa, Zea mays
  Clone ID: LIB3156-014-A7_FLI.pep
CKPIRASMIASSIQQLLKVEMPERRDNQNRPSFLRSLLVGKNILVVDDNKVNLRVAAAALKKYGANVSCVESGKDAISLLQPPHCFDACFMDVQMPEMDGFEATRQIRQTEMRVNEERKNKLVLIEGSTFVEYHLPVLAMTADVIQATYEKCIKSGMDGYVSKPFDEEQLYQAVSRLVVGTTDSTV

SEQ ID NO: 51743 - protein, 417 aa, Zea mays
  Clone ID: LIB3591-082-H3_FLI.pep
FSSNRAIIIPHTSPLARIRPLTGRYVPPEVAAVRVPLLHLSNFQINDWPELSAKSFAIMVLMLPSDSARKWHVHELELVEVVADQVAVALSHAAILEESMRARDLLMEQNVALDLARREAEMAIRARNDFLAVMNHEMRTPMNAIIALSSLLLETELTPEQRLMVETVLKSSNLLATLINDVLDLSKLEDGSLELEIKAFNLHAVFKEVMGFIKPIASIKRLSVSVMLAPDLPLCAIGDEKRLMQTILNISGNAVKFTKEGHITLVASIVKADSLREFRTPEFHPTASDDHFYLKVQVKDTGCGIGPQDLPHVFTKFAHPQSGGNRGFNGSGLGLAICKRFVSLMGGHIWIDSEGTGRGCTATFVVKLGVCDNTNTYQQQLIPLVWPSSADSDLRAPKPLPDGRGSTPLKSRYQRSV

SEQ ID NO: 51744 - protein, 192 aa, Glycine max
  Clone ID: 700686586_FLI.pep
IFFAAEDNDGSLHSFYVKSVKEMPYYISVLQISAADSEAPTAAPSAIDPISIMSKQGCKAFTDLLRGSKALPSFKENVDGGLTVFCPTHSTVSGFAAKYKNLTEAQKVSLLLYHTTPVYESLHMLKSSNEIMNILAIEGANKYDFTVQSEGEDVNLKTKVNTTVYMTLKLSIIIQCANTYVNIGTTFYISKR

SEQ ID NO: 51745 - protein, 331 aa, Zea mays
  Clone ID: LIB3069-001-A8_FLI.pep
VRLLVHISYSPRRWACRICEVASGSLRPCDFKYSKLLASLQTFRCTYNFEIRLTSVQAEPFKKIILKAISHLTEEVQNARALVDGQLFSEEMNISTEDPHQVDFLVPFKNAVPVEECSLEGVAGLIRFIGSVSALAYLGPKESISEAISDLKADIVTSLKSRLDIILDEADDGPATAEVEKSPSQKATQVIFHELREPYSFSFPRRVLIPWLSGTYVCDYLQQPETAEDAVDRFKEVIGALETAVERSSILEPESAAAACSVLESFWDMVPGSGSGGQGGSSKLKDSHSIQKDDSSKGQGGLNFSIVAALIVLLVALIAGLLFTGSAGYPI

SEQ ID NO: 51746 - protein, 544 aa, Zea mays
  Clone ID: LIB3068-034-C10_FLI.pep
RIEEKLVQQAEVNQELDSIPKRSREHADQELEVERTAQAGLEQECDSVPIDSEEHGCLTSYAHTDDEQDEVKQKVTSETADVLHYAADTFNVNTNSWKEDIEEDPTEAALTAIHQICYEPLTSIVKFSLDHSVSEEDREPDTPTHIEGICDSQELLDSKAVVSDAKSVDSSVATLSTDVESTELVSVDQLKSALASTRKSLNTLYSELENERNAAAIAADETMAMINRLQEQKAAMQMEAIQYQRLMEEQSEYDQEALQRLNELVVKREKEKQDLERELELYRHKVHLYEVKLRKVSRHKVDDQNGSSSTSSSAEDSDDLSQSFYEGDESSHGINGSNGSIPTDVVLQETARHLVTLDGSLADFEEERLSILEQLKVLEDKLFDLDDEESDNMKHFSEENHLSGASNGFSDDDSCFKLHDKRKNVTYRGKKLLPLFDDATVEAGNVPQGNEAQHSTEVTLDLAREQHKLAIANEIDQVHERLHALEADREYIKQCVRTLKKGGKGFDLLQEILQHLRDLRRIEQRASARNSGELSPYYLHHHTD

SEQ ID NO: 51747 - protein, 563 aa, Zea mays
  Clone ID: LIB3069-028-A10_FLI.pep
TIEKELNRRAAETASKQQLEGIRKVAKLQAECRRLQAAAQRRASSVNVELRRSPSSACVESLTDCQSDCSDSWASALVTELDQFKKDKSGASTRTASLVAADIDVMDDFLEMEKLASANGSSKGDAVEDASGQVEKALHEAQRELRTCRRRVMVAEERSAELQRQLNHANGDKHAMEAEAEAAEAKGRELEGKLELARADIAGLLDKGRILEERLESEKALTLELAAKYQDMETLEAEKRELNAQLETSRSEAKKLSDKIALMERKLEVEKALSIRLATKCHGVDALEAKKKGVELELESAREEIASLRNKASSLELQVMEEKASSAGLAMRCQELEELRSQLVSSNSRIVELNEKVKTLEDVIEKQRPVTAELESQLQSRHDEISSLKEDISLLQKKLESQKNLSSAYISALGASETEKKELATRFELGEKEAEELRGKTSLLEEQIHEERARSSEFAVKCRKMEEQFSRRSLLGHQPVKSSAIKDIQIRKETELAKAAGKLADCQKTIASLSSQLKSLADFDEFLPETETSGADSADAWDGDLKLLHPASYPTQIGCLAVT

SEQ ID NO: 51748 - protein, 836 aa, Zea mays
  Clone ID: LIB3069-031-D2_FLI.pep
SSEAVEGSLDAVPEKVVILSSSETVDSSYAVSCILDDTVHDASDISQADGVQHEEHSSISDGSTEKLISEESSLVCYGVPSNKKDLVNIAVQESKAFILKNPASQILEESGPGLDVSTDSVSLSHADSAPDLACQHVSPNVEDTTSYEPGIGPEDVTKNSVVENGACSGELVVSVIQTSAGDGLTKCIAHPAVFSNKIEVEGSPTSAGFSSLISVEVQNTKLEDDTNKSSSVIGDEAGFVPEATAELDEEAEPVISLSEYTEEIQFQFSDAENFADRKATDDMVANKTTGEVEHDESDCDTEKQEEGDVGLVNDLENCSASLKPVSSPVSIPAIDFQSGNSNREAKSLPNLRSHIHDLERSYSFQLSRSLQSTAENNGIDLVKSMNYAFLEQKSEAIGDFSEENNSPPEVTNTVALDGNHADDLKVDAFIPFAELSLCRHLLSEGMGEDAACSAFDSEKVTLEEFRNMKQSLMRNNKLVVRIAGRYFPWDAAAPIVLGMISFSEEQVFEPKGMINVERVEQSAAPGGSWSIWPFSFRRTRTITAIQPVCESIVETSVSTPKELTHFKELDRERNKSRVKRIERKVRSLTPTSDELASLDLREGRNVVTFTFSTAIVGKQQVDCHIYLWRWNTRIVISDVDGTITKSDVLGQFMPLVGVDWSQNGVAHLFSAIKENGYQLLFLSARAISQAHITRQFLFNLKQDGKALPDGPVVISPDGLFPSLYREVIRRAPHEFKISCLEAIKDLFPHDSNPFYAGFGNRDTDELSYLKVGIPMGKIFIINPKGEVAVNRRVDTKSYTSLHALVHGMFPPILSSSEQEDYNAWNYWKMPLPDVDL

SEQ ID NO: 51749 - protein, 80 aa, Zea mays
  Clone ID: LIB3067-032-C3_FLI.pep
HDVQHQQDWRTSGPTQVLNISLRATCTSLEPCSQLMSPARRGKNWRRFFSKAESPSPLIACRVETTRGALAASSLRFDEP

SEQ ID NO: 51750 - protein, 433 aa, Zea mays
  Clone ID: LIB3068-039-D1_FLI.pep
AKKSKLKRAHLTEHNDISPCKNELDDFHDLPDISLPSDKQIKRNRHRSLLLSESDDDPADVGTEKHNIFTVTEVGFFPQPSEVPPMHGQGISDQFHFPVESRETCEIADSFQNPPESNMYGSISQVCDTFMSQDVSCVPESSLILDGTSASISGDEFLSRAVSNGFSAFCEGTYTTSRMVLEDTGCVKNLMAERQKDVEDVVGETSETYMESFRRNEQASCSAAGFQLMDECSRAESIWLLSGKKPNDSCKVELVQDTWNRLRSCRLEFTSEANHNRATSGALKLVSEVSDLISESDLMLFRCYPLTKDTLDPSLTPCDEPVDSSWYSNQVEMGSVYAQHALHILSRNSQKIDGGSVDLSQELFASTDAGFRNDYGSTDISHMKNPTTCIFKRRERHVHLCETLSPVVPPKLLQSLRGPAFVDYLSSISQIPN

SEQ ID NO: 51751 - protein, 469 aa, Zea mays
  Clone ID: LIB3069-008-B3_FLI.pep
QVGKFLCRLPSENEKTRGSQKENRVREGADGNGSASAIALGPHRLLRRAVAGLVAVRVKCSSGQRLGSAGLCRATDNGGLGAAGLCRGTDDSCGLGAAGFCSATDDNGGLGAAGLCRGTDNGSLGAAGLCSATDDNGGLGANGLCRCAAGLCTAASTSFRVGAPGLGRGTNESSLRASGLSRGAGNSSLAANYISLRAPGLGRGTNKSSLAATGLCCGANYISRGATGLCRRTSYRRRRATDHSCFSAAGRHVASGFLPATGSYATCLCYPSSHATSGNATSRRRRRASPGDSGSSRLPARSNATGGACPGHAPSSDGSDTTSRCPRHGSHRATCHGSRTGSRFSGSKSKRRPDPVSDRSSHPVAHRGPDPVSHAGAYTRAVELGVGEPVAGAGARARSGGRVGGAELAHWRRRGPGGRRARRRFVLRSRAAAFITAIRPYRPSHGSLVLLLVFSWIDARTNHSCCTTH

SEQ ID NO: 51752 - protein, 170 aa, Zea mays
  Clone ID: LIB3069-020-G5_FLI.pep
FHLPFLVLSLASLSVSLHSLVMDSSQLTGDNTEECNSNESGWTMYLGSPVNSDDLKANGSKWSNNVGSGCSNGRSKNDNMDYDDGDYDSLASDASTGPAQVKVLNGKEKKIHEKRDNSIEEQDSDEQDEQAKLPNNCDKKAGKMKKEEKTTRRSHNKRRSSCSSRTSFFR

SEQ ID NO: 51753 - protein, 300 aa, Zea mays; identical to SEQ ID NO: 50547
  Clone ID: LIB3069-039-F8_FLI.pep

SEQ ID NO: 51754 - protein, 620 aa, Zea mays
  Clone ID: LIB3069-050-H12_FLI.pep
TLNNGCMASACATSIPLVSAPSACPSKKTTVARFRRRTATCRASSGGGGGRGGENDGLLWLPRRDVMLNGLSSVAAGLAWYPGVASGADAVCTRADKVNEKTVQCTDPAGQLPCPLVSPTDPVDFKPESKVTRIRQPVHLLSREYQEKYKEAVAKMKALPEENPLSFAAQAAIHQAYCDAYYKYDPTAKDAPFDVHFSWIFAPWHRMYIYFYERALGQLIGDDTFALPFWNWDTPAGMVVPPLFKDSMGNPLYDPNRNPSNVDALVDLDYLNDRNAEPIPFKGPRDEKYKELVNKNLCTVYTQQIRSGKGAESFLGEKYCTDIGSSTSSMGSLERMAHTAVHVWVGKAGPTPSSEACSAATGGFPNHTKGGYSCNNDMGFLGSAGHDPLFYSHHSNVDRMWHIWSTRLGGGQGITEADWLDTSFVFYDDVKSPRKVRIRFRDVLDTRDLGYTYDAESDKDLPWLRCKISSLVPHGKDSPPRSSSARKAAAPVFPLALTKGQVVEVPAVPVPAKDPGKEQLLVIEGIEYDPQANNKFDVAINLPADKALQVGPQYKEYAGSFAVVPGSGAGKTRKVKLSLCITEVLFDIDADGDKTVDVVIVPRTNAKITLNARPTIKNRN

SEQ ID NO: 51755 - protein, 318 aa, Zea mays
  Clone ID: LIB3067-037-E9_FLI.pep
STGPPDQSHSTSGSHPKPRTASPPMADRVYPAAKPNPPPGAAGNSNGAQASSFPAPKSQMYQRPIYRPQAPAKRQRGRSCRCSLCCCFCWALVVVILLAFVGAVCGGVFYLLYRPQRPSFSVSSVRLASLNLTSSATAPVLSDAITLTVTARNPNKKMVYLYDDLTLLVATAANAVPLGSATVPGFAHAAGNTTVLTATVSASAVGVDPSGASSDIKRSGGGSFSVVVDADTSAGVRVGGLKTKKIGIQVHCEGIKLTAPPPPPPAPKRAKGKNSTAALAPALAPSAADATPAKTATVSTAAHSCKVRVRVKIWKWTF

SEQ ID NO: 51756 - protein, 141 aa, Zea mays
  Clone ID: LIB3068-048-H6_FLI.pep
AITPGEPIGVDDVNRMKYKDNIYASTPQVETSDIWIQQAREMPPMQVPSYYNIPGQATPGAFVPNPANASFNATAQSSHVQFPGLYHPQQPPSIVSPHPMVHQQVPSAIGPNVGVGVAAPGPQVGAYQQPQLGHMNWRPSF

SEQ ID NO: 51757 - protein, 219 aa, Zea mays
  Clone ID: LIB3069-056-G4_FLI.pep
HSAGEYVALVGARLDGAEMLACGLATHFVPSNRMLLLEESLKKVDTSNSFVVCSIIDQFCQQPSLKQKSSLNRLEIINKCFSNRTVEEIISSLEEVASNSASKWVAQTIQYLKKASPTSLKITLRSIREGRTQTVGECLQREYRMVCHVVRGDFSRDIFEGCRAILVDKDKNPKWMPPRLEQVHDDAVEEYFSRVDDPEWEDLDLPVMCSNGRIMESKL

SEQ ID NO: 51758 - protein, 281 aa, Glycine max
  Clone ID: 700869544_FLI.pep
VTHMGGAPTVLNMIINSSPKVQKPLPGKVQVMTGGAPPPPDVIFRMEELGFNVTHSYGLTETFGPASICTWKPEWDNLPQDAQAKLKARQGVAHVGMEGLDVKDPHTMKSVPADAKTMGEVMFRGNTVMNGYLKDLKATQEAFKGGWFWTGDLGVKHPDGYIELKDRSKDIIISGGENISTIELEGVIFSHPAVFEAAVVGRPDDYWGETPCAFVKLKEGCSATSEEIIQFCQNRLPRFMAPRTVVFTDLPKTSTGKTQKFVLREKAKAMGSLTKKNTSRL

SEQ ID NO: 51759 - protein, 126 aa, Glycine max
  Clone ID: 700872956_FLI.pep
RKIMKLFPDSDLHEAIFSGTAPKHAIAIETISHFPSVGHSNETSHPFIETVLDHKIHGFLKLQAFVFHHRCHLTRQRATYDGLAFTRARYAAHVARVGPGAYQRRITDAPGHFVHQPSRGCCCRAP

SEQ ID NO: 51760 - protein, 298 aa, Glycine max
  Clone ID: 700894885_FLI.pep
TMEIREGRGVGPLKDHIYLHLNHLPPDVLKERLPGISETAAIFAGVDVTKEPIPVLPTVHYNMGGIPTNHHGEVITIKGDDPDAVVPGLMAAGETACASVHGANRLGANSLLDIVVFGRACANRVSEIQRPGEKQKPLEKDAGMKTIAWLDKLRNSNGSLPTSKIRLNMQRIMQNNAAVFRTQETLEEGCQLIDKAWESFHDVKLKDRSLIWNSDLIETIELENLLINACITMHSAEARKESRGAHAREDFTKRDDEKWMKHTLGYWDNEKVRLDYRPVHMNTLDDEVESFPPKARVY

SEQ ID NO: 51761 - protein, 531 aa, Glycine max
  Clone ID: 700787122_FLI.pep
LELKADLLVLLSDVEGLYSGPPSDPHSKLIHTYIKEKHQNEITFGDKSRVGRGGMTAKVKAAVHAADAGIPVVITSGFAAENIINVLQGQRIGTLFHKDAHEWVQVKEVDAREMAVAARECSRRLQAISSEERNQILHKIADALEANEKIIRTENEADIAVAQEAGYEKSLVARLAIKPGKIASLANNMRIIANMEDPIGQVLKRTELSDGLILEKTSSPLGVLLIVFESRPDALVQIASLAIRSGNGLLLKGGKEARRSNAILHKVITEAIPDTVGGKLIGLVTSREEIPELLKLDDVIDLVIPRGSNKLVSQIKSSTKIPVLGHADGVCHVYVDKSANVEMARRIVLDAKIDYPAACNAMETLLVHKDLIEKGWLNDIVVDLRTEGVKLYGGPRASSLLNIPQAQTFHHEYSSLACTVEIVDDVYAAIDHINLYGSAHTDSIVAEDKEVANVFLRQVDSAAVFHNASTRFSDGARFGLGAEVGISTSRIHARGPVGVEGLLTTRWILKGSGQVVDGDKGIVYTHKDIAT

SEQ ID NO: 51762 - protein, 457 aa, Glycine max
  Clone ID: 700788392_FLI.pep
KNNMNFLTFVTVLLFILPATSSSQYLGNNLLTHRKIFLKKDNIITSYAVIFDGGSTGTRVHVFHFDQNLDLLPIGDSLELNKKITPGLSAYEDDPEQAAESLIPLLEEAESVVPEDLRPNTPVRLGATAGLRLLKGNASEQILQAVRDMLSNRSTLNLQSDAVTILDGNQEAAYMWVALNYLLGNLGKVISKTVGVADLGGGSVQMAYAVSKNTAKNAPQPPEGEESYIKTLVLNGKTYDLYVHSYLHFGKEASRAEMLKVTGDSANPCILAGYNGTYTYSGVKYKALASTSGSNFDKCREVALKALKVNEPCPHQNCTFGGIWNGGGGSGQKVLYVTTSFYYLVIQAGIADASKTSSKVYPAEFKAAAKRACQVKFEDAQSTYPLMMEDALPYICMDITYQYTLLVDGFGLDPWKEIIVANEIEYQGALVEGAWPLGSAIEAISSLPKFNKLMYFI

SEQ ID NO: 51763 - protein, 359 aa, Glycine max
  Clone ID: 700791918_FLI.pep
LAHNNLTGQILQCLATFPSLLALDLQMNNLYGNIPWNFSKGNALETIKLNGNQLDGPLPWSLAHCTNLEVLDLADNNIKDTFPHWLESLQELQVLSLRSNKFHGVITCFGAKHPFLRLRIFDVSNNNFSGSLPASYIKNFRGMMSVNDNQTGSKYMGNQYFYNDSVVVVMKGQYMELERILTIFTTIDLSNNMFEGELLKVLGELHSLKGLNLSHNAITGTIPRSFGNLRNLEWLDLSWNQLKGEIPVSLINLNFLAVLNLSQNQFEGIIPTGGQFNTFGNDSYAGNPMLCGFPLSKSCNKDEDWSPHSTFHLEESGFGWKAVAVGYACGFLFGMLLGYNAFMTGKPQWLARLVEGVLN

SEQ ID NO: 51764 - protein, 169 aa, Glycine max
  Clone ID: 700875152_FLI.pep
KQLEVVELSENALTGTVESWFFLLPSLQQVDLANNTFTGVQISRPLEAREGSSNSNLVALNLGFNRIRGYAPANLGAYPALSFLSIRYNALRGAIPLEYGQIKSMKRLFLDGNFFVGKPPAGLMEAGTAVSGSLGDNCLHACPGSSQLCSPAQKPSSVCKQAYRGRPTP

SEQ ID NO: 51765 - protein, 573 aa, Glycine max
  Clone ID: 700896089_FLI.pep
RVEGDEDEDDSDDIENEFNYAQGKAKARRQWEDDADLSSSSRRESQQPIPLLTNGQTMSGEIPCATPDTQSVRTTSGPLGPSEKVHSLPYVDPRQPVPVRIVDPSKDLNSYGLGNVDWKERVEGWKLKQEKNMVQMTGRYTEGKGGDVEGTGSNGEELQMVDDARQPMSRVVPIPSSQLTPYRVVIILRLIILGFFLQYRVTHPVKDAYPLWLTSVICEIWFALSWLLDQFPKWSPINRETYLERLALRYDREGEPSQLDPVDVFVSTVDPLKEPPLVTANTVLSILSVDYPVDKVSCYVSDDGSAMLTFEALSETAEFAKKWVPFCKKHNIEPRAPEFYFAQKIDYLKDKIQPSFVKERRAMKREYEEFKVRINALVAKAQKMPEEGWTMQDGTAWPGNNPRDHPGMIQVFLGHSGGLDTDGNELPRLVYVSREKRPGFQHHKKAGAMNALIRVSAVLTNGAYLLNVDCDHYFNNSKALKEAMCFMMDPVIGKKTCYVQFPQRFDGIDLHDRYANRNIVFFDINMKGQDGVQGPVYVGTGCCFNRQALYGYDPVLTEEDLEPNIIVKSCWGS

SEQ ID NO: 51766 - protein, 527 aa, Glycine max
  Clone ID: 700873228_FLI.pep
YNDLQQLIHTISFPSCWTTTMAAKSSSSSTTNVVTLKAAWVLPQRTQNIREVYEVGRKLGQGQFGTTFECTRRASGGKFACKSIPKRKLLCKEDYEDVWREIQIMHHLSEHAHVVRIEGTYEDSSAVHLVMELCEGGELFDRIVQKGHYSERQAARLIKTIVEVVEACHSLGVMHRDLKPENFLFDTVDEDAKLKATDFGLSVFYKPGESFCDVVGSPYYVAPEVLRKHYGPESDVWSAGVILYILLSGVPPFWAESEPGIFRQILLGKLDFQSEPWPSISDSAKDLIRKMLDQNPKTRLTAHEVLRHPWIVDDNIAPDKPLDSAVLSRLKQFSAMNKLKKMALRVIAERLSEEEIGGLKELFKMIDTDNSGTITFDELKDGLKRVGSELMESEIKDLMDAADIDKSGTIDYGEFIAATVHLNKLEREENLVSAFSYFDKDGSGYITLDEIQQACKDFGLDDVHIDDMIKEIDQDNDGQIDYGEFAAMMRKGNGGIGRRTMRKTLNLRDALGLVDNGSNQVIEGYFK

SEQ ID NO: 51767 - protein, 233 aa, Glycine max
  Clone ID: 700876545_FLI.pep
ALDMGIIQKADYERINKVMVPACEMAIKLCGTDGKIACTASYFVCNTIFNSIMSHAGDINYYDIRKKCEGSLCYDFSNLEKYLNQKSVRDALGVGDIDFVSCSSTVYQAMLVDWMRNLEVGIPALLEDGINMLVYAGEFDLICNWLGNSKWVHAMEWSGQQEFVVSSEVPFTVDDSEAGLLKKYGPLSFLKVHDAGHMVPMDQPKASLEMLKRWTQGTLSESAADAEKLVAEL

SEQ ID NO: 51768 - protein, 163 aa, Glycine max
  Clone ID: 700873794_FLI.pep
AVLCRGKEPMALSVDHKPNRDDEYARIEAAGGKVIQWNGHRVFGVLAMSRSIGDRYLKPWIIPDPEVTFLPRAKDDECLILASDGLWDVMTNEEVCDIARRRILLWHKKNGLALPSERGEGIDPAAQAAAEYLSNRALQKGSKDNITVIVVDLKAQRKFKSKT

SEQ ID NO: 51769 - protein, 73 aa, Glycine max
  Clone ID: 700873993_FLI.pep
FANCRYPHLCHLVEFQAEALDRLTSDDPGGKVFQVYMLCIKMKECTSEGKKKLDLFYSIILMGNKIKLIRTQT

SEQ ID NO: 51770 - protein, 287 aa, Glycine max
  Clone ID: 700874629_FLI.pep
KMGQALGCYQVDQSNVAIKEHFGKFDDVLEPGCHCLPWCLGYQIAGSLSLRVQQLDVRCETKTKDNVFVTVVASVQYRAVSEKASDAFYRLTNTREQIQSYVFDVIRASVPKLELDSVFEQKNDIAKAVEEELEKAMSTYGFEIVQTLIVDIEPDVNVKRAMNEINAAARLRLAANEKAEAEKILQIKKAEGEAESKYLSGLGIARQRQAIVDGLRDSVLAFSENVPGTTAKDVMDMVLVTQYFDTMKEIGASSKSSSVFIPHGPGAVKDIAMQIRDGLLQATTSQN

SEQ ID NO: 51771 - protein, 232 aa, Glycine max
  Clone ID: 700831537_FLI.pep
AGQISVPIVFRGPNGAAAGVGAQHSQCYASLYGSCPGLKVLSPYSSEDARGLLKAAIRDPDPVVFLENELLYGESFPVSAEVLDSSFCLPIGKAKIEREGKDVTITAYSKMVGYALKAAETLAKEGISAEVINLRSIRPLDRSTINASVRKTNRLVTVEEGFPQHGVGAEICTSVIEESFGYLDAPVERIAGADVPMPYAANLERMAVPQVEDIVRAAKRACYRSVPLAASA

SEQ ID NO: 51772 - protein, 239 aa, Glycine max
  Clone ID: 700874658_FLI.pep
KLEPERKVQLAKELGLQPRQVAIWFQNRRARFKTKQLEKDYGVLKASYDRLKGDYESLVQENDKLKAEVNSLESKLILRDKEKEENSDDKSSPDDAVNSSPHNNKEPIMDLLISKNATTSENGTEVSTLPLPIMVTCKQEDANSAKSDVLDSDSPHCTDYGNHPSSFVEPADSSHAFEPEDHSEDFSQDEEDNLSENFLTLPSSCCLPKVEEPCYDDPPENSCNFGFHVEDQTFCFWPY

SEQ ID NO: 51773 - protein, 326 aa, Zea mays
  Clone ID: 700085383_FLI.pep
RKEAENCDCLQGFQVCHSLGGGTGSGMGTLLISKIREEYPDRMMLTFSVFPSPKVSDTVVEPYNATLSVHQLVENADECMVLDNEALYDICFRTLKLTTPSFGDLNHLISATMSGVTCCLRFPGQLNSDLRKLAVNLIPFPRLHFFMVGFAPLTSRGSQQYRALTVPELTQQMWDAKNMMCAADPRHGRYLTASAMFRGKMSTKEVDEQMINVQNKNSSYFVEWIPNNVKSSVCDIPPRGLSMASTFIGNSTSIQEMFRRVSEQFTAMFRRKAFLHWYTGEGMDEMEFTEAESNMNDLVSEYQQYQDATADEEEYEDEEEVQADDM

SEQ ID NO: 51774 - protein, 488 aa, Zea mays
  Clone ID: 700219831_FLI.pep
KLLLHTHTHTHILRIFSQPSLWKQGGQHRVASQQGRETSTSMASKPGPLSRWPWQDLGNYKYALVAPWAVRSTYRFVRSGSGERDLLAFAVLPVLLLRLLYSQLWITVSRHQTARSRHRIVNKSLDFEQVDRERNWDDQILLTALLFYAVNAAVPVAQSVPWWDSRGLLVAALLHVGPVEFLYYWLHRALHHHYLYARYHSHHHASIVTEPITSVIHPFAEELVYFTLFAIPLLTMVGTGTASVAVANGYLAYIDFMNYLGHCNFELVPRLLFDVFPPLKYLMYTPSFHSLHHTQFRSNYSLFMPLYDHLYGTADKSSDDLYERALQGRAGEDAPDVVHLTHLTTPASLLRLRLGFASLAAAPAPPASRYGAGSSSSSSSSLAAVACPLAALLGWTRTAFRSEANRLHKLKLETWVVPRYTSQYLSKQGLYAVGRVVEKAVADAEASGARVLTLGLLNQANELNKNGELYVIRKPSMRTKIVDGTSLA

SEQ ID NO: 51775 - protein, 179 aa, Zea mays
  Clone ID: 701183379_FLI.pep
LATLDETQHSATSLFPLITLHTKRLQRQYSGRSVGGARAGRLGPYSVLLLEPSDLVLLLDIRLLGHLGGLVVEHDEIAVGNVEAGEVVDGVLGVVYVLVDDVGGAARVLGVAQPDLPNRAVLAEDVVHLLARDVERQIPHVQHPVHFGWEARVPLPQARRCHRRRAEFARVWGFWGMLC

SEQ ID NO: 51776 - protein, 109 aa, Zea mays
  Clone ID: 700930120_FLI.pep
PIIIIVSVAAMQCHGTLRHHKERHRYRRTLPRMKEAYLLLVFHALKREPRHVEGVGKLLHLDLEVLDVLVVHQALVEVLEELAVLLLDVQADGHCLVEELPNLLEILLQ

SEQ ID NO: 51777 - protein, 140 aa, Zea mays
  Clone ID: 701164210_FLI.pep
LARNGGPSRASAPATTPHHRPRRRRTLAPGRRGACRGSGSGGGRPPPPARSAGRCWRTAPPCPRSGTPEARTWCRWARRSISTASSSCRPASPTSHARSVPEGASLAAYQAAQSALHHSADRSPCGDGGRTQSRDSSCLS

SEQ ID NO: 51778 - protein, 242 aa, Zea mays
  Clone ID: 701165759_FLI.pep
GAFESMGAGLAMAPGDIAFKSNFATLDENTGVIISRRADRHFEEEGPILCAALDGMKLRSFPEYEVRVRYATEHRCGVVVKGPKLSGNISGTDPLKDNRLHLKAEPLDGSEEAKNTAAVVNELSMEITRILVSHPINAKRAAEGKNIANVVLLRGCGIRIEVPAFETKHGLAPCMVAPTKIIAGLGLSLGIDILEAPGATGDYRTLLTSKAKAIAKALSAPMDTPPRVFVPGEDGYKAGKEN

SEQ ID NO: 51779 - protein, 179 aa, Zea mays
  Clone ID: 701165827_FLI.pep
HVKKLGAPDKKGLPAPRTRRLLFLFLPSTPVVPSSAGHRKSNASSLPPSLPVPSSAPAAAASNGGFLESRGAGGGRSGLASCRCRWRAGVPGRGLGRAAAGAASGHVQAVRRVRGRRRQGRQEPLLLLRRGAGGRRRQAAHAVAEWRSVATARLLLSSPLLSLSKAIFFCWSSYALVFT

SEQ ID NO: 51780 - protein, 622 aa, Glycine max
  Clone ID: 701120991_FLI.pep
SSLFGFTVITDTKGEEYFTYKWNSPEKVRFQITWDGFEKKFVLDADGKQWNRTQFEPFDDCEKYNFCGSFAVCDTGNSPFCSCMEGFEPMHWEEWNNRNWTRGCGRRTPLKAEAERSANNSSSGADREVSVGEDGFLEQRCTKFPDFARLENFVGDADCQRYCLQNTSCTAYSYTIGIGCMIWYGELVDVQHSQNNLGSLLHIRLADADLGDGGKKTKIWIILAVVVGLICIGIVVLLVWRFKRKPKVSSASGFNNNSEIPAFDLTRSTDLSEISGELGLEGNQLSGAELPLFHFSCILAATNNFSDENKLGQGGFGPVYKGKIPGGEEVAVKRLSRKSSQGLEEFKNEMVLIAKLQHRNLVRLLGCCIQGEEKILVYEYLPNKSLDCFLFDPVKQTQLDWAKRFEIIEGIARGLLYLHRDSRLRIIHRDLKASNILLDESMNPKISDFGLARIFGGNQNEANTNRVVGTYGYMSPEYAMEGLFSIKSDVYSFGVLLLEIMSGRKNTSFRDTDDSSLIGYAWHLWSEQRVMELVDPSLGDSIPKTKALRFIQIGMLCVQDSASRRPNMSSVLLMLGSESTALPLPKQPLLTTSMRILDDGESYSEGLDVSNDLTVSMVTTGR

SEQ ID NO: 51781 - protein, 440 aa, Glycine max; identical to SEQ ID NO: 45590
  Clone ID: 700853383_FLI.pep

SEQ ID NO: 51782 - protein, 129 aa, Glycine max
  Clone ID: 701146604_FLI.pep
GRFSLTMGQKHLVTVLCLWALTCSLLPSFSFGILRIGLKKRPLDIDSINAARKAREGLRSGRSMMGAHDQYIGKSKGEDLVPLKNYMDAQYFGEIGIGTPPQPFTVVFDTGSSNLWVPSSKCYFTVSST

SEQ ID NO: 51783 - protein, 184 aa, Glycine max
  Clone ID: 700991692_FLI.pep
LVSSYKSEPVSKTKFHKLKIHLLVLQNMVPTPQLKYVLLLFYCTFAFNLLSTPACALNIGAETTGVAVSVSKECSRQCESSFCSVPPLLRYGKYCGLLYSGCPGERPCDGLDACCMKHDQCVSAKNNDYLSQECSQTFINCMNNFKNSRAPTFKGNTCDADDVIEVIHVVMEAALLAGRVLHKP

SEQ ID NO: 51784 - protein, 158 aa, Zea mays
  Clone ID: LIB3150-027-D7_FLI.pep
AGAREHHLRPAGPYTGVADGRVVFWDGERWVPFAMAFPCWTQELHGGPKASPLEYLPASISATARSGSVSIRLGTCTSPTPTSACSKSAARPGWPRCSQRRPRACASTSPTTSTSTSTTRATSTSLTLAFTTKDVCDAMPSLSSLCFARLVGCSLDSY

SEQ ID NO: 51785 - protein, 357 aa, Zea mays
  Clone ID: LIB3179-001-D1_FLI.pep
PKYHKHPQSHPESGGSQANLRPPSMGEQSLSQPKAQPLSPFPSPPASAALPPPASASASASAASTSRTTSAAASRPKKKVTNPSPDRNPAKKPRLTFSIPGRPLSAVGEVGVAIRYLRAADPALAAVIDAHEPPVFQCPHRPFHSLVRSILYQQLAFKAAASVYSRFLALLGGESCVAPDAVLALTPHQLRQIGVSPRKASYLHDLARKYASGILSDAAIVNMDDRSLAAMLTMVKGIGSWSVHMFMIFSLARPDVLPSADLGVRKGVQMLYALEDVPRPSQMDKLCERWRPYRSVGAWYMWRLIESKVPQPAPAIPVGSLAFPSPDGQSMLQQQEQQQQQTVIQMIDPLQMLPGMG

SEQ ID NO: 51786 - protein, 315 aa, Zea mays
  Clone ID: LIB3150-034-D9_FLI.pep
GIGLDRTSNFFFMEKVDMIIARAWRRFLEKTRLQKLFSRKKNSKPKIDSKKNDDLASEIEDKELYVERIRLETMDLSFGNLFGKVTIQEPTFEEVIVLYRRKSPKGQDDRAIHVKHFKNIPMADMELVLPEKKNPSLTPMDWVQFIVSVVIGLVTLISSLEMPKADFWVVIAILSALAGYCAKIYFSFQQNMATYQNLITQSMYDKQLDSGKGTLLHLCDDVIQQEVKEVIIAYYILMENGKATSDDLDLQCEELIQEEFGLQCNFEVMDAVQKLERLGVITRDSIGRICCVPLKRANEIIGATTEELVMKARQS

SEQ ID NO: 51787 - protein, 101 aa, Zea mays
  Clone ID: LIB3159-017-D1_FLI.pep
TRGHAIFGISGGLEWGCRLHQVLLHRRSMRHMVPVAGDHGMICFKSCSKLKQPSFRIHGCPQDSDFCNPVQFTIMLLAWHLGAAVTVEATTYFALSLPDAA

SEQ ID NO: 51788 - protein, 413 aa, Glycine max
  Clone ID: 701138309_FLI.pep
LLVLLVLYVTVEQSKLLHHVEADGGFVKTRGVQLMLNGSPYYANGFNAYWLMYLASDPSQRNKISSVFQQASNHGLNIARTWAFSDGGYQPLQYSPGSYNDQMFQGLDFAIAEARKYGIKMVLSLVNNYENMGGKKQYVEWARSQGQSINSEDDFFTNPVVKGYYKNHIKAVLTRRNSITGVAYKDDPTIMAWELMNEIRCPSDQSGRTVQAWITEMASYLKSIDGNHLLEAGLEGFYGQSKPESNPNFNVGTDFIANNQIPGIDFATVHSYPDQWISSSGYEDQISFLGRWLNEHIQDAQNTLHKPLLFAEFGISTKSYGGNSTPRDRLFNTVYSAIYSSASSGGAAVGGLFWQLMAQGMDSYRDGYEVVLDESPSTANLIAQESQKLNRIRKMYARLRNIEKWNEAKQIRG

SEQ ID NO: 51789 - protein, 290 aa, Glycine max
  Clone ID: 701015315_FLI.pep
LLVSFSASVWCFQQVDWMGFALSFGSLPVLVSSYDFATPNKEIQWLGSVFTGIIFCVVVYRLTAILSSLLFKGYGKLSSAEKIEWNNRGFSTFHALFASFTSFYLLVLSDIFNKDSHEELVINRSSTFSNSVLGISIGYFLADLAMILWHFPALGGLEYVLHHGLSMFSIIQSLLCGQGQIYILMVLFSESTTPFVNLRWHLDIADLKSSKLYVWNGIALFFGWLIARIFLFMFFFIHMWTHFDEVKEIYPLGFYSLLVVPPVLAMMNLFWFWKIAKGLVKTISKAKHSI

SEQ ID NO: 51790 - protein, 464 aa, Zea mays
  Clone ID: 700052459_FLI.pep
SGRPRAAAATPPPVMASTVVLRNACSRRLFCYSTLRAAAILGPAAPPDAPAAASAQPPPMAGTLWARSMATFTRTKPHVNVGTIGHVDHGKTTLTAAITKVLAEAGKAKAVAFDEIDKAPEERARGITIATAHVEYETAKRHYAHVDCPGHADYVKNMITGAAQMDGGILVVSAPDGPMPQTKEHILLARQVGVPSLVCFLNKVDAVDDPELLELVEMELRELLSFYKFPGDEIPIIRGSALSALQGNNDEIGKNAILKLMDAVDEYIPDPVRQLDKAFLMPIEDVFSIQGRGTVVTGRVEQGTIKTGEDVEILGLTQSGPLKTTVTGVEMFKKILDHGEAGDNVGLLLRGLKRGDVERGQVVCKPGSLKTYKKFEAEIYVLTKDEGGRHTAFVTNYTPQFYFRTADVTGKVELLGETKMVLPGDNVTANFELISPVPLETGQRFAMREGGRTVGAGVVSKVIS

SEQ ID NO: 51791 - protein, 460 aa, Zea mays
  Clone ID: 700072444_FLI.pep
HKRSAGPDELDSDEKAYRCASHEMHIFGPIGNGASSVVERAIFIPVHRILALKKINIFEKEKRQQILNEMRTLCEACCYPGLVEFQGAFYMPDSGQISIALEYMDGGSLADVIRVKKSIPEPVLSHMLQKVLLGLRYLHEVRHLVHRDIKPANLLVNLKGEAKITDFGVSAGLDNTMAMCATFVGTVTYMSPERIRNENYSYAADIWSLGLTILECATGKFPYDVNEGPANLMLQILDDPSPTPPVDTCSLEFCSFINDCLQKDADARPTCEQLLSHPFIKRYAGTEVDLAAYVKSVVDPTERLKQIAEMLAIHYYLLFNGPDGIWHHMKTFYMEQSTFSFSENVYVGQNEIFDILSNIRKKLKGDRPREKIVHVVEKLHCRANGETGVAIRVSGSFIVGNQFLVCGEGIKAEGMPSLDELSIDIPSKRVGQFREQFIMQPGNLMSCYYISKQDLYIIQS

SEQ ID NO: 51792 - protein, 278 aa, Zea mays
  Clone ID: 700149792_FLI.pep
KNKIDYCRLHGIEIVHNLAHLDNELAGYWAKLPLLRRLMLSHPEVEWIWWMDSDALFTDMSFELPLSRYDGHNLIIHGYQDLLFEKHSWIALNTGSFLFRNCQWSLDLLDAWAPMGPKGFIRDQAGKVLTANLKGRPAFEADDQSALIYLLLSQKDKWMDKVFIENSYYLHGFWAGLVDKYEEMMENHHPGLGDERWPFVTHFVGCKPCGSYGDYPVERCLRSMERAFNFADNQVLRLYGFSHKGLESPKIKRFRDQTTRPINDVENLDMKAKISTIS

SEQ ID NO: 51793 - protein, 505 aa, Zea mays
  Clone ID: 700150045_FLI.pep
KLTPSPFPTTPVSVERRLGEAMASGIGSGQQQPPAPAADADPGAVGDKLVFEAPPQPVREDYVQNAVKFLSHPKVRGSPVVYRRSFLEKKGLSTEEIDEAFRRVPDPQPSTTATTSPQQQVNSQNQSVGVQAYAPAQPVHPANAGPVVLPTQPRFSWYQAFLAAGLLLGFGASAAVFIKKLFLPRLKSWIRNVVAEGNGTEGNQLKPRIDDETADAVKASASAVSAIAKTNQQLLASKDEEKKILVTLTQALDSQAKELKSLTDSIGHTREPINITRDDRFSQYRPLEDHAPTVIRNGAINSSWRASQQTNMYGVSNGDFGSVRSSFAPAPVEPTAGSFSRSYGEQPMSTAQRSDRSSGSKPWEMQQYSQQRPGYGSNSQLSEEGSYSDAQDSYAPSYHQNGKAPDFQADEPRPLTYNTGVEERPPPQRRWVPPQPPGVAMPEAAAAIRQPKALPKQPSSDASEAAGEMQVNGSSASDAVTEVPVNGATASDAGRSEIQEQSVAA

SEQ ID NO: 51794 - protein, 104 aa, Zea mays
  Clone ID: 700153220_FLI.pep
AKEIDLYSTNQDCVKMLVGNKVDKESDSPLTKKEGIEFAREYGCLFLECSAKTKVNVEQCFEELVLKILDTPSLLADASSAGVSKKNIFKQKAPEADAATGSCC

SEQ ID NO: 51795 - protein, 279 aa, Zea mays
  Clone ID: 700153421_FLI.pep
SRLRRLGGLRRRRRRCRCSTVLSPLPISSRRRAPPAFCINHRVYIHLHLVDPPLLKTHSMASATGGSSSEMAVDHATGLGTVEKPRFDALMPSEMSGGRTQFRKVTVPQHRFAPLKRCWMEIYTPVYEHMKIDIRMNLKARRVELKTRQDTPDVSNLQKCADFVHAFMLGFDIADAVALLRLDDLYVDSFEIKDVKTLRGEHLSRAIGRLSGKGGKTKYAIENSTRTRIVIADTKIHILGSFVNIKVARDSLCSLILGSPAGKVYSKLRAVSARLAERY

SEQ ID NO: 51796 - protein, 429 aa, Zea mays
  Clone ID: 700153483_FLI.pep
QIPACTRHPEFRTPLLFSGSRAPLRLLLAGKKSSQPLRDRGRGEGKGESSSVHGSFPPSPLRPRLPSPAPPTPPPSRRRTMSTSPAASAAASPPPPIASAAEASRATETLVVDERVASHVDPFLVEALDNPRHRLMVLRMELDIRNFMQNPQLQEFEFQNFPTSYLRCAAHRVAQHYGLETIVADSLVEGSVSRIVARKTPESRCPAISLAEVPSKQARNDHEAAEKLKFVIYQRPKAFQNGSTDLGNKNGAPKTVEERIEEYNKARARIFNGSVSADSDAASVLGTLCTGRDESVNVEPSVDEIKVSTMNNRSRVAVFKDTQKDRSDPDYDRNYKRYVRSPVPDFNLSPGAFNFVPQFMQYGVGYVQSPGMSTNQPAVYFGQPDLTMGSSGAAVYPHWPTPAMMYPHCYDNVGSMISQVPLYQSFNHG

SEQ ID NO: 51797 - protein, 249 aa, Zea mays
  Clone ID: 700097371_FLI.pep
PARISQCKERLGVLVHGPDNGRDLLHLTLVGARGEQHLGGAGVWVAPGVHHLLEDPQALPVLLLPGVRADAGRPRHHVGGEAPRRQGAERRLHPVQIPRAPVRVHQHVVRAGVRGAGARAVAALHGREEPLHVVQPPGPAVRVEHGVEGEGVRAQPGLVQLRHHLLAPRHVAGPGVRRQEQHVRLHRRPHALLLQLLERCFRLVKPSSSESIHQYVVRGSIRLAPHVFHQREDLRRPLRQPCAAVSFHQ

SEQ ID NO: 51798 - protein, 302 aa, Zea mays
  Clone ID: 700106266_FLI.pep
RGVGRGNGLQPLRRLELLFSSNCCKFWLFFIIYKYCFLYFLADKLSCVIDNDISLNFKKKKKNGRVGGFEGFGHHYSRASSGKLDWAESMILITQPVKDRNMEMWPTNPPTFRDALDVYSVEMIGLAMRLLGFMAADLGVEPEALQDAFTGKRQSMAVHHYPPCRQREKVMGITPHTDGLGLTLLLHVDDTPGLQIRRGGRWFPVRPLPGAFVVNVADILDVLTNGAYTSVEHRVLPDAERARTTVVVFQEASVGGLVAPLPGLLDQQGARARYRSIEIEEYIKGNFNALEQGTRFIQSLRI

SEQ ID NO: 51799 - protein, 263 aa, Zea mays
  Clone ID: 700089549_FLI.pep
AYIITLESGGMSYSKKIAYCISKIPILRNEMKQTGPKRKVLYYIILDLYSGQIMREGVCDGRSVEDEATDDERGEGEGGGDGERDAAGEDAELELDGVDHGEQQEEGAHGGAPGGEQHHGLREPEHGAAPLPRPGGAPCRHLLAVVGRRGLLVGVAVEVVGGQERDGELHPLRHEAGQQVEAEGEDLEEEEVARDVVPRDAGGRHGRGRRDGARDPDEHRHREEGVGRHDSLQRLHVQFRVAPPQRRHRCRRCLRVVSFPGCA

SEQ ID NO: 51800 - protein, 342 aa, Zea mays
  Clone ID: 700163925_FLI.pep
SMDKTVRLWHMSSTYCLKTFSHTDYVTCIQFNPVDDRYFISGSLDEKVRIWSIPKREIVDWVDLHEMVTAACYTPDGKGALVGSHKGSCHLYDTSDDMLCYKTQIDLQNKRRKSSQKKITGFQFVPGDSSMVIITSADSRIRVLDGFELAHRFKGFRNTSSQISACLAGNGRYIISASEDSHVYIWRNNDGPKPSRKKGIVSVTDSHEYFHCQSVTVAVTWPFASTAMTCLMNPGKQEELERGSEPQDLQTKLAKAQEMPDVEYRSTNITSNNSNHNNGDRTSPTWPEKLNTPPNQSLRATTCHANEGDQALNRSAWGLVIVTAGRGGQIRTFQNFGFPVRV

SEQ ID NO: 51801 - protein, 186 aa, Zea mays
  Clone ID: 700050756_FLI.pep
SVRRRPFLLRSFAAAMVKYSQEPGNPTKSAKAMGRDLRVHFKNTRETAFALRKLPLTKAKRYLEDVIAHKQAIPFRRYCGGVGRTAQAKSRHSNGQGRWPVKSARFILDLLKNAESNADVKGLDVDNLYVSHIQVNQAQKQRRRTYRAHGRINPYMSSPCHIELILSEKEEPVKKEADNIVAARKQ

SEQ ID NO: 51802 - protein, 162 aa, Zea mays
  Clone ID: 700050896_FLI.pep
GGDKLVTVEDIVRQHWATYGRHYYTRYDYENVDAGAAKELMANLVSVQSSLSDVNKLVKEIRSDVSEVVAADEFEYKDPVDGSVSKHQGIRYLFGDGSRLVFRLSGTGSVGATIRVYIEQYERDSSKTGRDSQDALAPLVDVALKLSKMQEYTGRSAPTVIT

SEQ ID NO: 51803 - protein, 167 aa, Zea mays
  Clone ID: 700043939_FLI.pep
GLPLLCRRHRPFLRRTRTSPRRGQKEVLHRARLSPQGHRHRRRGNGCQRPACRRCHGPGGAAGRRRRRARLRAQPVHRQGRRHHHIQEQRRLPAQRRLRRRRGAERRRRHQDLAGGVPQRARRDLLRHPHRAGNLRLLLRAASRSRNGRQDHRQLIKLAIDRYPFMY

SEQ ID NO: 51804 - protein, 281 aa, Zea mays
  Clone ID: 700044864_FLI.pep
LRRAVERWNGERSVRFCINFGDIVDGFCPKDRSLAAVQAVVREFDGFRGGPTYHMLGNHCLYNLPRSELVSVLRMPSASPGRAYYDFSPWPGYRFVVLDAYDFSAVGWPRGHPVSAAARRFLEKRNPNHDKNSPSGLEGTDRRFVMFNGGVGEAQLRWLDGVLRRAERRGEKAVVCSHLPMHPGAASPTGLMWNYEEVMDVVRRHGGCVVACLAGHVHKGGYAVDDSGVHHRTLEAALECPPGTDAFGHVEVHPDRLRLVGSDRMASTEMLLSPSNELASA

SEQ ID NO: 51805 - protein, 461 aa, Zea mays
  Clone ID: 700074583_FLI.pep
QGTDCSSGTVPSQGNEGSSLLEPGNGDGICTGVTCGSPSVISCAESCPQEGGHGSTALLHHTLCGQSEDPEDHGASVDGIQSPKQCNTRNIESAPGSQETSAAGGDRSFSFEVGAPPNVAEKAHSPVWSPFPKYITSQSSKMATENTQAGGSLKDTSDDSKKISTVESGKEQLSERKVTESSGGGLSDNCNIDDIIKGRSSPPRQHPIPECSDLVNFPFTDPQHLQLRAQIFVYGALIQGTPPGEAYMVAAFGEPVGGGKPTWEAAWRAAFERFQYKKSPHISLETPTSSLIGSSVPEKASKGTAITTVPASKKVGKTVAPAHPAVTLHSPTSDFPFGSSTFNLQRGTHLDFSQAVSPFAYNSHMRHPSPGVAPWYTQSPGPRPAAWLIPPQNLIFDSSMQPVIPTNETAKGASSKNISVSHTVSSGVLPSLAPSIVSSPIAVVSDGKQKAASSSKRGTTS

SEQ ID NO: 51806 - protein, 384 aa, Zea mays
  Clone ID: 700074601_FLI.pep
IIGAVVGGVAAVLIVLSIVAYFLFQKYRRERTLRIPKTAGGTLIAFRYSDLQHVTNNFSERLGGGAFGSVFKGKLPDSTAIAVKRLDGVHQGEKQFRAEVSTIGTVQHVNLVRLLGFCSEGSRRLLVYEFMPKGSLDLQLFLGETTALSWATRYQIALGTARGLNYLHEKCRDCIIHCDVKPENILLDESFVPKVADFGLAKLLGRDFSRVLTTMRGTRGYLAPEWISGVAITAKADVFSYGMMLFELISGRRNSDHGEQHGSTFFPTFAASKLHEGDVRTLLDPKLNGDANADELTRACKVACWCIQDDESARPTTGQIVQILEGFLDVNMPPVPRSLRVLGESPDVINFFSDISSNQTSQTQNSTTSQTRSTTSGSSHLQSP

SEQ ID NO: 51807 - protein, 414 aa, Zea mays
  Clone ID: 700151231_FLI.pep
IFLRILAFKTNVPRNANMAKLQAGYLFPEIARRRAAHLLKFPDAKIISLGIGDTTEPIPNVITNAMAERAHTLSTIDGYSGYGAEQGEKKLRAAIAATYYADLGIEDSDIFVSDGAKCDISRLQVLFGSNVTIAVQDPSYPAYVDSSVIMGQTDLYQQDVQKYGNIEYMRCGPENGFFPDLSTVPRTDIIFFCSPNNPTGAAASRDQLTKLVKFAKDNGSIIVYDSAYAMYISDDSPKSIFEIPGAKEVAIETASFSKYAGFTGVRLGWTVVPKELLFSDGHPVAKDFNRIVCTCFNGASNIAQAGGLACLSPDGLKAMQDVVGFYKENTEIIVETFTSLGFNVYGAKNAPYVWVHFPGRNSWDVFAEILEKANVVTTPGTGFGPGGEGFVRVSAFGHRENIIEAARRLKQLYK

SEQ ID NO: 51808 - protein, 381 aa, Zea mays
  Clone ID: 700099002_FLI.pep
QPHPLAHFYSPSAAARRKEASAYSLSAMATAAASSLLKSSFAGSRLPAATRTTPASLVVATGPRGAGAGPICASMSMSSSNPPYDLTSFRFSPIKESIVSREMTRRYMTDMITYADTDVVIVGAGSAGLSCAYELSKDPAVSIAIVEQSVSPGGGAWLGGQLFSAMVVRKPAHLFLDELGVAYDEAEDYVVIKHAALFTSTVMSLLLARPNVKLFNAVAVEDLIVRGGRVGGVVTNWALVSMNHDTQSCMDPNVMEAKVVVSSCGHDGPFGATGVKRLQDIGMISAVPGMKALDMNTAEDEIVRLTREVVPGMIVTGMEVAEIDGAPRMGPTFGAMMISGQKAAHLALKALGRPNAVDGTMSPPLREELMIAYKDDEVVDA

SEQ ID NO: 51809 - protein, 284 aa, Zea mays
  Clone ID: 700083238_FLI.pep
PTCRFVFIFLIYFYLFQCNLVRILNEETWSGRLKSFSGTIWSALLYIFEHSYVSSVGSLTLLTASYSFVPSKLSRRRRAIIGGLHVLAHLTAALLLMLLLELGIEICIRNHLLATSGYHTLYEWYRSMESEHFPDPTGLRARLEQWTLGLYPACIKYLMAAFDVPEVMAVTRINICKNGMMSLSRSVLIMYYTSVFIYFWIFSTPVVSLIFGSYLYICVNWFHIHFDEAFSSLRIANYKSFTRFHVKKDGDLEIFTLAVDKVTDQPSFRCSHLLITLPPLLCCE

SEQ ID NO: 51810 - protein, 494 aa, Zea mays
  Clone ID: 700085987_FLI.pep
KKFIENHYRSQMKTIQERKERRFKLERQLASSQVPKEQQIDLIKDLERKETEYMRLKRHKICVDDFELLTIIGRGAFGEVRLCREKTSGNIYAMKKLKKSDMVVRGQVEHVRAERNLLAEVASHCIVKLYYSFQDTEYLYLIMEYLPGGDIMTLLMREDTLTEHVARFYIAETILAIQSIHKHNYIHRDIKPDNLLLDKNGHMKLSDFGLCKPIDCSKLSTLNEDEPMGDDNMRESMDIDSSLSNTANGRRWRSQHEQLQHWQMNRRKLAFSTVGTPDYIAPEVLLKKGYGMECDWWSLGAIMYEMLVGYPPFYADDPITTCRKIVHWRNHLKFPEDAKLSNEARDLICRLLCDVDHRIGSAGADQIKAHPWFQGVAWDKLYEMEAAFKPQVNDELDTQNFMKFEELENPPAKTGSGPSRKMMLNSKDLSFVGYTYKNFDAVKAIKISDLQRNSSLTRPSIGSIFGPSGMDSPMEPNGRDTHMHTVSSGDPMIP

SEQ ID NO: 51811 - protein, 455 aa, Zea mays
  Clone ID: 700072994_FLI.pep
ASPISSPPTDLNREPLPPPEKRRSLRRTAMAPEPEDDIMNEKNPRPLDEDDIALLKTYGLGPYSTSIKKVEKEIKEMAKKINDLCGIKESDTGLAPPSQWDLVSDKQMMQEEQPLQVARCTKIISPNTDDAKYVINVKQIAKFVVGLGDKVSPTDIEEGMRVGVDRNKYQIQIPLPPKIDPSVTMMTVEEKPDVTYNDVGGCKEQIEKMREVVELPMLHPEKFVKLGIDPPKGVLCYGPPGTGKTLLARAVANRTDACFIRVIGSELVQKYVGEGARMVRELFQMARSKKACIVFFDEVDAIGGARFDDGVGGDNEVQRTMLEIVNQLDGFDARGNIKVLMATNRPDTLDPALLRPGRLDRKVEFGLPDLEGRTQIFKIHTRTMNCERDIRFELLARLCPNSTGADIRSVCTEAGMYAIRARRKTVTEKDFLDAVNKVIKGYQKFSATPKYMVYN

SEQ ID NO: 51812 - protein, 233 aa, Zea mays
  Clone ID: 700073466_FLI.pep
QPSRSAASKLSPPGPSPTATAPNDMAEPAEHRPAEEEEAAAAGEDEDTGAQVAPIVKLEEVAVTTGEEDEDALLDMKAKLYRFDKEGNQWKERGTGTVKLLKHKDTAKVRLVMRQAKTLKICANHLVVATTKMQEHAGSDKSCVWHALDFADGELKEEMFAIRFGSVENCKKFKDTVEEIAEQQGKSEEKENDEVSTAASDLAQKLTVAEPSKEENAEKEEAPASDDKKDAKE

SEQ ID NO: 51813 - protein, 219 aa, Zea mays
  Clone ID: 700150330_FLI.pep
PAMKYVVRQYVYSCDICSRAKSDRSQYPRLLQLLQVPSHAWQVLSLDFIEGLPKSGKFDCIVIVVDKFSKFAHFIVLAHPFTAYKIAQVFLDSIYRLHGMHSAIISDRDRIFTSAFWQGLFKLSGTELRMSTSYHSQTDGQMARQRGVNQCLETFLRCFVSSQPSQWSKWLPLAEYWYNSSFNSSLGKSPFEVLYGYHPHHLGISTVDAIPLSDLQSWL

SEQ ID NO: 51814 - protein, 260 aa, Zea mays
  Clone ID: 700154272_FLI.pep
IGLTLLGWWYEPGTQTPDDVAAAARMNDFHIGWFMHPMVFGDYPPVMRRNVGSRLPTFTDEEAARVRGSFDFVGFNHYIVVYVKADLGRLDDQVRDYMGDAAVKYDMPFLKSRNQFPFGALTSDFMTSTPWALKKMLRHLRVTYKNPAVMIHENGAAGQPDPSGVNSYDDEFRSQFLQDYIEATLQSIRNGSNVQGYFVWSFLDVFEYLFGYRLRFGVYGVEFNSTARTRYQRHSAKWYASFLRGGELRPVALPDGAYSQ

SEQ ID NO: 51815 - protein, 153 aa, Zea mays
  Clone ID: 700154547_FLI.pep
EPERSRSQTHRQRIARFRPSDPRRSTAMAMAYKMATEGMDVKEECQRWFMEMKWKKVHRFVVYRIDDCRYAVFDFDFVSVDNCQKSKIFFIAWYVRTYVRIPEPLAFSFPSNGLAVQSVQHPNVTKAGKLLLAAIIPAAFIKVAGYFIRSDLA

SEQ ID NO: 51816 - protein, 253 aa, Zea mays
  Clone ID: 700154676_FLI.pep
GKKNSTENKSIDSVHIRNQNKTFEHHGFVLHLDTIFFGLAPSSWFPGVCMQAPSEDLIVAGEEELPVEQLIPRVRHAGEAPVRAVGVAPGVGALLGRRFHPLLLVGLRVRVPAVLGQPRDIDQPDGHPRRGQHLLRRAQHLLARAATVGRGGADRRRLVVAVAAALRVVVAPRPSVRVRRRSGDEEHPRLAGVHVALQPPDHLVQHQPVGLLRLHLHDVLARVVVGAPQDLDFVPGDPPEVGVEDEDVGALPA

SEQ ID NO: 51817 - protein, 319 aa, Zea mays
  Clone ID: 700097958_FLI.pep
AMEGPVLCRPAMQAKSPAAALVNNSLTRFGQLGTISKYRNVSRFISPISQPSTKNIGPCCSFSSSSDGNGYMAGNFSDSDEDYVNSTVLEAVEVRSGSEGYVIKMRDGKNLRCVHNNSQGRNIPESAPQPAIVLRIEDGSETLLPIIVLEMPSVLLMAAIRNVHIARPTIYQVVKEMIDKMGYEVKLVRVNKRIQEAYCAELCLTKIDDSTDSITFDLRPSDAINIAVRCKVPVQVHRSLAYSDGIRPVEPARMAVAAGLSDGLLFTELDRPDGQASVEAQEFGLVKNMLIAAVEERYKDAASWKDKLMRLRSKRKNWA

SEQ ID NO: 51818 - protein, 535 aa, Zea mays
  Clone ID: 700098043_FLI.pep
SNMMASTASATAAAAVAFGAAAKPRGPAAALRARVPAGGRRRSGMVVRCDAGVEAQAQAVAKAASIAALEQFKISADRYMKERSSVAVIGLSVHTAPVEMREKLAVAEELWPRAIQELTSLNHIEEAAVLSTCNRMEIYVVALSWNRGIREVVDWMSKKSGIPASELKEHLFMLRDSDATRHLFEVSAGLDSLVLGEGQILAQVKQVVRSGQNSGGLGKNIDRMFKDAITAGKRVRSETNISSGAVSVSSAAVELALMKLPKSEALSARMLLIGAGKMGKLVIKHLIAKGCKKVVVVNRSVERVDAIREEMKGIEIVYRPLSEMYEAAAEADVLFTSTASETPLFTKEHAEALPTISDAMGGARLFVDISVPRNVSACVSEIDSTRVYNVDDLKEVVEANKEDRLRKAMEAQTIIAEELKRFEAWRDSLETVPTIKKLRSYADRIRASELEKCLQKIGDDALTKKTRRAIEELSTGIVNKLLHGPLQHLRCDGGNSRTLDETLDNMHALNRMFGLDTEKAIVEQKIKAKVEKIQN

SEQ ID NO: 51819 - protein, 241 aa, Zea mays
  Clone ID: 700098096_FLI.pep
ISLDPCSFGQANTLSFNSLLHKLNKYVPRSSTVVDLYSGAGVIGLSVAASRKCRSVKCIEINKQSKMSFETSASRLPANLGCTITWHNTDASVEPSHWLEGSSVVIVDPPRKGLHPSVISALQKVALSERKAYKAKSSLAKVKDEKRPWILRAREAAVHVDNTTTEEGNETWPETLIYISCGWESFKRDCKSLISSKAWQLENAHAFNFFPGTDSIEILAIFKRESEAGQKKKKKAKKKAK

SEQ ID NO: 51820 - protein, 309 aa, Zea mays
  Clone ID: 700100890_FLI.pep
EIRLLAKTGKQNRAFIAELGAIPLLCKLLLSSDWMAQENTVTALLNLSIYEPNKARIMEQADCLHLIVSVLKNGRTTEAKENAAATLFSLSVVHDYKKKIMNEPGAVEELASMLTKGTPRGKKDAVMALFNLSTHPESSGRMLESSAVLALIESLRNDTVSEEAAGALALLMKQPTIVHLVGSSETVITSLVGLMRRGTPKCKENAVSALYEICRRGGSTLAQRVARIPGLNTVIQNVTLTGTKRAKKKASLIVKMCQRSQVMPSALAPLGSTLTVVDHSLVGNGTLRRAASFGSEELSNPVSISVPVP

SEQ ID NO: 51821 - protein, 653 aa, Zea mays
  Clone ID: 700100934_FLI.pep
SWEKPVELMTPLERADASTEWKEFTTPEGRKYYFNKVTKQSKWTIPDELKVARELAENTSNQQPDRESGIATSALVRSAAFEPSTAPANQSSSAVGIIASSAHDGSSNSVLSGPPLPHNVENTSSSIVGMQNGGSSTAVVPVAASTEVPLVATDAGSSRNNDENSSLTTGADAEDGTSAEDLVEAKKTMPVAGKINVTPVEEKTSEEEPVVYATKMEAKNAFKSLLESVNVESDWTWDQTMRVIINDKRYGALKTLGERKQAFNEYLNQRKKFEAEEKRIKQRKARDDFLAMLEESKELTSSTRWSKAILMFEDDERFKAVERPREREDLFENYLVELHKKEKAKAAEEHKRYVAEYRAFLESCDFIKASTQWRKVQERLEDDERYSRLEKFDRLDIFQEYIRHLEKEEEEQKRVQKDQVRRQERKNRDGFRKMLEEHVADGTLNARTRWRDYCAQIKDSQSYLAVASNTSGSTPKELFDDVIEELGKQYQEDKIQIKEVVKSGKIPMTTSWTLEEFQTATLEDDALKGISTINIKLVYDDQLERLKEKEQKDAKKRQRLGENFSDLLYSIKEISASSTWDDSKQLFEDSQEFRALDSETYARELFEECVVHLKERLKEKERLREEEKAKREKEREEKEKKKEKEKERKEKER

SEQ ID NO: 51822 - protein, 259 aa, Zea mays
  Clone ID: 700100959_FLI.pep
HRARSFEDVSGNPLVKDAYDAAHETERKRALSALLSQTKQQERKDAETLAEAKRIMESRAASKNVDVAVMPPNSDNAMVPVDGVSPSSSTHPSLAHPNTSANILIPNSLRTLRVYLRTHALDQMVQAVGASAGLRVIKRVDQTLQELAVNLKPKVPTKAVCIEHIELRNELLTLLNLQKQLQNKEAEVSANRESSFTEAPSTPKRSNRDIDRPFIPDTSGFTGERAGKRDHKRKSTGRFIDAPPSPPQSKRPRKLKGSD

SEQ ID NO: 51823 - protein, 348 aa, Zea mays
  Clone ID: 700102740_FLI.pep
FVVLQDATNHFDEQMVIGVGGFGKVYKAVMQDGSKLAVKRGNQKSHQGLREFRTEIELLSGLRHRHLVSLVGYCDEHNEMILVYEYMEKGTLKSHLYGGDMPPLSWKKRLEICVGAARGLHYLHTGFAQSIIHRDVKSANILLDENLLAKVSDFGLSKVGPEFDQTHVSTAVKGSFGYLDPEYFRRQKLTDKSDVYSFGVVLLEVICARPVIDPTLPRDMINLAEWAIKWQKRGELDQIVDQRIAGTVRPEALRKFGETVEKCLAEYGVERPTMGDVLWNLEFVLQLQEAGPDMSNINSMNQISELPSNPKRVSSLDISSTDQSRVPIDYSDMSTSNAFSQLINAEGR

SEQ ID NO: 51824 - protein, 364 aa, Zea mays
  Clone ID: 700106668_FLI.pep
KHRPPVISAMEERAKGLGVWTDTNGLASKLYNFKRDPEPLVSLSDSTDQLSDVGDGDTNQESDLGNMDDEYGGVIVNSEIDSLPDPKDQVAWLKLELCRLIEERRSAVLRADELETALMEMVKQDNRRQLSAKVEQFEQEISELRQALSDKQEQEQAMFQVLMRVEQELKIAEEARISAEQDAAAQRYAANVLQEKYEEAMASLAQMENRAVMAETMLEATLQYQSSQQKAMSPCPSPRPSMLDASPSQSSQNSSQEFQPRRKNLLGPFSLSWRDKNKEKPNNADDSTNTKSTNNDEMVETSNTNDEKHRETLDLNSEQRAESPKADVKMRAETPEKDNDLPGVQLVTDDLNGHHEQMQEIKLD

SEQ ID NO: 51825 - protein, 471 aa, Zea mays
  Clone ID: 700085587_FLI.pep
FEYLPRGSPSEACLMRIFVATVEAILRRTFPSETSEQSRKPRSQSKNLAVAELHTMIHSLFVESCASMDLASRLLFVVLTVCVSHQALPGGSKRPTGSDNHSHEEATEHSRLTNGRSRCKKRQGPVATFDSYVLAAVCALSCELQLFPFITKNGSHSNLKDSMKIIISGKNNGMNNELHNSISSAILHTRRILGILEAVFSLKPSSVGTSWSYSSNEIVAAAMVAAHVSELFRRSRPCLNALSALMRCKWDAEISTRASSLYHLIDLHGKTVSSIVNKAEPLEAHLTLTPVKRDNQHHREESNTSSLDSVKLENKNGSTSHKKNGFSRPLLKCAEEVLLNGDVASTSGKSIASLQVEASDLANFLTMDRNGGYRGSQTLLRSVLSEKQELCFSVVSLLWQKLIASPEMQMSAESTSAHHDGGRLLMHFVMSFQPHQPRHQLLSFSRPRRTCSLGLLEMTNKVRRCGESTSV

SEQ ID NO: 51826 - protein, 142 aa, Zea mays
  Clone ID: 700165093_FLI.pep
LARAGHLEEAWDFIEEMPGKVDAVMLGALLAACRKCKNTEVGERVINRIMKLEPSNSWNYVVSSKIYATSDKMDESARMIGLMRERGVNKTPGCSWVEVNGKVLEFYASTEPQHGAEDMYQLMGVLVNEMRLKGYVPNLDLV

SEQ ID NO: 51827 - protein, 226 aa, Zea mays
  Clone ID: 700047887_FLI.pep
STRSCAAEHTLLDSGFGCCSTRNGSPAGTGTRSCKASPWIGPSLWCTSHCPPVATRIQWCGSTAPRACSSSWRRRRRSTSAPTSPSACAGGGSARSSSPGPWSCTRGTPGWVRRRWWPRSRATCPTASGTPCAGARRPGGRAAAWSGSPTTWRSGTCWPRSWSAGRPRAGGSNLRNAAPRSVRRCVLIGDPSADRRGSVAVPSRARGAVRGYQGLYVQREMDRKMI

SEQ ID NO: 51828 - protein, 342 aa, Zea mays
  Clone ID: 700052427_FLI.pep
GAGTRPVQLPPAPHPPRRRMIAAGAASMGRAATPAPGAQSSRLPRAVSRLRLVLRSSEAAARSGSKRWIGCFRPSPSPATAAAGAAVVKEAKGKRPEVEVEPARGGGEDVWSADAETEVAQGGAFPEHLVIMVNGLVGSADDWKFAAEQFVRRMPDKVIVHRSQCNSATQTFDGVDLMGERLANEVLSVVEQRRGVKKISFVAHSLGGLVARYAIGRLYEPNSRRKSSGGESRDDVVHLNGHIAGLEPMNFITFASPHLGSSGNKQLPFLCGLPFLERRASEAAHLIVGRTGKHLFLTDNDDGRRPLLLRMVDDSDDLQFRSALRSFKRRVAYANANFDRIL

SEQ ID NO: 51829 - protein, 183 aa, Zea mays
  Clone ID: 700045156_FLI.pep
ARNTELRCVCAIIRNYRQSGENEEKELYIAGAPHHQGDSGSASEGVGTGDDLEDLPGDLGLALSVVGDGEVLAELDGVVGGAAHGAHPGGELAGERLLQGTEDLAVEVEREQRVQDLHGVLLELHHGGEGLRLDLHLLALHGELPLLGGEAEELVLGGVHADAVDVADLALGRHGEQRLDDGV

SEQ ID NO: 51830 - protein, 358 aa, Zea mays
  Clone ID: 700097321_FLI.pep
RSEERAAMAAAAVATVASPSLTSRRLFPSAGPSLLRLPRSTARLRRALRFAAAGDEADVLPGPGAEGEAVVPGRLEEQRDEQLGGSQLDIGGLAFQGDVGGGFTGGGAGSGASGGGGGNKMLDRGINTAIVLGASTYALTKLLTVDQDYWHGWTIFEILRYMPEHNWSAYEEALKANPVLAKMMISGVVYSLGDWIAQCYEGKPIFDFDRARMFRSGLVGFTLHGSLSHYYYHICEALFPFKDWWVVPAKVAFDQTIWSAIWNSIYFVVLGFLRLESPTTIYNELKSTFWPMLTAGWKLWPFAHLVTYGVVPVEQRLLWVDCVELVWVTILSTYSNEKSEARNSDSTSTPAASKDNST

SEQ ID NO: 51831 - protein, 299 aa, Zea mays
  Clone ID: 700097352_FLI.pep
CTNVLVELEAGEHVVVDGVGEVVEQVLERANAGDEPLDEVTEDGEHGEPAVLDLLELELIHLLLGLAEAERVEEGPAGVGRVAGAGEELLEAEEVLLAHGARVVPVLEAAVLGEAHERHVEDEERVGVGPVVVGARGRDDARLEPRQRGLRRDDAHLAEDLRGDGAHRAQHGVAAVDHLAVGQPLGLDEAPGALRVREAQRVEAIVAGQRAIEVGEGLLGREPQLPVGTLLGWRAGAGPDDEGRLPRRRPRDGRLHGAAQQLPAGEESLGRHRSGTGASSNLSFRQRAYVRALAIVSLP

SEQ ID NO: 51832 - protein, 462 aa, Zea mays
  Clone ID: 700099547_FLI.pep
QKGLFVDRGVGSSMLPKSASACSLASGFSFGSAKTMPEAAGAVAAAAVADRLHGSKEDRKLAIVLVGLPARGKTFTAVKLTRYLRWLGHETRHFNVGKYRRLKLGANQSADFFRDDNPEGIEARNEVAALAMEDMIDWMNGGGQVGIFDATNSTRKRRYMLMKMAEGNCKIIFLETICNDPNIIERNIRLKIQQSPDYAEQLDYEAGLEDFKERLINYEKVYEPVGEGSYIKMIDMVKGQDGQLQVNNISGYLPGRIVFFLVNSHLTPRPILLTRHGESLHNVRGRVGGDTVLSETGELYAKKLANFIEKRLKCEKTATIWTSTLQRTILTASPIVGFPKIQWRALDEINSGVCDGMTYEEIKKIMPEEFESRKKDKLRYRYPRGESYLDVIQRLEPVIIELERQRAPVVVISHQAVLRALYAYFADRPLREVPEIEMPLHTIIEIQMGVTGVEEKRYKLMD

SEQ ID NO: 51833 - protein, 297 aa, Zea mays
  Clone ID: 700099576_FLI.pep
CTNVLVELEAGEHVVVDGVGEVVEQVLERANAGDEPLDEVTEDGEHGEPAVLDLLELELIHLLLGLAEAERVEEGPAGVGRVAGAGEELLEAEEVLLAHGARVVPVLEAAVLGEAHERHVEDEERVGVGPVVVGARGRDDARLEPRQRGLRRDDAHLAEDLRGDGAHRAQHGVAAVDHLAVGQPLGLDEAPGALRVREAQRVEAIVAGQRAIEVGEGLLGREPQLPVGTLLGWRAGAGPDDEGRLPRRRPRDGRLHGAAQQLPAGEESLGRHRSGTGASSNLSFRQRAYVRALAIVS

SEQ ID NO: 51834 - protein, 199 aa, Zea mays
  Clone ID: 700101881_FLI.pep
AESQLAAVTTRIMQALQNNLDGKSKQYKDPALTHLFLMNNIHYMVRSVRRSEAKDILGDDWIQRHRRIVQQNANQYKRVAWAKILQTLSVQGAGSGGDLTSSSVSRATIKERFKSFNTQFEELHAKQSQWIVPDQELRESLRLAVAEVLLPAYRSFIKRFGNLVDNNKNPQKYVRYSPEAVDQLLGQFFEGQQWAEQKR

SEQ ID NO: 51835 - protein, 151 aa, Zea mays
  Clone ID: 700083750_FLI.pep
EMITDEEKSVFRRIGLRLKAYLPLGVRGVFDGVIENMHLHWKHREVVKLISKQKTLSFVEETARLLAYESGGILVAIERVPKGYALIFYRGKNYRRPINIRPRNLLTKAKALKRAVAMQRHEALSQHIDQLESNIKQMKLDLVCNFSLGYF

SEQ ID NO: 51836 - protein, 270 aa, Zea mays
  Clone ID: 700083867_FLI.pep
NKNRNRTKIKRVTTRVRPRDNDQRNKRVDVRVGELLRKLVLPDGTVLRVQLPGRPTRDCLFSDPARDGASLLKIWNLNKCGGVVGVFNCQGAGWCRVTKRTRVHDASPGTLTGTVRADDVDAIARVAGDGGGWDGETVVYAHRTRELVRLPRGVALPVTLGPLQYEVFHVCPLRAVVPGFSFAPVGLLDMFNAGGAVEECDVISNVGGKAMALRVRGCGRFGAYCSREPARCLLDSAEVEFSYDADTGLVSVDLPVPEQELYRWTLEIMV

SEQ ID NO: 51837 - protein, 150 aa, Zea mays
  Clone ID: 700087455_FLI.pep
TILYKLKLGEIVTTIPTIGFNVETVEYKNISFTVWDVGGQDKIRPLWRHYFQNTQGLIFVVDSNDRDRVVEARDELHRMLNEDELRDAVLLVFANKQDLPNAMNAAEITDKLGLHSLRQRHWYIQSTCATTGEGLYEGLDWLSSNIATKS

SEQ ID NO: 51838 - protein, 476 aa, Zea mays
  Clone ID: 700087622_FLI.pep
SYPARVVSGFLSNAASAVVKRLWSLKSTTKIASGGKSMVKYEGGYTVETVFDGSKLGIEPYSVEVTQGGELLVMDSMNSNIYRMALPLSRYSRPKLVAGSPEGFPGHVDGKLREARMNHPKGFTVDDRGNIYVADAMNMAIRKISDTGVTTIAGGKSGRGGHVDGPSDEAKFSTDFEVRYIGSSCSLLVIDRGNQAIREIQLHFDDCVYQYEAGFPLGVALLLAAAFFGYMLALLQRRVLGMYSNGDEQDHESPVKAKLASIPPPYQKPLKPYVHPLLIPNDDEPVKQEEEEGLFTSIGKLVGGAKSSIAEIIGAAFSRKKRVNVHHHQLGRPTSWPAQESYAIPRDETPPPLDTRAPTPRKNYAFMSKEPEKIHHIRHGRPQLHGWTGEAQQPPQPQQVRHQQYVQHHRQYSAGPQTFYEPNCDATKEIVFGAVQEGDTSRRPVEIKAVNHGDAAPYEQNGLRFRSSYSVRYNGN

SEQ ID NO: 51839 - protein, 265 aa, Zea mays
  Clone ID: 700202902_FLI.pep
GAEQRAGVPVGQLPLHRRGQRGLRRGHRQHPSRHAEPQRGAGQRRPGRQHQGVHGGAERRHPGLPAVAGHLLAGLHGAHRAVPAEHRRPAAVQRLPLLLLHRQPGPDRPQLRALHLAGHRRAGRQQRVPEPLRRARRHLRLRARERRRWQRPRRRVRERLAVRRGRRRHRGQRADLQPEPHQPRRPGHAQAPWPHRDLHLRHVQRGPEDGSRVGEALRPLQPGQIAGVPHQFLLIPKQDGEVHSKTFIRQYTHIDIYIHIHTGEN

SEQ ID NO: 51840 - protein, 480 aa, Zea mays
  Clone ID: 700241323_FLI.pep
MATPRLAAIFFSLLCCRAASSLRPPNLISNSSDGVITHLPGFQGPLPFHLQTGYVEVDEDNGVHLFYYFVRSEREDSPGDDPVVLWLTGGPGCSVLTGLAYEIGPLSFDLNGYVGGLPKLVYKQDSWTKVSNVIFLDSPVGAGFSYSHTEEGYKSSDTRAVNQILVFLKKWFDKYPQFFSSLLYIAGDSYSGMIVPTVTSEIARGKEEGSQPNLNLKGYLVGNPVTDFNFDGPSRIPFAHGMGLISDEIYEAYEKSCSVGDSRRQSIECINSLGAIDECIKGISPNHVLEPLCAFASPKPKLISSGAREMLQLPVPVHTEEEEEELRLSEISLQCRTAGYMMSSMWANDASVRQALGIHKGTVPSWSRCNYDIPYTNDIPSAVKYHLDVTTKGYRSLVYNGDHDMVVPFIGTQAWIRSLNFSTVDEWRPWFVDGQVAGFTRSYSNNLTFATVKGGGHTAPEYMPRQCFAMFVRWVSGDPL

SEQ ID NO: 51841 - protein, 224 aa, Zea mays
  Clone ID: 700219580_FLI.pep
EGQTTVVVGPSGVGKSSLINALRCNQDISEEDPIHKLVEQNSKWFGEQRVGTVSKKSGKGKHTTRHVSLLPIASGGFLADTPGFNQPSLMKVTKKSLAETFPEIRKALKENEPKKCLFNDCVHLGEHGCAVKGDWERYPYYLQMLEIKIREEIQLRTFGTKREGDVRYKTGVMGVKQAEPRLELKKHRRVSRKKINQSILDEIEDDVDDLDDDYQFDVKQRSRK

SEQ ID NO: 51842 - protein, 180 aa, Zea mays
  Clone ID: 700219760_FLI.pep
DFLQSCAAPLLSASTLPTSTTQPRAPPRRSPLPLRRLPRVLLPRERGARGAAHHLLRRLQQPAGAGDPAAAAAPRVGRVRLPDGQGTGVGRRPQGVGPRRRRHVPGALLLPGPRHAAGQEAVDVARRRHGDIRQRQGRGGGVDAQWLRHPCAGQVYQVTATGQQQLLVDRHFNVTVRYAE

SEQ ID NO: 51843 - protein, 553 aa, Zea mays
  Clone ID: 700219868_FLI.pep
ANKHSAAVADTGEVFTWGCNKEGQLGYGTSNSASNCIPRMVEYLKGKVLRGVSAAKYHTIVLGADGEVFTWGHRLVTPRRVVVARCLKKGGNINLKFHRMERLQVISVAAGTTHSTALTADGALFYWVSSDPDLKCQQIFSMCGRNIVNISAGKYWTAVATSTGDVFMWDAKKRKDETPIFTRVHGVKRATFVCVGETHMLVLSSIYHPEYPPKPKSQGLKSMLEWNGGTEELGEDILFDDVQPNSGLSGSSGEMSKGVPSLKSLCEKVAVEYLLEPKNAIQLLEIADSLEAKELKKHCEDLAIRNLDYIFTVGAPSIMNASSEILVNLEKLLDEKSSEPWSQRRLPTMTATYPAVIDSDVEEDEAREFPKTRKCGKSASRPSAMSSDDSFLQKDCTAEQAVSKQVRALRKKLQQIEILEAKQLAGHQLDSQQVAKLESRAALEGELAELGIPSEIYSTSSACPAEGRTNRKPEVSKKQKRKNKQSTQTPSVKNELGQQIPITELQVLQVNASAEKEAYAADPIKPMEAAAFSNTKDTASPPEKKPSQPTPSK

SEQ ID NO: 51844 - protein, 218 aa, Zea mays
  Clone ID: 700220033_FLI.pep
PNQGTVDYPSFKLVIVGDGGTGKTTFVKRHLTGEFEKKYEPTIGVEVHPLDFTTNCGKIRFYCWDTAGQEKFGGLRDGYYIHGQCAIIMFDVTSRLTYKNVPTWHRDLCRVCENIPIVLCGNKVDVKNRQVKAKQVTFHRKKNLQYYEISAKSNYNFEKPFLYLARKLAGDPNLHFVEAVALKPPEVTIDMAMQQQHEAELAAAAAQPLPDDDDDLIE

SEQ ID NO: 51845 - protein, 114 aa, Zea mays
  Clone ID: 700222346_FLI.pep
PPTPLLRRRTASVRHSARFMHSSTSSSSSLLLLLRRKQQKGEGLRWLSTSTDASSFSPATQGCRCRKRFKRATTAEGGKGNSGSSACNSSREVAGLELQEHRLCYEDHRWHRRQ

SEQ ID NO: 51846 - protein, 278 aa, Zea mays
  Clone ID: 700222825_FLI.pep
REDDELFLHSHIQTGYGGSFLPGIKQRLLSYIFCKTWNEVPDQTLRVQHLKKKFYFHFQDYVDLIIWKVQFLDRHHLFVKFGSVDGGVSRSTDQNLAFFAVYNMETTDIVSLHQNSSEDIYALFEQFYDHFHANPQASSHGKFISSHSNDIHALDQLRVIKNKASSSSQFVKKMMTSLPYTCQSQSPSPYFDLSLFRYDEKLISAIDRHRHCTEHPIKFMSVRQNVVKFKIKPGSDSGASDSRAKRISSFLFHPFFPLALSIQQTYMQPTVVNIHFRR

SEQ ID NO: 51847 - protein, 381 aa, Zea mays
  Clone ID: 700167027_FLI.pep
QCNCNQDTYRSFTNMSSTFSSMLVSTLLSNPAIHAAARLAASYWPAAEGNTPIDPNQENPADGVQGRNIGSPPSMVSIVAATVAAASAWWATQGLLPFFAPPVAFPFVPAPSAAFPTVDVPRPSEKDRDCPAENAQIECQEARKQVQFEGLRIAASSESDGSGKGEVSLHTELKLSPAQNADATPTTGAGTNDAFRNKKKQDRSSCGSNTPSSSDVDAGNVPEEDNANEKAKQASCSNSSAGDTNHRRFRSNGSTSDSWKEVSEEGRLAFDALFSREKLPQSFSPPQAVDSKEVAKEEEDEVTTVAVDLNKNATSIDHDDLDTMDEPRASFPNELSHLKLKSRRTGFKPYKRCSVEAKENRVPASDMVGTKRIRLDSEAST

SEQ ID NO: 51848 - protein, 171 aa, Zea mays
  Clone ID: 700167152_FLI.pep
RRRHLPLRRPDGHRRDEGVRDVGAAAAGGGAAERPAAGGEGGRPRRGGVDARGLRQGGRRERPGGRRCRVLGEPLRAEPPAHLRAGRRQDRCRRRRLLAVATARVRTCAAGVVFGGRLVRFRSSARESSDRARLSPPPSLFVCSFYSMLSRMVSVLFMASSSNNISINIVY

SEQ ID NO: 51849 - protein, 244 aa, Zea mays
  Clone ID: 700171392_FLI.pep
VLDFQFEAKVADFGLAKFTTDNNTHVSTRVMGTFGYLAPEYASSGKLTEKSDVFSFGVMLLELITGRRPVDTTQTYMDDSLVDWARPLLMRALEDGEYDSLVDPRLGKDFNPNEMARMIACAAACVRHSARRRPRMSQVVRALEGNVSLEDLNEGVRPGHSRFFGSYSSSDYDSGQYNEDMKKFKKMAFNNNYTSSQYSAPTSEYGQIPSASSSEGHQTQEMESGAMKKGGYSGGYSSGYSGAS

SEQ ID NO: 51850 - protein, 209 aa, Zea mays
  Clone ID: 700171481_FLI.pep
SRLQSADCRYSPCSDGATGEAERAEAESTAWCLIMEEAGRGCGLLKVVVTHGRNLAVRDFTSSDPYVIVHVADKTTKTKVINSCLNPVWNEEMTFSMKEPVGIIKFEVFDWDRFKYDDKMGQAFLDLQPVAAATKLRRALRLTAGETNLRKVNPDADNCLLSDSFVTYANGEVAIDARLRLREVESGELFVTIKWIEPDSANTGKQADH

SEQ ID NO: 51851 - protein, 194 aa, Zea mays
  Clone ID: 700210226_FLI.pep
RDRLKLTDRREFIRPTATKSQIKRRNPVMAPAQIRRCLHAGAWMLAQASTTSSSLDAITNSSRSAGDTSGMVPSTALGLPSAFSARCAAFWPEIIMAPNVGPILGAPSISATSIPVTIMPGTTSRVRTCCPCGLTGSSCSSSPTGTRDAGTSPRTSRAACPASRSTPSTPPAPATPSSAPSSLWKMESSLATLT

SEQ ID NO: 51852 - protein, 241 aa, Zea mays
  Clone ID: 700211955_FLI.pep
RSYSHLLIHTCHRRGVHAMGGMAAQIPIKDDAAANEAALELVRKDKLREVRAGHDGTWAAHPGLIPAIREVFEGHLGGRPNQIGDAAGHEGASVKEEDLIQPPRGARTVDGLRLNVRVGVQYLAAWLAGSGSVPLYNLMEDAATAEISRVQNWQWLRHGAALDAGGVEVRATPELLARVVEEEMARVEAEVGPDRFRKGRYAEAGRIFSRQCTAPELDDFLTLDAYNLIVAHHPGASPCKL

SEQ ID NO: 51853 - protein, 532 aa, Zea mays
  Clone ID: 700212054_FLI.pep
GVFQQENYLANWIQALFNSLPPEDYVGATLVLGGDGRYFNKEAAQIIIKIAAGNGVQKIIVGRNGLLSTPAVSAVIRKRKANGGFIMSASHNPGGPDNDWGIKFNYSSGQPAPETITDQIYGNTLSISEIKTADIPDTDLSSVGVVSYGDFAIEVIDPVSDYLELMENVFDFQLIKDLLSRPDFRFIFDAMHAITGAYAGPIFVEKLGADPDCILNGVPLEDFGNGHPDPNLTYAKELVFTMFGTHAPDFGAASDGDGDRNMILGKRFFITPSDSVAIIAANAQTAIPYFQFGTKGLARSMPTSGALDRVAEKLNVPFFEVPTGWKFFGNLMDAGKLSICGEESFGTGSDHIREKDGIWAVLAWLSILAHRNKDKKVGERLVSVEDIAMEHWKTYGRNFFSRYDYEACESHSANQMMDHLRDVMANSKPGEKYGNYTLQFADDFSYTDPVDGSTVSKQGLRFVFTDGSRIIFRLSGTGSAGATIRLYIEQFESDISKHSLDAQTALKPLIDLALSVSKLKDFTGREKPTVIT

SEQ ID NO: 51854 - protein, 109 aa, Zea mays
  Clone ID: 700212444_FLI.pep
KKHTVPNKRYHPRWWSISQCDIISYTDSLGVTSSVSYLHQIQLSTRYLSALMRNSCRNCGIPMCLLRFYEAQPCEVKEQPQKPQLQQISGLFFRICHLSISSCNFVSAR

SEQ ID NO: 51855 - protein, 207 aa, Zea mays
  Clone ID: 700212481_FLI.pep
IQEALRSLNEYKRSRELDGVSYYDSFKLQREVHDFNANVKRLELAGLWDEIVEMLRRRELPDGFEAREEWVSLGTLFRRLVEPLDIANYYRHSKNEDTGSYLSKGRPRRYKYTQKWHEQLQRVPVGSSLESCFWAVVEELQAEMADGRAFEDLRERLVKLENDAHGWYNSGSLGKDVFLGSSSFVAWWRTLPEQHRAASSIAKLVSL

SEQ ID NO: 51856 - protein, 360 aa, Zea mays
  Clone ID: 700217224_FLI.pep
PSSKPYNIPESIIKSINFDTLEGALGIKFQNKGLLVEAITHASRPSSGVSCYQRLEFVGDAVLDHLITKHLFFTYTDLPPGRLTDLRAAAVNNENFARVAVKHKLHVHLRHGSSALETQIREFVKDVQEELSKPGFNSFGLGDCKAPKVLGDIFESIAGAIFLDSGCATSVVWKVFQPLLDPMVTPDTLPMHPVRELQERCQQQAEGLEYKASRTGNVATVEVLVDGIQIGVAQNPQKKMAQKLAARNALVVLKEKETAAKKDTEKDGEKKNGSQFTRQTLNDICLRRQWPMPQYRCINEGGPAHAKRFVYAVRVNTSDSGWTDECIGEPMPSVKKAKDSAAVLLLELLNRNYRGKPDGK

SEQ ID NO: 51857 - protein, 192 aa, Zea mays
  Clone ID: 700217228_FLI.pep
KSIEKQPRRPAAAVKRELSGEEEGKITMLDHLVGLLKLRVVRGVNLAVRDLRSSDPYVVVRIGKQKLKTRVVKKSVNPEWDDELTLSIEDPAVPIRLEVFDKDTFVDDTMGNAEVDIRPLVEIVKMKLQDVADRTVVKKLVPNRQNCLAEESSIYISEGKVKQDMVVRLRNVESGEIELQLQWIDLPGSKGV

SEQ ID NO: 51858 - protein, 241 aa, Zea mays
  Clone ID: 700217258_FLI.pep
EMERLSAKESLLLAFKDAGGFEALVSGKTTEMQRIDVNERIVGLERLNPTPRPTTSPFLEGRWNFEWFGDSSPGAFAARLLFERSPTAVAHFMGLDVLIKDGYSKLSSNLKFVNTIQSKFLLTTQLSVEGPIRMKEEYVEGLIEIPRINEESLPEQLKGLLGQTAGALQQLPSPIRDAVSEGLKLPLSGSFQRLFMISYLDEEILIIRDAAGAPDVLTRLEGPQPNPGDGTADAVISEYES

SEQ ID NO: 51859 - protein, 367 aa, Zea mays
  Clone ID: 700217310_FLI.pep
TSAGLSPQALTILVPAGVGRRGPAVPRSVNRGGREGPVLALVPILPRRQTLALDVPEHLEHLLDRRAHLAVLLQAAEGQLRDHRHHLPGGRVGVVAQAEVDELLQLALLDLADGHAGQVDLAAVPGDVDGRLGRDELHQDHPEAVHVALVRQLVALVVLWINIPWRALRSGGDVRDVEGEEAGEAEVGDLDVVVGVQEDVGGLDVAVHDGRLDGVQVGERRGGLHGDAEAERPREGALGGPLPVQVVGDRAVGHELVHQKELAAVAGRAAVEHDEVGVAQPRQDGRLVLELLHAPVPVVVQPLHRHHAPVPEVPFVDGAEAAIAEFSAFVEAVGRLLELLVGEVVRWRVLDAAGLHVTNPRTRGPTR

SEQ ID NO: 51860 - protein, 140 aa, Zea mays
  Clone ID: 700217506_FLI.pep
RMAPHIMADQWRKGSEWFELNRELAVQIVADYKYYSIFRKHCRPSCYPDEHYIPTYLHLFHGPLNANRTITWVDWSRGGPHPASYGATDITEDFIQAIRNNGTQCFYNSKPTSVCYLFARKFAPNALPRLMNLTSTVLDF

SEQ ID NO: 51861 - protein, 434 aa, Zea mays
  Clone ID: 700333696_FLI.pep
PFITPSSSKIFCRNKGVIRPPSTWAAVAATAAAAAASAGAGDVRASVPLEMAAAGAGTGSEGKKRGASRSWILLDAAGEEQLLDADKYAIMRRVDINARDLRILDPLLSYPSTILGRERAIVLNLEHIKAIITSNEVLLRDPSDENVIPVVEELHRRLAPSSATQHDGKENLSGQHDVEGAEEDESPFEFRALEVTLEAICSFLDARTTELETDAYPALDELTSKISSRNLDRVRKLKSGMTRLTARVQKVRDELEQLLDDDDDMADLYLSRKLAGASSPVSGSGGPNWFPASPTIGSKISRASRASAATVHGNENDVEELEMLLEAYFMQVDGTLNKLTTLREYIDDTEDYINIQLDNHRNQLIQLELFLSSGTVCLSLYSLVAGVFGMNIPYTWNDGHGYIFKWVVLVSGLFCAFIFVSIVAYARHKGLVGS

SEQ ID NO: 51862 - protein, 376 aa, Zea mays
  Clone ID: 700205542_FLI.pep
QSGSSLAAGRQWLPCLPGLQLQERADKRQRHGHAKPVHEPGQEPKHGQAKPPFSSSWLLVPRLTPRANFGKQAMPGDGGAAGSARWVCAVLSVFPPPSKAKNASFEQGANFAITGATALDTDFFRKRGLGSTVWNSGSLRTQIQWLRDLKPSLCSSAQGTRCKEFFAECLFVVGEFGGNDYNAPLFAGKDLREAYKLMPHVIRAISDGVEQLIAEGAKDLIVPGVMPSGCFPVYLTMYADPKEGHGSRTGCLKRFNTFSWVHNAMLKRALVKLRAKHPGARIIYGDYFTPIIQFILQPKKFGFYKQPPRACCGAPGRGPYNFNLTAKCGEPGASACADPKTHWSWDGIHLTEAAYLHIARGWLHGPFADQPVVQAS

SEQ ID NO: 51863 - protein, 215 aa, Zea mays
  Clone ID: 700238568_FLI.pep
RSGGGGANAGEGEGVREGAPAMVHVNFYRNYGKTFKKPRRPYEKERLDAELKLVGEYGLRCKRELWRVQYALSRIRNAARHLLTLDEKNPRRIFEGEALLRRMNRYGLLAEGQNKLDYVLALTAENFLARRLQTLVFKAGMAKSIHHARVLIKQRHIRVGRQIVNVPSFMVRVESEKHIDFSLSSPFGGGPAGRVKRKNQKKASGGGDAGDEDEE

SEQ ID NO: 51864 - protein, 89 aa, Zea mays
  Clone ID: 700239329_FLI.pep
KTFPVVILGVGCCAGWGLLVNQSFSISHYEFVTSSYLDVHYFVGTCRFCLVHACPLSEYAHVLSAVCVRALGMYVCIDESKELLGVDDS

SEQ ID NO: 51865 - protein, 227 aa, Zea mays
  Clone ID: 700243695_FLI.pep
RMTKYTRNKKSSSSHSSSRFKRVSRKEMSFAVEKYAWTNATCPVCMEFPHSAVLLLCSSHGNGCRPYICASSYQHSNCLDQLVMSCRKEASEDPDAIELMCPLCRGEVKGYTLVEPARKQLNRKRRSCMEDGCSYMGTYRELCKHVQKKHPTANPRAVDPLHAYRWKRLLFRSSLHDMICSTTSEAMRRFCSHMLQIEEVVAALREGGDHRGATDDDPLIHDLLTSR

SEQ ID NO: 51866 - protein, 246 aa, Zea mays; identical to SEQ ID NO: 46958
  Clone ID: 700243853_FLI.pep

SEQ ID NO: 51867 - protein, 347 aa, Zea mays
  Clone ID: 700244432_FLI.pep
QCLRARRRHREGRGGDLLGDGEPGPILRRAGRAGPVRHHHKGAHRPGTCSPKGSVDPGALLQLHRVHGGPGAPHLPGQPPVRLRGGLRRRRRGPHQQLEVLLLLAAEPGEAQLAQAPLRRPLLPRGHQELRRRHRRVGRAGCGCAVGRAELHPRHGVHDGPAVRGLPGPRAQGGAEAARQGDVGGAAPVAEPLRAGVPHRRLRPRRLPWRAGGRHRRRRRSHPHLPHEQAQVGPEELGGDPGRGRVLPGGVPAVGAAGRAGEPGGAGAAEPAGPRLLRGGRHRRQAVPAQPQGAGRVGGALRRRAVGAVRQAQGPVRPAGHPGRRAGHLPAAGLAAARRRLVIGTTD

SEQ ID NO: 51868 - protein, 410 aa, Zea mays
  Clone ID: 700223759_FLI.pep
YFYMSDSRFHFHFQPLCRSDPMLVLESSLYVLERNPSETIELFLSENVPADLVNSYLKQHAPNLQSTYLELMLSMNDTGINPNLQNELVQLYLSEVLDWYKILKEEGNWTEKTYSPTRKKLISTLESNSGYNTDALLKRLPQDALFEERAILYGKINQHLRALSLYVHKLQMPERAVAYCDRVYEEREQQPSKSNIYFNLLQIHLNPRKAEKEFEQKIIPVASQYSGIQKASATKPKGGRVGKKVVEIEGADDIRFSPSGTDSGRSDGDGDDVNDRGPIMLNEALELLSQRWDRINGAQALRLLPRDTKLQDLVSFLEPLLRNSSEHRRNYLVIKNLILRANLQVKEDLYNRCQAVVKIDGDSTCSLCHKRVANSAFAIYPNGQALVHFVCFKESQQIKAVRGANSVKRR

SEQ ID NO: 51869 - protein, 344 aa, Zea mays
  Clone ID: 700224356_FLI.pep
CFADELIKNAAYIGTPGKGILAADESTGTIGKRLSSINVENVEENRRALRELLFCCPGALQYISGVILFEETLYQKTKDGKPFVDVLKEGGVLPGIKVDKGTIEVVGTDKETTTQGHDDLGKRCAKYYEAGARFAKWRAVLKIGPNEPSQLAIDLNAQGLARYAIICQENGLVPIVEPEILVDGPHDIDRCAYVTETVLAACYKALNEHHVLLKPNMVTPGSDSKKVTPEVIAQYTVRTLQRTVPAAVPAVVFLSGGQSEEEATLNLNAMNKLSTKKPWALSFSFGRALQASTLKAWAGKVENVEKARAAFLARCKANSEATLGTYKGDAAADTESLHVKDYKY

SEQ ID NO: 51870 - protein, 272 aa, Zea mays
  Clone ID: 700169861_FLI.pep
LSCSFPLTMQYFSCLGGADPLSWAIRLKVAIGAARGLSFLHDAENQVIYRDFKASNILLDSEFNAKLSDFGLAKAGPTGDKTHVSTQVMGTHGYAAPEYIATGRLSAKADVYSFGVVLLELLTGRRALDKSKPGFEQNLVDWARPHLGDKRRLYRIMDTKLGGQYPKKGANAIASIASQCICGDAKLRPPMSQVLEELEQLQDAKYGAPSPLVDIRKASHAAPKSPMSSTPKSPLSSTPKSPMRAQPAARPSPRRSLGAAAPLAGYRTAQVH

SEQ ID NO: 51871 - protein, 329 aa, Zea mays
  Clone ID: 700172364_FLI.pep
PDWSMLLAAITTIFLAAEKQWTMLDWKPRRPDMLTDTFGFGRIIHDGLMFKQNFSIRSYEIGADRTASIETMMNHLQETALNHVKTAGLLGDGFGSTPEMSKRNLFWVVSQMQAIVERYPCWGDTVEVNTWVSANGKNGMRRDWHIRDSMTGHTILKATSKWVMMNKLTRKLARIPDEVRTEIEPYFVGRSAIVDEDNRKLPKLPEGQSTSAAKYVRTGLTPRWADLDINQHVNNVKYIAWILESAPITIFENHELASIVLDYKRECVRDSVLQSHTSVHEDCNIESGETTLHCEHVLSLESGPTIVKARTMWRPKGTKAQETAVPSSF

SEQ ID NO: 51872 - protein, 370 aa, Zea mays
  Clone ID: 700172675_FLI.pep
EIMELYRLHLGKILKQSLVQGLAIGFGFGLSQFLLFACNALLLWYTAISVDKQHLTIATGLKEYILFSFASFALVEPFGLAPYILKRRKSLTSVFEIIDREPRIDPDDTTGLKPPNVYGSIEFKSVDFSYPARPDILVLSNFNLKVSGGQTVAVVGVLGSGKSTLISLIERFYDPVAGQVLLDGRDMKSFNLRWLRSHMGLIQQDPVIFSTTIRENIIYARHNATEAEMKEAARIANAHHFISSLPHGYDTHVGMRGVDLTPGQKQRIAIARVVLKNAPILLLDEASSAIESESSRVVQEALDTLVMGNKTTILIAHRAAMMKHVDNIVVLNGGRIVEQGTHDSLMDQNGLYVRLMQPHFGKGLRQHRLM

SEQ ID NO: 51873 - protein, 201 aa, Zea mays
  Clone ID: 700208741_FLI.pep
VRDPPRGHRARTEPARTLPRLCGPSASLAVSRAPRDTALALALALAFAAAASSAAICALLHSSLQNAVSPLYMKMSRLPASGFRQRKHASKKCAPRPAPPMDGRFSLCQSPSGLWPRTPSAATGRLLESNTDPAPRAGPRARTTAPSARRPSRRADRGGSLFLLASACAGCSCESSVLFFLFPSDSGGACFLARPRQMRGD

SEQ ID NO: 51874 - protein, 308 aa, Zea mays
  Clone ID: 700208851_FLI.pep
GRDALRFARFAVRYGKSYESAAEVHKRFRIFSESLQLVRSTNRKGLSYRLGINRFADMSWEEFRATRLGAAQNCSATLTGNHRMRAAAVALPETKDWREDGIVSPVKNQGHCGSCWTFSTTGALEAAYTQATGKPISLSEQQLIDCGFAFNNFGCNGGLPSQAFEYIKYNGGLDTEESYPYQGVNGICKFKNENVGVKVLDSVNITLGAEDELKDAVGLVRPVSVAFEVITGFRLYKSGVYTSDHCGTTPMDVNHAVLAVGYGVEDGVPYWLIKNSWGADWGDEGYFKMEMGKNMCGVATCASYPIVA

SEQ ID NO: 51875 - protein, 380 aa, Zea mays; identical to SEQ ID NO: 46597
  Clone ID: 700211142_FLI.pep

SEQ ID NO: 51876 - protein, 352 aa, Zea mays
  Clone ID: 700214514_FLI.pep
VASIGRGRRRRRAISCCSSPDADGPRPAAPPTSAAPSDGSIQLYSQIERVITEAAKQSREGWGSTGDWTEVEGSWVLRPKSLEPSFVVHFVGGIFVGAAPQITYRFFLECLANRGALVIATPYASGFDHFFIADEVQFKFDRCLRNLDEPVNDLPTFGVGHSLGSVIHMLIGSRYAVQRSGNVLMSFNNKEASSAIPLFSPVIVPMAQSFGPIFSQLASYPTIRFGAEAAIKQLENLSPPVVKQLLPLLQQLPPLYMDLIKGREDFIPKPEETRRLIKSYYGISRNLLIKFKDDQIDETSTLAQVLSSEAAISSLLDMSIRSLPGDHGLPLQQVLPDVPPAMADAVNREVNF

SEQ ID NO: 51877 - protein, 252 aa, Zea mays
  Clone ID: 700214560_FLI.pep
GRRRVEMEDRHVAEVALGGDPQVALFGVFDGHGGKNAAEFAAENMPKFLAEEFKKVNGGGEIEGAVNRGYLKTDEEFLKRDESGGACCVTAVLQKGGLVVSNAGDCRAVLSRAGKADVLTSDHRASREDEKERIENLGGFVVNYHGTWRVQGSLAVSRGIGDGHLKQWVVANPDTRTLLVDHQCEFLILASDGLWDKIDNQEAVDLARPLCINNDKTSRLAACRMLTETSISRGSTDDISVMIVQLQKFSSS

SEQ ID NO: 51878 - protein, 143 aa, Zea mays
  Clone ID: LIB3070-003-E8_FLI.pep
SCFKMSEALEKDKEIDEEEEEYVLLELDNCLYSDMSPGAPFVLSGLDTLTPTLIIGDSLKMIGEYEETIGTCYLFSETEAEPKPTSNEMAPSEENTDKQVSSSKEAPSKEVNHLASVQKILKFRPINAEHSQHRAYQHKDKEF

SEQ ID NO: 51879 - protein, 887 aa, Zea mays
  Clone ID: LIB3067-054-G8_FLI.pep
GSSGMRAGGCTVQQALSPEAAVVVKQAVSLARRRGNAQVTPLHVASAMLQQQAPTGLLRAACLQSHSHPLQCKALELCFNVALNRLPASASPLLGGHGHVYYPPSLSNALVAAFKRAQAHQRRGSVDTQQQQQPPVLAVKIELEQLVISILDDPSVSRVMREAGFSSTHVKANVEQAVSSIEANNNSASAAATKNPNPSASPPEETTKPGKLLVLPLDQARDEDVAVVLDCLASRSKKRVMVVAECAASAEAPVRAAVERIKRGEALRGAQVVSVSVSRFRDLPRDEAERVLVELRCAVKAGGRAGGVVLVVEDLGWAAEFWAGRGESGRARWPSACCYYCAVEHAVAEVRALACRGGDGVWLVGYGTYQSYMRCRAGQPSLETLWGLQTLAVPAGSLAFSLNFVGDSATAMTINHQSISCKMAKCDDDRSGNGSAAPRCLSLLDAGGSGRLTGAVSSFCAADCSATKCDATVKSSIPPWLQHCRDHQEPSRCKKSSTCGGSPSHHHRTALNFSTVVSPSSSTVSSYEQHYHLRHQSYQPWLLVADGAREAEHPCNKARCSAAVQLHVVDDEDGKPLSAIKVKSHDSSASNGSVECRSRFKELSAENLKVLCSALEKEVPWQAEIVPEIASTVLQCRSGMARRREAAVSSSRPSSTQACAKEDTWMLFHGGDAEGKARVARELARLVFGSRKSFVSIGGSRTTASSPACWSDGSSEQQRKRPRLTEASNHGCRHESLYEAVRDNPHRVILVQDVEQGGCWRCQRDILEAIQSGLVRSRAGDDDAALGDAIVVLSCQSLDAWSTTTSPLTTKKAKAESKEEPEEEESAGDHRRKEAITAAAASPSSSLCFDLNMDVENHDTESCFTDASLLKAVDRTFFFRRPDESSD

SEQ ID NO: 51880 - protein, 299 aa, Zea mays
  Clone ID: 700332517_FLI.pep
EQELDRRFRLYRFWETPREEFLRAHAGAVRAVVGNASYGADAALIDALPALEIVASFSVGIDRVDLAKCRDRGIRVTNTPDVLTDDVADLAVGLAIAVLRRIPQADRYVRAGLWKSRGDYTLTTRFSGKRVGIIGLGRIGQAVAKRVEAFDCPVSYHQRTEQRATYPSYTYYPSVVELAANSDVLVVACPLNAQTRHIVSREVMEALGPSGVLINVGRGPHVDEREMVAALADGRLGGAGLDVFEDEPNVPEALLGMDNVVLLPHVGSGTNETRKAMADLVLGNLEAHVLSKPLLTPVV

SEQ ID NO: 51881 - protein, 99 aa, Zea mays
  Clone ID: 700204157_FLI.pep
VPKAREGRSAACAEGYGLGLAERPAPAAAAAVRAVCARRGPAAAVVVFADAAVVTAPPVATAITRSRQNCTKPHRTSNSHLHRRLCDCGIVFQVTCLLR

SEQ ID NO: 51882 - protein, 373 aa, Zea mays
  Clone ID: 700237552_FLI.pep
GEDIYEPFLRLLWKGNWFVQEKSCKILTAIISARPKLRNGTLPNGDASNSKSKLTSTHDVLRGLVNWLCSQLRNPTHPSCSIPTSIHCLSTSLREPYVRTLFVQADGIKLLIPLISPAATQQSIQLLYETCLCIWLLSFYDAAVDYLSTTRVMPRLVEVVKGSTKEKVVRVAVLSFCNLLAKGAFAAQMIDLGLPQIVQNLKAQAWTDEDLLDALNQLEVGLKENLKKLSSFDKYKQQVLLGHLDWSPMHKDPSFWRENINNFEENDFQILRVLMTIIDTSSDTTALAVACYDLSQFLQYHPSGRIVVADLKAKDRVMKLMNHENTEVQKNALLCAEALPWRKVCQFSAGLRETEPFFVFRSRELLAIFQNGC

SEQ ID NO: 51883 - protein, 309 aa, Zea mays
  Clone ID: 700237884_FLI.pep
RVVAVKRLYKNNYKRVEQFINEVDILSRLLHQNLVILYGCTSRSSRDLMLVYEFIPNGTVADHVHGSRASERGLTWPRRMSIAIETAEALAYLHAVEIIHRDVKTNNILLDNSFHVKVADFGLSRLYPPEVTHVSTVPQGTPGYVDPVYHQCYKLTEKSDVYSFGVVLVELVSSKPAVDMGRSHSEINLANMALNRIQNHEVGQLVDPELGYETDGETKRSIDLVAELAFRCLQLERDSRPSMKEVVEALNRIRNGDSLENNKTDRSSSSPKEDARLLTSSSIQYSPDSVIHRFHSQSTTHSAASNASG

SEQ ID NO: 51884 - protein, 94 aa, Zea mays
  Clone ID: 700242940_FLI.pep
QRRSARRRRQRRAEGEEENSDETSGRECAVASNCIIYIQTQCCYSGDDRLESEGEVATEGWMHGDGERVAELELMCFILRCHAAGQIRFGNAAG

SEQ ID NO: 51885 - protein, 480 aa, Zea mays
  Clone ID: 700220177_FLI.pep
KIYQRAFGGQSLDFGKGGQAYRCACAADRTGHAMLHTLYGQAMKHNTQFFVEYFALDLLMDNEGKCQGIIALNMEDGTLHRFRASNTILATGGYGRAYFSATSAHTCTGDGNAMVARAGLPLQDLEFVQFHPTGIYGAGCLITEGSRGEGGILRNSEGERFMERYAPTAKDLASRDVVSRSMTMEIREGRGVGPLKDHIYLHLNHLPPEVLKERLPGISETAAIFAGVDVTKEPIPVLPTVHYNMGGIPTNYHGEVVDIKGDNPDAVIPGLMAAGEAACASVHGANRLGANSLLDIVVFGRACANRVADISKPGEKQKPLEKDAGEKTIAWLDKLRNANGSLPTSKIRLNMQRVMQNNAAVFRTQETLEEGCELISKTWESFHDVKLSDRSLIWNSDLIETLELENLLINACITMYSAEARKESRGAHAREDFTTRDDEKWMKHSLGYWENEKVRLAYRPVHMKTLDDEVESFPPKARVY

SEQ ID NO: 51886 - protein, 182 aa, Zea mays
  Clone ID: 700220357_FLI.pep
QVKANPAALLALCWYWASEGIGKKDMVVLPYKDSLLLLSRYLQQLVMESLGKEFDLDGNRVNQGLTVYGNKGSTDQHAYIQQLREGVHNFFVTFIEVLRDRPAGHDWELEPGVTCGDYLFGMLQGTRSALYANDRESISVTVQEVTPRAVGALIALYERAVGIYASLVNINAYHQPGMLLMT

SEQ ID NO: 51887 - protein, 361 aa, Zea mays
  Clone ID: 700220556_FLI.pep
HINLKILIGFTLVIRFRHNQAVVAPNGIYGRRRELPCLELGHLHRAAAIVEHEHVAVARLRVLRVHSSRDAHPPVSSEALHHRVINQGSQIDGLVLLNVDVHESSVWRLVHACPRGRPCQVSAHEKLVPAMVPERAEEDSGVLAQVAGGHHDEPERPDAAGHRGALLPAQLLRVQQPVGVQCLGPRQARDLERDLHVRLRARDADDLVHASGGQRRAAAQDDALPPQRFDLLHRPLPQLLPVLVQPQLPRERLNAGPALGDVVGLAVGLVGPRPQHAPAPARVEEGLGRVHVAVVQPPPAAHVVPALGLRRHERVRRVVVPPHHVVILERVHHAELQHVPHPGAARRRVEPLAVAIVTLLP

SEQ ID NO: 51888 - protein, 314 aa, Zea mays
  Clone ID: 700167886_FLI.pep
LNFTAVDKLMTTTAVDCFTSFAPFLANVICCPQLQATLTILIGQSSKQTGSLALDPTVANYCLSDVQELLLSQGASDNLHSLCSVHLSNVTEGSCPVSTVDAFESAVDSSKLLEACRKIDSVNECCSQTCQNAINEAAQKISSKDAGLTSYTGSPKTDSCRNVVLRWLSSRLDPRSAKEMLRQISNCNVNGVCPLSFPDTSKVAKECGGTMTNSTACCKAMLTYVAHLQKQSFITNLQALNCASFLGAKLQKMNVSMNVYSSCQITLKDFSLQGKLFKTYQLITHKGHIYLLALHFVATELMKYLFTFSTGVFE

SEQ ID NO: 51889 - protein, 229 aa, Zea mays
  Clone ID: 700167912_FLI.pep
CRFSLTNQGLSCYRSPGQDIATFAEKDLQPWIARDDEQGQKMWRVNQRIVKLIAELMRNHDSPEALVILASASDLLLRATDGMLVDGEACTLPQLELLEVTARAVHLIIEWGDPGLSVADGLSNLLKCRLSTTIRCLSHPSAHVRALSMSVLRDILNHGSVSPNKISRGEQQRNGIQSPSYRCVAAGILNWQADVERCIEWEAHSRRATGLTLAFLSTAAKELGCPLPC

SEQ ID NO: 51890 - protein, 345 aa, Zea mays
  Clone ID: 700172159_FLI.pep
LKTGRGPGRDKPVQFCPPVQRSIYTLSLPRPLSSGPRGGGADKALAVRCRRQASAAPRTGAGRVAMVEKHVVTDAANVPQVAAAVAGAVLVSLVHPPRRAHHGVVPERHLRRRHLRVPQRARGRGRGALSSCSSCSAGPRLVEPDLHAPHQPLRRRAAAVAAQEDVEREALVHLRGRGPAADGRERVGRLVDRLRAALPAHHVGVGEAEPLRERGGNVAARRAHPPRGRDVAARRRRVLPVDAVRGARHDAARQLRRVVRDEPAAGPGALGVQPQVEVGVHVPRPLRVGHREPELVLLAVQEAAEEGRELDVVGGHVEGADAGDGAPDERVDAAGVDHRERPHGA

SEQ ID NO: 51891 - protein, 258 aa, Zea mays
  Clone ID: 700207929_FLI.pep
ATAVARYRTKYQAAQKGKVGIVLDFNWYEALTNSPDDQAAAQRARDFHIGWFVDPLINGHYPQIMQDLVKERLPRFTPEQAKLVKGSADYIGINEYTSSYMKGQKLVQLAPSSYSADWQVQYVFARNGKPIGPQANSKWLYIAPTGMYGCVNYLKEKYGNPTIYITENGMDQPGNLTRDQYLRDATRVRFYRSYIGQLKKAIDQGANVAGYFAWSLLDNFEWLAGYSSKFGIVYVDFNTLERHPKASAYWFRDMLQKH

SEQ ID NO: 51892 - protein, 470 aa, Zea mays
  Clone ID: 700210852_FLI.pep
RARAAAGAPMASFSSLSASSSTSTPSFNLPAKTSAGTGSLSFHRARESQKSRARMVTVRAEAVDTTISPRVNALRPSKTMAITDQATALRQAGVPVIGLAAGEPDFDTPAVIAEAGINAIRDGATRYTPNAGTLELRKAICKKLEEENGLSYSADQVLVSNGAKQCITQAVLAVCSPGDEVLIPAPYWVSYPEMARLAGATPVILPTSISDNYLLRPESLASVINENSRILILCSPSNPTGSVYPKELLEEIAAIVRKHPRLLVLSDEIYEHIIYQPAKHTSFASLPGMWERTLTVNGFSKAFAMTGWRLGYLAAPKHFVAACGKIQSQYTSGASSISQKAGLAALNLGYAGGEAVSTMVKAFQERRDYLVRSFRELPGVKISEPQGAFYLFIDFSSYYGSEVEGFGTIKDSESLCLFLLEKAQVALVPGDAFGDDKGVRISYAAAMSTLQTAMGKIKEAMALLRPPVAV

SEQ ID NO: 51893 - protein, 181 aa, Zea mays
  Clone ID: 700217894_FLI.pep
EPERSRSQTHRQRIARFRPSDPRRSTAMAMAYKMATEGMDVKEECQRWFMEMKWKKVHRFVVYRIDERSRAVLVDRVGGPGEGYEELVAALPGDDCRYAVFDFDFVSVDNCQKSKIFFIAWYVRTYVRIPEPLAFSFPSNGLAVQSVQHPNVTKAGKLLLAAIIPAAFIKVAGYFIRSDLA

SEQ ID NO: 51894 - protein, 308 aa, Zea mays
  Clone ID: 700331881_FLI.pep
IMTNMCTYVGRKEAALKQREAALKAARESKDGRDGEVTTLRQELESAKEEVASAMDQLKEAESETKALRSMTQRTVLTQEEMEEVVLKRCWLARYWGLAVQYGVYPEIAVSKHEHWSSLAPLPLEVVLSAGQKAKEEPRKQGDNVQGRNKLAREMSDVMGEGNIESMLSVEMGLRELSSLKVEDAVVVAVGQHRRPSIVRQFTSDFKSPGEPKYLEAFDLSPEEAEDVSFKQAWLIYFWRRAKTHGVEEDIADDRLQLWIGRNAQAPNSHDAIDVERGLTELRKLGIEQQLWEGSRADIDQASLAMEN

SEQ ID NO: 51895 - protein, 723 aa, Zea mays
  Clone ID: 700332166_FLI.pep
AGDCSSCVGVMLELARGVAQWAHGFKSGILFLFNTGEEEGLDGAHSFITQHHWRNSVIFAVDLEAMGISGKSTLFQGTDHWALESFAAVAKYPSAQIASQDVFSSGAIKSATDFQIYEEVGRLPGLDFAYTDTTSVYHTKNDKMALLKPGSLQHIGDNMLAFLLHSAASPKFLKDAQQRKQGKTEQDRAVYFDILGKYMVVYPLRLATMFHNSIILQSLLIWGTSLLMGGHPALVSFAISCLSIILMWIFSICLPVVVAFALPYMCPFPIPYVANPWLTIGLFGSPALLGAFIGQHIGFILLKRHLRRVHSKAKTGITPSMIENVTDLEAERWIFKSGFVQWLIALILGTYFKVGSSYIALIWLVSPAFAYGFLEATLSPVRLPKQLKVVTLVVGLVAPVVSSAGLAVRMADVIVGSIVRIDRNPGGLPDWLGNVIVSVAIAVVVCSTFVYLLSYIHISGDKRILGLLLSLSFGLSIALASSGIVPAFTEDVARSVNVVHVVDTTGVHGGHIEPVSYISLFSNTPGKLTNELVDLGGEEFSCGRNMTTDLVTFTVKYGCWSYKESSTGWSRSEVPVLLVESDSVIGGARQTVVSVDTKSSTRWTLGINKDGIDDFTVQVDSEKIVLPGDKSEIDGWHTIQFAGGKNSPTKFQLTLYWSSSKPSEREAKQAADAPLLVKLRTDVNRVTPQVARVVEKLPRWCTPFGKSTSPYTLAFLTALRVDI

SEQ ID NO: 51896 - protein, 239 aa, Zea mays
  Clone ID: 700201362_FLI.pep
WWAGVKVQLHADEETYRSMGKEHALVISNHRSDIDWLIGWILAQRSGCLGSTLAVMKKSSKFLPVIGWSMWFAEYLFLERSWAKDEKTLKWGLQRLKDFPRPFWLALFVEGTRFTPAKLLAAQEYAASQGLPAPRNVLIPRTKGFVSAVSIMRDFVPAIYDTTVIVPKDSPQPTMLRILKGQSSVIHVRMKRHAMSEMPKSDDDVSKCVKTFLWQRMPYWTNIWQQALSMRRLDLSAAQ

SEQ ID NO: 51897 - protein, 270 aa, Zea mays
  Clone ID: 700205938_FLI.pep
KKKTGKENGSDRRQGQWLRRSLARGAGVRGQQAGCEGPGRLRRQVHPGHVPPPAGVPQGCHFSTSSALLRRCAGHPSGGPVRGAARGSGGPGEARGRDGGLLLGGEPRRAGGADGQHAQRGAPVQRGLSGGQAGALLTGPRSQRALRFQLRPLRVRGGRLARHALLQDCAGSGAAGARAGASPERDDGIRRGTDEAGAVHVRAAVGVPRHAQRPPAQDGVHAAAPHRVPVLPAMPGAAPHHGRQEALGHRFLHHPPAGRHGRPAGASRSR

SEQ ID NO: 51898 - protein, 302 aa, Zea mays
  Clone ID: 700206584_FLI.pep
RASRASHTNATCSHGTEARATDGGGRRRPAGARLVGRRAELRVRVGPVLQPVRVLRDGRGLLRRRVPVGPLRRAGDQQRVRGQHRDAGLLRRAPRAGRRLVRGQRLLHPRRLPRRRRLLPGVRPHRHRRRLQARDRRLLRQRQPRDHKVLLHQRDRRAEQELLRPEQHAVAVPGGEGVLRPRPAADLLELQLRARGAEHRLRRAGRPRRGGAQRRARVPLRALVLDEQRARGHRLRPGLRRHHPGHQRRARVRRQEPQLRQQPRRLLQAVLPGFRRRPGQQPHLLNDLSLIGLLSCTYTCVG

SEQ ID NO: 51899 - protein, 453 aa, Zea mays
  Clone ID: 700240441_FLI.pep
EEHWMNQTLDHFNPTDHRQFKQRYYEFLDYYRAPNGPIFLYICGESTCNGIGNNYLAVVAKKFGAALVSPEHRYYGKSSPFNSLTTENLQFLSSKQALFDLAVFRQYYQETLNAKYNRSGADSSWFVFGGSYAGALSAWFRLKFPHLTCGSLASSGVVLAVYNFTDFDKQIGISAGPECKAALQEITGLVDGQLQSGRNSVKELFGATKLENDGDFLYLLADAAAIAFQYGNPDVLCSPLAEAKKNGTDLVETFASYVKDYYIGKFGASVASYDQQYLKNTTPAESSYRLWWYQVCSEVAYFQVAPKNDSVRSPKIDTRYHLDLCRNVFGEGVYPDVFMTNLYYGGTGIAGSKIVFANGSQDPWRHASKQKSSDELPSYLIECKNCGHCSDLSGCPQAPSNIEGDSSKCSPPEALNKVRKEIVDHIDLWLSECQEQGHDKEPWLGSRWSIAAI

SEQ ID NO: 51900 - protein, 249 aa, Zea mays
  Clone ID: 700240564_FLI.pep
RRLWGEYRLLLLVPAPIPMVASSQLCERRRLELLVVPEDALAVLGLDVDALPGLAPGRLGNRGRVEVVVVPEDGPDRLGGLHGVVVRHGGEEVVRDVRVRDVVEHAVEDAVVAVHGGQRAAQPVPLARVVVGERRVGVLQVGDEHQPRVHDQQRHGVHAHHPPDPERRRQLVQPERHGHDAGVRDEDLGALPVVVDGAVGVEVAGEARVRPPRRVGRQVQRPPEGELHHDVHHPADRVVVHVRGVPRQR

SEQ ID NO: 51901 - protein, 149 aa, Zea mays
  Clone ID: 700240708_FLI.pep
TDVGTVESRRGNGGSTACEVLLFHHEDMGIPYEIAKLGIRQGMWGCVKRIEPGLRAYQQARAAGEPVSRSALMAQINTKVGDSFVRSLESDSDGSETVEAEEKPARNRVARFLVLGGAVALACTLDQGLLTKALIFGVARKFVGQRKAL

SEQ ID NO: 51902 - protein, 199 aa, Zea mays
  Clone ID: 700240739_FLI.pep
PSSHIGSMFFGCPKISSNEQTTLRNLARRQEFQNGHAKRSNSVLVVLDVEALGVGGSITLVGAEGSLRVGLAPGEEGSSSLLQVLHLASPGLEGARLEGTAEGERQGPRLLGAELVHGIEVAGGLLLALSTREEDNSRHSSRDGPLEGTDGVLSNHLRGHLLGVGAWSHHVGLQEGTLQEDMVLVERLVAGSKGSPSWS

SEQ ID NO: 51903 - protein, 128 aa, Zea mays
  Clone ID: 700218617_FLI.pep
VLTEMSDVHLVGDLEGGRRTELLPPVLPLVLVLVLQAVAVVVLMAVARRGGRLVHALGPARVVGQHGHLTEVGDLHHHGVVLLGERLLPWLPVDPHERVLGCSLVELETDSVGLKPKYTHHQIFSFLS

SEQ ID NO: 51904 - protein, 116 aa, Zea mays
  Clone ID: 700218704_FLI.pep
VISTASSPPMATALKSFLNSPVGPKTTHFWGPVANWGFVIAGLVDMNKPPEMISGNMTAAMCVYSGLFMRFAWMVQPRNYLLLACHASNESVQLYQLSRWARSQGYLEKKEPEAKQ

SEQ ID NO: 51905 - protein, 287 aa, Zea mays
  Clone ID: 700221591_FLI.pep
VQKFQYLLRCLKLWARKRGLHCHLLGFFAGIHLAILAAYVCRRHPNASINTLLSLFFDIFVHWPWPLPVSLLDPPVPCRGPDGCSLMPIMLPCIPPEFCSSSTTESTFSKIKEELWRGYALSKDTRSTDFNWSWLFAPFPYGARYKCFLRIVLSAPMGEELRDWVGWVKSRFRNLLLKLESLGVYCDPDPSEQVDHTITDPNVVFFWGLIYRSNIQICISSLKEDFMKSVCNNIYGKEKCAHSDITMSIVGPPQLPKSVFDLSVYSEKLPQHMMGHQLMKQNYNAVS

SEQ ID NO: 51906 - protein, 290 aa, Zea mays
  Clone ID: 700221670_FLI.pep
FATTLTGLHFVTTTLMTILFRWLGLSQPSHLPLADLVKFVIFSNLSIVGMNVSLMWNSVGFYQIAKLCMIPASCLLEVVFDHVHYSRDTKLSIMVVLIGVAVCTVTDVSVNARGLIAAVIAVWSTALQQYYVHFLQRKYSLNSFNLLGHTAPAQAGSLLLVGPFADYLLTGKRVDQFSLSSLALFFLALSCFIAIGVNLSQFICIGRFSAVSFQVLGHMKTVLVLSLGFLFFGKEGLNLQVVLGMVLAVLGMIWYGNASAKPGGKERRSILPVRSASLKGSSEEKAGAEK

SEQ ID NO: 51907 - protein, 619 aa, Zea mays
  Clone ID: 700224627_FLI.pep
DARSRDPSRPDPTLPRPPALSSPPPPPAVPRDPSQARVEDMASTFGATSTVGLMAAPTGKNVRLQRRANFRVKAAKELYFNKDGSAIKKLQTGVNKLADLVGVTLGPKGRNVVLESKYGSPKIVNDGVTVAREVELEDPVENIGAKLVRQAAAKTNDLAGDGTTTSVVLAQGLIAEGVKVVAAGANPVQITRGIEKTAKALVEELRKLSKEVEDSELADVAAVSAGNNYEIGNMIAEAMSKVGRKGVVTLEEGKSSENFLYVVEGMQFDRGYISPYFVTDSEKMTAEYENCKLLLVDKKITNARDLINVLEESIRGAYPILIIAEDIEQEALATLVVNKLRGSLKIAAIKAPGFGERKTQYLDDIAILTGATVIRDEVGLSLDKADKSVLGTAAKVVLTKESTTIVGDGSTQEEVTKRVAQIKNLIEAAEQEYEKEKLNERIAKLAGGVAVIQVGAQTETELKEKKLRVEDALNATKAAVEEGIVVGGGCTLLRLAAKVDAIKDTLENDEQKVGAEIVRRALSYPLKLIAKNAGVNGSVVTEKVLSNDNFKYGYNAATGQYEDLMAAGIIDPTKVVRCCLEHAASVAKTFLTSDVVVVDIKEPEAAPVANPMDNSGYGY

SEQ ID NO: 51908 - protein, 143 aa, Zea mays; identical to SEQ ID NO: 39567
  Clone ID: 700224716_FLI.pep

SEQ ID NO: 51909 - protein, 269 aa, Zea mays
  Clone ID: 700224869_FLI.pep
QWLHVGAEDFGRRVGPPRHHKPERLEAAGHRERYRHERVEPRCGRAPPLRRLHQLHVRDAGHRQAAVQGRPAAAAGPQVRDDVPLIGFIGRLDHQKGVDIIADAIHWIAGQDVQLVMLGTGRADLEDMLRRFESEHSDKVRAWVGFSVPLAHRITAGADILLMPSRFEPCGLNQLYAMAYGTVPVVHAVGGLRDTVAPFDPFNDTGLGWTFDRAEANRMIDALSHCLTTYRNYKESWRGLQARGMAQDLSWDHAAVLYEDVLVKAKYQW

SEQ ID NO: 51910 - protein, 341 aa, Zea mays; identical to SEQ ID NO: 48586
  Clone ID: 700166257_FLI.pep

SEQ ID NO: 51911 - protein, 178 aa, Zea mays
  Clone ID: 700166478_FLI.pep
GLPSPVLLACVFPVPSACVRSTQRRGRSHQADPMAFMRSRSNASSGMGVAPNIRETFVELQMKKTFRYVIFKIEEKQKQVVVEKTGATTESYDDFLASLPENDCRYALYDFDFVTGENVQKSKIFFIAWSPSTSRIRAKMLYSTSKDRIKYELDGFHYEIQATDPSEADIEVLRERAH

SEQ ID NO: 51912 - protein, 222 aa, Zea mays
  Clone ID: 700166586_FLI.pep
GIYIDVQLFCCIGLHYEMQLYKHTQKAIGCSLHQMFGYRYGFYDECLRKYGNANVWKYFTDLFDYLPLTALIENQIFCLHGGLSPSLDTLDNVRSLDRIQEVPHEGPMCDLLWSDPDDRCGWGISPRGAGYTFGQDIAQQFNHTNGLSLISRAHQLVMEGFNWCQDKNVVTVFSAPNYCYRCGNMAAILEIGENMDQNFLQFDPAPRQIEPDMTRKTPDYFL

SEQ ID NO: 51913 - protein, 234 aa, Zea mays
  Clone ID: 700170162_FLI.pep
SWYLWLFVILFLLLNINGWHTYFWLAFLPLFLLLIVGAKLEHIITRLAQEAAISLSNNTEEVPKIKPCKDHFWFHKPELVLHLIHFILFQNSFEISFFFWILVSEGFGSCMMERKPYVISRLVIGVIIEVICSYITLPLYAIVTHMTGQIKLHGFGSRVHESVHGWIGLRKKPFSFWKIPGGDPNADSGREADVTRRVAKERSGSSRSMPMAPADEIVTVDDVAVAAAAVGQGP

SEQ ID NO: 51914 - protein, 245 aa, Zea mays
  Clone ID: 700170277_FLI.pep
KKHLSIYMDYLIIKQHKRGEKKPLTFGSYHRCDVDSLVSETLMAERGYGSEEKHFPSRVMLQITPTQQSDVLSVSVGKSNDNPTHEFGIEKGFEGSFEPPNAFGLKASVTESLTLAMKPWKFEQSVHGNTATLNWFLHDGVNGREVYSSKPSKISLLQPKAWFRDRYSNAYRPFTKQGGVIFARDEYGDSVWWKVCGATLGQTMNWQIRGWIWLTYWPNKQRTFHNETRWLEFRECLQLPLTKFP

SEQ ID NO: 51915 - protein, 114 aa, Zea mays
  Clone ID: 700170315_FLI.pep
SQVSLLSRHRRLLPWTALLQRLGTTAWSLRKKPSHMMLWRLPHGLKMDSSWLLATRSTNTSRVSSSTRRASSPLMARKSSSTSSDSLRSWRSSVPNLREVDATGGFIDQAEAET

SEQ ID NO: 51916 - protein, 401 aa, Zea mays
  Clone ID: 700170547_FLI.pep
LAHNILSRLSPRDVASIGSVCTRMHELTKNDHLRKMVCQNAWGRDVTVRLEMSTKMVGWGRLARELTTLEAASWRKFTVGGRVEPSRCNFSACAVGNRLVLFGGEGVNMQPMDDTFVLNLEAATPEWRRVKVSASPPGRWGHTLSWLNGSWLVVFGGCGQQGLLNDVFVLDLDAQQPTWREVASEGPPLPRSWHSSCTLDGSKLVVSGGCAESGVLLSDTFLLDLTKEKPAWREIPTSWSPPSRLGHTTSVYGATKLFMFGGLAKSGSLRLRSSDAYTVDVSEDSPQWRQLATTTGFPNVSPPPRLDHVAVSLPCGRIIIFGGSIAGLHSPAQLFLIDPAEEKPIWRILNVPGQPPKFAWGHSTCVVGGTRVLVLGGHTGEEWILNELHELCLASRPDEDG

SEQ ID NO: 51917 - protein, 160 aa, Zea mays
  Clone ID: 700193458_FLI.pep
QWCTTSYTTTRNLAKVLRELFRRKHRSEAQLKMRVAMGIVRAPSPSATAVAAPSHRIAAAIIHALQTHPRSRQRGSIRSTAAETSRCVSLRDISPQLLRLLSHSHKILLHCLNLRSQLWLRLLLKLKVRPSLEQFLTQRITFSYQSSHFLAFRLLKFKLF

SEQ ID NO: 51918 - protein, 382 aa, Zea mays
  Clone ID: 700193490_FLI.pep
VGSAVGGAVITLIIAAVILFIVLRKMPKKKKLKDVEENKWAKTIKGAKGAKVSLFEKSVSKMNLNDLMKATDDFTKDNIIGTGRSGTMYRATLPDGSFLAIKRLQDTQHSEDQFTSEMSTLGSVRQRNLVPLLGYCIVKNERLLVYKYMPKGSLYDNLHQQNSDKKALEWPLRLKIAIGSARGLAWLHHSCNPRILHRNISSKCILLDDDYEPKISDFGLARLMNPIDTHLSTFVNGEFGDLGYVAPEYTHTLVATPKGDAYSFGVVLLELVTREEPTHVSNAPENFKGSLVDWITYLSNNSILQDAVDKSLIGKDNDAELLQCMKVACSCVLSSPKERPTMFEVYQLLRAVGEKYHFSANDDELTMLPQNANPEDELIVAN

SEQ ID NO: 51919 - protein, 326 aa, Zea mays
  Clone ID: 700209082_FLI.pep
LPKQLAGMVEKASIEDVMKVLMASRKQDLHQLWTTCSHLVAKSGLPPEVLAKHLPMDVVSKIDELRLKSSLSRRSPFLAHHHHPAPGGGMEASSAADIDDHHKIRRMRRALDSSDVELVKLMVMGEGLNLDEALALHYAVENCSREVVKALLELGAADVNHTAGPAGKTPLHVAAEMVCPDMVAVLLDHHADPNVRTVEGVTPLDILRTLTSDLLFKGAVPGLAHIEPNKLRLCLELVQSAAMVMSREDAHTAVNAAPMYGEPSGGGGCGVYSASGTSSTSLVNLNLDNRMVYLNLGMDAQFGKMGDGDDGGGRGPSSLFSPHGYH

SEQ ID NO: 51920 - protein, 250 aa, Zea mays
  Clone ID: 700211645_FLI.pep
WAATESNIRGKGRLLYILSNLRSPSIQPRGRVRVDLCVEGMKITALLVLKPSTSGAGSSSSGGESGPEAVVLANAIDVSHFGYFQRSAAREFIVFVARTVAQRTQPGQRQSVQHEEYKVHSHNRNGLCAVAFMDDHYPVRSAFSLLNQVLDEYQKAYGDSWKSVTADETQQWAFLTDALTKFQDPAEADKLMKIQRDLDETKIILHKTIESVLARGERLDSLVEKSSDLSAASQMFYKQAKKTNQCCTIL

SEQ ID NO: 51921 - protein, 162 aa, Zea mays
  Clone ID: 700211848_FLI.pep
ELGATDLLVPGVLPIGCFPLYLTLYNTSSKADYNARTGCLRRYNRLAFHHNRELKQQLDELQKKYPKTKIMYGDYFKAALQFVVNPGKFGFSTALQACCGAGGQGNYNFNLKKKCGEQGASVCSNPSSYVSWDGIHMTEAAYRKVADGWLNGPYAQPPILKS

SEQ ID NO: 51922 - protein, 124 aa, Zea mays; identical to SEQ ID NO: 47585
  Clone ID: 700217167_FLI.pep

SEQ ID NO: 51923 - protein, 334 aa, Zea mays
  Clone ID: 700332881_FLI.pep
ALATTFKEAQKYSPCIILLRHFDAIGNASSNEGPQSEQSGIASNIESVIKQYIGQRWVAKDSLPGKDVNGSSYLVEPECVSSLQIILVATADSSEGMQQSIRRCFRYEIDMKTMNEEQRNKLISETLQGIPKVADESICDKFLKDLAAQTSGFMPRDILALVADAGVSFAHKIAAGNDSKAISKHTEVLPESSSATQNEEHHFSKEDIMSSLERAKKRNRAALGTPKVPNVKWEDVGGLEDVKKVILDTIQLPLMYKHLFSSKLHKRSGVLLYGPPGTGKRKMFGIFLRRLGLHAHVSFSLMSLIPSLLHEDPQQILAVSWTGLFPSYLWRSMG

SEQ ID NO: 51924 - protein, 388 aa, Zea mays
  Clone ID: 700333024_FLI.pep
QAQSLKDDFFRRLKDIRNKLKNTGSELLEKVVSSYKHVLNAPMDEDTLMRKCQAALINFDELNKTYGNNSVLGSSNQSEFMQGVQEQHNILRNSIEQLKLSESLRATLISHLKEALNEQELKVEQVRSLLQAAQPRFKRAAELCVGLGSNMEMHEPSNQGLKRSSLSDPLSTVAPGAEKSLQKGQSSAVLYSQEGNGFEHIMTETKLAAGDASDNIRGGDLPSQVNGGNTKLKIEEHTSGNKRQKLEDDTDISQPQSQSPPPPPPFPHPDAFEPPPPPPPEVPPSPEPSPPPPPTSPPPNMIPPPPPAMPPQMISHVPPPAGTFVPFPAGPPGPMYSSYPPFTPVVNFPITSPPAGFPSPSPPPPFQGLVGTFYGPQFPTAPPPADRK

SEQ ID NO: 51925 - protein, 341 aa, Zea mays
  Clone ID: 700333432_FLI.pep
DAPSRLHHPDPAVATGQDAAVEAPPPPPPAHDPGGSECRFCEMTRQHQPQCARRLPKRIILVRHGESQGNLDMSAYTTTPDYRIPLTALGVEQARAAGQRIRDVVAGSGNWKVYFYVSPYARTRATLREIGRAFPRDRVIGAREECRVREQDFGNFQVEERMRAVKETRQRFGRFFFRFPEGESAADVFDRVASFLESLWRDIDMGRLDQDPSCETNLVIVSHGLTSRVFLMKWFKWTVAQFERLNNFDNCEFRVMQLGPGGEYSLLVHHTQEELQQWGMSPEMIADQQWRASANRRCWAEECSSFIDTFFEEPYGSSETSSSDEDDAEDKEEETKLLEQL

SEQ ID NO: 51926 - protein, 162 aa, Zea mays
  Clone ID: 700355861_FLI.pep
AAEKDEQQQSRGIALMQGICAVVYRKADNTPCPIKQGLYLGSVGAAFNKDALKSLNITHILIVAKSLDPVFPAEFNYKKIEDEAISSGGNVLVHCFAGRSRSVTIVVAYLMKKHQMSLESALSLVRSKRPQVAPNGGFISQLEKFQKSLQVEQEWRMQPVQH

SEQ ID NO: 51927 - protein, 824 aa, Zea mays
  Clone ID: 700349116_FLI.pep
AVNGSGGALRAAAAYMEAGAPPRGWRWGVLWLVSVEIVLVLVCTRGAGADSGESKGSFLQDSEAGEKDVYLSHSCIHDEILHQRRRAGRKEYSVMPQVYHESREDAERVRGRHLLGMSSWRAPHENARKPIRIYLNYDAVGHSPDRDCKNVGDIVKLGEPPVPSAPGTPICDPHGDPPLVGDCWYNCTLEDIAGKDKKQRLRKALGQTVEWFRKALAVEPVKGNLRLSGYSACGQDGGVQLPHAYVEDGVANADLVLLVTTRPTTGNTLAWAVACERDQWGRAIAGHVNVAPRHLTAEAETLLSATLIHEVMHVLGFDPHAFTHFRDERKRRRGQVTAQSLDKKLGRMVTRVVLPRVVMHARHHYGAFSQNFTGLELEDGGGRGTSGSHWEKRLLMNEIMTGSVDTRSVVSRMTLALLEDSGWYQANYSMAEHLDWGQNQGTEFVISPCNSWKGAYHCNTTQLSGCTYNREAEGYCPIVNYSGDLPKWAQYFPQANKGGQSSLADYCTYYVAYSDGSCTDVNSARAPDRMLGEVRGSNSRCMASTLVRTGFVRGSMTQGNGCYQHRCTNNSLEVAVDGIWKSCPQSGGPVQFPGFNGELICPMYHELCTTVPVPMTGQCPKSCSFNGDCIDGTCHCFPGFHGHDCSRRSCPDKCSNHGTCKANGICECQSGWTGIDCSTDYAGYTCQKGSAILPSLSMCHDVLVRDSDGQHCAPSELSILQQLETVVLVPNYNRLMPSGRTFLNFFNNANCAAAAKRLACWISIQRCDEDGDNRLRVCYSACELYNTACGAGLDCSDQTLFSKREEEEKGVPCTGYGEKKSFWL

SEQ ID NO: 51928 - protein, 518 aa, Zea mays
  Clone ID: 700350396_FLI.pep
RVGSATSPSRTFLSPTPQRLSAPRSRSRLFSMGLVKEGVDMEEGTLEIGMEYRTVSGVAGPLVILDKVKGPKYQEIVNIRLGDGTTRRGQVLEVDGEKAVVQVFEGTSGIDNKYTTVQFTGEVLKTPVSLDMLGRIFNGSGKPIDNGPPILPEAYLDISGSSINPSERTYPEEMIQTGISTIDVMNSIARGQKIPLFSAAGLPHNEIAAQICRQAGLVKTLEKGKHAEGGEDDNFAIVFAAMGVNMETAQFFKRDFEENGSMERVTLFLNLANDPTIERIITPRIALTTAEYLAYECGKHVLVILTDMSSYADALREVSAAREEVPGRRGYPGYMYTDLATIYERAGRIEGRTGSITQIPILTMPNDDITHPTPDLTGYITEGQIYIDRQLHNRQIYPPINVLPSLSRLMKSAIGEGMTRRDHSDVSNQLYANYAIGKDVQAMKAVVGEEALSSEDLLYLEFLDKFERKFVTQGAYDTRNIFQSLDLAWTLLRIFPRELLHRIPAKTLDQYYSRDASH

SEQ ID NO: 51929 - protein, 132 aa, Zea mays; identical to SEQ ID NO: 48939
  Clone ID: 700424624_FLI.pep

SEQ ID NO: 51930 - protein, 497 aa, Zea mays
  Clone ID: 700073484_FLI.pep
GVSATQANNGTETPAVTAPELETEIMVRAWGRRTALPPLLILGLLRLHYSSLVVAQEGQEKDPATLFAQASGMMDLRKYDGALGLLNAVLEIDPNHSEAYRQRASVLRHKCRYEEAERDYNKHLELSPGSASVVKELSQLLQAQNSLQSAYGQFDSGDFSKVVEYINKIVLVFSPGCLKAKLLKAKALLALKDYSSVISETGFILKEDEDNLDALLLRGRAYYYLADHDVASRHYQKGLRLDPEHSELKKAYFGLKNLLKKTKSAEDNAAKGKLRVSVEDYKAALAMDPDHTAYNVHLYLGLCKTLVRLGRSKEAISTCTEALIIDSELVDALTQRGEAKLLSEDWEGAVQDLKEAAQKSPQDMGIREALMRAEKQLKLSKRKDWYKILGVSKTASAAEIKRAYKKLALQWHPDKNVDNREKAENMFREIAAAYEVLGDEDKRVRYDRGEDVEEMNMGGGGGFNPFGGGGQQYTFQYDGGFPGGGFPGGGGFQFNFG

SEQ ID NO: 51931 - protein, 509 aa, Zea mays
  Clone ID: LIB3180-040-E4_FLI.pep
DEFRHLLIRGAPPLAAEDLQVSLLRRLSLTVPSFNSSAVDLDCPSFAQHHAAVAAEGVNEQQGGRSSASDDEISPYLIAPDTVSVLRDIADVMLRAGYAPELCQVYGEVRRDTLMECLAVLGVDKMSLEEVQRVEWGVLDGKMRKWIQALKVVVRGLLAEERRICRQILSPDMNTEEECFTQAAKGCVLQMLNFGDAIAIGKRSTEKLFRILGMYEALAEVLPELEGLFSGDAKNFIKEEAEGILLRLGDAVCGTIEEFANDIQGDTSRRALPGGEIHPLTRYVMNYVWLLADYNASLNKLLECWDTELTGVDNPNMTPLGHCVLMLITHLQCKINEKSRLYEDEALQNIFLMNNLLYIVQKVKDSELKTLLGDNWIRKRRGQIRQYSTGYLRSSWTRVLACLRDDGLPHTMGSSSTLKAALKDRFKNFNLAFEELHRTQTSWRVVDPQLREELKISISEKVLPAYRSFVGRFRGQLEGGRGSARYIKYNPDDLENHVSEFFEGRKSNA

SEQ ID NO: 51932 - protein, 168 aa, Zea mays
  Clone ID: 700049131_FLI.pep
RFLEAEKMVLKTELCRFSGQKIYPGKGIRFIRADSQVFLFANSKCKRYFHNRLKPAKLTWTAMYRKQHKKDIHAEAVKKRRRANKKPYSRSIVGASLEVIQKKRAEKPEVRDAAREAALREIKERIKKTKDEKKAKKAEVTKSQKAQTKGAVQKGSKGPKLGGGGGKR

SEQ ID NO: 51933 - protein, 490 aa, Zea mays; identical to SEQ ID NO: 43249
  Clone ID: LIB3158-005-F8_FLI.pep

SEQ ID NO: 51934 - protein, 276 aa, Zea mays
  Clone ID: LIB3156-014-B6_FLI.pep
TGSAFQGDRPLSRSIRPSVGPEPQDNAAKNKRHRRASEAGRSRSRTRRKEKEAQLSLAWSREAEGAREQQGMEEPVPADPPRIFWKSRRSANGRSLQQEPDKDATEETNEQAQEEPMKTDDATDTAAAAEPYPKANLSEKRKALFEPLEPINGKRGAAETLLPPPDFEPASYPKGWLVGKKRKLVNVDVVESMRRIAIQEMNRKDREINGLNEQLEEDSRVLELLQKQLADERRKRTEIEKENSMLHEQVTMLMNMLDENEGFDEDGEAPPPDSFD

SEQ ID NO: 51935 - protein, 54 aa, Zea mays
  Clone ID: 700550055_FLI.pep
YNEFMVLLQFPSQAQTWQVDQKAEEMIQHHHRFSCVQILFPSAFPASDIQPCHN

SEQ ID NO: 51936 - protein, 122 aa, Zea mays
  Clone ID: 700550874_FLI.pep
KSGGSIVFLTQIIGAERGLYPGAAAYGTSLGAIHQLVRLCAMELGKHKIRVNAACRGLHLQDKFPVSVGKEKAEKATAEVMPLRRWLDPEKDLASTVLYLVGDESRYMTGTTIFVDGAQSIV

SEQ ID NO: 51937 - protein, 198 aa, Zea mays
  Clone ID: 701162977_FLI.pep
AGEGHDPRQGADGVPGADGGDAVPSGRAAPGAVGPGAGGLHGGAGPGHARVPALQPRARPRRAAHRHGRRGVPHVGRAGARRPVLAHVPRQHGAAGVPAHPGLRRGGAPQDGGGRGARGPQDRAGRARHPEQGAGGRCWHWRRRRQDFLVNKQIIHGCVRVNVSRVVVECSSLYVGNRLLVVFPECVINILVFVVCGA

SEQ ID NO: 51938 - protein, 134 aa, Zea mays
  Clone ID: 700618951_FLI.pep
GPVAERNFGIFNTDLTPKYDLGLLRQGPQSGSPTPSPEPSPSVGGGKWCVAKSGASATDLQNNINYACAYVDCRPIQSGGACLDPNNIHSHASYVMNAYYQANGMHDYDCDFKGTGVVTSSDPSYGSCKYNASS

SEQ ID NO: 51939 - protein, 138 aa, Zea mays
  Clone ID: 701178536_FLI.pep
QSDQVELEKEQIQQIDASVSPLMSKGSCYQAPEALKTLKPSQKWDVYSYGVVLLEMITGRSPSVLLETMQMDLVQWVQFCIEDKKPSADVLDPFLAQDSEQEGEMIAVLKVALACVQANPERRPSMRHVAETLERLNG

SEQ ID NO: 51940 - protein, 218 aa, Zea mays
  Clone ID: 700616516_FLI.pep
MTYKKTKMPLNIVQKGPQTKRDLRLNRKRDYHSHKEIDKIVQNMPFDKAPVFNGFNGKFLRHIIKIDFYKLCHDFYDGNINLDGINTSFIALIPKVNNPVRVNDFRPISLLSIAIKLITKLLVNRLKPVIQRIVHKNQYDFIKNRTIQDCVLLGAMNTYISAIFLERKWLFSNFDKAFNTVEHSVIIAILNQLGFPVRWIRWVSSTLNSESSTVLLNG

SEQ ID NO: 51941 - protein, 67 aa, Zea mays
  Clone ID: 701168909_FLI.pep
HLFTYLWALKLETMQHISTNRIKHTIADLCCIVSSFKAIYLLIYDFYTRPNNLAKALIEWKIFFWEF

SEQ ID NO: 51942 - protein, 248 aa, Zea mays
  Clone ID: 701161694_FLI.pep
APACHTPTMFLLICRKGQIVNTSSHCQAREKRTRAASRTEQRGAIPISLFPFSPDAISPNPNPHARRPAVAGALAPNAAVTRGVPPPPPQRPRPRPRPPPTVLPGRHQLPWAPPTSGCSRSSPSPSSRSCSSSPRSRASPPPPHSSRASRHPPTCAEAPPHRPPSPTCSRAAGGTAGSSCGCSSPSTTPGTATCSTSPPTRRPPSAPSSPRPSRAPLPPCAPSRTSMSWAGPPRAPQWDPPASPPRSV

SEQ ID NO: 51943 - protein, 240 aa, Zea mays
  Clone ID: 701181836_FLI.pep
GGGALVDRILDKTGMKGTGKWTVQQAAELAVAAPTIAASLDGRYLSGLKDERVAAAGVLEEEGMPAGLLETVNVDKKVLVDRVRQALYASKICSYAQGMNLLRAKSVEKGWNLNLAELARIWKGGCIIRARFLDRIKSAYDRNRELANLIVDREFAREMVQRQNAWRWVVARAVEAGISTPGMTASLSYFDTYRSSRLPANLIQAQRDLFGAHTYERIDCPGSFHTEWTKLARRSNGAAI

SEQ ID NO: 51944 - protein, 108 aa, Zea mays
  Clone ID: 701184223_FLI.pep
FVSPHKTVSPYHSCASVFESYDYDTHCYCYCCGSSSINGVVVLARRASVPPTMKALVERPVRRVLEHHHPGERFFLLAEAEQVDEVLVVYSRQGVYLLVFIKATAQIS

SEQ ID NO: 51945 - protein, 210 aa, Zea mays
  Clone ID: 700166410_FLI.pep
VVFLALLLLLLLLLLDRCLRLAALPPHPPMHPGLQRQPGQAAGHHRRHLRAHPARPRPQRRPVRGHLQLLLRRLRPHLGAGRVPDLRGVVPGRHGRLRRLRGRLRPGQAPPDRLPLQDLLHLLPPGHPGPAQGPALHARPALPHRRAHARRQGRRAARLRQQLHQLTDQLQPRNHLCLPCLSLTRFVCLYGLGPSIRTFVRGSTNKHAID

SEQ ID NO: 51946 - protein, 373 aa, Zea mays
  Clone ID: 700102139_FLI.pep
LVKSMGLKQQRPTSITYLTKIRQRNPMVLLNCYTRELLVDKALAHFRNMKELGFVFSTLPYNDLMGLYTRIGQHERVPSVMAEMKSNGIVPDNFSYRICINSYGTRADFFGLENTLEEMECEPQIVVDWNTYAVVASNYIKGDLREKAYSALSKAEAKLDKQDPDAYRHLISLYGNLGDKSEAKRLWAVQMSNCKRYINRDYMNMLSVLVKLDEITEAEDLLKEWESSQNSFDFRVPNVLLTGYRQKALLDRAEMLLDGFLKKGKTPPSTSWGIVAIGYAEKGDVAKAYEMTKNALSVHAPNTGWIPRPSMLEMILKYLGDEGEVKDVEAFVSLLKAAVPVDSDMTEALSRARAREEMKAEEATEAPRGDVIA

SEQ ID NO: 51947 - protein, 314 aa, Zea mays
  Clone ID: 701164237_FLI.pep
PSTSSRQSPSQQKTPKCRATPPDRRRVTPAQTSPAVAPDRKRPADAAAGTGSNSDNVTTSHDDASSSVPNKVSEELLRCLLAIFSQMGGSAAGGGRGLGDEDQQALSPSVSGSSESSASSEADAYPQDPYGILELGARDIGAYKRFHVVDAASFDGNGDTPLVRRRLKALLRRLSSVDLAGLSHQQKLAFWINVYNSCMMNAFLEHGIPTTPQMLVAMMPKATVSVGGRTHSAMSIEHFILRLPYSAKQVKVSREGAKCDDGDVTAARGAFGLEWPEPLVTFALSCGSWSSPAVRVYTAARVEEELEAAKREYL

SEQ ID NO: 51948 - protein, 478 aa, Zea mays
  Clone ID: 700101251_FLI.pep
PSRSCIAAEMGASTTPLASAAALLLLLLAPLAAAADSMSIVSYGERSEEEARRMYAEWMAAHGRTYNAVGEEERRFEVFRDNLRYVDAHNAAADAGVHSFRLGLNRFADLTNDEYRATYLGVRSRPQRERRLGDRYLAGDNEDLPESVDWRAKGAVAEVKDQGSCGSCWAFSTIAAVEGINQIVTGDMISLSEQELVDCDTSYNQGCNGGLMDYAFEFIINNGGIDTEEDYPYKGTDGRCDVNRKNAKVVTIDSYEDVPANSEKSLQKAVANQPISVAIEAGGRAFQLYNSGIFTGTCGTALDHGVTAVGYGTENGKDYWIVKNSWGSSWGESGYVRMERNIKASSGKCGIAVEPSYPLKKGANPPNPGPTPPSPTPPPTVCDNYYSCPDSTTCCCIYEYGKYCFAWGCCPLEGATCCDDHYSCCPHDYPVCNVKQGTCLMGKDSPLSLSVKATKRTLAKPHWAFPGNTAADGMKSSA

SEQ ID NO: 51949 - protein, 418 aa, Zea mays
  Clone ID: 700103547_FLI.pep
VFTRLLMDYLNDYAYDAQVAGLYYVVKPNDTGFQVTMVGFNDKMRTLLETVIGKIAEFEVKADRFSVIKEAMTKEYENFKFRQPYQQVLYYCSLILEDQTWPWDEEFSALSHLEASDLGIFLPHLLSKTFIECYFAGNIEPNEANNIVQHVEDVLFNAPISACKPLSPSQHLAKRIVKLEKGLRYYYPAMCSNHQDENSALLHYIQTHQDNVKQNVLLQLLALVGKQPAFHQLRSVEQLGYIALLRQRNDSGVRGLQFIIQSTVKDPANLDARVENFLNMFESNVYNMSDAEFKSNVSALIDMKLEKYKNIREESAFFYGEISEGTLKFDRKEAEVAALRELKKEELVGFFNDHVKVNAPQKKILSIQVYGGLHSAEYETIVQNAPPPPSCEITDIYGFRRSRPLYGSFRGGVGQMKL

SEQ ID NO: 51950 - protein, 330 aa, Zea mays
  Clone ID: 700150844_FLI.pep
TNKCFSIECMIQLGQRDPGTTMQAINQPKLLHQTTQNINKRISTANGTAGTRGFIRNTVCAMLPVPHPSMDASPRIQQLAGWYSTDTTSSASGVGGEPVGRVGERAVGPALVDLLRLRPVPGGAERDVQRVEVVRPRVRHPRVRRLLLVPLHVLVPSVEERVLEPGVELGGPLRHGRVGRANLAQVVRGATGAEDEDAFLPQGRQRLAEVVVVRAVAVGLHRELAHGDAGVRVHEHQRHPGAVVEPAAVVLLHGAEPGLLQELYGPQGQVRSARSGVLELVHGLGKAIEVVDGVVAAADDVDRRRGRLPVSRDDEDGARGLVARDLRRHP

SEQ ID NO: 51951 - protein, 252 aa, Zea mays
  Clone ID: 700102668_FLI.pep
ERSAAKESNQQTMSDLDVTMAEANTSHPRNSTPSANPAYYRNVTFVEGFSKTSVVKHASDVKGNSIKVLNCHDSVIYILAPLKYATVYGCSDATVVLGAVGKVVKVEHCERVHIIAAAKRICIANCRECIFYIGVNHQPLVLGDNHKLQVAPFNTCYPQLHEHMIQVAVDPSVNKWDQPFVLGVVDPHDSLSHPAGVSDVKAESATCLDPDLFTNFLIPSWFGDENQGPTNCNPFPLPEIYGTSQSKKISKR

SEQ ID NO: 51952 - protein, 211 aa, Glycine max
  Clone ID: 700875686_FLI.pep
AKVALDIHNLREENPDKFYNQFMNKVLYAREGAKSIMDRTFADLPWQIRVEVDGVEIEVPEDAEGVLVANIGSYMGGVDLWQNEDENYDNFDQQSMHDKILEVVSISGTWHLGKLQVGLSRARRLAQGQSIKIQLFAMFPVQIDGEPWFQQPCTINITHQGQAFMLKRVAEEPLGPASAIIAEVLENAETHNVINTSQKRALLHEMALRLS

SEQ ID NO: 51953 - protein, 337 aa, Glycine max
  Clone ID: 700843748_FLI.pep
ENGVTKVPRMFYCEHSNLSDGLTTESNSNFTIPSIDLTGINDDPILRDAVVGKVRYACEKWGFFQVTNHGIPTQVLDEMIKGTGRFHEQDAKVRKEYYTRDMSRKVIYLSNFSLYQDPSADWRDTLAFFWAPNSPNDEELPAVCRDIVPEYSTKVMALASTLFELLSEALGLDRFHLKEMGCDEGLLHLCHYYPACPEPELTMGTSRHTDGNFMTILLQDQMGGLQILHENQWIDVPAAHGALVVNIGDLLQLVTNEKFISVQHRVLANHQGPRTSIASFFRIGDQSPEGLSRVFGPIKELLSEHNPPVYRETSLKDYLAHQYAKSIGASSLSLFKL

SEQ ID NO: 51954 - protein, 399 aa, Glycine max
  Clone ID: 700844230_FLI.pep
ATSISSTDNNFGNPLAMTAVVVVPLGLLFFASGLIVNLIQAICYVVVRPVSKNLYRRMNRVVAELLWLELVWIIDWWAGVKVQVFTDPETFHSMGKEHALVISNHRSDIDWLGWVLAQRSGCLGSTLAVMKKSSKFLPVIGWSMWFSEYLFLERSWAKDERTLKSGLQQLRDFPLPFWLALFVEGTRFTQAKLLAAQEYAASAGLPVPRNVLIPRTKGFVSAVNHMRSFVPAIYDVTVAIPKSSPAPTMLRLFRGKSSLVHVHIKRHAMKDLPEEDEAVAQWCRDVFVAKDALLDKHIAEDTFSDQELQDTGRPVKSLVVVILWACVVVTGVVKFLQWSSLLSSWKGVAFSAFGLGVVTLLMHILIMFSQSERSTPSKVAPTKKSKNSEQLEARDNKQD

SEQ ID NO: 51955 - protein, 261 aa, Zea mays
  Clone ID: 700428310_FLI.pep
DEKKTRIHTLFHFKKTIPEDGVQFDRTLLFSIVVQSSPERRGHKVCNKKKSAKTCSTDLESRQEATCSRKNRPKKVSREQHVLLCPSNFFLERLDVVGELFPAFLEEKVAVDEPSGVAEADKLHDLGEQRHGVDGADDDGRQPESDDSAAGVGEDSALVLDGVPLGFQVGDELVPARGRGVVGGGLHPEQRQPRRILEPERERRQFITPREEEGRGRCGGSGSGEARPAGERGGVRRGGHVSVPYRSRWRVPGLCSDFAYL

SEQ ID NO: 51956 - protein, 215 aa, Zea mays
  Clone ID: 700431774_FLI.pep
FTHEYDLTSQAYALTSHELLLLAEVLPGVRLVQHDDGVGVGLPAILRRPRRNAEPERDVSHGHDDHPVPGLGVLGDASERRLGHGIAKEKGTLGVGFEPDAAARVCSEEVERVDRKVERAVVGELADGRPHAGEARSGHGGGAAHERLGGVVDAIAVKPEAVAAGLRVGALHCGALQEVLQVGPRELEQLLEYLSRLLLVERPHGAAAAEAELGA

SEQ ID NO: 51957 - protein, 144 aa, Zea mays
  Clone ID: 700471083_FLI.pep
KKNCFSWFHQFFKNTTSSLLLLLPLQVTSQYLKQQVPYYSFWQERSDGRSVFQDEAMEVLLDSLSSQENSRVQALSACFLSNLGGTYSWSGESYTAAWLTKKAGLTSTSQRNTIRNIDWLDSCRIASYALHGSEASWLPLVKMP

SEQ ID NO: 51958 - protein, 322 aa, Zea mays
  Clone ID: 700477461_FLI.pep
SATRRRNQKKKRVTVVSFLDREFYQQQSPPPPPQAAADADRYNYKVKLTTHLLAITCEVCVHVLLEVSREEVADLLHDLVVVVRVGQQVETHGGLLTVHDLHMVAVLLEALGVRQLPIAGEVQARHDDEALGEGEPPEPPPVRPERVARRMVPVGVLGQVRLPVPVPVLERDEVLAVQPPLRLGALGAAEHGVQQDVAAYVDPGVGGADGHVVGDVAARAVARQEHAGPPVPAAAEEGLRRGPLQRGPAVVVGARVPVLGGAPVVHGHHHALAQLHEPPAQVVVDGRAGGRVGEAAAVEEEDHRERVRRRPAAEEVKDGQGD

SEQ ID NO: 51959 - protein, 181 aa, Glycine max
  Clone ID: 700893559_FLI.pep
ALCPFEAVKVRVQAQTCFAKGLYDGFPKLYASEGTRGFYRGLIPLLGRNIPFSMVMFSTFEHSVDFLYRNVVKRKKEDCSIGQQLGVTCLAGYAAGSVGSFISNPADNIVSSLYNRKADSLALAIRNIGLANLFTRSLPIRMLLVGPSITLQWFFYDTIKILGGMSTSGGVRTDMRGNGAG

SEQ ID NO: 51960 - protein, 221 aa, Glycine max
  Clone ID: 700890117_FLI.pep
VMGKTDFNAVKHKQQSMILVDVQTPGVHIKRPLTVFGFDDAPHGHAEVTFENVCVPAKNIILGEGRGFEIAQGRLGPGRLHHCMRLIGVAERGMHMMIQRAVGRRTFGKLIAQHGSFISDMAKCRIELESTRLLVLEAADQLDRHGNKKARGILAMAKVAAPNMALKVLDMAIQVHGAAGVSSDTVLAHLWAAARTLRIADGPDEVHLGTIAKLELQKAKL

SEQ ID NO: 51961 - protein, 194 aa, Glycine max
  Clone ID: 700790067_FLI.pep
RGMAKKRKSISTSLDEVDRTIYSSFSSATNSLSHLYTLSMNHQKLSFQAGERHSLEKLYQWVWRQQESGSRVATVDILSYIQNELDYCGEEPCMSPRAPLHQQQSQPVMQVTTGAGFPVTTGFSGQTIVGQELRPEHCDNQSKNSMFSNALSNPVRQIGEGGNHPSGLSMGNGNQSTDSAAFSSNDSAMDMHAD

SEQ ID NO: 51962 - protein, 223 aa, Glycine max
  Clone ID: 700843705_FLI.pep
LHHNYFNKFVSVADVLVVSVEYRLAPETLLPAAYDDCWDALKWVATNTEPWLVKHGDFNRVFIGGDSAGANIVHNIAMRAGAEALPGGVKLLGAFLSHSYFYGSKPIGSEPVAGHQQSVPYLVWDFVYPSAPGGIDNPMINPMVTGAPSLAGLGCSKILVCVAEKDLIKDRGVAYYEAVKKSGWQGEAELFEVEGEDHAFHIHNPQTQNAMKMIKRLSDFLLH

SEQ ID NO: 51963 - protein, 246 aa, Zea mays
  Clone ID: 700344296_FLI.pep
AESISKIRNEKARRYMNNMRKKPRVPFTKKFPGIDPMALHLLERLLAFDPKERPSAAEALADPYFNGLANNEREPIAQPISKLEFEFEKRKLAKDDVRELIYREILEYHPQMLQEYLQGADHNQMTFMYPSGVDRFRRQFAHLEEGTAKGEKNSPQLRQNVSLPRERVIGNKHGDGNTGDKLAHASVTDGISQPSLSERSFLKSESISASKCIGEKPKHVKDGESVLESVDETVDDLSKKIPQLKT

SEQ ID NO: 51964 - protein, 178 aa, Zea mays
  Clone ID: 700345355_FLI.pep
RRRKRLPFFCREYLNLDEPGRDGVTLNGAFTYIPTTPNTRFITTTSSSNHGIIVRRNKALRALASSRRATRGLSSQSDPEVLALEGLAEAPVPRGGVPGGGGAAVAAGDAEGERLADEDGAGLPVLAPVPRHGQPLPGARRLHARAHHVPRAGHVRDQHQVEVPEAVDGEPHAAGLAA

SEQ ID NO: 51965 - protein, 650 aa, Zea mays
  Clone ID: 700345831_FLI.pep
VFSADFTAYTAARAQPRRCICAAAGPPHPHVSLYPSGHLHTAVHARGTALTPNPEATNTRSAPTPQPPETAPQQRMASDSTAAVTVDGSALAGRALAAAGTRHMFGVVGIPVTSLASRAAAAGVRFLAFRNEQSAGYAAAAYGFLTGSPGALLTVSGPGCVHGLAGLSHATANAWPLLMISGSCDQADAGRGDFQELDQIAATKPFAKLAVKATTIADIPRLVFQALAAAVSGRPGGCYLDIPSDVLHQTLPESEAAALIAAAAADSAASDPSPSMHKSLDEGIAKAADLLRCAERPLVVIGKGAAYARAEEAIRKLVDTTGIPFLPTPMGKGVVPDSHPLSATAARSLAIGQCDVALVIGARLNWLLHFGEPPKWSKDVKFILVDVSEEEIELRKPHVGIVGDAKRVTELINREIKDNPFCLARSHPWVEAITKKANDNVLKMEAQLAKDVVPFNFMTPLRIIRDAILAEGSPAPVVVSEGANTMDVGRAVLVQNEPRTRLDAGTWGTMGVGLGYCIAAAAAEPERLVVAVEGDSGFGFSAMEVETLVRYQLPVVVIVFNNNGVYGGDRRSPDEITGPYKDDPAPTSFVPAAGYHKMMEAFGGKGYLVETPDELKSALSESFRARKPAVINVIIDPYAGAESGRMQHKN

SEQ ID NO: 51966 - protein, 328 aa, Zea mays
  Clone ID: 700347721_FLI.pep
QTEDGACVTFVGPGGAGNFVKMVHNGIEYGDMQLIAEAYDVLRRLGGLSNSEIADVFAEWNRGELESFLVQITADIFTVADPLDGSGSGGGALVDRILDKTGMKGTGKWTVQQAAELAVAAPTIAASLDGRYLSGLKDERVAAAGVLEEEGMPAGLLETVNVDKKVLVDRVRQALYASKICSYAQGMNLLRAKSVEKGWNLNLAELARIWKGGCIIRARFLDRIKSAYDRNPELANLIVDREFAREMVQRQNAWRWVVARAVEAGISTPGMTASLSYFDTYRSSRLPANLIQAQRDLFGAHTYERIDCPGSFHTEWTKLARRSNGAAI

SEQ ID NO: 51967 - protein, 366 aa, Zea mays
  Clone ID: 700349407_FLI.pep
LNRDATNDEVTVESAEATLKYNVAVKCATITPDETRVKEFKLKSMWRSPNGTIRNILNGTVFREPILCKNIPRILSGWKKPICIGRHAFGDQYRATDMIINGPGKLKMVFVPDGADPMELDVYDFKGPGVALSMYNVDESIRAFAESSMAMALSKKWPLYLSTKNTILKKYDGRFKDIFQEVYEEQWKEKFEENSIWYEHRLIDDMVAYAVKSDGGYVWACKNYDGDVQSDFLAQGFGSLGLMTSVLLSSDGKTLEAEAAHGTVTRHFRLHQKGQETSTNSIASIFAWTRGLEHRAKLDKNDSLLDFTHKLESACVETVESGKMTKDLALLIHGPKVTREFYLSTEEFIDAVAQQLRGKIQLPTTV

SEQ ID NO: 51968 - protein, 654 aa, Zea mays
  Clone ID: 700350038_FLI.pep
NMKQPLVLPAHRSPQDQEGPRGGGAPWAQLRAPRRAVLGGQAAHVRGHDAALGPARAAPGHQADAHQEGAALPALPGHRRPLQRRHPAAGADRVGRHPQHRPARGQAGGGHHRARPPLRAAGHDRERPLLVVQRRGVREADDRGAQPAVHPAPDGVPHQEQAGPGGVRPGGVRHHQGDPGEAHERRRRHDRGAGARGEASVHPGLPRRVPALRAQGARAAGHDALRLPHRLLPHGPGHADAAGHRAGAAQIADAAAVEAGVHARARRHRRLAVEACQGARGDPRHGVPPAGEPLAAHALLRGALHHCREPAAQPAAPGVPPPAPALPLHHGDQRAGQGGAHQRRRHHRGVLLAGQVRRRAQLSGVRRHVAVRHGGAAQRPRQAWARRAPGRRRAGAHHQGLPLRARRAHGLEHHKAVGGRLRQRLLQVRRGRRRRPRAEGVLGRGAQRGPRRQEGRAVVARARHPRQPRGDAHHHHVGHLRPPLGGQLRAVPLRRILPEPPDHHPEEHARGGGGGPGRRDEEVPEAAGDDPAGHAADADAGHQGDDDAGHPLVALARRGVHGRVGGAVVAGGAHGEGGVREVRRQDEGDRGIHRRVQQQPGAQEPVRSRDRAVRTAQALLQAGSHREGHPQQHLHLTRPSSPSNGGLPYCVHAS

SEQ ID NO: 51969 - protein, 296 aa, Zea mays
  Clone ID: 700350951_FLI.pep
KPQPNFDQVKPALPALQHLIHSQDEEVLTDACWALSYLSDGTNDKIQAVIESGVFPRLVELLMHPSASVLIPALRTVGNIVTGDDMQTQCVIDNQALPCLLNLLTTNHKKSIKKEACWTISNITAGNKEQIQAVINANIIAPLVQLLQTAEFDIKKEAAWAISNATSGGTHDQIKYLVAQGCIKPLCDLLVCPDPRIVTVCLEGLENILKVGEAEKNLGAGDVNVYAQMIDDAEGLDKIENLQSHDNTEIYEKAVKMLESYWLEEEDDAMPSGDNPQNGFNFGNQPSVPSGGFNFG

SEQ ID NO: 51970 - protein, 254 aa, Zea mays
  Clone ID: 700351628_FLI.pep
AKHRLAACRTMLQKYSLGDRTRLFVADGTLFSLLPVNSRMQRMEGSIGVEENGSIFPEWTSRRSWKDRQKTRKANANGQQHLLAASEPELIYYGKHSGLVGQCKSDVFCPSVDDEACTSGYDKVLVDAECTHDGSIKHIQKFEFWGWKSLDRRVLDAERTENLLQLQLHLLTNGFKLLKTGGSLVYSTCSLTVAQNECVVQQFLSTHPSADLQKINLADNWPCRSGGIPKTLRFDPAVSQTSGLFVAKFCKLPT

SEQ ID NO: 51971 - protein, 389 aa, Zea mays
  Clone ID: 700377436_FLI.pep
VARRAKGLGMHVIAHDPYASADRARAIGVELVSMEEAMTTADFISLHMPLTPATNKMLNDEAFAKMKYGVRIINVARGGVIDEDALVRALDSGIVAQAALDVFTKEPPAPDNKLVLHENVTVTPHLGASTVEAQEGVAIEIAEAVIGALKGELAASAVNAPMVPAEVLSELAPFVVLAEKLGHLAVQLVAGGGGIKSVKVTYASARAPDDLDTRLLRAMITKGLIEPISSVFVNLVNADFTAKQRGVRITEERIILDGSPETPIDYIQVQIANVKSKFPSAISETGEITVEGRVKDGVPHLTKVGAFQVDVSLEGSLILCRQVDQPGMIGSVGSVLGEENINVSFMSVGRIAPRKHAVMAIGVDEEPSKVTLRKIGEIPAIEEFVFLKL

SEQ ID NO: 51972 - protein, 592 aa, Zea mays
  Clone ID: 700379641_FLI.pep
SSMAMAMARPCAFLLFFLVLFSYDGSGPGSSRRTRRSGVAQATQRVFLYPQAPKVSSIVSSKYRTAYHFQPPKNWINDPNGPMYYNGIYHQFYQYNPNGSLWGNIVWAHSVSTDLVNWIRLAPAIERTTPSDINGCWTGSATILKSGRPAIIYTGADTEKRQVQNVAFPKNLSDPYLREWVKPHDNPVIQPVGRGLNPGQFRDPTTGWIGPDGLWRIAVGAEVDGHSAALLYESEDFVRWDRVDHPLYSSNASAMWECPDFFAAMPGENSGLDMSAAVPDGAKHVLKMSLDGSDKYMVGVYDLKGDAFVPDTVIEDRRLWSRIDYGNYYASKSFFDSKKGRRVIWGWTNETDSSSDDVAKGWAGIHAIPRTIWLDKDSKQLLQWPVEEIESLRGKQVRHQGLELRKGDLFEIKEIDTLQADVEIDFELTSIGSADPFDPSWLLDIEKQCREAGASAHGPFGLVVLASESMEEHTSVHFRVYYRSQEKHMVLMCADLRKSSLRPELYTPAYGGFFELDLEKEKTVVSLRTLIDRSAVESFGGGGRVCIMARVYPAALVDDGGTRMYAFNNGTSTVRVPRLEAWSMRRAQVNKG

SEQ ID NO: 51973 - protein, 184 aa, Zea mays
  Clone ID: 700451479_FLI.pep
ISDFGMAKIFEDDSDAINTGRVVGTYGYMAPEFALDGVFSVKSDVFSFGVLLLEILSGQRNGALYLEEHQQSLIQDAWKLWSEDRAAEFMDQSLGRSYSKDEAWRCYHVGLLCVQEDPDVRPTMSNVLLMLISDHTKLPEPAMPPLFARLRNISLLAPPLTTKTESTTSPLSINDVSITMIEPR

SEQ ID NO: 51974 - protein, 176 aa, Zea mays
  Clone ID: 700452670_FLI.pep
HVDQVLSLATLAFDGAEIVVKVPSIYWWYRTASHAAELTAGFYNTTNRDGYSPVFRMLKKHSVILKLVCYGPEYTVHEKDDDEAFADPEGLTWQVINAAWDQGLPLCIESALPCRNGEAYSRILDTAKPRDDPDRHHAASFAYRQQQQPPLREACLSELCTFVKCMHGEAPQNGEG

SEQ ID NO: 51975 - protein, 230 aa, Zea mays
  Clone ID: 700456919_FLI.pep
GGIYFGKPRGFGTNDNGDDIGFNTEVYSASEIDRIARVAFEVARKRRGRLCSVDKANVLEASMLWRKRVTALASEFPDIELSHMYVDNAAMQLVRNPKQFDTIVTNNIFGDILSDEASMITGSIGMLPSASVGESGPGLFEPIHGSAPDIAGQDKANPLATILSAAMLLRYGLGEENAANRIEAAVTETLNHGFRTGDIYSPGTTLVGCKRMGEEVLKTVNSLKEVAAVN

SEQ ID NO: 51976 - protein, 285 aa, Zea mays
  Clone ID: 700465124_FLI.pep
RSRARREERLTTAAAATCECDNLRGGVGAGGGDICLPGWGCGGRRERQPAMAASARPGERATSFAVACSLLSRFVRQNGVAAAELGLRIKGEVEQQRTPATTSLLPGAEGEEVERRKETMELFPQSVGFSIKDAAAPPREEQGDKEKPKQLTIFYGGKVLVFDDFPADKAKDLMQLASKGSPVVQNVVLPQPSAAAAVTTDKAVLDPVISLAAAAKKPARTNASDMPIMRKASLHRFLEKRKDRLNAKTPYQTAPSDAAPVKKEPESQPWLGLGPNAVDSSLNLS

SEQ ID NO: 51977 - protein, 365 aa, Zea mays
  Clone ID: 700472751_FLI.pep
GFKKIDPEQWEFANDDFIRGQQHRLKNIHRRKPIFSHSSHTQGSGPLPDTERRDYEEEIERLKCDNAALTSELEKNAQKKLVTEKRMQELEDKLIFLEDRQKNLMAYVRDIVQAPGSFSSFVQQPDHHGKKRRLPVPISLYQDSNAEGNQVVHGGFITNPPACRESFDKTESSLNSLENFLREASEAFNISYGDGLPGPSSAVVITELHSSGESDPHVPSPVSRMHTSSAGAGDSLSSRDLTESTSCAESPRLAQIQPCTDSRTKVSEIDVNREPAVTETGPTRDQPAEEPPHVAAGVNDGFWQQFLTEQPGPDVHQEAQSERRDGDDDKGDQTRIGDRENFWWGKKNVEQMREKLGRLTSVEKT

SEQ ID NO: 51978 - protein, 183 aa, Zea mays
  Clone ID: 700552263_FLI.pep
FNGKLSDFGLAKLLGAGKSHITTRVMGTFGYVAPEYANTGLLNERSDVYSFGVLLLESVTGRDPVDYGRPANEVHLVEWLKMMVGTRRAEEVVDPDMELKPATRALKRALLVALRCVDPDSEKRPTMGQVVRMLEAEDVPSREDRRSRRGHSGNADSESKASSSEFEISSDRRELGPSARFQS

SEQ ID NO: 51979 - protein, 503 aa, Glycine max
  Clone ID: 700558526_FLI.pep
GYIKFFIYEMKYTGEALGRDLENVRKYYGSGKTKEASWRESQLKGLHNFLVEKEEEILRALKHDLGKHYVEAFRDEVGTLMKTLNLASKSLKNWMAGKEAKLPRIALLSSAEIVPEPLGLVLIISSWNFPFGLSLEPLIGAIAAGNSVVLKPSELSPTCSSLLATFLPTYLDNNAIKVIQGGPEVGELLLQQRWDKIFFTGSARVGRIVMSAAAVHLTPVTLELGGKCPAIIDSLSSSWDKEVAVKRILVAKFGACGGQACIAIDYVLVEKSFSSTLVTLMKEWIKKLFGENPKVSNTIARIVNKNHFMRLKNLLTEPRVKESVVYGGSMDENDLFIEPTILLDPPLDSAIMAEEIFGPVLPIITVEKIEESVEFISSRPKALAIYAFTKNQTLQRRLVSETSSGSLVFNDAILQYVADTLPFGGVGECGFGKYHGKFSFDAFSHHKAVARRSYLTDFWFRFPPWTLNKLQLLEVSYNLDYLGILLVLLGLKKSKRSLFQACN

SEQ ID NO: 51980 - protein, 309 aa, Glycine max
  Clone ID: 700559162_FLI.pep
HIKIADFGSVKPMQDSQITVLPNAASDDKACTFVGTAAYVPPEVLNSSPATFGNDLWALGCTLYQMLSGTSPFKDASEWLIFQRIIARELRFPDYFSDEARDLIDRLLDLDPSRRPGAGPDGYAILKSHPFFKGVDWDNLRAQIPPKLAPEPGTQSPASDDVHDSSWSPSHIGDGSAASVRQPDGATSSEGTGHITRLASIDSFDSKWQQFLEPGESVLMISMVKKLQKLTSKKVQLILTNKPKLIYVDPSKLIVKGNIIWSDNPNDLSIQVASPSNFKICTPKKVMSFEDAKQRAWQWKKAIEGLQNR

SEQ ID NO: 51981 - protein, 460 aa, Glycine max
  Clone ID: 700560625_FLI.pep
LNHAHQVNSKGLVGVGKRIVHVESLLQLEAADVRIIGIWGIGGIGKTTIAQEVYNKLCFEYEGCCFLANIREESGRHGIISLKKNLFSTLLGEEYLKIDTPNGLPQYVERRLHRMKVLIILDDVNDSEQLETLARTDWFGPGSRIIVTTRDRQVLANEFANIYEVEPLNFDESLWLFNLNVFKQKHPEIEYYELSKKVVDYAKGIPFVLKLLGHRLHGKEKEIWESQLEGQNVQTKKVHDIIKLSYNDLDQDEKKILMDIACFFYGLRLEVKRIKLLLKDHDYSVASGLERLKDKALISISKENMVSMHDIIKETAWQIAPQESIEDPRSQIRLFDPDDVYQVLKYNKGNEAIRSIVVNLLRMKQLRLNPQVFTKMNKLHFLNFYSVWSSSTFLQDPWGLYLSQGLESLPNELRYLRWTHYPLESLPSKFSAENLVELHLPYSRVKKLWLKVPVNIISLI

SEQ ID NO: 51982 - protein, 104 aa, Glycine max
  Clone ID: 700563075_FLI.pep
AKPQKWEDVAPLKGAFIVNLGDMLERWSNCVFKSTLHRVLGNGQGRYSIAYFLEPSHDCLVECLPTCKSDSNPPKFPPILCHDYLTQRYNDTHADLNVYKKQQA

SEQ ID NO: 51983 - protein, 184 aa, Glycine max
  Clone ID: 700563838_FLI.pep
IKLPWNARIQVALGAARALEYLHENFQPPIVHRNFRSANVLLNDNLEVCISDCGLGPLLSSGSTGQLSGRLLTAYGYSAPEFESGSYTQQSDVFSFGVVMLELLTGRKSYEKSLPRGEQVLVRWAVPQLHDIDALSKMVDPCLKGTYPMKSLSRFADIVSSCIQREPEFRPAMSEIVQDLLRIK

SEQ ID NO: 51984 - protein, 195 aa, Glycine max
  Clone ID: 700563871_FLI.pep
AFLSGTCQTTQSTNDDCMEVKQAKKEDKIVDINTFRNRDISASEKSSKDVISVNKDTDYVIEIKADAVSRSNDDVVSQTDRTTSTRKTWSPPNYGALKIVIADEDEQRDKPTRTVDATPKEKGFRNLFWKLKFEEYPQAMRVVHMFNQRFGRIGICQSQRQFQSPLHLRYGCSVQVTLALMLTIFLIVPFVLYST

SEQ ID NO: 51985 - protein, 168 aa, Glycine max
  Clone ID: 700565229_FLI.pep
KDSDLEEDSNLEDSDLEEDSDLEEDSDLEDYDLEEDSDLEEDSDLEDYDLEEDSDLEDSHFLPTVRVDALSTMSNLKLLKFRYAGYEINYSGTLTKLSNELGYLTWVKYPFECLPPSFEPDKLVELILPKSNIKQLWEDRKVISIIIIIIFLYCFHLNKQIKRQTFLR

SEQ ID NO: 51986 - protein, 562 aa, Glycine max
  Clone ID: 700565345_FLI.pep
QIPNISALVNLKSIFLNENNFSGDFPASVALLHRVKVIVLSQNHISGEIPASLLNLRRLYVLYLQDNALTGRIPGFNQSSLRYLNVSKNRLSGEIPVTSALIRFNESSFWGNPGLCGEQIEEACKNGSGSLPPSISPSYPLKPGGTTSTTMGKSKRTKLIKIIGGSVGGVVFALGCVVLVWVICRKWKRRRRRRRRRKGGAEVAEGEVGAAGSGGGGDNSKEEEGGGFAWESEGIGKLVFCGGGDGDMSYSLEDLLKASAETLGRGIMGSTYKAVMESGFIVTVKRLKDARYPGLEEFSAHIQVLGRLTHPNLVPLRAYFQAKEERLLVYDYFPNGSLFSLIHGSKTSGGGKPLHWTSCLKIAEDLATGMLYIHQNPGLTHGNLKSSNVLLGSDFESCLTDYGLTVFLNPDTMDEPSATSLFYRAPECRNFQRSQTQPADVYSFGVLLLELLTGKTPFQDLVQTYGSDIPRWVRSVREEETESGDDPASGNEASEEKLQALLNIAMACVSLVPENRPTMREVLKMIRDARGEAHVSSNSSDHSPGRWSDTVQSFPREEHQSI

SEQ ID NO: 51987 - protein, 297 aa, Glycine max
  Clone ID: 700565246_FLI.pep
VSDVAAYIKAGFYDIGIGAGLESMTVDRVNRLPNINPKVETFAEARDCLLPMGITSENVAQRYGVTRLEQDQAAVESHKRAAAATAAGKFKEEIIPVSTKFVDPKTGVEKKIIVSVDDGIRPNTNLADLAKLKPAFQKDGTTTAGNASQISDGAAAVLLMKRRVAVQKGLPILGIFRSFAAVGVDPAVMGVGPAVAIPAAVKSAGLELGNIDLFEINEAFASQYVYCLKKLGLDPRKVNVNGGAIALGHPLGVTGARCVATLLNEMKRGGKDCRFGVISMCIGSGMGAAAVFERGDF

SEQ ID NO: 51988 - protein, 143 aa, Glycine max
  Clone ID: 700565384_FLI.pep
ALLIFSSTGKLYELCNGDSLAEVVQQYWDHLGASGTDTKSQELCFEIADIWSGSAFSQMIKRHFGVSELEHLSVSDLMELEKLTHAALSRIRSAKMRLMMESVVNLKKKIEALEKTNDVNNVVTRSIDCDQTDGVTHNLFPGL

SEQ ID NO: 51989 - protein, 409 aa, Glycine max
  Clone ID: 700565636_FLI.pep
SFGAERKMAEEYEEGGEVEEEFSVWKKNTPLLYDFFISHPLQWPSLTVHWLPSSPQPHSHPSFNLHKLLLATHTSEGESNFLMLADASLPVDTSQHIVATDPNNPVLPKVEISQRISVDGEVNRARCMPQNPSIVGAKTCNSEVYVFDFTKERGSACDPDLRLRGHDKEGYGLSWSPFKNGYLLSGSHDHKVCLWDVPGASQEKVLDALHIYEGHENVVEDVSWNLKDENMFGSSGDDCKLIIWDLRTNKAQQSVKPHEKEVNFLSFNPYNEWILATASSDTDVGLFDTRKLAVPLHILSSHTDEVFQVEWDPNHETVLASSGADRRLMVWDLNRVGGEQIEGDGEGGPPELLFSHGGHKGKISDFSWNRNQPWVISSVAEDNSFHVWQWLRAFTMTEMMTTCGRPMIN

SEQ ID NO: 51990 - protein, 68 aa, Zea mays
  Clone ID: LIB143-032-G9_FLI.pep
FINCCTTLGVITLLDDLHTLPHRLSSAPGPRCELWPANLLIVFDQTFFHMGFRGTGRHPCAKLPAAFD

SEQ ID NO: 51991 - protein, 158 aa, Zea mays
  Clone ID: LIB3078-018-F12_FLI.pep
VGGRPRRAGHVPGRPGAVGHAADHPGDRVRGHRLRRAPAHHGEGPREEEVPRRRLRPARLLQGPRQVRGVQAQGDQERPPRHAGLRRLLRPAVGVPRHRPAGEPRLPPRRPVAQQHRRHHHPQINLPLSSAQLLVAVSCVRLGPACTTSDDGDFPPGN

SEQ ID NO: 51992 - protein, 342 aa, Zea mays
  Clone ID: LIB3587-205-E12_FLI.pep
ITKVSCVYLYLHLIRIIYVVYTCAMHLVNTASIAASRPALDGAAVSGPVVGEPIPDHDATIVGRLLHLGQQIVVEVFEVDLNGGRRVVRHAALGRGEPHVKLALGVPRRPLAPLVHDAGHVAVLVRALVGVAVEADVDALEQPRPQRPRHGVVGRERAPRRRRQPYVLRRGVVVHAVEVVETARELVVVVARCAVVVDVEVDAVDRRVTEGAGHVAVAAAEERVPQVVRDGLRGRGGRDGVVVSPAADGEEDRDALGLAVLDVGADAVQRVAGEVEGVAAVAEDAVEGDDDGVVEPGVAGLTQCALLLVPAPEDGELACSLGHGRVGEAGQEEHGGQHEDTP

SEQ ID NO: 51993 - protein, 342 aa, Zea mays
  Clone ID: LIB3594-009-H6_FLI.pep
IEQEASSSNKKPSSIHVSTNGGARRTAEEGVVSGPPASLVGGGPGLPGRPSHGRGEQDRAGDRVLGPEQGRGHAARGLRLGPLHHGDHVLPRRLRPAARRLPPVPPGPVGAPDGRHRGRHQALPVRGRAGDALRRRLRLRLLAPVHAGGAGPVRLPLERLPRRVEARRAPPLRRRVARRRRPVPGARLARRPLRRAGARARQAQHPRRARQAAAPDGHAALRLPARRLPAPRARHGHLRARPRPDPRRRRLRGQVAPRVGRVDGGVPGHQVLRRPHGVGDDARLGAPQERLLRRRAVRAEGGQLRRLHDLGPLLRQTLQLHQHGQGLRLIGFLDSVQSRHAC

SEQ ID NO: 51994 - protein, 307 aa, Zea mays; identical to SEQ ID NO: 47130
  Clone ID: LIB3596-057-G3_FLI.pep

SEQ ID NO: 51995 - protein, 234 aa, Zea mays
  Clone ID: LIB3606-041-H5_FLI.pep
PATQADMQNLGALLAEWRARITEESVAKSLPPQPQPLLLTATLYFSNHLFGTPDGNLDYPVDAIASSLDWANVLTFGFRGDSGVTAADAPLYDTSSHFSASYGVVSWLDAGLPPCRLVMGIPLFGRSWFLRNKAKNGLGAPAAAAGTKQRRSNQTGIIAYAETEEYLSSQGTVVTYDDQSVAEYFCSGDLWVSFDGAQVVQRKLEFAARSQLLGYFLWTVGFDDSNSTISRKGQ

SEQ ID NO: 51996 - protein, 157 aa, Zea mays
  Clone ID: LIB3900-001-B2_FLI.pep
AERVSERRDEERAAGGGGGGGSGVGVRGVGGGGGAEVQCHLQLRRLHHRHREPLHQREAVADHLHAAALRRGTPRASFTWGSPRPRAACRTTRRPPLRSTSNTSTTICCPRCRRRPTMVASWSGIGSPTTGPDTAAPSRAGRLAAMLAVLTKCIAHV

SEQ ID NO: 51997 - protein, 506 aa, Zea mays
  Clone ID: 700218649_FLI.pep
PNAPVPRLRRVGFWQLARTRASMDDGSSNKVVEDVAEEDPGRRGGPWRTDEADANEKAPRPSRRVASLDVFRGLTVALMILVDGAGGEWPVIGHAPWNGCNLADFVMPFFLFIVGMAVPLALKRIPDRGRAVRRVVVRTLKLLFWGILLQGGYSHAPDELAYGVDMRHVRWGGILQRIALAYLVVAVLEMVTKDGAKVHQDQPPGSSGRFSRVFRMYLSQWIVACCILVVYLSLAYGVYVPDWEFRVRNADSPDYGKVLTVRCGTRGALDPPCNAVGYIDRRVLGINHMYQKPAWRRHRACTDDSPHEGPFREDAPAWCVAPFEPEGILSSLSAVLSTVVGVHYGHVLVHMKSHTDRLRQWVTMGVALLVLGIILHFSHAIPLNKQLYTFSYICVTAGAAGVVFSALYFLVDVVSLRYAFAPLRWVGMNAMLVYVMAAEGVFEGFLNGWYYESTNNTLVYWVRKHVFVKVWHSTRVGILLYVLFAQILFWALVSGVLHRARLYWKL

SEQ ID NO: 51998 - protein, 86 aa, Zea mays
  Clone ID: 700623741_FLI.pep
SPEDVNIKQHPLLSGSLTRLINTHIRKASMDALKHASLEQKLTRGSARRRRPAHAYCKSCGFAEWPQATVRRLHRTLWHCLRRPQQ

SEQ ID NO: 51999 - protein, 152 aa, Zea mays
  Clone ID: 701165201_FLI.pep
ATALGGEPNPTADAMEVDPPRASADEKHVATIIAGGSDAVTGHIISTTIGGKNGEPKRTISYMAERVVGTGSFGVVFQAKCIETGETVAIKKVLQDKRYKNRELQIMRSIDHCNVISLKHCFFSTTSRDELFLNLVMEFVPESLYRVLKQTP

SEQ ID NO: 52000 - protein, 276 aa, Zea mays
  Clone ID: LIB3245-301-B3_FLI.pep
ASACRALRAAVTAVTARRAGDAARGLEPLPIPFRNYVDSKPYAYFLYTPFSLTRLAPGASAPSAQPWGAAWTRPPRPTWPRPNLDGLPSAVYGCACAAAECGGTQCACADVEADAAGSGLEAGMGSLTECGDVCACAPSCGNRRTQRGVAVRLCVVRHLHKGWGLHAAEALSCGQFVCEYAGEFLTTEEARRRHKVYDELASGGKLCPALIVIREHLPSGKACLRVNIDATRVGNVARFINHSCDGGNLHPVLVRSSGLLLPRLCFFAARDIVEGE

SEQ ID NO: 52001 - protein, 311 aa, Zea mays
  Clone ID: LIB3594-042-F1_FLI.pep
PRRVIVSHRLPLRASPDPAAPFGFAFSVDAGTVAYQLRSGLPANAPVLHIGTLPAVAAEAASDELSDYLLANFSCLPVYLPTDLHHRFYHGFCKHYLWPLLHYLLPLTPSSLGGLPFQRTLYHSFLSANRAFADRLTEVLCPDEDLVWIHDYHLLALPTFLRKRFPRAKVGFFLHSPFPSSEIFRTIPVRDDLVRALLNADLVGFHTFDYARHFLTACSRLLGLDYQSKRGYIGIEYYGRTVTVKILPVGIDMGQLRSVVSAPETEDAVRRVTEAYKGRRLMVGVDDVDLFKGIGLKFLAMEQLLVEHREL

SEQ ID NO: 52002 - protein, 355 aa, Zea mays
  Clone ID: 700071665_FLI.pep
TRNSTHADNGSNKKQAASLKLCIVHELSCLCLLAAVRLAEQLLDGLEPGVLVAELGALVVVEVVPEPVGTGVRRGAGVLIPAGRRRDHGVGARVVERGHGQAAALVPGRDAVQDAPVGAGAEDLDLVPDVDEEPAPLGGADGDPVGAGPEELEAAHDVVLEEQDDAAGVGVRAQAPHQLRARAGRVHGELGAHERRREGGGDVGPGEAQVEAHALGQTLREGHHLRDVRVQRLSCRRRDLWEVGDVGLGVVLDEVGGLPVHLVGGLLISVTSGGGLEVHGEGGGVELGLQVLLVVAVDEALDLVHQRRVHAVVLHPEEAPVLAGVVELRQGPRPLLAAAVEAAEIDHRNLHRARH

SEQ ID NO: 52003 - protein, 498 aa, Glycine max
  Clone ID: 700653702_FLI.pep
SLSASLFRLKSPKKVLTSMMKMKLVKTLLLLLCVKLFCYAVIGAPQTCPANNEDKCGDSDEWKGEFFPDIPKIKYEGPSSKNVLSFKWYNAEEEILGKKMKDWLRFSVAFWHTFRGTGADPFGAPTKYWLWEDGTNSLNMAKRRMRANFEFISKLGVDFWCFHDRDIAPDGKTLEESNANLDEVVALAQELQTKAKKRVLWGTAQLFMHPRYMHGAATSSELKVYAYAAAQVKKAIEVTHYLGGENYVFWGGREGYQSLLNTDMERELNHLARFFEAAVAYKKKIGFNGTFLIEPKPQEPTKHQYDWDAATSANFLRKYGLTGEFKLNIECNHATLSGHSCHHELETARINGLLGNIDANTGDPQVGWDTDQFLVDIQEATLIMLSVIRNGGLAPGGFNFDAKLRRESTDVEDLFIAHIVGMDTLARGLRNAAKLIEDGSLAELVRKRYQSFDTEIGAQIEAGKADFELLEKKVKEWGEPKVASAKQELAEMILQSVL

SEQ ID NO: 52004 - protein, 243 aa, Zea mays
  Clone ID: 700465407_FLI.pep
ETTRSWALCSRTETWHHTLLSTTRAWVCVPTFSTRSFLPSISSLFIASQETRAKQRLRSSSAAAMSLAPSIPSIKVKVGAVSVAPPHRACRSFAVIRSSKAEGPIRRPAAPPLSPPPPMPPKTPALSTPPTLSQPPTPVKPAAPPTSSQPMPPSPEPKPVDATAQMRKPVAGAMTLEYQRKVAKDLQEYFKKKKLEEADQGPFFGFLPKNEISNGRYVCPPSHEPNTSKFQASANRDTSMSRL

SEQ ID NO: 52005 - protein, 272 aa, Zea mays
  Clone ID: 700241387_FLI.pep
HCDLVRDERWSAMRNTIISLYQPSHLAGLVPTMQHCIERAADAIPAMVVQENGQVDFSDLSLKLATDIIGQAAFGVDFGLTASGPGPGCEAAEFIREHVHSTTSLKMDLSAPLSVVLGLVAPALQGPVRHLLSRVPGTADWRVARTNARLRARVDEIVVSRTRGRGQHGERRKDFLSAVLDARDRSAALRELLTPDYVSALTYEHLLAGSATTAFTLSSAVYLVAGHPEVEAKLLAEVDAFGPRGAVPTTDDLQHRFPYLDQASDTTMQRHV

SEQ ID NO: 52006 - protein, 463 aa, Zea mays; identical to SEQ ID NO: 37853
  Clone ID: LIB3137-017-C1_FLI.pep

SEQ ID NO: 52007 - protein, 675 aa, Zea mays
  Clone ID: LIB3180-002-A5_FLI.pep
LPNTLCIRSTRSSSMCIEAPLALLADLDAYFFILGRKKDDPLSSLLSCPKLFLADEDLVLVGLVLAAVLLAAPSHPFGNGCHRIEEVGALPDYGVARGTKDTVHLKEHVLHLAPVRLCCEQAIKMQQVIGAWICRERLTPVVVDADEPSVVDDAEGVWAVGGDDVHDPDGVLDEAGCESSVHGVHVHDVPDLVAPQRRQQRLVVLGPELPPGVVLLEGGGAAARDDADALRRDAEPLGPLGRGVEPQLPVLGAGSRDAGAHGHVPGGVGVDAVVALGGRGDRGELVVAGVGGLLPHGDVPLHAVELEAHAGQHLLEPVQVGLLRLRGGVPAVPAVLVVDGRAGEHPEAARAEDAVDLQEVEAAELGPGDEAARAVRHVEGGGRERQALRGDDAEDGRDAALQRELHLGLVVVPGRQRHGEDAPPQQVAAPAGDAAAGVERGADGAVAHARDQALHQVHVRADAVGEHGAAAGEPEAVALLDEPVLVGLLAVDPVVGDVPVPALVLALGPPDGRLVPLGRRHQALLPVGRRRAVPLHEAQAVVAVPPPALGVGAGGVVLVIGGALGERHGGRGRQCRPSLAVVGGTAGRRGGAEGEESRRRRLDGVQQAPSRAVDAAQVEGEGAEHDDDERHRHRPGPCAGAARPLGLIFLAVLHGAAHATLFSPSSSAAARMGMG

SEQ ID NO: 52008 - protein, 146 aa, Zea mays
  Clone ID: 700051091_FLI.pep
LETNPHVQSYKKIKLGCGCSCVASSCWTEEREGRSSWRADFYSGGLLFSMGLLGYIFSRSTISLVLGITPGLATLLLGTLSLKFWRSDRSSFLLILAQAEVMLMCKHLHLEFCLARMNQVYFPILLHLRQIEQGFVWLPNGLLVLK

SEQ ID NO: 52009 - protein, 321 aa, Zea mays
  Clone ID: 700094439_FLI.pep
EMSLQIPVRSGALRRLLLLGGAEGLLRTYSTGDRRRRVIREARQEEEDEAFLRTLNFGADPENNPLPPPPRHGRGLSDASAGKQQQQPERSAQKVVGETLLEKLKLGDGPSAAAAIGGGDEPRQSEDEPAPAQPVDVDEIFRKMKETGLIPNAVAMLDGLCKNGLVQDAMKLFGLMREKGAIPEVVIYTAVVEAFCKVAKLDDAVRIFRKMQGNGVIPNAFSYWLLIQGLYKGGRLDDAVGFCVEMFEAGLAPNAETFVGLLDAVCKTKGVDEGENLVRSFQDRNFAIDEKSIRDHLDKKGPFSPVVWEVIFGKRKSDRPF

SEQ ID NO: 52010 - protein, 598 aa, Zea mays
  Clone ID: 700089712_FLI.pep
LQEWREQAGLPLGSWWLHLLLLFAARGLTYQFWFSYGNMLFFTRRRRVVADGVDFRQIDAEWDWDNFLVLQTLIGATVVNSPLLPGLRQLCLWDPRGWAVALLLHVGFSEPVFYLAHRALHRAPLFARYHAAHHSSGVTQPLTAGFGTPLEVLLLTLVMGAPLAGAFLVGAGSIGLVYVHALAFDYLRAMGYSNVEVVSPRVFEAFPLLRYILYTPSYLSLHHRERCRNFCLFMPALDLAGGTLDERAWALQRAAYDGGPGGGALGTPEFVFLAHVVDMMSSMHVPFALRSLSSTPFANHFILLPFWPVAFGFMLLMWCCSKTFVVSFYYLRGHLHQTWSVPRYGFQYFLPAAKKGINQQIELAILRADRMGVKVLSLAALNKNEALNGGGTLFVNKHPDLRVRVVHGNTLTAAVILNEIPSNVREVFLTGATSKLGRAIALYLCRKKIRVLMFTVSSERFVKIQREAPPEYQQYLVQVTKYQAAQNCKTWIVGKWLSPREQRWAPSGTHFHQFVVPPIIGFRRDCTYGKLAAMRLPKDVQGLSSCEYTMERGVVHACHAGGVVHFLEGWGHHEVGAIDVDRIDVVWKAALKHGLAPV

SEQ ID NO: 52011 - protein, 478 aa, Zea mays
  Clone ID: 700166352_FLI.pep
RVSIGVEAVRDPPVLILDEPTSGLDSASALHIVGALRAMAEARGRTVLLSIHQPGARIVKMFDSVLLLAAGSVLHHGTVDQLRALLGDAGLHLPPHVDDVEFAIDSVDALRRHASSSLQAPSSGDREGRCTLQRLFQLHGKQVADAPVAVTMMASRYANSRAREVAVLSQRFFKNVARTRQLFACRTVCMLVAGLALGSIFYDLGQDKVAERVGLFAFLLTFLLSSTTEALPIFLQERDILARETASGAYRVSSYAVANAVVFLPFQLALAVVFAAPVYWLAGLRRTAAAFGYFLLVIWLILYTANSVVVCFAAAAPDFVVGNAAIQGVMGSFFLFSGYFIARSAMPGCWVFMHYLSLFKWPFEALLVNEFAGGGRCVVRALGECVATGDEVLRREGLGEECRWRNVGVMVAFMAAYRVLGYAVLRVRCSLALNKKGAVAAGPPGLGLSRRLRRQLAIIGTAAWPSPSSSSTPSLPVN

SEQ ID NO: 52012 - protein, 713 aa, Zea mays
  Clone ID: 700219253_FLI.pep
TGPSSAPRVIVLVGLSSSANVGSLAKDLLAFAEGDDRKLKLSTIASPTYKLRTTVLQAPYGDLTTCMELAKVADLLAFVLPANSFYSGDLNSPIDEFGSQCLSVFRAMGLPSTAVFIRDLPADNKSRQELKKAATSFLSAELPEDCKFYLADTKDDLHKFMWLFKEQHLSSPHWRNQRSYVMSEQVCINPDENTGLCTLLVSGYLRAHNLSVNQLVHVSGAGDFQLGQIDVLKDPCPLSERKSSDVMETEDNGIQIVNTFVPDPSSQEPLLVENVPDPLAGEQTWPTEEDMEEVDINNKQRKLEKRKLPQGTSEYQAAWIVEDTDDEDNDSDDDNQTESGMVIDEQGHSDQGSDGSDIDAVSHFTEKFDGETIGDTEMADEENLTKDQIEAEIKKIKEANADDEEFPDEVETPLDVPAKKRFAKYRGLKSFRTSSWYPKESLPLDYARIFAFDNFTRTQKHVFAKIAELDGGMKNCAQVGSYVRLYVKNVPTDIASKLCHPSRRIPVVVSGLLQHESKMSVLHFSIKKHDSYEAPIKSKEPLIFNVGFRQFTARPLFSSDNINCNKHKMERFLHHGRFSVASVYAPISFPPLPLIVLKNRDGEQPAIAAVGSLKSVDPDRIILKKIVLTGYPQRVSKLKSIVRYMFHNPDDVKWFKPVELWTKHGRRGRIKETVGTHGAMKCLFNSSIQQHDTVCMSLYKRAYPKWPEQLYHV

SEQ ID NO: 52013 - protein, 404 aa, Zea mays
  Clone ID: 700207394_FLI.pep
GLFDAMKEAGMQPNQYTYNVLMSGHCQRDDVNSAVVLYQELLKSGLNPNAVIFTTLIDGFCKAKRFSEAKGMFLEMPRFGVAPTVPVYNSLMDGAFRSGNAQEALALYQEMTRLGLCPDEFTCSIVVRGLCDGGQMHVADRFLQGVQEDGVNLNAAAYNALIDEYCRIGNLEEALATCTRMTEVGIEPNVVSYSSLIDGHSKRGKMQIAMAIYTEMVAKGIEPNVVTYTALIHGHAKNGGIDAAFRLHKEMIENGISPNAITVSVLVDGLCRENRVQEAVRFVMEYSGLKCSDIHSVFSNFTIEEECLIPNSVIYMTLIYGLYLDGQHCEAGKLFSYMRKSGMIPDSFTYTLLIRGQCMLGYVLNAMMLYADMMKIGVKPTRYKIECPEIWSWAPLNDLQTVVS

SEQ ID NO: 52014 - protein, 576 aa, Glycine max
  Clone ID: 700807673_FLI.pep
IYLYCVLLILEQDFNSYTPKTHTIFISKGLKVIVFYKKIEVWGGIYISMGLSLSLLSSAWEEIVRHSLFGLSLNFTFGSKDGAMILRSGSFKIRESETTSKGASTTNFSSKLTDCRPEHMVLEPNLSCIKDMEIMESKSSEQQLQHQPVPVLSLPKEVVFSSPRPVSELDAAATKLQKVYKSYRTRRNLADCAVVVEELWWKALDFASLKRSSVSFFDVEKHETAVSRWTRAKTRAAKVGKGLSKDDKAQKLALQHWLEAIDPRHRYGHNLHMYYDTWFESQSTQPFFYWLDVGDGKEINLEKCPRTTLQRQCIKYLGPKEREEYEVIVEKGKLVYKQDGRFVDTNGNSKWIFVLSTTRSLYVGRKQKGAFQHSSFLAGAATTAAGRLVAQQGVLEAIWPYSGHYHPTEENFKEFISFLDEHKVDLSNVKKCAVDDDAPSIVGSNSFIDINESQQINEGPTVSSSNNVNNNGITINATFNKEIEKKVVATVFDVPKRLTCKWSTGAGPRIGCVRDYPGHLQIRALEHVNLSPRPASARPYSYGPIPSPRPSPKVRMSPRLAYMGLPSPRTSIPATS

SEQ ID NO: 52015 - protein, 253 aa, Zea mays
  Clone ID: 700167407_FLI.pep
ERICNAGRFSEDEARFFFQQLISGVSYCHSMQICHRDLKLENTLLDDSIAPRLKICDFGYSKSSVLHSQPKSTVGTPAYIAPEVLARKEYDGKVADVWSCGVTLYVMLVGAYPFEDPDEPKNFRKTLTRIISVQYAVPDFVRVSMECRHLLSRIFVAKPEQRITIPEIKNHPWFLKNLPIEMTDEYQMNLQLVDMNVPSQSLEEIMSIILEARKPGDGLKHAGQLPGLGSMELDDIDVDDIDVEDSGDFVCAL

SEQ ID NO: 52016 - protein, 332 aa, Zea mays
  Clone ID: LIB3150-038-B8_FLI.pep
HHKIHRFEQGDVVAMPAGAQHWLYNDGDAPLVAVYVFDENNNINQLEPSMRKFLLAGGFSKGQPHFAENIFKGIDARFLSEALGVSMHVAEKLQSRRDQRGEIVRVEPEHGFHQLNPSPSSSSFSFPSSQVQYQTCQRDVDRHNVCAMEVRHSVERLDQADVYSPGAGRITRLTSHKFPVLNLVQMSAVRVDLYQDAIMSPFWNFNAHSAMYGIRGSARVQVASDNGTTVFDDVLRAGQLLIVPQGYLVATKAQGEGFQYIAFETNPDTMVSHVAGKNSVLSDLPAAVIASSYAISMEEAAELKNGRKHELAVLTPAGSGSYQQGQAGSAQQ

SEQ ID NO: 52017 - protein, 566 aa, Zea mays
  Clone ID: 700072524_FLI.pep
KDTTSFETTSGVYPSPDDADIEDSVAGETNEAISRGPNKLKHVWNLQKGKRIVVNCNELGQPIGEEAGVLGKFLGMVARNGCLCSLSFKDWRLLIGKKDRNNEQKNKQDVLKQVKMRFLYPARMEKWILRTIGERWRQHKSNLKSLHFDAHRSKENNLKNVPEGVLDDQWVALVNNWFTTKSQDISEANRINCAKRKATHTSGTKSFARNREDMREQDPEKKYPHRAVLYINTHKSNITKNRNPHVVALKELLVQQPSLADTSHGKVAWKGDALSQILGEEKPGHIHGLGLVPNPDQVFGGSTSRHLKHLNLTSLDATSSEDVVSLRLQVEKLIDRVQKQDDTILNLQNTLELQKSHHECLDEPLSASKDLQPTMNQKVNLLDELNSTMADEIEHDGYEELQAQCKKSKIQEKGKPPMPRGGLQGGRVSTSLNVKNRSNAAKVMNQDTARNSSNHEPYKSKGSLENYLPSTKDDQSTSKRKVGSHIFLMSWRNQNKKVALGTIIGCDPKQQVGGDPLGKEFWKVRLGLVLVRDEPLIRPYNNFVVLGDINNDPIAWPSSCIEKAAL

SEQ ID NO: 52018 - protein, 621 aa, Zea mays
  Clone ID: 700100605_FLI.pep
FVQLGAKEQRDPTSWICDTGATNHMTGSRAAFADLDTTVSGSVRFGDDSMAEIEGRGTVLFKCKNGEHRSFTAVYYIPRLTANIVSLGQLEEADYDVHIRHGGMEIREPEGRLLARIPRAGNRLYVLNVDVARPVCLAARGEESAWRWHARLGHINMLALRKMAREELVRGLPSIEQVDQLCEACLAGKQRQTAFPDQTQWRADRALELVHGDLCGPVTSATPSGNTYFLLLVDDRSRFMWLTLLRSKDRAAAAIKEFQARAEAESGCKLLALRTDRGGEFTSKEFMEYCAADGVHRQLTAPYSPQQNGVVERRNAMVAGTACCLLKAKGLPAWFWGEAVNTAVYLLNRVPTKAVEGKTPFEAWYGKKPAVHHLKTFGCIVYVKNTTPHLKKMEDRGRKMISVGYERGSKAYRAYDPATKRVHVTRDVVFDESAQWDWSEGAKAGTGADHGGDDTFTIQFGVVEGQGGLQAGAPVAAMQHMTPPGTPGEAGVASPGVQFATPPAALDEDLDADHDDKAPLRFRTVEDVTGAASPPGYAVRVLYNEQLFAVSAEEPGSLAHAGQDPCWRRAMEEELRAIEDNHTWTLTELPSGQRAIGLKWVFKVKKDEHGAVVRHKARLVA

SEQ ID NO: 52019 - protein, 799 aa, Zea mays
  Clone ID: 700100757_FLI.pep
SFPVTPGRMFVRLYFYPTIYGGNHAPADAYFGVTAANLTLLQSFNASQTSLSLGVAFFVREYSVNVTEGSLDLTFSPSTHHNGSYAFINGIEIVPTPDLFTTPTPTLSNGGNPDPFPILAGTGFETMYRLNVGGQAISPGGDTGFYRSWVNDVPYIYAAGFGVAFGKDDNLTISYTPTVPNYTAPVDVYATARSMGPNAQINLNYNLTWILPVDAGFYYLLRFHFCEIQYPITKVNQRSFFIYINNQTAQQEMDVIAFSGGIGRTVYTDYVTVTAGSGQTYLWVALHPDLTTRPEYFDAILNGLEVFKLQNYGNNSLNGLNPPLPSVQPNNNGNGEPSVRRKGAAPAPAAIAGAVGGFAVLLIAAFGACIVCRRKEVANKESRKPDDGHWTPLTDYSKSRSNTSGKTATTGSRTSTLPSNLCRHFSFGEIQAATKNFDQASLLGKGGFGNVYLGEIDSGTMVAIKRGNPTSEQGVHEFQTEIEMLSKLRHRHLVSLIGYCDDMNELILVYDYMANGTLREHLYNTKRAALSWKKRLEICIGAARGLHYLHTGAKHTIIHRDVKTTNILLDDKLVAKVSDFGLSKTGPNNVDNTHVSTVVKGSFGYLDPEYFRRQQLTEKSDVYSFGVVLLEVLCARPALSPSLPKEQVSLADWALHCQRKGVLGQIIDPHLQGQVSPQCFLKFAETAEKCVADRSVDRPSMADVLWNLEFALQLQGSAEDSGSVVVVTDGTTSSSSNRSSPLIVSGLHSDEPPTDSTTTTTTTSSTTTLTMMGRSLASVESDELTPSSVFSQLMHPGGR

SEQ ID NO: 52020 - protein, 524 aa, Zea mays
  Clone ID: 700102205_FLI.pep
VDDMDIFKGISLKLLAMEELLRQHPEWRGKLVLVQVANPARGRGKDVAEVQTETYAMVRRINEVYGEPGYEPVVLIDEPLQFYERVAYYVIAEVCLVTAVRDGMNLIPYEYIVSRQGNEKLDRMLRQGKPEEKKSMLVVSEFIGCSPSLSGAIRVNPWNIEAVADAMETALVLPENEKRLRHDKHFRYVSTHDVGYWANSFLLDLERTCKYHSQKRCWGIGFGLRFRVVSLDLTFRKLSLENILMAYRRAKTRAILLDYDGTLMPQAINKSPSTESVRILNSLCRDKDNVVYLCSGYDRRTLHEWFPCENLGIAAEHGYFLRCKRDAEWKTCVAATDCSWKQIAEPVMCLYRETTDGSTIEDRETVLVWNYEDADPDFGSCQAKELVDHLESVLANEPVSVKTTPHSVEVKPQGVSKGLVARRMLVSMKERGQCPDFVLCIGDDKSDEDMFQLIATAACGDSLASKAEVFACTVGRKPSKAKYYLDDAAEVVRLMQGLSYVSEELALANQRDEDEDSSLDDVWE

SEQ ID NO: 52021 - protein, 91 aa, Zea mays
  Clone ID: 700102381_FLI.pep
GWLHENIPPLLTRQLMFDLPIIVRFYTLNAGCLPHHHRAFAYGPVAGNNVSPRCRLAWSGINLLMSSGEAFASSCLKLNSGGNGRPFGNLH

SEQ ID NO: 52022 - protein, 543 aa, Zea mays
  Clone ID: 700084152_FLI.pep
GSLMGFICVSSDSRQLEQIFCKPPTSARSQSESSMTSCDGSCSNTSHRINSLNRSSFDSNLPLQSTLASKITNLATKVTNKVRSRVRTDENGDGGSGESHCLDRGAKEEPTSSGTSTPRGDAPHGPFATEENSPGKSTNPNSDESEGKVGLHKILGSKAEALLNKKGISWPWKGRENEGPDERNHVILPWLHGGQENGVNHQKVSDSSISPDAQGAEHNQPSKNEASGSWSSFNNNSTGSASSTGSTNSSALYKVDHEADCLDYEILWEDLVIGEQIGQGSCGTVYHALWYGSDVAVKVFSKQEYSEEVILTFRQEVSLMKKLRHPNILLFMGAVMSPQRLCIVSEFLPRGSLFRLLQRSATKLDVRRRVHMALDIVRGMNYLHHSSPPIIHRDLKSSNLLVDKNWIVKVADFGLSRLKRETFLTTKTGKGTPQWMAPEVLRNEPSDEKSDVYSYGVILWELVTQKIPWENLNSMQVIGAVGFMNQRLDIPSEVDPQWKSIILSCWESDPQQRPSFQELLERLRELQRHYAIQHRNTKNSIEE

SEQ ID NO: 52023 - protein, 180 aa, Zea mays; identical to SEQ ID NO: 37897
  Clone ID: 700084405_FLI.pep

SEQ ID NO: 52024 - protein, 415 aa, Zea mays
  Clone ID: 700089312_FLI.pep
APEETPCDRSQSQRNRTEARPPAASEMDGGAGEEGKQERHLVLAHKLFLLSHPSVDDLSKVALRAEVLDTVKSDDMATLFESLVAGGVLEGDAALLAEMRGRIDEEIRKLDEKIADAEENLGESEVREAHLAKSLYFIRVGEKEKALEQLKVTEGKTVAVGQKMDLVFHTLQIGFFYMDFDLISKSIDKAKNLFEEGGDWERKNRLKVYEGLYCMATRNFKKAASLFLDSISTFTTYEIFPYDTFIFYTVLTSVITLDRVSLKQKVVDAPEILAVIGKVPHLSEFLNSLYNCQYKSFFVAFSGLTEQIKLDRYLQPHFRYYMREVRTVVYSQFLESYKSVTMEAMATAFGVTVDFIDQELSRFIAAGKLHCKIDKVAGVLETNRPDERNAFYQATIKQGDFLLNRIQKLSRVIDL

SEQ ID NO: 52025 - protein, 405 aa, Zea mays
  Clone ID: 700074190_FLI.pep
GLMGSGIATAMVLSNYPVLLKEVNEKFLTAGINRIQANLQSRVRKGKMTDERYEKAMSLVTGVLDYERFKDVDLVIEAVIENVKLKQQIFSDLEKYCPSHCILATNTSTIDLNLIGEKTKAQDRIAGAHFFSPAHVMPLLEIVRTQHTSPQVVVDLLDVGKKIKKTPIVVGNCTGFAVNRMFFPYTQSALFYVDLGMDVYKIDRACTKFGMPMGPFRLADLVGFGVAVATGMQYLENFPERVYKSMLLPLMMEDNRAGEATQKGFYKYEGKRKATPDPEIMKYIEKSRSMAGVTPDPELMKLSEKDIVEMVFFPVINEACRVLDEGIAVKASDLDIASIFGMGFPPYRGGVMHWADSIGAKYIHGKLEEWTKRYGGFFKPCSYLAERAAKGIPLSAPTKKVQARL

SEQ ID NO: 52026 - protein, 282 aa, Zea mays
  Clone ID: 700151630_FLI.pep
QELNHHGFVIKALPLASTRAMEHLFDQVIIVIREGLRSGSCKLSFMLLLHGHINLHFRWLQSNGFDKVKVLIPCQLPCEVKEGLLKVVIALGRNLIVLQVLLPVECNLLGFDLPVLYINLVSAENDGDVLTHPAQVPVPCWNILVCQPRSDIKHNDGTLTMNVVAIPEATELFLPSSVPAIEANFATVSAKIQRVNFNTNGGLIFLLKLASKMPLHKCGFASSTVANDDELEAGVIHNLLIRQRHFCGGARRTETAAAAKSLKCITREKRSRGRLASGLWTL

SEQ ID NO: 52027 - protein, 641 aa, Zea mays
  Clone ID: 700101131_FLI.pep
GSSAAIVPAPVPPAEGERRRKERVEEIGREDAWFKQSSAEVSVAPGGRWNRFKTYSTIQRTLEIWGFVFTFIFKAWLNNQKFTYRGGMTEEKKIMRRKVLAKWLKESLLRLGPTFIKIGQQFSTRVDILPQEYVDQLSELQDQVPPFPSETAVKIVEEELGASVNEIFDRFDFEPIAAASLGQVHRARLNGQEVVIKVQRPGLKELFDIDLKNLRVIAEYLQKVDPKSDGAKRDWVAIYDECASVLYQEIDYMKEAFNAEKFAENFKKLDYVKVPEIYWAHTTPQVLTMEYVPGIKINRIKQLDKLGVDRKRLGRYAVESYLEQILSHGFFHADPHPGNIAVDDVNGGRLIFYDFGMMGSISQNIREGLLEVFYGVYEKDPDKVLQAMVQMGVLVPTGDMTAVRRTAQFFLNSFQERLAAQRKEREMATAELGFKKQLTKEEKFEKRKQRLAAIGEDLLAIAADQPFRFPATFTFVVRAFSVLDGIGKGLDPRFDITEIAKPYAKELLRFNDAGVEIVVKDAKKRWERQSRAFYNLFRQPDRVEKLAQIIERLEQGELKLRVRTLESERAFQRVAAVQKTIGYGVAAGSLMNLATMLYFNSIRGPATIAYSLCAFFGLQVLIGLVKVKKLDRQERLITGTA

SEQ ID NO: 52028 - protein, 225 aa, Zea mays
  Clone ID: 700082281_FLI.pep
YHAEGGGIRRLAMARWRPAALLVVALAAVLSAAWRADALSVTVTDTECIHEFVPYEGDTVSGNFVVVDHDIFWSSDHPGIDLTVTSPGGNTVYTLKGKSGEKFEFKAPRGGMYKFCFHNPYGAPETVSFYIHVGHIPNEHNLAKDEHLDPINVKIAELKEALESITAEQKYLKAREARHRHTNESTRKRVMFYTMAEYLAFMAASALQVLYIRRLFSKNVGYNRV

SEQ ID NO: 52029 - protein, 238 aa, Zea mays; identical to SEQ ID NO: 48306
  Clone ID: 700083123_FLI.pep

SEQ ID NO: 52030 - protein, 328 aa, Zea mays
  Clone ID: 700153786_FLI.pep
HRAIEECISTLHRICMYSSNPSMSVITNESYLVHELLEGVHRGGWQAEQHVDALPLLPVRQEQDDFLLRQRDRARHDGLAPPEVGAVELEARPGGDEQRGRERRPGPRRLEVVHRRAHVVVGDHPHGVLHQPRRARHGRGQQLAGRGKGVGEHDAVAEVAPRERRREPAAPVHGEQQLGALLGRQPQRPGARAPHQPRQRLEGGAAAQGGVGERKPAHALQPVRVEAEGAVQQLLRAVERRRVGDVGDLGELVVGEGGHGRVARLQDAAVQERRHGELGDAARRLRPRVDELHGADAVEHAVVHGQAEREAPTLEPRHLPHQLTRGPW

SEQ ID NO: 52031 - protein, 476 aa, Zea mays
  Clone ID: 700164115_FLI.pep
DDRMDRDEKGNVATDIWVPPSQPPPAAAARSNDDDGYECTKSSNPTSPEYAGGMGGGGGGSGTSLASAPSRYLATSRMVGRVAGAGCEHHSPTFTAAAASAKSYAPASRASTVHHLLHLPRRVPLPRPLGQHQLLGRRAGLYGMPPGHHLQHQGTEREHVGSRRGLPRPRQLGSQVPQGAHHARRARVGPALVELGETEVAEPRRHVGVEEHVAGLDVAVEDDALPSLVQVQQRRRDVAEDAVADRPGQARRFEVVAEEVAVQAAVGHVVVDEEEVAAAAAPALELDQVAVAEPADRRDLRHELAEALPGLVVHALHGHGLAGFPEHAAVHLAETAGSEHLALAEPARRAAEFGVLEPMRAVVQLPRLDDVAVLVPVRTVRAGAGEHDERHERRERDGEDERGPVLGALELGQRRQGREIQRRRGAGAEAKAPTPEVVRAREDSRGRREADVHLLAEDPREVDAEGDERRGGLPQR

SEQ ID NO: 52032 - protein, 163 aa, Zea mays; identical to SEQ ID NO: 41910
  Clone ID: 700151880_FLI.pep

SEQ ID NO: 52033 - protein, 169 aa, Zea mays
  Clone ID: 700099123_FLI.pep
RVRQRSVADSTVVAAACLVACSSGVICCTPALVPTPGSRWRSRACSLSLRCTRSHPSGFAHARVCRRAVEPVLPCSTSSLPFWWPLSLWCWTTFHHLVALAIDFVGPFHVKPASSAIVTQLLAPRVLVNFLGRVCRADQRFSSPLSPSPTQPCCSLVVVHSYFPPPYAS

SEQ ID NO: 52034 - protein, 191 aa, Zea mays
  Clone ID: 700099261_FLI.pep
TPTTTIYLQHRIHHRLPPSEVLHDLRLPAPPQDNVPAAGPEFPEPPPQRPFLGALGTRLGGRAAMVVVQQRGLRRAGPDAVHDPLDHAVHLAHLGAGLGQPDHAPVRDARQLRRGLEVVVPLQPRVDDDGEPLHVRDVWLHPVQKLLLALWTVLVDGAAACDELVQDDSVAPYVALRREVSSLHVFWSCVA

SEQ ID NO: 52035 - protein, 619 aa, Zea mays
  Clone ID: 700103723_FLI.pep
SFAGQGVVYETLHLSALPNYTTGGTIHIVVNNQVAFTTDPRAGRSSQYCTDVAKALNAPIFHVNGDDLEAVVCVCELAAEWRQTFHSDVVVDLICYRRFGHNEIDEPSFTQPKMYQVIKNHPSSLKLYEQKLLGTGEVMKEDVQRIHDKVNRILNEEFAKSKDYVPNKRDWLSAYWTGFKSPEQISRVRNTGVKPEILKRVGQAITTLPENFKPHRAVKKIFELRAAMIESGQGIDWAVAEALAFATLIVEGNHVRLSGQDVERGTFSHRHAVLHDQETGAKYCPLDHVAMNQNEELFTVSNSSLSEFAVLGFELGYSMENPNSLVLWEAQFGDFANGAQVMFDQFLSSGEAKWLRQTGLVVLLPHGYDGQGPEHSSARLERFLQMSDDNPFVIPEMEPTLRKQIQECNWQVVNVTTPANYFHLLRRQIHREFRKPLIVTAPKNLLRHKDCKSNLSEFDDVEGHLGFDKQGTRFKRLIKDRNDHKQVEEGVNRLILCSGKVYYELDEERKKSERGDVAICRVEQLCPFPYDLIQRELKRYPNAEIVWCQEEPMNMGAYSYISPRLFTAMKALGRGSFEDIKYVGRAPSAATATGFLSVHAQEQSELVKKALQAEPIKFL

SEQ ID NO: 52036 - protein, 336 aa, Zea mays
  Clone ID: 700088173_FLI.pep
LLKQRAATNARRLAKADSFFFASGKEKEERKKWQGKRHDTPSAPSRSSIDQVCGRRHASLAGGLSLHGQRHGARHGAVLERVQHLQVPPGLAPLQVGHVLPEPVHAGEGHQPLRVQLPGVLLLDTLEPALGDLAPVARLRLALVEEVHEQGRRLVALVRVDVVARHAVHDDLGRTAVGGGERGQAAGHGLNHRQPESLVESRLHEGALGVADVAVQLAVADAVHLGGDPADVPVQVVLLDEVKHLLELGLLLLVLGRVAMVAADDHEVHQLLQPLVPAVQLHQPSQVLHTVETSHGEDDWLVPVVQNELVLRVLGLAVQELLNLRVKGGQPLVRLG

SEQ ID NO: 52037 - protein, 837 aa, Zea mays
  Clone ID: LIB3069-001-F12_FLI.pep
GYARRSCPRGRLFKLMFYNMEESSFSKPTVKRLLEDELRKLKQLKLPNDEVERILADLGHGACLDKSSTQNSKAKKGDQNHIRGITTTAAPSGSLDPTASNCMKEAEENELEFALADFLGRIHRNCNNNGELCTEMKALIQTKIAELDNPPCTFAYEQQTSRGDENDTAGGKHRCSSSKTQPKKFRDALEMLSSDTELFFQKSNSRILESAQRNQNRLIGSNLEPTKIADNTDSNKDPKSLNQHELATRRYGKESRNIFFWKKERSSPRQTAQGTSSSQPVNKIVILKPNPRREIGHAVAVSSTQAPKLGATESSKFSIKEVRRRFRIVTSEATKGIPSVSEDNLQKGQHWLNSSAFTIIKDTRQLAEQTSEGKFSSSVMKDFRSSNSGRQKKIKNDGPTEKNGSIITSSKDESVFYDEARKHLTEILKDKRQTTKQHPTLEISRSLVRMLSLPQSSTSSPRSSPRAKDCIYLSPEEASIRAIYKSNKDFLEEESQSGEFPENVVCDPSEALHEQAVQERWCVKEESQETTQEGAELDTLRTKEIDKLDCMGKNSNAWGTPAKQCTYKPSQDMVGEAEPGQRHVRTFPSSPENDFEKLECQEPTTPRPSAQIEQISQFSPDGNHEKQEQPSPQSVLDVFFLDGELHKDILRTRYNTTGDGSDQGIFWEDKHPRLCYIKELLELSELCANQNLEVWYLEDELISPCLFEEVHGGNQIDGTKLLFDCICEAVTEIQDIYFRNPACLSSLTHSIRAPPPAGQNLISEINKRVERHLHYRFPSTLDQLVNMDLEGGSWMDLGSESGEVAVVIWDCTLDELLEELVYDLWISGFNLAAGNHL

SEQ ID NO: 52038 - protein, 512 aa, Zea mays
  Clone ID: 700222949_FLI.pep
DQLPGVSYCITSPPPWPEAVLLGFQHYLVMLGTTVIIPTALVPQMGGNNEDKAVVIQTLLFVAGINTLLQSFFGTMLPAVIGGSYTFVLPTISIILAGRYANEPNPHIKFLRIMRGTQGALIVASALQIIVGFSGLWRNVARYLSPLSAAPLVALVGFGLYELGFPSVAKCVEIGLPQLILLVIFTMYLPHAVHMLKSIFNRFAVLFTIPIVWLYAYLLTVGGAYRNAPPKTQFHCRTDRSGLIGGAPWIRIPYPFQWGAPTFDAGEAFAMMAASFVALVESTGAFIAVSRYASATPIPPSVLSRGIGWQGIGILLDGLFGTGNGSSVSVENAGLLALTRVGSRRVVQISAGFMIFFSILGKFGAVFASIPAPIFAAMYCIFFAYAGSAGIGFLQFCNLNTFRTKFILGFSVFMGLSVPQYFNEYTSIAGYGPVHTHSRWFNDIVNVIFSSKAFVAGFVAYLLDNTIDRHEASVRRDRGYHWWDKFRSYRTDTRSEEFYSLPFNLNKFFPSV

SEQ ID NO: 52039 - protein, 220 aa, Zea mays
  Clone ID: 700166609_FLI.pep
GYKGSLPLLCSAFGRSQPFVLSRLRFGHPSDAAHARKPPPPTLRERRSGLRTGERHAPPLPREPLCPHRRTDGSIVGARVRVGRAVRLWVPQGLQCPHHLLRAVREPAGPCGGVSPRRSWSRHVARQQERGAGRSTPHACLEQNTTWDLVADIEKLREHLGIIQVFDGSWGSTLALAYSQEHPDKVTGLVLRGIFLLRKQEFDWFYDGGAAAIFPDGVEC

SEQ ID NO: 52040 - protein, 513 aa, Zea mays
  Clone ID: 700212432_FLI.pep
DRGAQPAVHPAPDGVPHQEQAGPGGVRPGGVRHHQGDPGEAHERRRRHDRGAGARGEASVHPGLPRRVPALRAQGARAAGHDALRLPHRLLPHGPGHADAAGHRAGAAQIADAAAVEAGVHARARRHRRLAVEACQGARGDPRHGVPPAGEPLAAHALLRGALHHCREPAAQPAAPGVPPPAPALPLHHGDQRAGQGGAHQRRRHHRGVLLAGQVRRRAQLSGVRRHVAVRHGGAAQRPRQAWARRAPGRRRAGAHHQGLPLRARRAHGLEHHKAVGGRLRQRLLQVRRGRRRRPRAEGVLGRGAQRGPRRQEGRAVVARARHPRQPRGDAHHHHVGHLRPPLGGQLRAVPLRRILPEPPDHHPEEHARGGGGGPGRRDEEVPEAAGDDPAGHAADADAGHQGDDDAGHPLVALARRGVHGRVGGAVVAGGAHGEGGVREVRRQDEGDRGIHRRVQQQPGAQEPVRSRDRAVRTAQALLQAGSHREGHPQQHLHLTRPSSPSNGGLPYCVHAS

SEQ ID NO: 52041 - protein, 283 aa, Zea mays
  Clone ID: 700238510_FLI.pep
VQSSQSQDNIFELKRRRQVLLEGLAASLQFVDPLGPSKSGHSSGSALKDDVIFLRIVSLPKGRKFLARYLRLLVPGSELTRIVCMAIFRHLRFLFGGLPSDSSAAETTVALAKTVSSCVHHMELGALSACLAAVVCSSEQPPLRPLGSSAGDGASLVIKSVLDRATELLTDRHAAASYTVPNRALWQASFDAFFGLLTKYCVSKFESIQQMFVTQTPSSGIGPEASKATSKEMPVELLRASLPHTNEQQRQRLLDFAQRSMPVTGFNPSGARGGHITSESVPG

SEQ ID NO: 52042 - protein, 970 aa, Zea mays
  Clone ID: 700238856_FLI.pep
GADMAALGAKMERLSSIDAQLRMLVPGKVSEDDKLIEYDALLLDRFLDILQDLHGDDLKEMVQECYEVAAEYETKHDLQKLDELGKMITSLDPGDSIVIAKSFSHMLNLANLAEEVQIAYRRRIKLKKGDFADENSAITESDIEETLKRLVVDLKKSPAEVFDALKSQTVDLVLTAHPTQSVRRSLLQKHSRIRNCLVQLYSKDITPDDKQELDEALQREIQAAFRTDEIRRTQPTPQDEMRAGMSYFHETIWKGVPKFLRRVDTALKNIGINERVPYNAPLIQFSSWMGGDRDGNPRVTPEVTRDVCLLARMMASNLYCSQIEDLMFELSMWRCSDELRMRADVLHLSTKKDAKHYIEFWKKVPPNEPYRVILSDVRDKLYNTRERSRELLSSGHSDIPEEATLTNVEQLLEPLELCYRSLCACGDSVIADGTLLDFLRQVSTFGLSLVRLDIRQESDRHTDVLDAITTYLGIGSYREWTEERRQEWLLSELNGKRPLFGSDLPKTEEIADVLDTFHVIAELPSDNFGAYIISMATAPSDVLAVELLQRECHVKTPLRVVPLFEKLADLEAAPAALARLFSIDWYRQRINGKQEVMIGYSDSGKDAGRLSAAWQLYKAQEELIKVAKDFGVKLTMFHGRGGTVGRGGGPTHLAILSQPPDTIHGSLRVTVQGEVIEQSFGEEHLCFRTLQRFTAATLEHGMHPPNAPKPEWRALLDEMAVVATEEYRSIVFKEPRFVEYFRLATPETEYGRMNIGSRPSKRKPSGGIDSLRAIPWIFAWTQTRFHLPVWLGFGAAFKHVLQKDIRNLHMLQEMYNEWPFFRVTIDLVEMVFAKGNPGIAALYDKLLVSEELHPLGEKLRANYEETQKLLLQVAGHRDLLEGDLYLKQRLRLRDAYITTLNVCQAYTLKRIRDPDYHVALRPHLSKEIMDSTKAAAELVKLNPGSEYAPGLEDTLILTMKGIAAGLQNTG

SEQ ID NO: 52043 - protein, 512 aa, Zea mays
  Clone ID: 700239031_FLI.pep
AESGSNKVSSIPSHPSAMSQLAPLPKVVMGSLAFGVFWMLAVFPSVPFLPIGRTAGALLGAVLMIVFHVISADDAYASIDLLILGLLFATMVVGGYLKGAGMFKHLGKLLAWRSQGGRDLLCRVCVVTALASALFTNDTCCVVLTEFVLELAAERNLPAKPFLLALATSANIGSSATPIGNPQNLVIAFNSKITFLSFFFGILPAMLAGMGVNTVMLLCMYWNDLEGAAACGSPGDEKEMEAIEEGRSPASVLSLKSSPAAAAAQHVALRQRQNGRGHDADDDDPDSMMSENIPTKHRWFMQCSEHRRKLFLKSFAYVVTVGMLVAYMLGLNMSWTAITTAIALVVVDFRDAEPCLDKVSYSLLVFFSGMFVTVSGFNKTGLPGAIWNFMAPYAKINHVSGVTVLSLIILLLSNLASNVPTVLLMGDEVAASAATISASAVTRSWLLLAWVSTVAGNLSLLGSAANLIVCEQARRAPRNAHDLSFWSHVVFGVPSTLVVTAIGIPLIGKIAF

SEQ ID NO: 52044 - protein, 413 aa, Zea mays
  Clone ID: 700223828_FLI.pep
SLGLLSSPPLSRSLPHRVFVVSSSCLLRPRKERMGSSEKTVTAYGEYTYAELEREPYWPSEKLRISITGAGGFIGSHIARRLKNEGHYIIASDWKKNEHMTEDMFCHEFHLVDLRVMDNCLKVTQGVDHVFNLAADMGGMGFIQSNHSVIMYNNTMISFNMLEAARINGVKRFFYASSACIYPEFKQLDTNVSLKESDAWPAEPQDAYGLEKLATEELCKHYTKDFGIECRVGRFHNIYGPFGTWKGGREKAPAAFCRKAQTSTERFEMWGDGLQTRSFTFIDECVEGVLRLTKSDFREPVNIGSDEMVSMNEMAEIVLGFEDRKLPIHHIPGPEGVRGRNSDNTLIKEKLGWAPTMKLKDGLRFTYFWIKEQIEKEKTQGVDIAAYGSSKVVSTQAPVQLGSLRAADGKEGL

SEQ ID NO: 52045 - protein, 512 aa, Zea mays
  Clone ID: 700208428_FLI.pep
YPQWPTTPWTRPRRRPPPPLLAESPPAPAQRSGPGGRHLSTALGEDGSGSADLRDLLLFLYIQSYKRLVPRVHKDSPAVTDVWPSTSAFDGYLSALSPIQFVRSNSRRFMPSQADEEAHQLSYLQKHMANILTLLADSIDGEGDDSMVLTMETFEHLGFFLQLSEGTPLSQAATFFANSDPDMPAAPVPAALVHDWVLQHIASALEFMAEKTVAKENSQHNAFDPDVTMSDAVTNTRIHSSSPTGSSAPNYPGYYRNASFVEGCSKTSVVKQASDLKGHSIKVLNCHDSVIYILAPLKYATVYGCSDTTIILGAIGKVVKVEHCERVQIIAASKRICIANCRECIFYLGVNHQPLIVGDNHKLQVAPFNTYYPQLGEHLAQVGVDPNVNKWDQPFVLGVVDLHDSLSHPAGVSDVQAESTTCLDPDLFTNFLIPSWFEVEGPTKYNPFTLPEVYWASQRKKHASLEDIQKNIRELEIDDIRKKELACALHAQFKDWLYASGNIRQLYCLQGE

SEQ ID NO: 52046 - protein, 306 aa, Zea mays
  Clone ID: 700238044_FLI.pep
LQSQAIMTGAKAQKNILQMVRTVWASDGLRGFYRGISPGVTGSLATGATYFGIIESTKAWLEIANPNLSGHWSHFIAGAIGDTLGSFVYVPCEVMKQRMQIQGTQKSWASAVAKGNISQTHGIEMYGYYNGMFHAGCSIWRDHGLKGLYAGYWSTLARDVPFAGLMVTFYEAMKKMSEYGKTKYLPHSDLHVSNSFEGLVLGGLAGGCSAYLTTPLDVIKTRLQVQGSMSRYNGWLDAITKTWTSEGVRGLFKGSVPRIIWYVPASAFTFMAVEFLRDHFNDKVDADAHEVTSLSIDTKSEVEKSA

SEQ ID NO: 52047 - protein, 339 aa, Zea mays
  Clone ID: 700220335_FLI.pep
LSRATIFKPQHPYRRCVNDVYKDFPTTALTLLDHLLAVEPGNRGTAASALDSEFFTTKPYACDPSSLPKYPPSKEYDAKLRDEEARRQRAAAKGQEAEAGRRKQPPAPDGNSGLQHRRVQMNPKSSSYKFTPKEDAVSGFPIDPPARAAADNGYPQRVPLMQAGRSSSTLGRSSGMDPKAQRFHTSQIVTTEMSGQSTASGQRGNAPKMSNLGESARRQYLREHRSSSRYSQLTAADPSDRPEWNHQFQERPSSSHRKDDAVANKEHTVVNGTKKNRIHYSGPLMPPGVNMDEILREHERQIQQAVRRARLDKGKGKHSGERDQSESLLCTTGNLRADR

SEQ ID NO: 52048 - protein, 321 aa, Zea mays
  Clone ID: 700223029_FLI.pep
HFFYIIKNRADILCYLFHYQVDELYSLDLDALNDLQPIYGLILLYKWRPPEKDERPVIKDAIPNLFFANQIINKACATQAIVSVLLNSPGITLSDELKKLKEFAKDLPPELKGLAIVNCASIRMLNNSFARSEASEEQKPPSGDDDVYHFINYVPVDGVLYELDGLKEGPISLGKCPGGVGDAGWWLRLAQPVIKEHIDLFSQNEIRFSVMAILKNRKEMFTVEIKELQRKREGLLQQMGDPNASRHVEQSLAEVAAQIESVTEKIIMEEEKVKKWKAENLRRKHNYVPFLFNFLKILEEKQQLKPLIEKAKAKQKSHGPS

SEQ ID NO: 52049 - protein, 227 aa, Zea mays
  Clone ID: 700167786_FLI.pep
CLAFTVRCDFLNFAKNIKCLRCDGEFQERYQLLHEDREHLPLKKGDWICKRCNYVNFKRNGFCLKCGWKRPKSLNSQNSVELCHDLEHSKNPRISFVQDGVQMKGWQSLQKKGSPSDTDLDFWSADDEEGGSRDNDTLLRQKDYRFLESFPIVGGRTANSQDLLAREKWKDEMSRRDKGLQTTESQESNRPSSHGRLPRSMELVDSDDDIASWFSGGDNNNRNLDKV

SEQ ID NO: 52050 - protein, 596 aa, Zea mays
  Clone ID: 700210668_FLI.pep
RAHGKPQSEPRTGSELGLEAMASGGEGAGSGESPPAASVEAAAVEATLHIRCANGSKFTVQTDLGATVGAFKEVLSGSCGVPAPQQRLIYKGRILKDEQTLDSYGVETDHTIHLVRGVATPAASSAPAAANPLASFTPSSGPAGGLGGLFPGVDAPGNDRPSGIFRPGFPELEQVEQHLSQNPNLMREIMNMPAMQNLMNNPDLIRNMIMNNPQMREIMDRNPDLAHVLNDPSVLRQTLEAARNPEIMREMMRNTDRAMSNIESSPEGFNMLRRMYETVQEPFLNATTMGGEGSTASNPFSALLGNQGSSQPGQGQPATNAPTTGSESTTGTPAPNTNPLPNPWSTNAGSAQGATRTPSGNARTGGVGGTGATGGLGGLGSPELSSLLGGLAGSPRTGSAGGLGGSGSPDLGSMLGGSPDVSPFSQMLQNPAMIQMMQNIMSDPQTMNQLLNLNPNARNLMESNTHMREMFQNPEFLRQLTSPETLQQLLSFQQTLLGQLGQHQPSQGGNNAGSATGTRGNPSLDTLMSMLSGLGSGGGLGVPNTSSVPPEELYATQLTQLQEMGFIDTAENIQALVATAGNVHAAVERLLGNLGQ

SEQ ID NO: 52051 - protein, 663 aa, Zea mays
  Clone ID: 700213246_FLI.pep
AMLTNWTGNQKLVFPHECDAQIAPCSTDEDIHELDHPPLSSPALVDLESEDHVSDDRDSEVTPCLVKDKIDESVDAQPNLLPGELEQETHAPPELDFRVAPQSAKESDCSTEFDSQAAPCSSNIPVLANTTVSTCISAMPSSEETYQLSPVPPPTVQFQNDSYKDPQALLADSYKDPQAPPPLPPLQWRLGKPRLGLLSRKGCMTEPARVIDPVLQISSQEMDIRPGLLDPTDRSIEPVSCQEIKEDRCESSLIDHNDQNVDFDRLSTRVAVTDVARTEHRLSLETSEDIKQQGHISSSATGVGEHLDAGFTSTMADEEHLDDSGMTHGTALYLSDPLFPLPTYELQDPQPDTRENSEHPSQTHGAASGDDKSMDAVGSMESTLTKGHVSGNRCYQQPQHGESSSETSDHKEHITNASEDGVKHQSGTSEAPSDTAKHSAPGTLLKGNVQESQILQEHNVGSSEDDQPGGLLYSLEPVAPQGENKNQVNNPGLLLEWPGDTSELVTGLEKSCYAHAEQPPVMGWTVGPQMLHPKYGILEEESQFEPNIADNHLIRKPISIKNIPRNPLVDAVAAHDRSSMRKVSELAPPTDKPKPNERNMLLEQIRNKTFSLKPVAPAQQTAMRSPARTSTRNLKVAAIIEKANAIRQAVGSDDEDADSWSDT

SEQ ID NO: 52052 - protein, 135 aa, Zea mays
  Clone ID: 700170380_FLI.pep
RVACLASQTYYLTASIPLPLHTSLLPSIHKQHKWITSRDYSSTIYGITIITADQSLLLRGVDCGHGRDHGIDAALVANVGTPAYLVVSVLPPVLAPRVLDDPVRLVLQANGGETRSTISNKENTMVKVPATDVWA

SEQ ID NO: 52053 - protein, 204 aa, Zea mays
  Clone ID: 700217031_FLI.pep
SRQINLGKGGVTHNMLDDIHNHWKRAEAVRIKCLGVPTLDMDNICFHLEDKTGGKVVSRSINIIILYRGRNYDPQKRPGVPLMLWKPLAPIYPKLVQNVAEGLTFEETKELRNRGLNSPPLTKLTRNGVYVNVVDKVREAFKTVEVVRLDCTHVGTTDCKKIGVKLRDLVPCIPILFKDEQIILWRGKVRQERSVSAECSSSPQ

SEQ ID NO: 52054 - protein, 164 aa, Zea mays
  Clone ID: 700076026_FLI.pep
SIVLILWFFQTLSSWSTSSVEEVNSVGPGIRFFQLYVYKDRNIVRQLVKRAEMAGFKAIALTVDTPILGRREADIKNRFALPPHLVLKNFQALDLGTMDKTNDSGLASYVAGQVDRTLSWKDVKWLQTITSLPILVKGIVTAEDSLRSNMALLGSSCPTTARAS

SEQ ID NO: 52055 - protein, 283 aa, Zea mays
  Clone ID: 700153125_FLI.pep
HRPLSLSLSFPSGSASSTTPTTPSASGELHLSTGCGEKRRGLTKSVGGGGGDPGAGAESRAMGQQSLIYAFVARGTVVLAEYTEFTGNFTTIAAQCLQKLPASNNKFTYNCDGHTFNYLVEDGFTYCVVAVESVGRQIPIAFLDRVKEDFTKKYGGGKAATAAANSLNREFGSKLKEHMQYCVDHPEEVSKLAKVKAQVSEVKGVMMENIEKVLDRGEKIELLVDKTENLRSQAQDFRQQGTKVRRKMWLQNMKIKLIVLGIIIALILIIILSVCHGFKCGSK

SEQ ID NO: 52056 - protein, 358 aa, Zea mays
  Clone ID: 700153041_FLI.pep
HPGSAIRLPAPAMAAALVSVPRIKLGSQGLEVSAQGLGCMGMSAFYGPPKPESEMIKLIDHAVDAGVTFLDTSDVYGPHTNEVLLGKALQGGVREKVELATKFGVSFADGKREIHGDPAYVRAACEGSFKRLGVDCIDLYYQHRIDKRVPIEVTIGELKKLVEEGKIKYIGLSEASASTIRRAHAVHPITAVQLEWSLWSRDAEEDIIPTCRELGIGIVAYSPLGRGFFSSGAKLVDSLSEQDFRKHMPRFQPENLDKNAQIFERVSAMAARKGCTPSQLALAWVHHQGNDVCPIPGTTKIDNFNQNVGALSVKLTPDEMAELESYAAADEVLGDRYGDQLANTWKDSETPPLSSWKF

SEQ ID NO: 52057 - protein, 505 aa, Zea mays
  Clone ID: 700097841_FLI.pep
LESKQPQDPLTTSYTCNGSSSLTPSSKEALLKNISSGKKGGSAGKVTNKDNRLHKLVFNVLLDGTEVAYYVDGQRKVDGYIKDQRIYCNHCNKVVSPSAFEAHAGEGSRRKPYDNIFTSNGVSLHELAMKISKDMELSERETDDLCRECGQGGDIFPCKICPRSFHPACVGLSKVPSEWYCDNCRNLVQKEKALAENKNAKAAGRQAGVDSIEQIMKRAIRIVPISDDLGGCALCKQKDFNNAVFDERTVILCDQCEKEYHVGCLKNQWQVELKELPEGEWFCCSSCSETRSSLDKIISDGAQLLVEPDLEIIKKKHVTRGLCMDTSKDLKWQLLSGKRTTEDGSILLSAAVPIFHQSFDPIREALTGRDLIPEMVNGRGPKEGMPGQDYSGMYCALLTVGSTVVSAALLRVMGGDVAELPLVATSQDVQGLGYFQALFSCIERMLVSLKIKHFVLPAAHEAEGIWMKKFGFSRTTPEELEAYLNGAHLTIFHGTSYLYKAVPMS

SEQ ID NO: 52058 - protein, 714 aa, Zea mays
  Clone ID: 700472244_FLI.pep
AAMGLPQPSTVEDDAPTALRTSISCPPHSGGVSACDLDGLPAGSSSRRVLSYPLICDFDRKATLDAPNESNGYSKDGCEFGEPADLHGLNIDSRNTNSWSSPKLVPSVHMPARRVVGFDSGCIGGSDGAETDMVDSSLVDRNSHLPFDQHELQARKRLFSPLKNVLVKQFNGDMLNLPSGDSRFRHSDSADKLYSTGFQDNKKANTGCINFFETRDTPASRCSSRSPEWDVTRSNSNSFTDGPLLGSKDYISYYDHLAASAKLAHSPLSLSPLSPKYMNKIKVTGSQRYIMKDLEDDFLDLKETGGSGGARMPEVSKGSNLLHDELDVMTPKWGSLRRYQNWGPESSPTSPRIGYGRSLSLHVRRSLVGSFEESLLSGRYSYGKDSQTIDGFLAVLNVTGGSFFPTTQKLPFSVTSIDEDSSLLYYSSIDLAGRLPSNNTKSPKLQRSYSNNDSRSAKSRLRIPVKGRIQLVVSNPEKTPLHTFFCNYDLSDMPPGTKTFVRQKVTLSPSALPSNPVEEGSKTCDVNSGHKSSQSVSCGNEPSERGARSECCNGGQNCNSNDESEKGDLKTRCRSLDSDSNESNKSSSPGNKKDQSDSDGCCCQMDKFGMGEKKSCCSPSKINDSSGGAVLRYALHLRFLCPSKKKSSKSMLRCKSDLSTAPYSSNTLPEEERRFYLYNDLRVVFPQRHSDADEGELRVEHDFPADPKYFDISN

SEQ ID NO: 52059 - protein, 109 aa, Zea mays
  Clone ID: 701182981_FLI.pep
STAISLVKIPYLQCVGSGTTPTHRRRSPGLTWPEKSYKTGEPRPRGAGLGSFRDHRPILPQLPSLLPSGRGRVVGITASVAAPRRGPAAAQVEPTGTIASAVASSPAPH

SEQ ID NO: 52060 - protein, 231 aa, Zea mays
  Clone ID: 700221913_FLI.pep
TINVWQPKIEQANEFSLSQLWILGGSFGQDLNSIEAGWQVSPDLYGDNNTRLFTYWTSDAYQATGCYNLLCSGFIQINNQIAMGASIFPISNYGGSQYDINILVWKDPKEGNWWLQFGNDYVLGYWPSFLFSYLADSASMIEWGGEVVNSEPDGSHTSTQMGSGHFPEEGFGKASYFRNVQVVDSTNNLKAPRGVGTFTEQSSCYDVQDGSNADWGTYFYYGGPGKNSNCP

SEQ ID NO: 52061 - protein, 133 aa, Zea mays
  Clone ID: 700075093_FLI.pep
KDSMVRVSVLNDALKSMYNAEKIGKRQVMIRPSSKVIIKFLTVMQRHGYIGEFEYVDDHRAGKIVVELNGRLNKCGVISPRFDVGVKEIEGWTARLLPSRQFGYIVLTTSAGIMDHEEARRKNVGGKVLGFFY

SEQ ID NO: 52062 - protein, 660 aa, Zea mays
  Clone ID: LIB3606-019-A3_FLI.pep
CCLCTSCITSRHVTSFLNEKLIGPRKWPVTVVYLIIEDRTWARPSQASTVLSTGAAFHLHPVASPAVIQRPARRRRRQGARCRRQASAAQRTGAGRVAMVEKHVVTDAADVPQVAAAVAGAVLVRLVHPPRRAHHGVVPERHLRRRHLRVPQRARGRGRGALSSCSSSSPGPRLVEPDLHAPHQPLRRRAAAVAAQEDVEREALVHLRGRGPAADGRQRVGRLVDRLRAALPAHHVGVGEAEPLRERGGDVAARRAHPPRGRDIAARRRRVLPVDAVRGARHDAARQLRRVVRDEPAAGPGALGVQPQVEIGVHVPRPLRVGHREPELVLLAVQEAAEEGRELDVVGGHVEGADAGDGAPDERVDAAGVDHRERPHGAHHGAVEQDGDLAERPVLLGRVHVPELVGVVGRDVDLEDGAVRVARHRHARGLHVGVVLDDEPQPVVERQAPGDRDDGIGGGGGGGRPHAAAEVEVEREVGVVDAVVGVVDEVAEVDSERGVAGREEGRVAGDVLGDRPDHPAGARLRGAAAQELGAAEPHAEGAVVLRAAALGAPLEHGERDRRRVGAGQARRRRVGRGDGRLGEREREGVREQQRGAGPRAAPGRAERAVDLEEGGLGRRRRPAAVSRQRGLHRRDVLGGEAEAAGRGRGGDRVGEQSQAA

SEQ ID NO: 52063 - protein, 359 aa, Zea mays
  Clone ID: LIB3898-015-E12_FLI.pep
WDANDRIRHTGMKCLELERDADSLSVRARACVGGVRPDADFGVAGLGGARPEHGGGVVRHTDLPLARHGHQPHGAAGRPRHDARRGVAQRERVPALHQRRDVARHRAADDLLALARGGHRAQRVGVRSGAHQRRVADPAGHLVHQPARGRRRREVARRVHGHAPYRARLAVVVHHGLGLLALACCWLGVVDLHPVGLFGLPQTLDIVVRDKVAWILSLHPLFPGEGLGAVEGEVDVRRLLHDESGEGDGVGNGGEPGDRAAVQGGALHDAGLHLDGAGGGEHGAPAGVEVRAVLQLPHDELDNVERGAALPERGGADVEAAAECGEARLPALGRQRARHVPGAAVQSQRPPHGSAAGER

SEQ ID NO: 52064 - protein, 199 aa, Zea mays
  Clone ID: 700097948_FLI.pep
LDWSNKAEENSCDFRITIPEILEDEWFKKGYKRPEFDEKYDTPLDDVDAVFNDSEEHHVTEKKEEEPVALNAFELISRSAGLNLGNLFDSEQEFKRETRFTSKCPPKEIIRKIEEAAKPLGFGVQKKNYKLRLEKVKAGRKGNLNVATEILQVAPSLHMVQVRKAKGDTLEFQKFYKNLSKTLKDVVWKSEDLQMRAAS

SEQ ID NO: 52065 - protein, 204 aa, Zea mays
  Clone ID: LIB3117-012-H3_FLI.pep
DEHGRAGHGAAHRLDGARPGLRDRQVHAIALGLRVRVLAHGHDGVREAAVPDEARVGVLREHHRRRRVHGRLHGVQERGADGDAARVALPLDRPPAALVPQVVGVAPGDQDLGGLLGQGQQRRVARLAVLEEHQRLPHRLPRQVPVLLLPQLVGEARVRHGVLEQAHGELDAQNPRHGVVDPAHRDQAAVHVTGQDGDEVLVVV

SEQ ID NO: 52066 - protein, 169 aa, Zea mays; identical to SEQ ID NO: 50724
  Clone ID: LIB3245-262-F8_FLI.pep

SEQ ID NO: 52067 - protein, 269 aa, Zea mays
  Clone ID: LIB3591-100-F12_FLI.pep
PRSDNASIPSRLLQASELKSQGAMATETETFAFQAEINQLLSLIINTFYSNKEIFLRELISNSSDALDKIRFESLTDKSKLDAQPELFIHIVPDKASNTLSIIDSGIGMTKSDLVNNLGTIARSGTKEFMEALAAGADVSMIGQFGVGFYSAYLVAERVVVTTKHNDDEQYVWESQAGGSFTVTRDTSGEQLGRGTKITLFLKEDQLEYLEERRLKDLVKKHSEFISYPISLWTEKTTEKEISDDEDEEEKKDAEEGKVEDVDEEKEEK

SEQ ID NO: 52068 - protein, 251 aa, Zea mays
  Clone ID: LIB3356-038-G6_FLI.pep
SVEGRVAMASETETFAFQAEINQLLSLIINTFYSNKEIFLRELISNSSDALDKIRFESLTDKSKLDAQPELFIHIVPDKANNTLTIIDSGIGMTKSDLVNNLGTIARSGTKEFMEALAAGADVSMIGQFGVGFYSAYLVAERVVVTTKHNDDEQYVWESQAGGSFTVTRDTSGEQLGRGTKMTLYLKDDQLEYLEERRLKDLIKKHSEFISYPISLWIEKTTEKEISDDEDEEDKKDEEGKVEDVDEKEEK

SEQ ID NO: 52069 - protein, 141 aa, Glycine max
  Clone ID: LIB3039-048-G9_FLI.pep
EGARVSNSRQWLRGCVRLSGIEKKRMAERAKPIDFELTLKPFYQRASEAEERLSRLEAALNSKKGTGNEENLKVINDLQSKLEVANVELISEKEKAQMLVAENAKLQYRIIHLLRALKEADLKLEKATVHEQLQSMKLQGS

SEQ ID NO: 52070 - protein, 194 aa, Glycine max
  Clone ID: LIB3050-017-A10_FLI.pep
SQQLTNVVMASSLHNYVLAILLLAITQFKTTSAGSHHHLQHLKSLHFSLFQHETINKTGYIIVDGIKGGAGVTQTTTPFGTLFAFQDPLTVAANRSSKLVGIVEGTTVTSSLDGLRSISIAKLTLRLKHHKGSLSIVGVTNNVKPSDLPVVGGTEDFMFVQGYISTSPVDLKGLTVVYKIEFHLYWPPYATQAS

SEQ ID NO: 52071 - protein, 140 aa, Glycine max
  Clone ID: LIB3072-014-H11_FLI.pep
LLAIIDQIVSRTIKHSFVVTVVANSFCAFTPKSLLVLSTILRKSVRSTLVTNRAISKVAAFWDGYGNLRIGSRHFCCVGEHNSTQTTRVLAKFLDLSTAILSNFNIFIFCGRDTRNKLYCFIIWSSRPPTFPCTLHSMNI

SEQ ID NO: 52072 - protein, 63 aa, Zea mays
  Clone ID: 700235386_FLI.pep
SDLSSAHHRNRVKGWNILSGFHTAAALMMSMNSGFKEAPPTRKPSTSGCAASSLQFAAVTEPP

SEQ ID NO: 52073 - protein, 153 aa, Zea mays; identical to SEQ ID NO: 48136
  Clone ID: 700236039_FLI.pep

SEQ ID NO: 52074 - protein, 97 aa, Zea mays
  Clone ID: 700236703_FLI.pep
CWNKLKEKTDDDIPMPAYFRFLALLAFKIFSAEQVDVAVLEVGLGGKFDATNVVKAPVVCGISSLGYDHMEILGDQILFLVINLVSINGLILLAKLG

SEQ ID NO: 52075 - protein, 360 aa, Zea mays
  Clone ID: 700237918_FLI.pep
LAAMGRAPCCDKASVKKGPWSPDEDAKLKAYIEEHGTGGNWIALPHKIGLKRCGKSCRLRWLNYLRPNIKHGDFTEEEEHIICSLYISIGSRWSIIAAQLPGRTDNDIKNYWNTKLKKKLLGKRAPSRRARTNQDPCYLAAGAASSSSSSAATATQALSASALERIQLHMRLQGIYGALACNDDSNAAFGSAAAALPQWPKLEALSQANRLLPGSLPADAMATTVSVQPHPQHLVEVDHHQSLAAAALEGEQQLSSAGEGGFFERPKVDFYSPSAEVAAAAAASVEMNSVAPMVVGGYAGAAGFGPQHHHDELYDFLYSKYGSVGGLAHDGGHVPTLPELQCPDGAAAVVGADEKFSAWT

SEQ ID NO: 52076 - protein, 266 aa, Zea mays
  Clone ID: 700240779_FLI.pep
PFSSSSRLPPKKKKNFEGGFDRETAQGPPRKCMAVSFLANEVSDLCIGKPAVRSLPLSAAAGDLAAALRRVARSGAPSCVAVTGPARAVVGRVGLADVLCFLCTDPEALARPAVVFSKPVSALLPKDGAGEVRRVDPRSSILEALDAVLSGAQVLAVPLRAGWRKKQLGGGGGSAAAGDFCWLTQEDLVRYFLNSIGLFYHVAARSVSSLGLVRTDFLSVRPGEAALSAVPLIRRAVATETAVAVVTEDGHLLGEISPALLAACDE

SEQ ID NO: 52077 - protein, 271 aa, Zea mays
  Clone ID: 700101991_FLI.pep
DQEQARRSEFAGYTGRPLYSSWVGAESERRAVFVDEVRCVGCLKCALHASRTFAVESVYGRARAVAQWADDEDRIVDAINTCPVDCISMVERSDLAALEFLMSKQPRGRVRVSEGNAVGARAPNIFNEVAKFKKRFDEMKQKSAAREFQESEAARQSRTSAVHAIRSMSNWWYWRPFGFGPSAPVTIVLASRLLPPPPAAPADPVTERLQEAAAARRKTGGAATATAHAGREDYWTPQLNLPSSASPPSIHQRGRGTPAHQGHGRRRGAAG

SEQ ID NO: 52078 - protein, 444 aa, Zea mays
  Clone ID: 700093540_FLI.pep
ERRQIRDSQAASARRFSQSYFLRKMAAMMVAMTARSKNSILPVEKKQGWSIQLPELRFPWDSHEDKGFSLSLQGSGPSHGGLFASVGLKVSTGAPAVAPGPGDKDIKIPFTDHCMKYVPEAVGYQVISTEAEPVEEVVDAKAKKAAKKRGLQLKIKIGNPHLRRLVSGAIAGAVSRTCVAPLETIRTHLMVGSNGDSMTEVFQSIMNTEGWTGLFRGNLVNVIRVAPSKAIELFAFDTAKKFLTPKADESPKTFLPPSLIAGALAGVSSTLCTYPLELIKTRLTIEKDVYNNFLHAFVKILREEGPSELYRGLTPSLIGVVPYAATNYYAYDTLKKLYRKTFKQEEISNIATLLIGSAAGAISSTATFPLEVARKQMQVGAVGGRQVYKNVFHALYCIMEKEGVGGLYKGLGPSCIKLMPAAGISFMCYEACKKILVEDNEDSE

SEQ ID NO: 52079 - protein, 369 aa, Zea mays
  Clone ID: 700095985_FLI.pep
KKKKNTPNTARRPTKPCRRRRRAMADELDELIGFLSDRNPQVRGAAADIVRGLTGGEDGLRALTARADSALPALLRLLASAGGSGSGEAAADSLVNLSQDAALAARLVALGAVDAAMDVVAKRGGEQPALARRLVMLLVNLTHVESGVAALLQVGDEKVQGLYVAKLVRSFCRSSSDSEEEDIFEYVASTLVNISKVEAGRRILLEPKRGLLKQIIRQFDSTNQLRKKGVAGTIRNCCFEADTQLLSLLSLAEYLWPALLLPVAGKKIYSEEDRSKMPLELSSALSHEREVVEDSEIRQQALEAIYMIVLQDGGRRSFWSVNGPRILQVGYEDEKDPKVMEAYELIGSLLVGKGEDVQDNKKEQGEKPQ

SEQ ID NO: 52080 - protein, 206 aa, Zea mays
  Clone ID: 700072603_FLI.pep
RRGMAKTRNPPGPGLLPGFQTTKPHGAARQNHPPGSRLAVTAHASNHAHTPPYHHHRARTQAPRGVCPRRDSDTSARNMFVPSRPGQETQTPTPRGPGRPLAPPASCRRRRRRRRRRPLSFPPQPRLHTTIRQPASLASPPQFITAQATKSCRATIRHQQRGASERPRGGPRHRATPLPPSLFASGSRMRGGRRRRRARRRRARSQ

SEQ ID NO: 52081 - protein, 132 aa, Zea mays
  Clone ID: 700150635_FLI.pep
PLPNPNTSWPSAFAARLRSASPAGREPRVRARVPPPPHPFRSPRPLARLDLVVAPRPSLVVSLATASRIRRGQSIISRGCGGGDGASGGACNRRRGRGHWRAAGEMVVVVAGRGRTRERVSVRGCCGDGSGE

SEQ ID NO: 52082 - protein, 466 aa, Zea mays
  Clone ID: 700151385_FLI.pep
SDQRRQACLLASPPNPPSRALRLSPRRLAPPLMDQLVNFIIRPPRADYSPNDDLLEQEFMLKGRWFLRKDLEVKNGQGKKLQCSHYMPVVIPEGKALPCVIYCHGNSGCRADASEAAIILLPSNITVFTLDFSGSGLSEGEHVTLGWNEREDLKAVVNYLRTDGNVSCIGLWGRSMGAVTSLMYGAEDPSIAGMVLDSPFSNLVDLMMELVDTYKYPLPKFTVKLAIQHMRKIVKRKASFDIMDLDTIQVAKQCFVPALFGHATEDDFILPHHSDKIYESYIGDKNIIKFDGDHNSPRPQFYFDSITIFFHNVLNPPEVAEDHYFMTPHGSLGQGHWDTEQDIEYRFSQSPTGTANATTTEDAIAQLRSRRLMSRMEVPSGATTEDRTDRTEGFDSDLGPSSSSVSTATPPNGRNGRLLTPTSDDGEYVEYSFDSLSDMPHTVEDEDRMLMQAILESLKDYEQSNT

SEQ ID NO: 52083 - protein, 137 aa, Zea mays
  Clone ID: 700045603_FLI.pep
QPGWKTGPSHPEFPIPARYYKKTSAAYTVAEIVVSCGGPRSQRPLSVPATTTKDHMRLVWSPSPGASKVGVRSATRRGASSGGQGHTSHDQTGRHHHDPGSDRDLGHTTTDRHKPQGPAQRGAGPWPETCEQPRACQ

SEQ ID NO: 52084 - protein, 324 aa, Zea mays
  Clone ID: 700047469_FLI.pep
FVLSLNTPCITKMGKGDRSSWKATYFMKLAQYFTDYPKCFLVCVDNVGSKQMQEVRRSLRGDALILMGKNTMMRKAIKGALENNPALEKILPHIRGNVGFVFTREDLVEIRDRILDNKVQAPARAGAIAPLDVKIQPQNTGLGPEKTSFFQALQIPTKIAKGTIEILNEVHLIKKDDKVGASEATLLNMLNVSPFTYGLKILQVYDSGTIFSPQILDITPEDLRAKFLAGVRNISSVCLAIGYPTVASVPHSIVNGVKNLIAIAVETEITFKEAEMAKEYLKDPSKFAAAAPVASATPAASSAAAPAVEEEEEEDDDMGFGLFD

SEQ ID NO: 52085 - protein, 179 aa, Zea mays
  Clone ID: 700048290_FLI.pep
LPSIPFTHASPSLSLSLSSCLRQQPFPLPIVEAWCGRRKGGQLLVFGAAEMSEVSVINQAEVEDAGAGQLDLPPGFRFHPTDEEIISHYLTHKALNHRFVSGVIGEVDLNKCEPWDLPGRAKMGEKEWYFFCHKDRKYPTGTRTNRATETGYWKATGKDKEIFRGRGVLVGMKKTLVFY

SEQ ID NO: 52086 - protein, 249 aa, Glycine max
  Clone ID: LIB3028-040-A8_FLI.pep
GEVVKGAPLVEPGDELFWFNRPRLILFLIHLVLFQNAFQLAFFAWSTYDNGFKINSCFHKTTADIVIRLTMGVLTQVLCSYVTLPLYALVTQMGSTMKPTIFNENVAVALKNWHHTAKKHIKHNKDSTSNTPFSSRPGTPTHGMSPVHLLHKHPRHSDSPVVSPRAYNYENEQWGVEGIHSPSHHARDHDPDHEKTMQMQMQMQQQRPAPTAELPPSGLNPIRTQHEINIALSEFSFGRGHHTGSNTNN

SEQ ID NO: 52087 - protein, 222 aa, Glycine max
  Clone ID: LIB3039-021-E4_FLI.pep
SSTTSLSSKLTMKPTLLLSLSFLPLFAFLALSEDVEQVVDISGNPIFPGGTYYIMPSTWGAAGGGLKLGRTGNSNCPVTVLQDYSEIFRGTPVKFSIPGISPGIIFTGTPLEIEFAEKPYCAESSKWVAFVDNEIQKACVGIGGPEGHPGQQTFSGTFSIQKYKFGYKLVFCITGSGTCLDIGRFDAKNGEGGRRLNLTEHEAFDIVFIEASKVDGIIKSVV

SEQ ID NO: 52088 - protein, 224 aa, Glycine max
  Clone ID: 700735465_FLI.pep
VWYRYEGQFVEDPNNEGLTIDFDRDISQTINEEEEEDVPSPELERLVAQEEREMKPHQEETELVNLRTTEEKKEVKVGTGMTVSIRQGLITLLEEYQDVFAWSYQDMPGLDSDIVQHKLPLNPGSSPVKQKLRRMKPEMSLKIKEEVRKQFDAGFLAVARYPEWVANIVPVPKKDGKVRMCVDYRDLNRASPKDNFPLPHIDILVDNTAKFALFSFMDGFSGYN

SEQ ID NO: 52089 - protein, 276 aa, Glycine max
  Clone ID: 701149157_FLI.pep
EHPVLLTEAPLNPKANREKMTQIMFETFNTPAMYVAIQAVLSLYASGRTTGIVLDSGDGVSHTVPIYEGYALPHAILRLDLAGRDLTDALMKILTERGYTFTTSAEREIVRDMKEKLAYIALDYEQELETAKTSSAVEKSYELPDGQVITIGAERFRCPEVLFQPSMIGMESPGIHETTYNSIMKCDVDIRKDLYGNIVLSGGSTMFPGIADRMSKEITALAPSSMKIKVVAPPERKYSVWIGGSILASLSTFQQMWIAKAEYDESGPSIVHRKCF

SEQ ID NO: 52090 - protein, 189 aa, Zea mays
  Clone ID: LIB3060-051-F3_FLI.pep
STMALQAAYEYLQQAVGHGAWSSTQTLTLLLIAVPTVLLLLASLAKSTSSSGRGKPPLPPSPPGTLPIVGHLHHIGPQTHISLQELVAKYGHNGFRFLRAGAVPTLIVSSPSAAEAVMRTHDHIFASRPWSMASHILRYNTCDVAFSPLGEYWQQTRKLMNTHLLSNKKVYSFRHGREEEVCLVVDNLR

SEQ ID NO: 52091 - protein, 315 aa, Glycine max
  Clone ID: LIB3109-002-B7_FLI.pep
GSQTDKQTTATLIMGPTSMAAGRVTRFLARHYPLEHHRDNADVEFDFLDDIGEALLAQSASSDECGHPNEMEEQFDQDEDHRDTVEENRTFWDKQHQLLQASICRTSSSESRIRHATKEALQEIQSAETVCGCGRQVAVITTCRNCLMREVSRRLQKAGYDSAICKTKWRSSPDIPSGEHNFLDVIDSTKKGEVRVIVELNFRGEFEMARGSEDYNRLVRRLPEVFVGKVERLSNLIKILCMGAKRCMKEKKMHMGPWRKHRYMQAKWLGPCEGNTSTTSLSVRYNSERILPRPKASMLTVDLLEKPSQYALHCC

SEQ ID NO: 52092 - protein, 287 aa, Glycine max
  Clone ID: LIB3107-008-C12_FLI.pep
GFSPKGFGGITITMRAKLFVFPIRGRNWCFSRTIDHSLSASHASSQSPSTLKDLWTNINVGDKPLNTKTELFVDYIANKMNNAWIGLEKAPEGSFKNKIHGLGLRLLSRVKPSEIFLKSISKEITSVEIIYPSSLNAQLVRRRLRHIAVRGAVIHRNYLYGLVSLIPLTSALSILPLPNVPFFWVLFRTYSHWRALQGSERLFQLVSDNSKTSNTCTYEKKTEHKESKSQRHSSNEPCWVLRPSKELENLVHLEDGQESLSQHAIINICKIYDLNPVDVIKYEKSVF

SEQ ID NO: 52093 - protein, 154 aa, Glycine max
  Clone ID: LIB3107-015-C7_FLI.pep
MLLSSVHSLIVILLLATAFLVIILIIHLRYRLLRFFFIPTSRTFRLFLVISSHVLLVLHFPFLRLCHIRCFFSIRHRLPFCSSSFAHSRHCFVVGMFLVEHLPEFLPLITTQISENNHNTIIKTTGRVVISSFTKHKLDLAYSKNIILTIKQSR

SEQ ID NO: 52094 - protein, 341 aa, Glycine max
  Clone ID: LIB3107-030-D4_FLI.pep
NSKRAMEEEEEAEKQKKHLAMLERLSKRTQSRSQNPDSSSSESSTSSILSRFTHLKSSIESQLAQSQSISSDPSNLKLHFNQISESISDLEKFVAENSYSLPSYDVRTSLKTVSDLKHSLDDLTSQLLPKKKFSFKNKPTTKKEYKDSAIPLPTQPPQLSTRLAPRDSPGFRNKTAELLISDFRGSEVGEFTVSDLDSCQVRIIGSVRALFVHRLKNSRVYVGPVTGSVLIEEAEGCVFVLASHQIRIHGAKRSDFYLRVRSRPIIEDCNGVRFAPYCLNYEGIEEDLRGAGLDAETGNWSNVDDFRWLRAVQSPNWSVLPENERVGTVEISNLKNEGKEI

SEQ ID NO: 52095 - protein, 188 aa, Glycine max
  Clone ID: LIB3167-006-F3_FLI.pep
LSLLLRNLRTEHNRALQLSLSLMASQASLLLQKQLKDLCKNPVDGFSAGLVDETNIFEWSVTIIGPPDTLYEGGFFNAIMSFPPNYPNSPPSVKFTSELWHPNVYPDGRVCISILHPPGDDPNGYELASERWTPVHTVESIVLSIISMLSSPNDESPANVEAAKEWRDRRDEFKKKVSRCVRKSQEML

SEQ ID NO: 52096 - protein, 142 aa, Glycine max; identical to SEQ ID NO: 47645
  Clone ID: LIB4200-007-D2_FLI.pep

SEQ ID NO: 52097 - protein, 314 aa, Zea mays
  Clone ID: LIB143-058-H6_FLI.pep
HEILRSIQKRRSMAIISDFKEDETPQQSAAVGPGVEETLVAALERTGGALPFLQAAIDVAHRRSGLFRDPSAVSKVTAMAAAVRAQVETEERAAREVKRKAEEAERKAAVEAQKADMEAATATAEEKLEKDRMDADKAEEGNVRQPNAGNGLDLEKYSWTQQLPEVNITIPVPQGTKSRFVVVDIKKNHLKVVLKGQPPIIDGELYKPVKVDDCFWSIEDGKTLSILLTKHNQMEWWKSVIKGGPEVDTQKVEPENSKLSDLDPETRQTVEKMMFDQRQKQMGLPTSDEMQKQEILKKFMSEHPEMDFSKAKMP

SEQ ID NO: 52098 - protein, 124 aa, Zea mays; identical to SEQ ID NO: 41198
  Clone ID: LIB148-040-H1_FLI.pep

SEQ ID NO: 52099 - protein, 263 aa, Zea mays
  Clone ID: 700238292_FLI.pep
RSLLTRLFTSTHIVMASSSFSSSPSRRLVHLTRHLVSSSSGELSSVGAPAAAASDADPVKSPRSTASRVHAAVLVCLFEDPSSGPRVLLTKRASSLSSHSGEVSLPGGKVDDGDADPKATALREAKEEIGLDPALVSVVTVLEPFLSKNGLTVVPVIGMVPDKALYKPVLNKAEVEDIFDAPLEMFLKDDHRRTRQMNWMGIDIPVQFFDYEADGKKFVIWGLTAHILTRAAAVIFGRKPSFVELPRPKYAGAPVAGTGKSNL

SEQ ID NO: 52100 - protein, 73 aa, Zea mays
  Clone ID: 700613322_FLI.pep
AMLTQVLNGGGANDNLHGVSTVNQQAVNDQVNNEFFMGTNEAHNAESDDLDDFLAYLVNQDFINNGDSFIDRD

SEQ ID NO: 52101 - protein, 191 aa, Glycine max
  Clone ID: LIB3108-055-G8_FLI.pep
VARKFVMAASSSSLSASDDSSSHRRRRHHRHRRYRDKDSLKIRKKSKSQSQSRGERRRRHHRHSSDSDSYSSSSLSDYSRSESSSDSEHETSHRSKRHKKSDRPKKNKEKDRSKSHRHKRQKHKVKEKQHDERSSSPVQLSKFLGHDKDDGVRRSAVSGKKILLKLEKTKEDKVAESKRNELLNFLNASFD

SEQ ID NO: 52102 - protein, 148 aa, Glycine max
  Clone ID: LIB3106-062-E7_FLI.pep
SIAASDLLVVEILKGDDQKGIMLQTRIRTGHATELSVLGHGPKTASKLQGSTPHDQLLIQTSDSFSGLLLFTIGFLVFMVACVKDWEFQSFFAKGCVLLHISMAVWRFYFEGKLEDLAHDWPRHAVGDIALATSWLFFLVYMWREKYD

SEQ ID NO: 52103 - protein, 136 aa, Glycine max
  Clone ID: LIB3106-094-F3_FLI.pep
KSHSIFTTKKKIMAMASATTPATITVVAISSVASTKRRERNVHFIRGLNSFGGLKAQNSVTSLGLPVCTEQCFAKVVSSLKYQSSSKGRGGGAASSTCNAAGEIFQIAAIMNGLVLVGVAIGFVLLRVEAFVEESE

SEQ ID NO: 52104 - protein, 444 aa, Zea mays
  Clone ID: LIB143-019-G10_FLI.pep
YIYAACLRAGFQLGVVEEARWVVQLPPGAGGRHRRDGGHARLAPAAVALGGAAGVHARPALRPGRVQVRHPRGAQVAHRGVPRQGRPVRRRRRDQPPLRRLQGRPRHLLRLRGRHARQPPRLGPRHDLQRRHAVLQRARAPRHGGRLRRRARHRPPQPARAAGALGLAQLAQVRPRLRRLAPRLRQGLLRRRRQGVRRQHRPHLRRRRDMELPPLRRQRRAVQQPGRRQAGAGQLGAGGGRPRRGVRLHHQGRAAGGRPGRAVAHEGRQRQGARDDRLAAGEGRHVRRQPRHRLHAELVAIPLRQGHAGLRLYPHAPRNSMHRKSPTGSVHHQIQNPGRHTDTLVLASVIQFYDHVFDWNLKQEISALSAVRSRNGIHPGSELNILAADGDLYVAKIDDKVIVKIGSRYDVGNLIPSDFHAVAHGNNYCVWEKHGLRVPAGRHH

SEQ ID NO: 52105 - protein, 276 aa, Zea mays
  Clone ID: LIB148-004-A3_FLI.pep
TNPRQNMDVNVRTMWSSMRAQVAMAVVLVFLVSGAWCGPPKVPPGKNITATYGKDWLDAKATWYGKPTGAGPDDNGGGCGYKDVNKPPFNSMGACGNIPIFKDGLGCGSCFEIKCDKPVECSGKPVVVHITDMNYEPIAAYHFDLAGTAFGAMAKKGEEEKLRKAGIIDMQFRRVKCKYDSKVTFHLEKGCGPNYLALLVKYVDGDGDIVAVDVKEKGSDTYEPLKHSWGAIWRKDSDKPLKGPLTVRLTTEGGTKSVYDDVIPANWKANTAYTAK

SEQ ID NO: 52106 - protein, 225 aa, Zea mays; identical to SEQ ID NO: 47094
  Clone ID: LIB4148-021-G3_FLI.pep

SEQ ID NO: 52107 - protein, 217 aa, Zea mays
  Clone ID: LIB4073-005-C3_FLI.pep
NQFHLSVSRLGNWEDDEEEEARAGTRPSTTTLRRGTGIGAPELRIHTPRPRPIRCVRRGLSMRWPLAISTRRRPLLFVLLVALYTIPGTFSSRQVTLDTVEIFTTHEWFGKPTVAFRCNGENKTDLPDVKEAHTLYTFKGEESWQSFQKRNASDVVCMRRTHLKLMSLMNGRCVRVISRVENTAGLRKASSMQHSYVQTAPPQLVLLISNTYSFLFV

SEQ ID NO: 52108 - protein, 114 aa, Zea mays
  Clone ID: LIB4073-006-H3_FLI.pep
VLRRLRDRRRQRRRSPGFRISIFGLEPFTGDEQPPVLRVPMAEPAKPEVTEEAKMDLLEDDDEFEEFEIDQEWDDKEEGNEALQQWEDDWDDDDVNDDFSLQLRKELESNAPKN

SEQ ID NO: 52109 - protein, 194 aa, Zea mays
  Clone ID: LIB4073-007-F3_FLI.pep
MLQNMKPRSRGGDNEGVLQLSAPHGDPLHHVLKFAEVDAAVAVAVDVADHLLHRGQAPSLRQAELLEHGLQLGGRDEAVTVLVEHPERLLHVPLVVVLRHLLRDGAEQRVPERAVEGLEVLEAEPRSAGRDVPAHRGLQAGAVGAEAERVERRGHLVEGDLAVAVAVEEVEHAAQAQSVEAAVPEAERRRGLLG

SEQ ID NO: 52110 - protein, 348 aa, Zea mays
  Clone ID: LIB4073-008-F4_FLI.pep
ETRVRERDGSHGFVPGGEHGEDGDRGEGHGHGGHPRRLRELGLLRAAEPWHLSRADGRGGAADQGALRQLPGGQVPGVRGADAGGRRQGCRRQGRGLGEHLLRPPPPGLQPRRPPRRRRPLQASDEAIRIGDPEAVGEAAGPAVREPGPGARLPQVRLRWLQRPHVRHQGERVPAVPAPGPRRRPPRAHRRRRHHPAVPGRPGQRPAAAQGRRVGGRAAHAPRHRRQHRRPAGGDHQRPLQERHAPRAHPPRRQPHVHRLLLQPGRRRRHLPGASARRRRRRRGGARRPGQVPEVRVRGLHEPVRAPQVRGQGATVRGHEVGHRHRVMNKHTAAFNSAPCPFVSCIML

SEQ ID NO: 52111 - protein, 391 aa, Zea mays
  Clone ID: LIB4073-009-G1_FLI.pep
APPPIASSPLHQISSPSRPPRSPRGYRSMASAAVVDAGDAPEPTVRNLLDQDSLKWVFVGGKGGVGKTTCSSILSVLLAGVRQSVLVISTDPAHNLSDAFQQRFTKFPTLVRGFTNLYAMEIDPKVENDDLSNEGMEGFLSELTNAIPGVDEAMSFAEMLKLVQTMDYSVVVFDTAPTGHTLRLLQFPATLEKGLEKMMELKNRFGGLLNQASRLFGLGDELNEDAMLGKLEGMKDVIEQVNRQFKDPDLTTFVCVCIPEFLSLYETERLVQELAKFEIDSHNIIINQVIFDEEAVESKLLKARIKMQQKYIDQFHMLYDDFNISKLPLLSEEVCGVQALQNFSQHFLTPYKSNLKRGTIEELEQRITLLKSALQEAEAELDRVRKGKQSA

SEQ ID NO: 52112 - protein, 148 aa, Zea mays
  Clone ID: LIB4073-009-B8_FLI.pep
SAPFICEFFRDAQEKVLPYADYIFGNETEAKIFAKVRGWETENIEEIALKISQLPLASGKQKRIAVITQGADPVVVAEDGKVKTFPVILLPKEKLVDTNGAGDAFVGGFLSQLAQGKSIEDSVRAGCYAANVIIQRPGCTYPEKPDFN

SEQ ID NO: 52113 - protein, 179 aa, Zea mays
  Clone ID: LIB4073-009-D7_FLI.pep
EGGSLLQFSFACASRLRACDRRRGGRGRSHHPDPMAFMRSHSNASSGMGVAPNIRETFVELQMKKAYRYVIFKIEEKQKQVVVEKTGATTESYDDFLASLPENDCRYALYDFDFVTGENVQKSKIFFIAWSPSTSRIRAKMLYSTSKDRIKHELDGFHYEIQATDPTEVDIEVLRERAH

SEQ ID NO: 52114 - protein, 122 aa, Zea mays
  Clone ID: LIB4073-010-C4_FLI.pep
SQRMTADMLSMILILLLGRTCRKARFSSLPGPHRHPASVLRCCTPPQRTASSTSSTGSTTRSRRPTRQRWTLRFSGSGLTEAGSPLKGPVEGREPSVRCKLYYEMMKLPPWYLLISSCKHII

SEQ ID NO: 52115 - protein, 173 aa, Zea mays
  Clone ID: LIB4073-010-C5_FLI.pep
TEILLPLVSSSNLCRCRHSQRELINWLQNSDLSRFSANQMFGSARSDPILTAELAMDHIYWHWQYGSNFFWRSSWLPPTSLSISFLSLMKMNVGVARTSNCVTNSGSSSTSMETKRRSECFKESSAYTGAAFLHGPHQVALNFTTTVCPSSFASSNLCSQDFRSGMIVTFPEL

SEQ ID NO: 52116 - protein, 294 aa, Zea mays
  Clone ID: LIB4073-012-B9_FLI.pep
LGQKSAASSAPIRSDPTAPHAVEAERGSRRGEERRGAAAATVPPPEERGEKEEEPYPSACSASAGPIDPMDSEHWISRLAAAKRFYAAQLGHSDRAGMEELDMDEEVRPEFACPYCYEDHDVGSLCAHLEEEHPFEPQAAACPVCSEMVTKDMVNHITMQHGYLFKNRRRLRRFIIPGSQALSLLSRDLREAHLQVLLGGGHRSSNNNSTTNISADPLLSSFGLSFPTSDAEQTSKSTLSIPDDATMIKETPAQARKLSIDSSLTSEEREQKRKQASVRATFVQDLLLSTLFGD

SEQ ID NO: 52117 - protein, 419 aa, Zea mays
  Clone ID: LIB4073-012-E12_FLI.pep
YLTCVSASASSSSPVSSPSSLRSGPHSTREQPAAAQCCGKAKMADYVYGPGRNHLFVPGPVNIPDPVIRAMNRQNEDYRSPAIPALTKVLLEDVKRIFKTTTGTPFLIPTTGTGAWESALTNTLSPGDRIVSFLIGQFSLLWIDQQQRLGFDVDVVESDWGHGADLDALERKLRDDTLHTIKAVAIVHNETATGVTNDLAAVRTLLDAYAHPALLLVDGVSSICALDFRMDEWGVDVALTGSQKALSMPTGMGIVCASSKALEASKAARSVRVFFDWKDYLRFYEMGTYWPYTPSIQLLYGLRTALDLIFEEGLDNVVKRHNRLGTATRFAVEAWGLKNCCQKEECFSDTVTAVVVPPYIDSAEIVKHAWKRYNLSLGLGLNKVAGKVFRIGHLGNLNELQLLGCLSGVEMVLKDVGTR

SEQ ID NO: 52118 - protein, 110 aa, Zea mays
  Clone ID: LIB4073-012-H2_FLI.pep
VHANTYYAVIYIYTLHNRPSHHAYPMLNSITQQSYMKLYRHESLSALQLQSKIQHLTYTDDLLSNQFWQWPKQAAILQQPYPRPTDSTPLQLMLISSAPAPSPSSFSDEV

SEQ ID NO: 52119 - protein, 146 aa, Zea mays
  Clone ID: LIB4073-013-F9_FLI.pep
PKLSRMSLLNCKNEFLSSWQRHVIALCSCFLQVRNEISTLLWLLEPREDHLSSRNVLLRVKQVVIQSVLLPDHSLVFVSRRVGVACGGTRLPPKKTIQVWTLLVTGALLDRVALRALGLEDLLARLGVAWGSLRERRHRRTQRSEV

SEQ ID NO: 52120 - protein, 249 aa, Zea mays
  Clone ID: LIB4073-014-G1_FLI.pep
PATTQRKVNSSGGGRRWEWDGGDGLLERGALGDLLPPRLNMGAVVDEPSLGGLGEVEQVGRVVGVGERELVAGEVLVAGEVRLVDVEHLGELVRVLVHHQWVRGAAEERPEEELEHQRRRVRVEVVRLHLQPHLELRRRRRREQRRARRRVLGRDVPVDGTGLVEDFVSVDESRDLAEGVEGEEVGLLVGAGGEVDGDDLEFEALLVEHGGHAHHVGRQRHPVQLQRRHPLLLLPSPSRSPVSESLSLS

SEQ ID NO: 52121 - protein, 160 aa, Zea mays
  Clone ID: LIB4073-015-B5_FLI.pep
TLGATLLELLDEGEVVEHLLDLLVPGVSDEPAAGLEGRDERGGLAAGVGAEVAERAELELGESVAAERLADLAHGVGVLVAAEALHVLQRLLEHLRHLRRRVRLRRVLLDLLVLVLQDDRHLAVHQALGLEELFADLELRGVLLLLARHPEAALVLPTGA

SEQ ID NO: 52122 - protein, 65 aa, Zea mays
  Clone ID: LIB4073-016-G9_FLI.pep
PEKADEFKKGIEGATKFLLSKLKDLQFFVGESMHDDGSLVFAYYKEGATDPTFLYFAHGLKEIKC

SEQ ID NO: 52123 - protein, 417 aa, Zea mays
  Clone ID: LIB4073-017-C2_FLI.pep
VAARWIPSEMASAGVAPSGFKNSSSASIGVEKLQDQMNEIKIRDDKEVEATIINGKGTETGHIIVTTTGGKNGQPKQTVSYMAERIVGQGSFGIVFQAKCLETGETVAIKKVLQDKRYKNRELQTMRLLDHPNVVALKHCFFSTTEKDELYLNLVLEYVPETVHRVVKHHNKMNQRMPLIYVKLYMYQICRALAYIHGTIGVCHRDIKPQNLLVNPHTHQLKLCDFGSAKVLVKGEPNISYICSRYYRAPELIFGATEYTTAIDIWSAGCVLAELMLGQPLFPGESGVDQLVEIIKVLGTPTREEIKCMNPNYTEFKFPQIKAHPWHKVFHKRMPPEAVDLVSRLLQYSPNLRCTAVEALVHPFFDELRDPNTRLPNGRFLPPLFNFKAHELKGVPADIVAKLIPEHAKKQCSYVGL

SEQ ID NO: 52124 - protein, 240 aa, Zea mays
  Clone ID: LIB4073-019-A10_FLI.pep
TGEAQLADGSETMASRQPRPVDASLRSLSIASALLTWSVCCAAVSVRALPEPDGCSSNSNMTELQMHVSFFDRNKDGILTPLETFQGFVAIGCEVAFSTAAASTIHTALAPLTNPPGALPPYINIYVEYIHKAIHGSDTGAYDSKGRFVQAKFDEIFKKHAHIRKDALSLLEVEEMLTVNRDVLDPASWAAAEAEWQLIYQLAHDRYGFLTKERARGIYNGKIFVELEERISRRPLHSNA

SEQ ID NO: 52125 - protein, 127 aa, Zea mays
  Clone ID: LIB4073-020-A8_FLI.pep
QHSAPHGGALYCKPNLIHHSLYRTDRKHGDTSRSGNTTQQQQRRFRRPGGPKGQPGTTTWRTSGSRSSRCSRTCAGPSCTCELSRGPKDRRGLDQSAGSRWTAAPWRWLVPDSTGPSGCQGKCSRCC

SEQ ID NO: 52126 - protein, 266 aa, Zea mays
  Clone ID: LIB4073-021-A8_FLI.pep
NAKLPSGEMAPKRGGRAPVPAKKKTDKVVNPLFEKRPKQFGIGGALPPKKDLHRFVKWPKVVRIQRQRRILKQRLKVPPALNQFTRTLDKNLATNLFKMLLKYRPEDKAAKKERLLKRAQAETEGKTVEAKKPIVVKYGLNHVTYLIEQNKAQLVVIAHDVDPIELVVWLPALCRKMEVPYCIVKGKARLGSIVHKKTASVLCLTTVKNEDKLEFSKILEAIKANFNDKFDEVRKKWGGGIMGSKSQAKTKAREKLIAKEAAQRMT

SEQ ID NO: 52127 - protein, 212 aa, Zea mays
  Clone ID: LIB4073-023-D12_FLI.pep
DTLVALHLYSTRRCSAVQLCESLDALGGFLRQQDAQGDGGGVERVGHLAHHLAHAGDALRRPLGRHRQRRRRHQRDQQLHADRAQRVRGQLPDELRELLAVQEPVQVHVVLIHHGLELLLGRGIVVRPWQVLVDVIVDAEDGDVDLLESEGLLLALLGVLREAVEHLVGDLPHLVLLPPPPLKFVLEITPGLSHGRADGGELDGSLQKGERN

SEQ ID NO: 52128 - protein, 117 aa, Zea mays
  Clone ID: LIB4073-024-B1_FLI.pep
GRCCKGHTSSTNIAQIRRHPRNHTRTTKTTRASAQPPGLPLGLKKGEDVTLTNWALDVPHDETVLVIQELHSDLGHLTPGASPAHHLHHNSKLHLGVHALASRVDGGRRALGHAKRT

SEQ ID NO: 52129 - protein, 126 aa, Zea mays
  Clone ID: LIB4073-024-G11_FLI.pep
DPASHPSACARRSEHPVPRKTGRRRGGKHGEGAGADEGGGVRAITVPAEGDAGAVEGHHHQDPPQGHGELDLRHAPRHPSRRHLPIRHVVQRAGEAFPQILNVRLSKLTAIAVSSHDGFCNPSMMI

SEQ ID NO: 52130 - protein, 149 aa, Zea mays
  Clone ID: LIB4073-024-G8_FLI.pep
FSDLDSLLPLTKLETLSLLTNPITTDAHYREYVAYKFPKLRLLDFRKIRQKDRQAAVELFKSRKGKELLKEIAKKAKAAADNPSIDTNNSKVSNTSAEDVQRIRDAIKNATSLHEVERLTRILQSGHIPENLNAENGNGTSHDEHAMEM

SEQ ID NO: 52131 - protein, 105 aa, Zea mays
  Clone ID: LIB4073-024-H10_FLI.pep
ASPSLLINQPMWGVWATVSTKIRTRLGTKSAVTIVPTGSTTMSASGLSLRITFFASSTLFPTTSGHDVLAPPQSAAVAVELIVVGCRSRIESATDTVLIAILLLV

SEQ ID NO: 52132 - protein, 271 aa, Zea mays
  Clone ID: LIB4071-001-A1_FLI.pep
PIDHRCHIPNPLPVVFGVFPAAAVAAVVHHTVPLVVISMRERNSSIDQEHQRGSSSRSTMPFAASRTSQQQHSRVATNGRAVAVCAGHAGVPDEVARHHEHAVAAGQCCAAMVQSIAAPVDAVWSLVRRFDQPQRYKRFIRSCHLVDGDGAEVGSVRELLLVSGLPAESSRERLEIRDDERRVISFRVLGGDHRLANYRSVTTVHEAAPSQDGRPLTMVVESYVVDVPPGNTVEETRIFVDTIVRCNLQSLEGTVIRQLEIAAMPHDDNQN

SEQ ID NO: 52133 - protein, 399 aa, Zea mays
  Clone ID: LIB4071-001-E5_FLI.pep
VAFSILRKRLALHSDNFKMDSAQQPTGELNNSFDTLMVSGGDQSRQPQDAGNETSFTNWKDLPMELLLRIISLVGDDRIVIVASGVCTGWRDTLGWGVANLSLSWCQDRMNDLVISLAHKFTKLQVLSLRQIRPQLEDSGVEAVANHCHDLRELDLSRSFRLSDRSLYALAHGCPQLTRLNISGCSSFSDVALVFLSSQCGNLRCLNLCGCVRAASDRALQAIACYCGQLQSLNLGWCDGITDKGVTSLASGCPELRAVDLCGCVLITDESVVALANGCLHLRSLGLYYCQNITDRAMYSLAANSRVRSRGRGWDATAKSGGGGKDRERDGLASLNISQCTALTPPAVQAVCDSFPALHTCPERHSLNISGCLSLTSVHCACALHPHRAGRVILSNHAY

SEQ ID NO: 52134 - protein, 390 aa, Zea mays
  Clone ID: LIB4071-003-C6_FLI.pep
RPSHRRKPATSLRGLTVISAWHPKAVKIREAGGTKRRASDPTSSSARAARRRREMGADYYKVLGVDRGASDDDLKKAYRKLAMRWHPDKNSTNKKEAETKFKEISVAYEVLSDPKKRAIYDQLGEEGLKGQPPPGAGGPGTSPFFPGGVHSTAHHFNPRSADDIFKEFFGSPGMGGMRTEPGFQRSVFGNDIFSSRFRAEGSTSMQQPLRKAAAIENPLPVGLADLYKGVTKKMKISRETIDASGRISNTEDILTIQVKAGWKKGTRITFPDKGNEAPNMKPADIVFIIDEKPHDVFTREGNDLVVTEKISLVEALTGYTARVTTLDGRSLSLHINSIIHPKYEEVMPGEGMPMPKDPTKKGNLRIKFNIMFPSRLTSDQKAGIKRLLGS

SEQ ID NO: 52135 - protein, 243 aa, Zea mays
  Clone ID: LIB4071-005-A2_FLI.pep
AADPSSTKPAPAATESGQIGPSGRRGSSRGAMDEEEHEVYGQEIPEDGDMDGADVDMAASGDDAAKLQELDEMKRRLKEMEEEAAALRDMQAKVAKEMQGGDPSASTAEAKEQVDARSVYVGNVDYACTPEEVQQHFQACGTVNRVTILTDKFGQPKGFAYVEFLEQEGVQEALNLNESELHGRQIKVAPKRTNVPGMKQRPPRGYNPYHGYPYRSYGAPYFPPYGYGRAPRFRRPMRYRPYF

SEQ ID NO: 52136 - protein, 136 aa, Zea mays
  Clone ID: LIB4071-009-H10_FLI.pep
VNTCNNLNDRKVELRLLGEKAVKRKDYNGALELYSEAIGLDSFDATLYSNRSLCYLKIGEAQKALLDAETCINNRPDWVKGYYRKGAALMLLKEHKRALDAFLDGLKVDPTSAEMEKAMREALEAVKMESVAVQRQ

SEQ ID NO: 52137 - protein, 245 aa, Zea mays; identical to SEQ ID NO: 48033
  Clone ID: LIB4071-011-D5_FLI.pep

SEQ ID NO: 52138 - protein, 376 aa, Zea mays
  Clone ID: LIB3960-003-B5_FLI.pep
REGKPELLTVPLSLLTGGLRLFRPSTAPVVSRPDPSPARFLCEWPEKMMGGFLSRVLLLAFGYAYPAYECYKTVELNKPQIEQLIFWCQYWILVALLTVLERFGDFTISWLPFYSEAKVLFFVYLWYPKTKGTTYVYGTFFKPYISQHENEIDRNLLELRARATDMVVLYFHKAASVGQNTFFDVLKYVAAQSPSRKSRLHPHQEPQQQQPQVQVELQQPQPQKQAAPVMRRGASIAARQAAMAQQSLETIPVPSSPKIKRQTSGRPGSVASTKPAAAASTPKPGGSPKKGEVKPAVDPVQTPATSADSPKSEPSAPPLSETEEVDNMAIDEVSGDAAEGAEELDPALEETLMEETIRVTRAKLRRRTATEDSAGN

SEQ ID NO: 52139 - protein, 322 aa, Zea mays
  Clone ID: LIB3960-004-D5_FLI.pep
QTYVGRSLAGFEGPRSMIPYATAAEAEGALGRTMTWAETAWYEYSAVMPDSWLHCHTTFILFVIYSIAPLPLLLLEQFAPSVVLPYKLQPRVRLPPAASLSCYMDAACIFPLAVGLQFVSYPAVAKILRTRMGLPLPSVRETIAQLVVYSLVEDYLSYWMHRLLHTQWCYEKIHRVHHEFTAPTGFAMSYSHWAENVVLSIPALAGPVLVPCHVTTQWLWFSIRLIEGINTHSGYHFPFSPCRLIPFYGGAAYHDYHHYAGGRSQSNFAPLFTYCDYLYRTDKGYRYHKLKQEKLKSLAENSADKGGNYSFDEGKKNRYFCA

SEQ ID NO: 52140 - protein, 330 aa, Zea mays
  Clone ID: LIB3960-004-F1_FLI.pep
GCNLLVGHLATATQKIASHIYQPSHRTSLPTTSHRTPIKVNLFAAPPEAEVELFTAASMHHDPNPFDEGADENPFSNGGGGARGGGVKPQYGFRPTEPAGFGGGRGDATTDIPLDTMNDSKGKAKELSQWESDLRRRESDIRRREEALKSAGVPMEDKNWPPFFPIIHHDIANEIPANAQKLQYLAFASWLGIVLCLFWNFIAVIVCWIRGGDSKLFFLATIYGMLGIPLSYLMWYRPLYRAMRTDSAFSFGWFFLCYLLHIGFCIFAAIAPAVVFRGKSLTGILAAIDTFSDHAIVGIFYFVGFALFCLETLVSIWVLQKVYMYFRGHK

SEQ ID NO: 52141 - protein, 496 aa, Zea mays
  Clone ID: LIB3960-008-E11_FLI.pep
NVRRRRAGVRPARRGLIPCVSATAPRRRHLFAVLALRRGGTGALRPSHGNGKTAALKMRVLEEDLFPSTPGKVKIERAGAMNRQLHRCFASTSTMFLWALFLVAMTASYLSFQSFVDTSSKYLAASWGGLHWERQIRASAAPRRPPGSAAGAGMSVLVTGAAGFVGTHCSLALRKRGDGVVGVDNFNAYYDPSLKKARRALLASHGVFVVEGDINDGRLLAKLFDVVPFTHVLHLAAQAGVRYAMQNPASYVHSNIAGLVTLLEACKDADPQPAIVWASSSSVYGLNDKVPFSERDRTDQPASLYAATKKAGEEITHTYNHIYGLSITGLRFFTVYGPWGRPDMAYFSFTRNILQGKPITVYRGKDRVDLARDFTYIDDIVKGCLGSLDTAGKSTGTGGKKRGPAPYRIFNLGNTAPVTVPNLVSILEKHLRVKAKKNVVEMPGNGDVPFTHANITLARQQLGYKPTTNLDVGLKKFVKWYQSYYGYTRGSKNSRQ

SEQ ID NO: 52142 - protein, 138 aa, Zea mays
  Clone ID: LIB3960-013-H7_FLI.pep
NLSTILIMLLYWLGSAVGLQIVYDVTDQESFNNVKQWLNEIDRYASDNVNKLLVGNKSDLTANKVVATETAKAFADEMGIPFMETSAKNAINVEQAFMAMAASIKDRMASQPAAANARPATVQIRGQPVNQKTSCCSS

SEQ ID NO: 52143 - protein, 153 aa, Zea mays; identical to SEQ ID NO: 48136
  Clone ID: LIB3960-014-F2_FLI.pep

SEQ ID NO: 52144 - protein, 439 aa, Zea mays
  Clone ID: LIB3960-015-F4_FLI.pep
QQSQRKVVLMSTVTLPTLSRCLVELEGLHHLPGEVGVVTAEVAVGGGLDEPVAALLQVEVDADHPGPEVEVLLHDLEDLLVGDRAGAVRVDEHGQGLRHADGVRHLHEAAAGEAAGHDALGGLPGHVGAAAVHLGGVLAGEGATAVGSPAAVRVDDDLAAGEAGVTVGPADDEAPGRVEVEDGLLVEVLLRDHGLDDVLLEVGGDLVVGDGLVVLGGDEHGVHADGHHGAALVHVLHRHLGLAVGPQPGAGAVLAHLGEARAQLGGQHVAQRHQLGGLVGGVPEHVALVARADLLGPLREVPVHALRDVGGLLLDVHQHLAAVGVEAHVVGGEPDLAAGVAHDLLVVHGRLGRDLAEHHHHVGLGAGLAGHLAVGVLREACVKHGVRHLVAQLVGVPLVHGLRGEKEALGRHCLLLALPTSCAAALYSGPARGRRGKRM

SEQ ID NO: 52145 - protein, 218 aa, Zea mays
  Clone ID: LIB3960-024-H7_FLI.pep
STPNHGKGTGSYPRSLNQDAAGKPCEHMCSEHTQAFRLFHGISKIAIQVISKICGTATGIQREHGLDGDVHSGGVEGLEHDLGHLLPVSLGVQGRLGEEDGVLLGSHAELVVEGVMPDLLHVVPVADDPVLDGVLEGQDTPLGLRLVTDVGVLLPHPDHDTSVARAPHDAGEDGPRGVVASEPSLDHASSVVADEGLDILGIGHFLPLVSWFEESHQG

SEQ ID NO: 52146 - protein, 181 aa, Zea mays
  Clone ID: LIB3959-008-C6_FLI.pep
STAMGLAMGRLLGWKKEAQIALLGLGGAGKTAILHKLKLGHAITTGPTIGFNSETLEYNGISFRVWDVGGQGELRPLLRHYLYGVQGVVFVVDSSDREWILRAKDLLNIILDEDQFRNRDLALLVFANKQDRPNVMSAAEIADEFGLPSRLCNRRWHIQSSSAISGEGLHEGMAWLCTNIR

SEQ ID NO: 52147 - protein, 463 aa, Zea mays
  Clone ID: LIB3959-010-E11_FLI.pep
DGEVSSGDLERHSASVSRIQQRRRAMEEGLVSVDKFSGGSQAYFLTHLHQDHTRGLGAVGGWRHGPLYCSPTTARLLPIRFPGIDASLLRPLAPGASASISLFSPSSGQSLSLHVTAIPALHCPGSLMYLFRGDLGCMLYTGDFRWELGCDEARRAKQDLLDALDGDTIDVLYLDNTYCHPSLNFPPRPVVAEQVIDIIRSHPDHEVIIGVDTLGKEDLLLHISRALQTKIWVWPQRLQTIHLLGIDENRDIFTTQTSLTRIRAVPRYSVTIDNLEALNTVCPTIGILPSAIPCLWKSSEGKAKSKGRSSVKSIRCSGRGEGLTEMDCNPLSPPKLFDKDSYTLPYSEHACFSELEDFMHTLSPLTVSGIVSSSFCYVNPRHHFRHLCLDNNVNDDTDRTPIKNKGKDNDKLTPKSWRNGSVTPKERKVRISSSSLYRSKVTMKRKECCGARINDTEEHIGVT

SEQ ID NO: 52148 - protein, 236 aa, Zea mays
  Clone ID: LIB3959-011-B4_FLI.pep
GMATARLLRCASSTFLFSTCTNPLRSCSPLVRRQHPRAAMTTDSSAASFQKIQIQREDTTFDAYVVGKENAPGIVVLQEWWGVDYEIKNHAIHISQLGGGYKALIPDLYRGKVALDVAEAQHLMEGLDWQGAVKDIQASVKWLKSNGSPKAHFGEHDNFVGFSDVTAAKSLEEKLKSSGISYEVHIYPGCSHAFMNTSPEALKRKKGMGLTDENQEAVDLAWSRFSSWMGRFLGSA

SEQ ID NO: 52149 - protein, 126 aa, Zea mays
  Clone ID: LIB3959-016-C12_FLI.pep
LNTNSIFNQDKQNCNLITRLTTLKTGSQKFKHSTNSKTPKTKQEPTKNARASAQPPGLPLGLEQGEDVTLADGPLDIPHDEPVLVIQELNSDLGHLTPGAGPAHHLHHNSKLHLGVHAALIESICQ

SEQ ID NO: 52150 - protein, 277 aa, Zea mays
  Clone ID: LIB3959-016-H2_FLI.pep
LKSLGLEELRGFPFNHAPKHALISLQTATFTCRTAEVELPAAGVPEAEVERVTRTQHQHVLDDRSSGSQDHAFLATLAGVGRRRRRLLLAARRLLLRPLAPSLGRHDLDELVVVDVAVAVHVGLADHLGHLLLAQLLPEVGHHVPELGRGDHPVLVLVEHAERLPELLLRLRVPHLARHQAQELLLVDGAAAVAVHLGDHVLQLRLGGVLPERPHHGSELLGCDATVAVLVEEAESFLELGNLLLAKLVRHGDGTERPRRRGKHARVKTTSARQWRV

SEQ ID NO: 52151 - protein, 332 aa, Zea mays
  Clone ID: LIB3959-017-C12_FLI.pep
HSRGSFENSHESILLRPAASRSSRQHRLLLRPTLERDRPDDHLVVDGSQRSADEGADPEDPVVSPGMVLVVNHGGAKAPRGVDAGAGDRDGGQVDEEHGKPDWKRGEDRHMGVPGVPLGVGGGEDGVDEDEGADDLGAEAVALGVAGRDDVGAAAVAHVQPLLEPLDDARAADGAQALHDDVKHRPGEGQLPRQEQPEGHRRVDVPAGDAGGAVDEGEDHAAEGPGDALDADGGALGGGLGDAHDGEDGDVEEEEGGDELGDAGAVEGPGLELPGLEERRRRGLLVVLVVRALRRRADGLALRELVGAQADVLLLPLHACCYCYLLAADEPS

SEQ ID NO: 52152 - protein, 234 aa, Zea mays
  Clone ID: LIB3959-020-B4_FLI.pep
VARLGSNPKQGVDLSAAAMSKLQSESVKDAISQIVGDAKEKNRKFTETVELQIGLKNYDPQKDKRFSGSVKLPHIPRPKMKVCMLGDAQHVEEAEKMGLDYMDVEALKKMNKNKKLVKRLAKKYHAFLASEAIIKQIPRLLGPGLNKAGKFPTLVTHQESLESKVNETKATVKFQLKKVLCMGVAVGNLAMEEKQIQQNIQMSVNFLVSLLKKNWQNVRCLYVKSTMGKPYRVF

SEQ ID NO: 52153 - protein, 310 aa, Zea mays
  Clone ID: LIB3959-022-G10_FLI.pep
HSTSGSHPKPRTASPPMADRVYPAAKPNPPPGAAGNSNGAQASSFPAPKSQMYQRPIYRPQAPAKRQRGRSCRCSLCCCFCWALVVVILLAFVGAVCGGVFYLLYRPQRPSFSVSSVRLASLNLTSSATAPVLSDAITLTVTARNPNKKMVYLYDDLTLLVATAANAVPLGSATVPGFAHAAGNTTVLTATVSASAVGVDPSGASSDIKRSGGGSFSVVVDADTSAGVRVGGLKTKKIGIQVHCEGIKLTAPPPPPPAPKRAKGKNSTAALAPAPAPSAADATPAKTATVSTAAHSCKVRVRVKIWKWTF

SEQ ID NO: 52154 - protein, 123 aa, Zea mays
  Clone ID: LIB3958-001-E5_FLI.pep
HELQNITFGSKRSLPSYSNTNLSSIFSKTPGPKGGTELKTEETKPCFPSYSSASASPLFLLPFLEYLRFLRNLGSIPLVEVWRWRLGFLMPFLCALNDWLCAVWFFDLAISSGCRSDGSRETN

SEQ ID NO: 52155 - protein, 120 aa, Zea mays
  Clone ID: LIB3958-010-G12_FLI.pep
PFEPPTSPRLVPHLLRLLARAAARRLPLVSAPRAVVHPCAAKMTAGYIVGSLVGSFAIAYLCDTFISDKKAFGGSTPKTVSEKEWWQATDTKFQAWPRTAGPPVVMNPISRQNFIVKSTE

SEQ ID NO: 52156 - protein, 240 aa, Zea mays
  Clone ID: LIB3958-012-F4_FLI.pep
LRASVMGDSQYSFSLTTFSPSGKLVQIEHALTAVGSGQTSLGIKAANGVVIATEKKLPSILVDETSVQKIQALTPNIGVVYSGMGPDFRVLVRKSRKQAQQYYRLYKEHIPVTQLVRETAAVMQEFTQSGGVRPFGVSLLIAGYDDNGPQLYQVDPSGSYFSWKASAMGKNVSNAKTFLEKRYTEDMELDDAIHTAILTLKEGYEGQISSNNIEIGIIRADREFKVLSPSEIKDFLEEVE

SEQ ID NO: 52157 - protein, 207 aa, Zea mays
  Clone ID: LIB3958-016-E8_FLI.pep
WSAVTAEDLVDALREVDWSMPPRPVPEFFSRFTVPRSYSKWTSRLKCNLYYYRTNYFILIMFILGMGFLWKPVAIVAAFMTGLSIAFLNDSFAVTFNEKVTRTVRQFSPHLAAKLRPPITPVLRGRPSSKRSIHICGRPRWVFVLFFSAVICILWLTSCSLLTVLWALLIALFATVLHASFRTPNLKARLNTFREEFRAVWRNYSEL

SEQ ID NO: 52158 - protein, 292 aa, Zea mays
  Clone ID: LIB3958-017-A11_FLI.pep
CALCCSGNKLCEDGKKYGTENTCSSGSTLSKAALSFAKARSMMEKERGNLLKALGTQVAEPLRAMVMGAPLEDARHLAQRYDRMRQEAEAQAIEVSKRQMKLREASGNSDMVSRLEAAESKLQELKSNMGVLGKEAVAAMTAVEAQQQRLTLQRLIALVESERNYHQKVLQILDQLEREMVSERQRIEGAPPVVESSMPPPPAYEEVNGIFMRNTVAELVETVEYFLAEAIQSYQAESDTELNLSTGDYIVVRKVSNNGWAEGECRGKAGWFPYDYIEKRERVLASKVAQVF

SEQ ID NO: 52159 - protein, 282 aa, Zea mays
  Clone ID: LIB3958-019-H8_FLI.pep
ANMQIILELTRCRGRNSRGGLHKCAPCTAMPNNKIVAANMEEKGAGGKAAVPHDELPRFTIFLIPNRREPPLDLVELVCLHHRISLGNGVPGSSPVVELAVVLVGVAVECAVQVPTPAVESRKSNPLPAGAAPVRPYLPPFGDRRHPLAGSGNISGLLHVHCLQLNLGNSYYRVAASNNRLHDGVAAVHDAVDRGGSQLGLILLRYHLLVALGAHVHGRRAAEEATVIDAEDGSLGGLAPSLLVLHGFLNSDETALFAIPLRRSPRGRRGGEGRGIAGNSVG

SEQ ID NO: 52160 - protein, 258 aa, Zea mays
  Clone ID: LIB3958-020-E9_FLI.pep
GSRRESSRATDRSSPLSTFQFHSASAAGRRLRNSDSPTTRIHRRMSEEDKAAASAEQPKRAPKLNERILSSLSRRSVAAHPWHDLEIGPDAPAVFNVVVEITKGSKVKYELDKKTGLIKVDRVLYSSVVYPHNYGFVPRTLCEDNDPMDVLVLMQEPVVPGSFLRARAIGLMPMIDQGEKDDKIIAVCADDPEYRHYNDISELSPHRLQEIKRFFEDYKKNENKEVAVDAFLPATTAREAIQYSMDLYAQYILQSLRQ

SEQ ID NO: 52161 - protein, 225 aa, Zea mays
  Clone ID: LIB3958-022-G2_FLI.pep
PEGEKESHNNNKMCRKEGETEFLDLVDVLVLELDVVVVAVLLALLGPIDVDALVEPERLGKLPVGLEQARLVVHVLEDDVGLVVLVVAEADEDDVPGRDPHLLVHLAPDMAEATRAVHAGGLAPPVAEHPGHLRILLPVFLEDELALVVVSLVLSTLPVLASLTLVLRHLRGGRERCGENLARDRGGERACCGPRFLRNFFRSVRRCLVNARGGGLEPYGSLDLG

SEQ ID NO: 52162 - protein, 314 aa, Zea mays
  Clone ID: LIB3957-002-A11_FLI.pep
TPVMAQAPARAASAVRLFDAHCHLQDPRIAAVAPALIRAAGASGVARFAVNGTSEKDWHLVKQMAEDHPAVVPCFGLHPWCVPERSPDWMNLLRRFFAETPEAAVGEIGLDKGSHGKTINFGEQVEVFQRQLELAKELARPVSVHCVRAFGDLLEVLKQTGPFPAGVLLHSYMGSAEMASALANLGCYFSLSGFLTGMKSTKAKHMLKSIPLDRILLETDAPDAFPRLDNVSVSPVHVHSSDADTEKHHMDSESQAANASNESLNHPENIHIVLEYVASLLEMPESELAELSYKNATKLFSYPGSKVQHEPKDI

SEQ ID NO: 52163 - protein, 190 aa, Zea mays; identical to SEQ ID NO: 48122
  Clone ID: LIB3957-002-D11_FLI.pep

SEQ ID NO: 52164 - protein, 143 aa, Zea mays
  Clone ID: LIB3957-003-E5_FLI.pep
EAAQKSPQDMGIREALMRAEKQLKLSKRKDWYKILGVSKTASAAEIKRAYKKLALQWHPDKNVDNREKAENMFREIAAAYEVLGDEDKRVRYDRGEDVEEMNMGGGGGFNPFGGGGQQYTFQYDGGFPGGGFPGGGGFQFNFG

SEQ ID NO: 52165 - protein, 404 aa, Zea mays
  Clone ID: LIB3957-006-G8_FLI.pep
GEPLKTVSAAAAAAACCCLVHLHPPHRPTGFLPRIRTSPLTSLCLINAGITARTGPALPPFLLPPPSLLTATTGRALPPLCARCPGLPRALHRRRAPIRSEMDEAVPALATGQASTDAVTEQPVNVYIWDMDETLILLKSLLDGSYAGAFDGLKDHEKSTEIGKRWENLILELCDEHFFYEEIENYNEPYLNALNEYDDGRDLTSYDFEADCFSSPYDDANKKKLAYRHRAIGEKYAKGLEKVLDGHMVKVCNDQYSLTDKYTDGWLSSAHKLLEEALGKSASAPSANSSSINCIVTSGSLIPSLAKCLLYHLDDVVSSENVYSSWEVGKLQCFKWIKERFDGPNVRFCAIGDGHEECSAAQVMKWPFIKIEFRPEAHHRFPGLDLPTVQTYMDVIYESSSKDG

SEQ ID NO: 52166 - protein, 269 aa, Zea mays
  Clone ID: LIB3957-009-A8_FLI.pep
AALSATAQTRRDRHCDFARDKTSQITPARSPMASSCQNVEIPGKPTETGTALLETATGTIQGFAPLSQIHQHLCAFHFYADDMGRQVEAHHFCAHLNEDVRQCLIFDGPGAGARLIGVEYIVSETVFLTLPDAEKPLWHTHEFEVKGGVLFMPGVPGVVERRDLEKVCKTYGKTIHFWQVDRGDALPLGLPQIMMVLTREGQLRQDLADCVEKKFGVSFQKERENRAYMSGPEHGIHPLANATGKGLRTEIREVDLPASTTAGAGRVFT

SEQ ID NO: 52167 - protein, 93 aa, Zea mays
  Clone ID: LIB3957-010-A4_FLI.pep
GCLLSSSSPCSLFPVMWRRKSAQGLILIILAHAGAIRTVQARAFSKTSAPAGTARAVSPFSNHAIVPLNVPWRTRQRGEGVYQAGTSREPPSA

SEQ ID NO: 52168 - protein, 107 aa, Zea mays
  Clone ID: LIB3957-012-E11_FLI.pep
SAPKVTAGFTCPPEMLTATATATARASACASATATRPPAVLMSWYIFPSERTDPSAAKTKMAVAMNSEMAARMVSGCVASSLRPTVNRRPGRTPVLMSSPNKNLPLL

SEQ ID NO: 52169 - protein, 174 aa, Zea mays
  Clone ID: LIB3957-018-F11_FLI.pep
MNFRVVKNRLNQLLNELVIDLCGHRYTHCYLHQRHNIVHPHLFGFGEFDCCFSLFLDWGGRTITCIVITLPGTSPTGTRDSARVLLFSSILPTLMSFTSLTVFGAISLFAGPDVGAVGQPELHLDRLLHASHLHGPGHERLPPPPTPPLNSQVPTRQQEQPPGQGRESAQEFRG

SEQ ID NO: 52170 - protein, 238 aa, Zea mays
  Clone ID: LIB3957-020-F12_FLI.pep
KASRLVGDVVGKPIKPLIQPFTRCSTSALDVPVPLAKRMQTKLVSNFSSIHSIGKILFVCKYKQHGITQLILIQHPVELISSLNNTFPIIAVYNKNKSLRVLKVVPPQGPDLVLATNIPNGEANVLVLNSFNIESNGGDGGDDLAELELIEDGGLTGGIEPDHENPHLLLGEEAAEQLPKGEPHLFLNEIRDGGERLPQPPRAPSPWTLSRWASAICALGSAETGARGAVVVGRASER

SEQ ID NO: 52171 - protein, 120 aa, Zea mays
  Clone ID: LIB3957-023-A10_FLI.pep
GARETDAYTQAAVEEEEKKKKKMASSAYASWSKRWIRPEVYPLFVPMAVALGICSYQLVRNITGNPEVRVTKEKRAAGVLDNHDEGERYAMHGLRKFVRGKKPEIMASINSFFADPPKDD

SEQ ID NO: 52172 - protein, 175 aa, Zea mays
  Clone ID: LIB3957-024-B2_FLI.pep
SPSPSSDITETGRQSSNQALSPLMRRASWMSLGMMVTLLAWMAQRLVSSKRPTRYASAASCSAATAEDWNRRSVLKSCAISRTSRWKGSFRMSSSVLFWYLRISRRATVPGRNLCGFFTPPVAGADLRAALVASCFRGALPPVDFLAVCFVRAIGESCERAGGAARSKDLKLEIG

SEQ ID NO: 52173 - protein, 125 aa, Zea mays
  Clone ID: LIB3957-025-B9_FLI.pep
IVAQGPNRYMILTIMMFLLHINLQILLMVFYVQYSDQAEAERASILENFRQETTQWNKTAKATNIAESSKLESTGSKISIIVATDACLPQAAMAEAPLMARVLINYELPTKKVSFNYISVHICCF

SEQ ID NO: 52174 - protein, 286 aa, Zea mays; identical to SEQ ID NO: 47877
  Clone ID: LIB3912-002-C6_FLI.pep

SEQ ID NO: 52175 - protein, 109 aa, Zea mays
  Clone ID: LIB3912-002-E11_FLI.pep
SLEKRQSEANRIREKYPDRIPVIVEKAERSDIPDIDKKKYLVPADLTVGQFVYVVRKRIKLSAEKAIFIFVKNTLPPTAALMSSIYEENKDEDGFLYMTYSGENTFGLL

SEQ ID NO: 52176 - protein, 208 aa, Zea mays
  Clone ID: LIB3912-007-A1_FLI.pep
KYVKLLILLARIWVSSVPLLLFWGSEFPANLPTLLLMVCLAIAGAYQSSQGNSSENDPNNTTVFVGGLDSNVNEEYLRQIFTLYGEISYVKIPVGKHCGFVQFTSRSCAEEAIRMLNGSQVGGQKVRLSWGRSPQNRQASQHDANNQYNGNSYYGYQQPGYEGYGYGASSAQDPSIQNYYGYSGCGNYEQQQPTQEQQLQQPPPPQQQ

SEQ ID NO: 52177 - protein, 446 aa, Zea mays
  Clone ID: LIB3912-007-H10_FLI.pep
GSRPRAPPPSVCPSPDHPSSPPSASRARARALVPSRPRSPSLARRAPIELPSPRGGEQGPTRALSRGDPVAFLRGCFSFGSAGRRRPKASPLPSPPRLTAAAAAADDGAKMKGLFKSKPRTPVDIVRQTRECLVYLDLHSDSRSGDAKREEKMTELSKNIRDMKSILYGNGESEPVTEACVQLTQEFFRENTLRLLIIHLPKLNLETRKDATQVVANLQRQQVSSKIVASEYLESNKDLLDILILGYENMDIALHYGAMLRECIRHQSIARYVLESEHMKKFFDYIQLPNFDIASDASATFKELLTRHKATVAEFLSNNYDWFFEEFNSRLLSSTNYITKRQAIKLLGDMLLDRSNAAVMMRYVSSKDNLMILMNLLRDSSKNIQIEAFHVFKLFAANKNKPPEVVNILVTNRSKLLRFFAGFKIDKEDEQFEADKEQVIKEISAL

SEQ ID NO: 52178 - protein, 192 aa, Zea mays
  Clone ID: LIB3912-008-G2_FLI.pep
SWACLPMSKKRKHLDPANSLKDSEQVVASDFIRGDDLDDLLSKLIRSVEIAKASRGGLPEKIWMKQQFAIGVNDVTRVLERMPHSVTAHPAQMSSGAPTVSGRRQAPLVPLQAVLVAADCNPKWLTKHIPTLASTRQVPVLCVKDNKGGSVRLGHVVNVRTALAIGVKAKDSVLNKTIDEFLKDSKLVANEP

SEQ ID NO: 52179 - protein, 240 aa, Zea mays
  Clone ID: LIB3912-009-E5_FLI.pep
SRRRCSSHIPREDACSSPIDTMAVFSDLHTADGLKSLEAHLAGKTYVSGDSITKDDIKVFAAVPSKPGAEFPNAARWYETVSAAVASRFPGKAVGVNLPAGSAPAAAAPADEAEDDDDLDLFGDETEEDKKAADERAAAAKASSKKKESGKSSVLMDVKPWDDETDMKKLEEAVRSVQMEGLTWGASKLVPVGYGIKKMTIMLTIVDDLVSIDTLIEDHLTQEPINEYVQSCDIVAFNKI

SEQ ID NO: 52180 - protein, 399 aa, Zea mays
  Clone ID: LIB3912-012-A3_FLI.pep
FTRITGTGLIFSTLFTSGMGFLSALSPNYLCLVALRFLVGVGVGGSHVFISWFLEFVPAQNRGTWMVIFSLFWTLGTILEASLAWVVLPALNWRWLLVFTALPCFLLLPFFGLTPESPRYLCAQNRMSDATSVLERMANANQSALPPGVLTYNRQTKCDHDVLAPESECLLPVREKECTVDNAKSSESGSLAALRMLLSRELLRSTLLLWFVFYANSFAYYGLVLLTSQLSDANKSCASGVSFGLRQKEINLYKDTFITSLAEIPGLFLSAVLVDWFGRKASMWSMMFACCAFLGPLVLQQTELLTTILLFGARACAMGSFTVLCLYAPEVYPTFVRSTGAGIATAIGRIGGVVCPLVAVAMLRSCHQMEALIVFEVILCLAAVACMFFPVETKGRGMD

SEQ ID NO: 52181 - protein, 326 aa, Zea mays
  Clone ID: LIB3912-014-G3_FLI.pep
LTSGHLSSRASANSLLRVAPCSSACALILRLLLLHRLRPDHISLSFSLHACARVVPTTSRYPLTVTGLLHSLALRLGHARDVYVANAAVSSYFAASDVASADRLFAEVSTDVADVVTWTTMVTGHASAGGLGRARHFFDAMSERNVVSWNAMLSAYARAGMLTEARDLFDAMPTRNAATWSCMISGLVLSGRCWEALGLFGDMVHSSGIVPNEPALVSVVSACAQMRSLEHGAWVHAYAEQELQGAMSVVLASAIIDMYGKCGGIHSAIRVFAAMPMRNIYSWNAMITGLAMNGGERQALSLLWKMQMVGVQPNDITFIGLLSACT

SEQ ID NO: 52182 - protein, 183 aa, Zea mays
  Clone ID: LIB3912-016-E4_FLI.pep
DAHNTAPTHTQTVLRDDTHARRTDMDMRGGHNMGGMAPPPSPHGGMRKRYVHMTFFWGKNSEILFTGWPGARGGMYALALVAVFAFALLLEFLGSRRLDALLSAAAGRRAAAAGAARTAVYALRVGGAYLLMLALMSFNGGVLLVAVAGHAAGFLAFRAGLFGDRRAQVEGDGKDEVAPVVCC

SEQ ID NO: 52183 - protein, 288 aa, Zea mays
  Clone ID: LIB3912-017-A1_FLI.pep
RIPRQAGRRGGQEDRRPSRAGARDGNGTGPQNLRSFLPARPCPSTRRSCRPRPTSALSSSRGIGYATGCAMVLWVFGYGSLIWNPGFDFDDKILGFIKGYKRTFNLACIDHRGTPEHPARTCTLETDDEAICWGIAYCVKGGPEKELKAMQYLERRECEYDQKISIDFYKEGDPLKPAVTGVLVFVSTPDPIGNKYYLGPAPLQDMARQIATANGPTGYNRDYLFSMEKALASISHEDDSIIELANEVRKVLNRTKETKITGANASLKSHAPLVHLSALPEGTVVDSR

SEQ ID NO: 52184 - protein, 240 aa, Zea mays; identical to SEQ ID NO: 47604
  Clone ID: LIB3912-017-E10_FLI.pep

SEQ ID NO: 52185 - protein, 419 aa, Zea mays
  Clone ID: LIB3912-019-E4_FLI.pep
ISPPTCRMAPVSHNNDSDSSDSDDNTIILATLLTLCIEATRRRRRQSSIPRRVIARDHFARENLIRHHYFGPNPVYPAHMFRRRFRMSRPLFLRILQGLQQQDSYFTQQVDATGLAGLGPLQKVCAAMRTLAYGLPTDAIDEYIQIGESTARQCLIRFCRALIAYFSVWYLRTPNQADIARIMQHSESRGFPGMLGSIDCMHWECRNYRGRNSRPTMILEAVASYDLWIWHAFFGMPGTNNDINVLHRSPVFDPMTSGQMPPVHYTVNGHAYNFGYYLADDIYPNWPTFVKAIRHPWEEKKIYFTQMQESHRKDIERAFSVLQARWAVLRGLAYRRDRNRLTEIITACIIMHNMIIEDEGEFAANTDFGDNASATAHCELIQEGRSDWVIDHFDLRRQERFCNLQNDLVEHLWTKRGSM

SEQ ID NO: 52186 - protein, 205 aa, Zea mays
  Clone ID: LIB3912-024-G11_FLI.pep
DPQFLLRISHSAQRRCEGRGTRRKMGLAFGKLFSRLFAKKEMRILMVGLDAAGKTTILYKLKLGEIVTTIPTIGFNVETVEYKNISFTVWDVGGQDKIRPLWRHYFQNTQGLIFVVDSNDRDRVVEARDELHRMLNEDELRDAVLLVFANKQDLPNAMNAAEITDKLGLHSLRQRHWYIQSTCATTGEGLYEGLDWLSSNIASKA

SEQ ID NO: 52187 - protein, 231 aa, Zea mays
  Clone ID: LIB3912-025-D6_FLI.pep
GVMAVSFANLNTEAGLKKLDEYLLTRSYITGYQASKDDLAVYTSFSSAPSSKYINVARWFNHIDALVRLSGITAEGQGVKVESSAVPSAPTPDVAEAQAPAAEEEDDDDVDLFGEETEDEKKAAEERAAAAKASGKKKESGKSSVLLDVKPWDDETDMAKLEEAVRSVKMEGLLWGASKLVPVGYGIKKLQIMMTIVDDLVSVDTLIEDYLCAEPVNEYVQSCDIVAFNKI

SEQ ID NO: 52188 - protein, 91 aa, Zea mays
  Clone ID: 700261537_FLI.pep
GFLVHLHHLVILEALGGTPSKRRWLVTLGGCRLLDGSGDCLRRALQEDCGEAAVLIVRGSRLPRRSGKGDISGIEVLSDFLSTWLKDQVVS

SEQ ID NO: 52189 - protein, 111 aa, Zea mays
  Clone ID: 700262483_FLI.pep
DMLGWQMNGLAFTLLSLMHYWTAGSIHDRRPSYCAQIRHGSDFGLVQVDQSTVAIKENFGKFSEVLEPGCHFLPWCIGQQIAGYLSLRVRQLDIRCETKTKVFSVAFHFDV

SEQ ID NO: 52190 - protein, 233 aa, Zea mays
  Clone ID: 700265290_FLI.pep
FQSIGSRCARALWVRWSPGLTRFSFRVEDDRSFTRFDLDDDTSTSPPEPDTPRAAAAATGREKPRRVAAGLTSCASAPSQLQLEVRGGSSSSNRSWRASTTRWPSALDATGVDRWRGRGRRGERRRRTRRRRRVEGRVLGELSLARLSLKLEGEHGVAAEIYELTPELLVVEVRRTSDGAADYEEFFRTRLRPGLRDLVCDEDEPTLLQSDECSQSLSGVMGETRERRLRSLR

SEQ ID NO: 52191 - protein, 221 aa, Zea mays
  Clone ID: 700582513_FLI.pep
RRFYGACTKQRKYVIVTEYMPGGNLYDFLHTLKNTLDLPTVLRIAIGISKGMDYLHQNNIIHRDLKTANLLMGSDYVVKIADFGVSRNPSQGGDMTAETGTYRWMAPEVINHKPYDHRADIFSFAVVLWELVTSKIPYRNLTPLQAALGVRQGMRLEIPSWVNPQLSKLIQRCWDENPNLRPSFSEITAELEGMLRDHQASKGSNKHSKAKAHKKSQREAE

SEQ ID NO: 52192 - protein, 375 aa, Glycine max
  Clone ID: 700731292_FLI.pep
DGTAGWLLGVVCDLKLSHPPPIATVPLGTGNNLPFAFGWGKKNPGTDEQAVKSFLDQVMKAKEMKIDNWHILMRMRAPKQGPCDPIPPLELPHSLHAFHRVSEADELNKEGFHTFRGGFWNYFSMGMDAQVSYAFHSERKLHPEKFKNQLVNQSTYAKLGCTQGWFFAPLFHPPSSNIAHLAKVKVMKTHGGWEDLQIPSSIRSIVCLNLPSFSGGLNPWGTPNKMKRRDRDLTPPYVDDGLIEVVGFRDAWHGLVLLAPNGHGTRLAQAHRIRFEFHKGAAEYTFMRIDGEPWKQPLPVDDDTVLVEISHHGQVNMLATHDSKSKSENDPSSPHHNDVEEDDSDDEEAKADEYRKFGAADTFKIPDEVDLAHLS

SEQ ID NO: 52193 - protein, 391 aa, Glycine max; identical to SEQ ID NO: 46303
  Clone ID: 700731628_FLI.pep

SEQ ID NO: 52194 - protein, 350 aa, Glycine max
  Clone ID: 700732184_FLI.pep
RVSFDQIITMVSEGTLLGMGNPLLDISAVVDEDFLKKYDITSNNAILAEDKHKPMYQELAEKYNVEYIAGGATQNSIKVAQWMLQVPGATSYMGGIGKDKFGEEMKKNSKLAGVNVHYYEDETTPTGTCAVCIVGGERSLVANLAAANCYKSDHLKRPENWALVEKAKYIYIAGFFLTVSPDSIQLVAEHSAANNKIFSMNLSAPFICEFFRDVQEKALPYTDFVFGNETEARTFSKVHGWETDNVEEIAVKISQWPKASGTHKRITVITQGADPICVAEDGKVKKFPVKLLPKEKLVDTNGAGDAFVGGFLSQLVQEKPIEECVRAGCYAANVIIQRSGCTYPEKPDFH

SEQ ID NO: 52195 - protein, 565 aa, Glycine max; identical to SEQ ID NO: 43888
  Clone ID: 700734795_FLI.pep

SEQ ID NO: 52196 - protein, 131 aa, Glycine max
  Clone ID: 700736060_FLI.pep
APHAHTHSFAKKEREMALRAAVLRHVRVPLQAAPKLQPWRAMSSHGDDHLSKEEVVERVLAVVKDFPKVDPSRVSPDVHFQKDLGLDSLDNVEIVMALEEEFKLEIPDKEADKIDSCHLAIEYISNHPMAG

SEQ ID NO: 52197 - protein, 159 aa, Glycine max
  Clone ID: 700735863_FLI.pep
EMEEEPVYVNAKQYHGILRRRQSRAKAEIEKKVIKNRKPYLHESRHLHAMRRARGNGGRFLNTKKLENNNSNSTSDKGNNTRANPSTNSPNTQLLFTNNLNLGSSNVSQATVQHMHTEQSFTIGYHNGNGLTALYRSQANGKKEGNCFGKERDPNGAFK

SEQ ID NO: 52198 - protein, 642 aa, Glycine max
  Clone ID: 700736227_FLI.pep
PTRVGMSARPSKNWESTHPYTRRGRTGRYPTRKDQNSEKPGEVYVPRDENFGHLKSSDFLAYGIKSLSQYVLPAFESVFDLNFTPNEFDSFQDVRDLHEGGIKLPTEVISTIMPLPVVKELFRTDGEQVLKFPPPHVIQVSKSAWMTDEEFAREMVAGVNPCVIRGLQEFPPKSNLDPTIYGEQTSKITADALDLDGYTVDEALASRRLFMLDYHDVFMPYIRRINQTYAKAYATRTILFLRENGTLKPVAIELSLPHPAGDLSGAVSQVILPAKEGVESTIWLLAKAYVVVNDSCYHQLMSHWLNTHAVIEPFIIATNRHLSALHPIYKLLTPHYRDTMNINALARQSLINADGIIEKSFLPSKHSVEMSSAVYKNWVFTDQALPADLIKRGVAIKDPSAPHGLRLLIEDYPYAVDGLEIWAAIKTWVQEYVSLYYARDDDVKPDSELQQWWKEAVEKGHGDLKDKPWWPKLQTIEELVEICTIIIWTASALHAAVNFGQYPYGGFILNRPTSSRRLLPEKGTPEYEEMVKSHQKAYLRTITSKFQTLVDLSVIEILSRHASDEVYLGQRDNPHWTSDSKALQAFQKFGNKLKEIEEKLARKNNDQSLSNRLGPVQLPYTLLHPNSEEGLTCRGIPNSISI

SEQ ID NO: 52199 - protein, 214 aa, Glycine max
  Clone ID: 700737952_FLI.pep
TIATYIVEGGTTRTYTTIKSMCHTAPHVLRTLLSHLTQAIADYVIFQVESGAHCIQIFDSWGGQLPPEMWERWSKPYIKEIVNLVKKKCPGVPIVLYINGNGGLLERMKDTGVDVIGLDWTVDMADGRRRLGSGIGVQGNVDPAYLFSPLDALTEEIQRVVRCAGPRRHILNLGHGVLVGTPEEAVAHFFEVARSLQFDTLFQNNTAKGPNLVT

SEQ ID NO: 52200 - protein, 301 aa, Glycine max
  Clone ID: 700738353_FLI.pep
FIWRIDHPYYGYDVWLANVRGTKYSRGHISLHPNDMAYWDWSWDELARYDLPAFVQYVYNQTGQRMHYAGHSLGTLMVLADLSRGKLLDMLRSAALLCPIAHLNHVTSPVARTAAQSFIADPLYWLGLREFIPNGDAASKLVGGICHILNLINCSNNLLTLITGPNCCLNSSAFNAYLDHGLPPTATKNLIHLCQMIRTAKIAKYDYGDQRQNMQHYGQRVPPLYDMTKISNEFPLFLTYGRQDALSNVKDVQLLLNDLRDHDGNKLVVLFTEDYSHYDFIMGVNVNQIIYDPMIVFFEVN

SEQ ID NO: 52201 - protein, 134 aa, Glycine max
  Clone ID: 700897637_FLI.pep
KKISLFYMYNSTYNISILFDKKGQFTKSRNTQSFLKLGCNINKLIKLIQAMLKITKKVWGWDRPVCIAYCILRVRRSTHPRRIGRTRCRSNRRAPASPAAAESPSPDSGFYRRVWVGSGAARVYARFVQPRPCD

SEQ ID NO: 52202 - protein, 80 aa, Glycine max
  Clone ID: 700900126_FLI.pep
EKEKRGISMASRVSLKAKGKSSKGSKAAEDRSASECLKEWTTWAMRKAKVITHYGFIPLVIVIGMNSDPKPPLSQLLSPV

SEQ ID NO: 52203 - protein, 246 aa, Glycine max
  Clone ID: 700900559_FLI.pep
VTEYKAKRGGRILFIPKLHDRAQVFISCPSEESGARPTYIGTIERWLNNKVTLPDIKCHSKINLFILVENMGRVNYGSFIFDRKGILSSVYLDKEQVKGWKMFPIPLHNLNEMSTYNPITQVAYSAFSGISSFRKKLIYKNGNTSKEPAFYSGHFLIDKSSQVKDTFISFNNWGKGIVFVNDFNIGRYWPLRGPQCNLYVPAPLLKQGDNFLVILELESPDPELVVHTVDEPDFTCGSSGTSLHQL

SEQ ID NO: 52204 - protein, 162 aa, Glycine max
  Clone ID: 700900916_FLI.pep
ECHAVERIWKLLTEVGDMNLMMDPEDFLRLKKELGMMRTAGETVAFCFRSRELVEVARVCRNLREKVPEILEVEVDPKGGPGMMEAAMKVYSEKEKGKVHVLQGMQGIEVAMKRFFYAYKQVVTVMMGSSEADNGFTKIFLEPTYFPSLDAAKTFLGYYNQN

SEQ ID NO: 52205 - protein, 331 aa, Glycine max
  Clone ID: 700904851_FLI.pep
SSVAVMFSIVVYGVIGCSSVWAHLGAALLLGLLWMQSTYVGHDSGHYEVMSSPGYNKLAQILCGNCMTGISIAWWKWTHNAHHISCNSLDYDPDLQHIPVFAVSTRFFNSIKSCFYGRKLVFDSLSRFLISYQHFTFYPVLCFARVNLYLQTLLLLFSRRKVPDRAFNIMGILVFWVWFPLLISSLPNWGERVMFVLASFAVCSIQHLQFCLNHFSADVYEGPPNGNDWFEKQTGGTLDISCSSWMDWFFGGLQFQLEHHLFPRLPRAQLRKISPLVIDLCKKHNLPYRSLTFVEANLWTLKTLRTAALQARNLSNPSSQNLLWEAFNTHG

SEQ ID NO: 52206 - protein, 242 aa, Glycine max
  Clone ID: 700904857_FLI.pep
YANDVQDHIDYGTSGKVAGFIAETMQGVGGAVELAPGYLKLVYDIIHKAGGVCIADEVQTGFGRTGSHYWGFETQGVIPDIVTMAKGIGNGLPLGAVVTTPEIASVLAQKIQFNTFGGNPVCSAGGLAVLRVLDKEKRQAHCADVGSHLLERLRFLMERHDIIGNVRGRGLMVGIELVTDRDNKTPAKAETAVVFEKLRELGVLVGKGGLHGNVFRIKPPMCFSKDDADFLVDALDYSLSKL

SEQ ID NO: 52207 - protein, 355 aa, Glycine max
  Clone ID: 700905224_FLI.pep
KKNKTLTERCCFEREMAPNLECRMYEAKYPEVDMAVMIQVKNIADMGAYVSLLEYNNIEGMILFSELSRRRIRSVSSLIKVGRIEPVMVLRVDKEKGYIDLSKRRVSEEDIQACEERYNKSKLVHSIMRHVAETLNIDLEELYIHIGWPLYRKYGHAFEAFKIIVTDPDTVLSTLTREVKEVGPDGQEVTSVVPAVSEEVKDSLVKNIRRRMTPQPLKIRADIEMKCFQFDGVLHIKEAMRKAEAVGNDDCPVKIKLVAPPLYVLTTQTLDKEQGILVLNNAIASCTEAIEQHKGKLVVKEAARAVSERDDKLLAEHMAKLRQDNEEVSGDEDSEEEEDTGMGEVDVDNGAGITE

SEQ ID NO: 52208 - protein, 613 aa, Glycine max
  Clone ID: 700906023_FLI.pep
EILRYIYYHQNKDGGWGLHIEGHSIMFCTTLNYICMRILGEGPNGGHNNACAKARKWIHDHGGATHIPSWGKFWLSVLGIVDWCGSNPMPPEFWILPSFLPMHPGKMWCYCRLVYMPMSYLYGKKFTGPITPLVVNLREELFIQPYDENSWKKARHKCANEDLYYPHHWIQDLLWDSLYVFTEPLLNCWPFNKLVREKALQVTMKHIHYEDENSRYIAIGCVEKVLCMLACWVEDPNGDAFKKHLARIPDYLWVSEDGMTMQGIGTQSWDVGFIVQALLATNLIDDFGPTIAKAHDFIKKSQVRENPSGDFKSMYRHICKGSWTLADRDHAWQVSDTTAECLKCCLLLSVLPQDIVGEKMELEKLHDSINLILSLQSKNGGMTAWEPAGAYKWLELLNPTEFFADIVVEHEYLECTASAIQVLVLFKKLYPEHRKEEIENFIAKAVTFIEDTQLENGSWYGNWAVCFTYSSWFALGGLVAAGKTYTNCVTIRKAVKFLLKIQNKDGGWGESYLSCPRKMYVPLEGSRSNVVQTSWALMALIHAEQAERDPTPLHHAAKLLINSQLEDGDWPQQETLGVYLRNCLVHYSFYRNIFPMWALAEYRTNVLLPSFTI

SEQ ID NO: 52209 - protein, 356 aa, Glycine max
  Clone ID: 700905846_FLI.pep
QIGESQPSIFFTDRSGQHYKECLSMAVDNLPVLDGKTPVQVYQSFCESFKSSFSPFMGSTITSISMGLGPDGELRYPSHHWLPSNGKTQGAGEFQCYDQNMLSFLKQHAEASGNPLWGLGGPHDAPIYDQPPYNGFFNDGASWESTYGDFFLSWYSNQLIAHGDCLLSLASSTFGDSGVAIYGKIPLMHSWYGTRSHPSELTAGFYNTVNRDGYGPVAQMFARNSCKIILPGMDLSDANQPKENHSSPELLLAQIMEACKKHEVQVSGQNSSESGVPGGFEQIKKNLSGDNVLDLFTYHRMGASFFSPEHFPLFTEFVRSLKQPELHSDDLPAEEEVGAESAVVMSRDSTVSMQAA

SEQ ID NO: 52210 - protein, 406 aa, Glycine max
  Clone ID: 700909141_FLI.pep
ISHLLLLIPTPKYTHTMETFLFTSESVNEGHPDKICDQVSDAILDACLEQDPESKVACETCTKTNMVMVFGEITTKAKVNYEKIVRDTCRGIGFVSADVGLDADKCNVLVNIEQQSPDIAQGVHGHLTKKPEEIGAGDQGHMFGYATDETPELMPLTHVLATKLGAKLTEVRKNKTCPWLRPDGKTQVTVEYRNDGGAMVPIRVHTVLISTQHDETVTNDQIAKDLKEHVIKPVIPAEYLDDNTIFHLNPSGRFVIGGPHGDAGLTGRKIIIDTYGGWGAHGGGAFSGKDPTKVDRSGAYIVRQAAKSVVASGLARRCIVQVSYAIGVPDPLSVFVDTYKTGKIPDSDILALIKEHFDFRPGMISINLDLMRGGNFRYQKTAAYGHFGRDDPDFTWETVKILKPSA

SEQ ID NO: 52211 - protein, 203 aa, Glycine max
  Clone ID: 700790034_FLI.pep
AMCEPLSVGVHACRRANIGPETYVLIMGAGPIGLVTMLAARAFGAPRTVIVDVDDYRLSVAKSLGADDIVKVSTNIQDVAEEVVQIQKVMGADIDVTFDCAGFDKTMSTALSATQPGGKVCLVGMGHSEMTVPLTPAAAREVDVLGVFRYMNTWPLCLEFLRSGKIDVKPLITHRFGFSQKEVEEAFETSARGGNAIKVMFNL

SEQ ID NO: 52212 - protein, 178 aa, Glycine max
  Clone ID: 700847068_FLI.pep
PYRISDCAPEDVSKALTRTLADMQLDYIDLYLMHWPFRTKLGSRGWNPENMAPLCLPETWNAMEGLFASGQARAIGVSNFSTKKLQDLLGYAKIPPAVNQVECHPVWQQPALHNLCKSTGVHLTAYCPLGSPGSWVKGQVLKEPLLKEIAEKLHKSPAQVALRWGTPKWSQCSSKKCK

SEQ ID NO: 52213 - protein, 136 aa, Zea mays
  Clone ID: 700551574_FLI.pep
FQESDENSGYRAPEVILAGQYSLKSDVYSFGVVMLELLTGRKPFDRTRPRPEQSLVRWATPQLHDIDPALQGLYPSKSLSRFADAIALCVQPEPEFRPPMSEVVQSLVRLVQRANMTRMHESQSRRHGESGGDYEF

SEQ ID NO: 52214 - protein, 101 aa, Glycine max
  Clone ID: 700553684_FLI.pep
KLLRSVANYQAINVDTLRAQNMESWPFFNQVTADLTPLNPRKVAVKFDTFKIGGIIPIKAPGRARGELEITYLDEELRLSRGDKGNLFILKMVDPSYRVPI

SEQ ID NO: 52215 - protein, 96 aa, Glycine max
  Clone ID: 700554207_FLI.pep
KAADEGLVIIQSPKVGFFRRSRTIKGRRAPPSCKEKQNVEEGQVICYIEQLGGELPIESDVSGEVIKILQKDGDPVGYGDALVAILPSFPGIKKLQ

SEQ ID NO: 52216 - protein, 329 aa, Glycine max
  Clone ID: 700788604_FLI.pep
EFQANPFYIAGESYAGVYVPTLAFEVAKGIRSGTKPVINFKGYMVGNGVTDEIFDGNALIPFVHGMGLISDSIYENLQSSCKGNYYDAYSLDENDVCYKTIEKVDRAIDGLNVYNILEPCYHFPDAATAKENGTLPRSFKQLGVTERPLPVRKRMFGRAWPFRAPVKPGLVPLWPQLAQTRHVACVSDEVASSWLNNVAVRKAIHAESEKVAGPWELCSSRIEYHHNAGSMIPYHKNLTRLGYRALIFSGDHDMCVPFTGSEAWTRSLGYKIVDEWRPWNSNNQVAGYLQAYENNLTFLTIKGAGHTVPEYKPREALDFYSRWLEGKLI

SEQ ID NO: 52217 - protein, 390 aa, Glycine max
  Clone ID: 700788916_FLI.pep
LRFIDDHNSAEDRTYKLGLNRFADLTNEEYRAKYLGTKIDPNRRLGKTPSNRYAPRVGDKLPDSVDWRKEGAVPPVKDQGGCGSCWAFSAIGAVEGINKIVTGELISLSEQELVDCDTGYNQGCNGGLMDYAFEFIINNGGIDSDEDYPYRGVDGRCDTYRKNAKVVSIDDYEDVPAYDELALKKAVANQPVSVAIEGGGREFQLYVSGVFTGRCGTALDHGVVAVGYGTAKGHDYWIVRNSWGSSWGEDGYIRLERNLANSRSGKCGIAIEPSYPLKNGPNPPNPGPSPPSPVKPPNVCDNYYSCADSATCCCIFEFGNACFEWGCCPLEGASCCDDHYSCCPADYPICNTYAGTCLRSKNNPFGVKALRRTPAKPHWTFGRKNKVSSA

SEQ ID NO: 52218 - protein, 519 aa, Glycine max
  Clone ID: 700834608_FLI.pep
CRSSSTQGCPTDARKPTCWRRNSVLPTTRGFFYEVGGDKIKLPPSCFAELSEQGTFDKRQGPLYFQLSLVHEESTSSIQTTDKVKQGRTTHSGVLEFTADEGSVGLPPHVWNNLFSEGTPKPPLVEIRYVWLPKGTYAKLQPENVGFSDLPNHKAILETCLRQHATLSQGDILTVNYGELAYELRVLELKPSSSVSVLETDIEVDIVDPDTSSQKTDGHVLMPLVFGMPQIGTIEEGKFVYYKFSIDNVIWEQLSPGNSCVEVKLESETDGGDTDIFISRHPVIFPTRHRHEWSSHDIGSKTLILSSNDKNMGAGTYSIGVYGFKGITKYKISVMVQDNFNQNVGQQASSSMSSMELDTEQCRNCKHYIPGRTIALHEAYCSRHNVVCQHAGCGVVLRIEESKNHIHCDRCGQAFQQAELEKHMKVFHEPLHCPCGIILEKEQMVEHQASVCPLRLITCRFCGDMVQAGRSAMDVRDRLRGLSEHESICGSRTAPCDSCGRSVMLKDMDIHQIAVHQSG

SEQ ID NO: 52219 - protein, 241 aa, Glycine max
  Clone ID: 700893754_FLI.pep
DYMKQNVQCPEANYPTFLYAMPMSHTKVFFEETCLASKDAMPFDLLKKKLFSRLNTMGIRIKKTYEEEWSYIPVGGSLPNTEQKNLAFGAAASMVHPATGYSVVRSLSEAPKYASVIATILKDGHAKDIITQERRKENLSMQAWNTLWPQERKRQRAFFLFGLALILQLDIEGIRTFFRTFFCLPDWMWQGFLGSSLSSTDLVLFAFYMFIIAPNNLRMGLVRHLLSDPTGATMIKTYLTI

SEQ ID NO: 52220 - protein, 224 aa, Glycine max
  Clone ID: 700788665_FLI.pep
VAVWFQNRRARWKTKQLERDYGVLKANYDALKLNFDTLDQDNEALRKQVKELKSRLLQEENTGGSGVSVKEEIITRPADSEDKTMEQSKSDPSSETSNINPSSESEEDHLNYECFNNNDDCVGGTAASLLQVDFKDGSSDSDGSSAILNEDNMYSPLKFNNCSISTSPSSSSMMNCFQFQKPYHHHAQYVKMEEHNFLSADEACNFFSDEQAPTLQWYCPEQWS

SEQ ID NO: 52221 - protein, 235 aa, Glycine max
  Clone ID: 700895939_FLI.pep
KVVWLNLILVLHFRYQEARHVKQGRELLNISFEIFNSLVVDETLVEILEKFAMLLLDLQCESHSTVKELTNLLKVFFNQTPRSHGRGTNSHSTRGQGTAITKNSVLVNSNVTEITEFLHLIPSQSKRSQIPQNKMVLRSASDKAVPFPHQVFSKRNGVRLNLLRVGLKPGRRGLLQRHGESTDLVVVGPTLQRREHREVNLVLEIINRVLRLPLLRRLGALPVKDHPRTWAPQAL

SEQ ID NO: 52222 - protein, 166 aa, Glycine max
  Clone ID: 700791911_FLI.pep
ISSFFIEPMCKWMGAKLVWALSNFIVFVCMASTAIISLISIRDYSGGIEHVIGANEAIKIASLVVFVLLGFPLAITYSVPFAVTAELTADSGGGQGLAIGVLNLAIVIPQMIISLGSGPWDALFGGGNIPAFVLASLCALAGGVIATLKLPDLSSSSFQSTGFHIG

SEQ ID NO: 52223 - protein, 276 aa, Glycine max; identical to SEQ ID NO: 45737
  Clone ID: 700854439_FLI.pep

SEQ ID NO: 52224 - protein, 345 aa, Glycine max
  Clone ID: 700867050_FLI.pep
EDGNLMKIHRVSIDDFEILKVVGQGAFAKVYQVRKKGTSEIYAMKVMRKDKIMEKNHAEYMKAERDIWTKIEHPFVVQLRYSFQTKYRLYLVLDFVNGGHLFFQLYHQGLFREDLARIYTAEIVSAVSHLHANGIMHRDLKPENILLDADGHVMLTDFGLAKQFEESTRSNSMCGTLEYMAPEIILGKGHDKAADWWSVGVLLFEMLTGKPPFCGGNRDKIQQKIVKDKIKLPAFLSSEAHSLLKGLLQKEQARRLGCGPRGVEEIKSHKWFKPINWRKLEAREIQPSFRPEVAGVHCVANFEKRWTDMPVVDSPAASPNGGNPFKDFSYVRPAASFLQRNNPAY

SEQ ID NO: 52225 - protein, 241 aa, Glycine max
  Clone ID: 700854106_FLI.pep
RHHSNTGSLERDEVFVPKQKSSIMWYSKYLNNPPGRVLTLAVTLTLGWPLYLAFNVSGRPYDRFACHYDPYGPIYSDRERLQIYISDAGVLAVCYGLFCLAMAKGLAWVVCVYGVPLLVVNGFLVLITFLQHTHPALPHYTSSEWDWLRGALATVDRDYGILNKVFHNITDTHVAHHLFSTMPHYHAMEATKAIKPILGEYYRFDGTPFVKAMWREARECIYVEPDQSTQSKGVFWYNNKL

SEQ ID NO: 52226 - protein, 110 aa, Glycine max
  Clone ID: 700559264_FLI.pep
EKQINTFAKKANDGSLSIDEMAGGTLTISNGGVYGSLLSTPIINPPQSAILGMHSIVSRPTVVGGNIVPRPMMYVALTYDHRIIDGREAVFFLRRIKDIVEDPRRLLLDI

SEQ ID NO: 52227 - protein, 319 aa, Zea mays
  Clone ID: LIB3075-012-H1_FLI.pep
QEDKWWLPCPRVPPKGLSEDARRKLQQSRDCANQILKAAMAINSDVLAEMEIPEVYLETLPKNGKSCLGEIIYRYITAEQFSPECLLDCLDLSSEHHTLEVANRIEGAIHVWKLKGQKKSTPQAKSKISWGGKVKGLVGDKEKSHTLSERADGLLQSLRLRYPGLPQTSLDMNKIQYNKDVGQSILECYSRVLESLAFNIIARIDDVIYVDDATNRSAAAESVSIFNRGTGVPVQKRISPSPFSIQNSPYGSPFATPTFCSSTPVTGSPGRVQPPLNKNILGTQEIKVEKLFSGDLEKVWTYAGNLSARKDAGDAPERD

SEQ ID NO: 52228 - protein, 120 aa, Glycine max
  Clone ID: 700893160_FLI.pep
IGMDLWNASSGGAEAAKMRHNQSGAPGVALGDQWVQDERELKRQKRKQSNRESARRSRLRKQAECEELQKRVESLGGENQTLREELQRLSEECEKLTSENNSIKEELERLCGPEAVANLD

SEQ ID NO: 52229 - protein, 137 aa, Glycine max
  Clone ID: 700869231_FLI.pep
DTEVVGLTSHHKVENSIETSLPHNSNLPEEPMVSTKKEATCYATRRYRGVRRRPWGKFAAEIRDPKKKGSRVWLGTFDTEIDAAKAYDCAAFRMRGHKAVLNFPLEAGMSHPEPNSSGRKRRRDYTTAVTSSSHVMS

SEQ ID NO: 52230 - protein, 156 aa, Glycine max
  Clone ID: 700892951_FLI.pep
VRGYTAPEYALHGQLSKKADTYSYGIVVLEIISGQKSTDVRVDDDGEEESLLRQAWKLYERGMHLELVDETLNDNYDAEEVKKIIEIALLCTQASAAMRPAMSEVVVLLSSNALEHMRPSMPIFIESKLKPHRDIFASTSSSTSNATASSSIVPAR

SEQ ID NO: 52231 - protein, 313 aa, Glycine max
  Clone ID: 700894460_FLI.pep
YKMGRQPCCDKVGLKKGPWTAEEDKKLISFILTNGQCCWRAVPKLAGLLRCGKSCRLRWTNYLRPDLKRGLLSEYEEKMVIDLHAQLGNRWSKIASHLPGRTDNEIKNHWNTHIKKKLKKMGIDPATHKPLPNANEQNQNQTRQDQQLHHQPVELEEPNQQPLQVDFDPKVDPNKEPEKPETSLESSTITEEAKEEDQIITPLFDTMELMNGFCTDEVPIIEPHEILMPCAPSSSSTTSSSSSSNSTNFLEDLQLPDFEWSCNYNDNNTITNNNNNEDKDDDNNNNSSMALWDDDIIGNRYWLINEDDDSDEN

SEQ ID NO: 52232 - protein, 268 aa, Glycine max
  Clone ID: 700869769_FLI.pep
SNLGMERVRVTLPVQQPSFSIKGETVTNLDFIRKRKVSNDFNMMDLKIYTCEHPQCPYSQVRLGFPDRISRDNHQLICAYRGTSDFGGPSFPVNEIKPVVHPPSFVQPKSTAQPGSMVPPVIDLTGLEVSDNGQKMITDLMTNYDTNVRGNKKTSSCNHLAAENFDLPQHAMQQQQDNFIRGQGITAEGNIFDEANMPNNHHMFAREEGQFDRFKALNAPFETNHNNNNFHSMFGSLCDLASFDFKEDMQGVGMDTLQKQPDISIWYQ

SEQ ID NO: 52233 - protein, 129 aa, Glycine max
  Clone ID: 700873886_FLI.pep
KKITPKSEKTIVFITIQNMATTISCDFSSMESIQHYLLEPEHDSNALMNISNHEVCYSATYNAFPSPTFSLEGVVHDANDSLACKREHPREEREVHAPPVWKHYRGVRRRTWGKFAAEIRDPKKNGARI

SEQ ID NO: 52234 - protein, 341 aa, Glycine max
  Clone ID: 700557852_FLI.pep
LQLVPLVTSFLHLIYPILSHSHSIMGVKGFVEGGIASIIAGCSTHPLDLIKVRMQLQGENNLPKPVQNLRPALAFQTGSTLHVAAAVPPPRVGPISVGVRLVQQEGLAALFSGVSATVLRQTLYSTTRMGLYDVLKTKWTDSVTGTMPLGKKIEAGLIAGGIGAAVGNPADVAMVRMQADGRLPPAQRRNYKSVVDAITRMAKQEGVTSLWRGSSLTVNRAMLVTASQLASYDQFKEMILENGVMRDGLGTHVTASFAAGFVAAVASNPIDVIKTRVMNMRVEPGEAPPYAGALDCALKTVRAEGPMALYKGFIPTISRQGPFTVVLFVTLEQVRKLLKDF

SEQ ID NO: 52235 - protein, 129 aa, Zea mays
  Clone ID: 700204496_FLI.pep
IRSSRSPTDPAAGRPPSPRRCLSFLFSIIKMSRGGSAGGGQSSLGYLFGSGEPPKPAVAPAASAPPVEKPSAAKTDAAKQVAAGVTSQTNNYHRADGQNTGNFLTDRPSTKVHAAPGGGSSLGYLFGGN

SEQ ID NO: 52236 - protein, 120 aa, Zea mays
  Clone ID: 700204732_FLI.pep
QIGHVQWVTPKGSEISTAPKTPSLGKSSCFLVSIHLLKSCLSSSFGLLQQFIWNLLMLTVRFITDPAQLQLKSFVLRFVMHSINYLCNFNNAFPAGKLRKFQLFYLSLCSLSPLPQCSTE

SEQ ID NO: 52237 - protein, 146 aa, Zea mays
  Clone ID: LIB3066-010-D2_FLI.pep
NNKGPANSNIEDLQHEIRKYRHQVEELEKQIRMFEPDPAVLVLTNEAETCEKFLMDTLTRVEERKKYLSCNQLGPFEPSPTDIHDVFGVSQQQQQQGDLSAFGAGDVVSYFAGGMAASDIFSSPAMTAGSGRIESKIVCSLKDDIG

SEQ ID NO: 52238 - protein, 132 aa, Zea mays
  Clone ID: LIB3067-035-D12_FLI.pep
GLSTGGARDGGKMVQRLTYRKRHSYATKSNQTRVVKTPGGKLVYQYTKKRASGPKCPVTGKKIQGIPHLRPAEYKRSRLSRNRRTVNRPYGGVLSGTAVRERIIRAFLVEEQKIVKKVLKLQKTKDKTSSKK

SEQ ID NO: 52239 - protein, 115 aa, Zea mays
  Clone ID: LIB3068-036-F8_FLI.pep
NRTLLDMARTMLDEYKTSDRFWAEAVNTACHAINRLYLHRILKKTSYELLTGKKPNVSYFSVFGSKCFILVKRGRKSKFAPKVVEGFLLGYDSNTRAYRVFNKSTGVGVSRPGGP

SEQ ID NO: 52240 - protein, 103 aa, Zea mays
  Clone ID: LIB3069-014-G10_FLI.pep
ASSRTRSRLPLPTYSPSRCRTPVLSSLGFRPSPADPSPPPAMSKQGGKAKPLKAPKVDKKEYDESDLAYLQKKKDEEKALKELKAKAQKGAIGGSGLKKSGKK

SEQ ID NO: 52241 - protein, 132 aa, Zea mays
  Clone ID: LIB3088-012-A6_FLI.pep
VSGMPADAHGSIGRSTNLVNPSLFSPLTSSQTTMVCTNSVVAIAPPQHPQTAQQPQSAPLLQPFLLPTASPSPPYGTPLLQPFPPPNPSPSLASAPVLSPTLSRDKVRDALLRLVENDEFIDLVYGEIMNRQ

SEQ ID NO: 52242 - protein, 158 aa, Zea mays
  Clone ID: LIB3078-035-A12_FLI.pep
ASSLTFPHPFSTVRSLVVLGSQPEGRRPMMGGRTVAPPLVLALVTIIAIAAAEGDEVKCGGCSPCGGADCPVLYPSPPPPPYYYYSPPPPATYPGESSSYYQPPPPGAYIQIGSAPPGKGPLYPQDPGFIPAGAPGRAAPLAVVAALAPALACAWALL

SEQ ID NO: 52243 - protein, 195 aa, Zea mays
  Clone ID: LIB3079-018-C5_FLI.pep
TELQYMLLWPLYADGTRTGNQICQYSVAASAEEGVNLVLEVRLVVPEAGGGGAILPADQRWHALEPEPGVHPPRVRRVAPSGLVPDVGAQEHRVLALQCLQPLVDHRLRHVAVGAPGEGGARLAVGQEEQQLHLAVGGGVRGSEEAIEVGVEVGKPRVHLLHRHLALLSPSAGRVKRANWSSKKDWETDWWKWND

SEQ ID NO: 52244 - protein, 113 aa, Zea mays
  Clone ID: LIB3114-045-E1_FLI.pep
ICSTSDIIYNKLALHAGLVCYGPGGCSETMNLDVLLLHNAGLDEEIRDVLPLITLELNDLSKFWVLDHCTIAAELFLEIFEDLAVAELLLQSLDGGQALATITLLDAHVYVVL

SEQ ID NO: 52245 - protein, 198 aa, Zea mays
  Clone ID: LIB3150-021-E8_FLI.pep
PPKDGRRRGYGRLLAPMAHEKKLSNPMREIKVQKLVLNISVGESGDRLTRAAKVLEQLSGQTPVFSKARYTVRSFGIRRNEKIACYVTVRGEKAMQLLESGLKVKEYELLRRNFSDTGCFGFGIQEHIDLGIKYDPSTGIYGMDFYVVLERAGYRVARRRRCKSRVGIQHRVTKEDSMKWFQVKYEGVILNKAQANTL

SEQ ID NO: 52246 - protein, 326 aa, Zea mays
  Clone ID: LIB3153-004-H10_FLI.pep
DPILLNQRKSPRRASQDLRRGEARRSKAPAGSHGRGPDGVLRPAPRQRPARHPGGGGGGAPQPGAPRVVAVHAGRRAAQGRGSPAAEAAFAAADRRDRRPGRLQVPQGHLHPGPHRPRPLPPRARRRAATGACSGRRRSRSGPRSPRGGSRRRGAAPEPDPGLHQAEPGRVGRRHVRHLHVLLLLGHGRRGQRVQGPQPGVLRQAAAVRPQAEALRRRALRGHHQRQPLPLLQEKEKPREEDHQSAGDQRQDRGHPAGRVLVEEVRPEAHQGLPLPTGLLQVQHRARVPGEEARGARHRRPGHAGGDVRGRAPPHAGRARARAQPP

SEQ ID NO: 52247 - protein, 168 aa, Zea mays
  Clone ID: LIB3153-011-G1_FLI.pep
ATVNPSPRPRVIANEMQIFVLTLTGKTITLDVESSDTIDNVKAKIQDKEGISPDQQRLIFAGKQLEDGRTLADYNIQKESTLPLVLRLKGGTMIKVKTLTGKEIEINIEPNDTIDRIKEHVEEREGIPPVQQRLIYAGKQLADDKTAKDYNIEGGSVLHLVLALRGGC

SEQ ID NO: 52248 - protein, 706 aa, Zea mays
  Clone ID: LIB3180-005-D6_FLI.pep
PASAVAFVAISLRSPPLLQVGAKSSLWPKIQVESASPAEARDSGAMSLDSEASSQGGDYRSFRQITRDRLLFEMLRSTRKNSKSTWKVLIMDKFTVKIMSYACKMADITEEGVSLVEDLYKRRQPLPSLDAIYFIQPTKENIVMFLSDMSGRSPLYKKAYVFFSSPVHKELVAQIKKDSSVLPRIAALSEMNLEYFAIDSQGFITDHERALEELFSENAEGSHKYNACLNTMATRISTVFASMREFPRVHYRIAKTIDASTMTTLRDLVPTKLAASVWNCLAKYKTTIPEFPQTETCELLIVDRSIDQIAPIIHEWTYDAMCHDLLCMDGNKYVHEVPTKNGSATEKKEVLLEDHDPVWLELRHAHIADASERLHDKMTNFISKNKAAQLHQARTDGELSTRDLQKMVQALPQYSDQIDKLSLHVEIAGKLNNIIREQCLRDVGQLEQDLVFGDAGTKELINFLRTQLVVSRENKLRLLMIYAALNPEKFESDKGAKLMQLAGLSADDMIAVNNMRCLCGPDTKKSSVGGFTLKFDVHKKKHTNRKERTGEESTWALSRFYPILEQLIENLSKGELPKDEYNCMNDPSPTVHGLPTSSSARTSPAHSMRSRRTGGTWARPRGSDDGYSSDSVLKHASSDFRKLGQRIFVFVIGGATRSELRAAHKLSSKLKRDIILGSSSLDDPPQFITKLKLMSVEELTLDDLQL

SEQ ID NO: 52249 - protein, 276 aa, Zea mays; identical to SEQ ID NO: 48062
  Clone ID: LIB3180-010-B8_FLI.pep

SEQ ID NO: 52250 - protein, 275 aa, Zea mays
  Clone ID: LIB3151-046-F11_FLI.pep
VQIMLERHTNRHRGFGFVTFEDRRAVDSAIKEMRGQELDGRTISVNKAEPKMNTDDTRFDNGGGRDYRGGRGDGPPPGNCYECGRPGHWVRDCPSAVGGRSGRFPSKFSDGGRGDRFSGSDRFSDRYMDDRYDGGRYGYRDQVDARDKYAGGRDRYANDRYSTGGDHFDGDRYGGGPDRYAPNGYGRERERSYERDGVRGGGGYDRNGSRGGGSYDRDGPRGGKGGGYVRDGPRGGVADRYGGGGPARYDGGSYRDRPGPYDRPSRGGGRFDDRH

SEQ ID NO: 52251 - protein, 175 aa, Zea mays
  Clone ID: LIB3152-039-D11_FLI.pep
DTHTPHHGTASEKQSGRTRGADCDGSCARRLRAARRPARCPGAGAGAGGGRARPRRPGQRGRHTAAERRVPREEGGGQDRGAGRGGRRRGAGARPVLRRRVQPAAPRRWRRRRQARVRQGGGGAAAGGVGAQVLPPRRGRGGGRRRGERRRARVRRRRRRQALARLAYPAHVRAR

SEQ ID NO: 52252 - protein, 324 aa, Zea mays
  Clone ID: LIB3179-002-H5_FLI.pep
ALAASSPVPPPTAAARARLRMAAAPSSLVSSHLSRLADLRRAAAPATPTVPQQLRVGCSRRRAQRVVAMAGSGKFFVGGNWKCNGTKDSVSKLVSELNAATLETDVDVVVAPPFIYIDQVKNSLTGRIEVSAQNVWIGKGGAYTGEISAEQLVDIGCQWVILGHSERRHIIGENDEFIGKKAAYALSQNVKVIACIGELLEEREAGKTFEVCFEQMKAFADSISNWADVVIAYEPVWAIGTGKVATPEQAQEVHAAVRDWLTTNISPDVASSTRIIYGGSVNAANCAELAKKEDIDGFLVGGASLKTPDFATIINSVTAKKVAA

SEQ ID NO: 52253 - protein, 239 aa, Zea mays
  Clone ID: LIB3180-059-D7_FLI.pep
VSCRRRTYDDADAPSKSTGCAIPFSLLSPRRGAEGGPFCCCSCFPALQDVVPEQAPRDGPYEAVRMLDLSWMMSDYKVEMVNDGMQEFFVEFKGPAESIYQGGVWKVRVELPDAYPYKSPSIGFINKIYHPNVDEMSGSVCLDVINQTWSPMFDLVNVFEVFLPQLLLYPNPSDPLNGEAAALMMRDRPVYEQKVKEYCEKYAKPEDAGITPEDKSSDEELSEEEDDSGDEAILGNPDP

SEQ ID NO: 52254 - protein, 281 aa, Zea mays; identical to SEQ ID NO: 36920
  Clone ID: LIB3180-059-E11_FLI.pep

SEQ ID NO: 52255 - protein, 351 aa, Zea mays
  Clone ID: LIB3279-008-D1_FLI.pep
DSNPASASERQPATMRPDTAASASPTPKKKPDSKAALDLASWSFNVTTSVGLIMVNKALMATYGFTFATTLTGLHFATTTVMTLVFRWVGLSQPSQLPLPDLAKFVVFSNLSIVGMNVSLMWNSVGFYQVAKLCMIPASCLLEVVLDRVHYSRDTRLSIAVVLAGVAVCTVTDVSVNARGLVAAVVAVWSTALQQYYVHFLQRKHSLNSFSLLGHTAPAQAGSLLLAGPFVDYLLTGQRVDHFSFSSLALLFLALSCFIAIGVNLSQFICIGRFSAVSFQVLGHMKTVLVLSLGFLFFGKEGLSLQVVVGMALAVLGMVWYGNASAKPGGKERRGKDLPVSLKQDKDDTDK

SEQ ID NO: 52256 - protein, 179 aa, Zea mays
  Clone ID: LIB3279-019-F4_FLI.pep
TNTVQQPNKNTVRKQTRFNNQTTLSMKLTSSNTSVLDLLLGPQLVAVTTLLLAAVDSPRVQPCIAFAADHLVLVVLASERLQRGLNDATAEPEHEVERRLLLDVIVRKGAAILQLLPGKDQPLLVRRDPFLVLDLGLDIVDGVAALDLEGDGLPCQRLHKDLHLVGPGRSPGCCDCCDG

SEQ ID NO: 52257 - protein, 176 aa, Zea mays
  Clone ID: LIB3279-020-D10_FLI.pep
ERELCLGGGKMNRKPGDWDCRACQHLNFSRRDACQRCSEPRGVGDRSGGGGDLGGRGGSSFGGGFGAGSDVRPGDWYCSCGAHNFASRSNCFRCSAYKEEAAGAFDSDMSRSRGYAGFGSGAAARTNRPGWKSGDWICTRSGCNEHNFASRMECFRCNAPRDSGSAATTTYENYLH

SEQ ID NO: 52258 - protein, 328 aa, Zea mays
  Clone ID: LIB3279-059-G4_FLI.pep
ARAVELLGFRACLTKSTMDCGDGLPPNWSCCSTDDCIQSQKELYEKHHNTADGRIRIWFGLRQIMNATDRLLLETRDIAQKLNTGIHMHIAEIPYENQLILRTKGIDHGTVTYLDKIDFLRSNLLAAHSVWLNAPEIGFFSKAGVKVSHCPASAMRMLGFAPIREMLDSGVCVSLGTDGAPSNNRMSIVDEMYLASLINKGREAYISGTTNPTALPAETVLKMATINGAKAVLWDNEIGSLEVGKKADLVVVNPFTWSMVPLHDSIANIVYCMRTENIESVMCNGRWIMKDHKIMNLNEEEVISSAVKRANDLLARAGINLPRRMNYV

SEQ ID NO: 52259 - protein, 135 aa, Zea mays
  Clone ID: LIB3279-185-F6_FLI.pep
PPLPSPPPTHHSLLAHSHLPAPSSTATKMNKERLMKMAGAVRTGGKGTMRRKKKAVHKTVTTDDKRLQGTLKRVGVNTIPAIEEVNIFKDDLVIQFLNPKVQASIAANTWVVSGSPQTKSKNTHSSFSFDVLVMW

SEQ ID NO: 52260 - protein, 258 aa, Zea mays
  Clone ID: LIB3279-192-C9_FLI.pep
ATSRRFSIFFSLSLTLSLAKASPFFPPLFPHCSRNRSSPPRCSWDRKVGSAMSNEFDYLFKLLLIGDSSVGKSCFLLRFADDSYVDSYISTIGVDFKIRTVEVEGKTVKLQIWDTAGQERFRTITSSYYRGAHGIIIVYDITDMESFNNVKQWLDEIDRYANDSVCKLLVGNKCDLAENRAVDTSVAQAYAEEVGIPFLETSAKESINVEEAFLAMSAAIKKSKAGSQAALERKPSNVVQMKGRPIQQEQQKSRCCST

SEQ ID NO: 52261 - protein, 458 aa, Zea mays
  Clone ID: LIB3279-203-F4_FLI.pep
SLEGVERGRPSVMSRCFPYPPPVYLGNPVAVAEAESTAKLQKERERAHKKKDKRSDKKAPQLGETSKHSKHNHKKRKLEDVSTGDQEPKKVFKESAELLEKSGLSEEHGAPCFVQMFRDSPESSQDSSKRRKAVLPSPSQAKNGNIIRIKLKSNQDPQSVLLEKPRVLEQPLVQQMSSVSSLSSKQNSINRKVNVRSTAGQQWVNGDSQAVQKSLVTETLSRAMQRTVPQPAVKVTRRADPQLSVKAPVGRSDLPPKFSGSVGPSPARVTGRFCPAPVKTQQRIEHPPSMVSQRVDPQAKVSQKEMGSAVCLPQAPHPPVLQKPKDLPVPKQREPINSLPKEEPCFSGRTVEADQGKEAKLSRSDRKKIHKTEKKNKKFRDLFVTWNPLLMENEGSDLGGQDWLFSSTRSSDGSMAQPTVPDGLGPIHPMVQQQPYLQPRATFLPDLHIYQLPYVVPF

SEQ ID NO: 52262 - protein, 231 aa, Zea mays; identical to SEQ ID NO: 43391
  Clone ID: LIB3332-011-D10_FLI.pep

SEQ ID NO: 52263 - protein, 174 aa, Zea mays
  Clone ID: LIB3587-204-E1_FLI.pep
LPILPITRRPEPPAPSSEQAIKGKGADFSEPLALRPRHIGRLLDSSVGGGTPGPEKSARDVPAAGHPHLPLRHRRGLLPRQGAQRRAGPVRRRRRRRRRRVGIPQGAPAPAFQGWIGCESRVLDDGGHGKRALPLAHPCCTACEFRIREGPVTNARLFVNCLVLRMECHIDRHR

SEQ ID NO: 52264 - protein, 180 aa, Zea mays
  Clone ID: LIB3591-110-G12_FLI.pep
IDKITRPKPGWAHTSVPPAAAATAAVAATATLAPTAVAATASVAAAATFAPTAVAATAAITAVTAPATITAAAAATAAVATAATATATGLGLVNGDVTAVELLAVHVLDSVEHGVLGGEGNEAEAAGPPRLPVGDDLGVEDLAVGGEGILQRLVAGGPGKPADEATVLHISRRHRPSTKP

SEQ ID NO: 52265 - protein, 345 aa, Zea mays
  Clone ID: LIB3592-060-C4_FLI.pep
HAYCIHNAEHQKQLRSDRHGCRHHGYHLPRARRQAGGWHEGRLRRGPHHHAQDRRQAQAGGVRQPMVRCRPRPVPGPAVRLAPELPDRRVPRRLRVGHRGAVGGPGDLRQEPRAGGDPLPLGHARRARVRVPGAARPQRRQVRRGGVVQGGLPDLQRGRARLPRQPEPGPRAEHPGHLGVPGGAHGRRRGVPRRRRPARGGGRPAVPWRQLRPARARRRPGGVRRAQGEGDQERPPRHVLHVRLLRAGYRHRQGPPREPRRPHRRPRQQQRLGLRHQLRPRQVSEGMMLACVYRRRTVFLRTAGCTSICEGSCAWEPEIVPLVYFCMHAVELINEICCKYIMSSF

SEQ ID NO: 52266 - protein, 237 aa, Zea mays
  Clone ID: LIB3592-068-A4_FLI.pep
ATRHRSATNKAPWLSSCTSKKSRTQAGVAHLPSSSSSRREFHAGSGMSIELLTKFLTLLFGYAMPALECFKAIEQRPGRADQLRFWCEYWIILVLLVMFDEIAGVLISKIPMYYELKLAFLVYLWYPKTRGTDIVYETFLQPLVMQYQPNIEARLQYLRANAGDILVFYLKNFTERGYELFLRVLDYVRSQASRGSRTRSFFSFRGERSERPSFTDDYVTGGDRRDGGRHRRPRSGY

SEQ ID NO: 52267 - protein, 292 aa, Zea mays
  Clone ID: LIB3600-040-G8_FLI.pep
VNFKQNWMGKGGRLTKPVTNIYWETVATNLDEFLEISEKLSKKGRAESAIADYLKTEVIPAVENFQKKKERRLKRQEKKDKLLAFTNTFQTRSLRERRPVSYNYSDFDRSIEEAIRAVQKGKVQGSREAGTEEKPASHHGDKGADGRSDINSENNKNGGQEDAKYLSDLSSGDEEDGDYSDRGVSSADSDGDNNASDSYKSDMEEDVSVPRKRTRLAARLANDKPRPGLRRSQRNMKNDEETMHPGQVTPPPMAKKTLRQRPTPVSKQPDITFSSSEDDLAQVVADSEDESG

SEQ ID NO: 52268 - protein, 159 aa, Zea mays
  Clone ID: LIB3606-029-H5_FLI.pep
QFAIICNRSKLNTFTFFFFAALPGTSRSSNLSGGGTGRCGGFTCHGLSLPERSLLASLGNSLQDGVRCHIALHGDLLFHDVYVVGLDAFHLAEDPLDSSNTALTGHANLEHNSLGHSARGEEGRGGSAVVVEISCRRRRRRGRTGERSIWAGREGRSWV

SEQ ID NO: 52269 - protein, 296 aa, Zea mays
  Clone ID: LIB3606-042-F6_FLI.pep
ALKQTPRLGLLFLAPSGPSSRRRLASSTSPDPAAMEEDDEFGDLYTDILIPTHTPASTSALSNPVLVETLHRPPPHPNPTPVAAAAEEVDDDWLLGGSEPIPGVDPTGDWADEDDDGGEPAPPAKRSTSADDIDPLMGGGAGDSGPVIPGLSSSSAAGAAGSDEWDSDSEDDIQIVLNETDGRPGLVEDEGDDEDGEDLVIVADGPAMEEQDWGEDPAAAGAEGERKDGGEPGKTVAAPTGRIGYSGGGPGFHQQHHSMFKVSYLCQEAVRCALATPAEGDGIKLAATHILYVVMC

SEQ ID NO: 52270 - protein, 190 aa, Zea mays
  Clone ID: LIB3607-023-C9_FLI.pep
ADELLSPSPSSPHSSHQPENMSGNGAKKVVDAAVKAGRTIIDWDGMAKLLVTDEARKEFAALRRAFDDVNHQLQTKFSQEPQPIDWEYYRKGIGSKVVDMYKEAFESIEIPKYVDTVTPQYKPKFDAVIAELKEAEKEHQKESERIEKELAEMEEMRKKISTMTADDYFEKYPELRKKFDDEIRNDNWGY

SEQ ID NO: 52271 - protein, 246 aa, Zea mays
  Clone ID: LIB4073-021-F10_FLI.pep
CRDIISPLAGNKQILMGCKACQKPKVQYRKGLWSPEEDEKLRDYILRYGHGCWSALPLKAGLQRNGKSCRLRWINYLRPGLKHGVFSREEEETVMSLHAKLGNKWSQIARHLPGRTDNEVKNYWNSYLKKRVEGGAQGKHGAADPATPGRSDVHGSPDDPSENNGQGSVVSRPANSDSSEPAVESSSADDSSCLTVTEPAGARASATAAVRPHAPVLPKVMFADWLDMDYGTSLVALGPDAGVFDV

SEQ ID NO: 52272 - protein, 211 aa, Zea mays
  Clone ID: LIB3732-035-C4_FLI.pep
AMGRQPCCDKVGLKKGPWSAEEDEKLVTFLLTNGQCCWRAVPKLAGLLRCGKSCRLRWTNYLRPDLKRGLLSSEEETTVIDLHAQLGNRWSKIASHLPGRTDNEIKNHWNTHIKKKLRKMGIDPATHKPLHPQPAAPPPTQQEQDTGGSPEEEGEKADAVMMAAATPIIGHETAPFFTDEEEMLAHLLDDIDDFPPAAYSPDDSSSPSSSS

SEQ ID NO: 52273 - protein, 365 aa, Glycine max
  Clone ID: 700865276_FLI.pep
HKPLKATMSSFKSKYQDELIANATYIGTPGKGILAADESTGTIGKRLASINVENVETNRRILRELLFTAPGCLECLSGVILFEETLYQKSAAGVPFVDILKKGGVLPGIKVDKGTVELAGTNGETTTQGLDDLAQRCKKYYEAGARFAKWRAVLKIGPNEPSPLSIHENANGLACYAAICQENGLVPIVEPEILSDGPHDIAKCADVTERVLAACYKALNDHHVLLEGTLLKPNMVTPGSEAARVTAEVIAEHTVRALQRTVPPAVPAIVFLSGGQSEEEATVNLNAMNQLKGKKPWSLTFSYGRALQQSTLKAWGGKDENIPKAQSALLVRCKANSEATLGTYKGDATLGEGASESLHVKDYKY

SEQ ID NO: 52274 - protein, 246 aa, Glycine max
  Clone ID: 700834165_FLI.pep
GNLLKALGTQVAEPLRAMVVGAPLEDARHLAQRYDRMRQEAEAQAIEVSKRQAKVREMPPNGENAMKLEAAEAKLQDLKTNMTILGKEAAAALAAVEAQQQRLTLQRLIAMVEAERSYHQIVLQILDQLEGEVTSERQRIETPTTPSLDNSMPPPPSYEEVNGVFASQAHNGSTDSMGYFLGEVLFPYSAVSEVELNLSVGDYVVVRKVTNSGWAEGECKGRAGWFPFSYIERRERVLASKVAEVF

SEQ ID NO: 52275 - protein, 272 aa, Glycine max
  Clone ID: 700790651_FLI.pep
KLQHRNLVRLLGFCLQGEEKILVYEYVPNKSLDYILFDPEKQRELDWGRRYKIIGGIARGIQYLHEDSRLRIIHRDLKASNILLDGDMNPKISDFGMARIFGVDQTQGNTSRIVGTYGYMAPEYAMHGEFSVKSDVYSFGVLLMEILSGKKNSSFYQTDGAEDLLSYAWQLWKDGTPLELMDPILRESYNQNEVIRSIHIGLLCVQEDPADRPTMATIVLMLDSNTVTLPTPTQPAFFVHSGTDPNMPKELPFDQSIPMSVNDMSISEMDPR

SEQ ID NO: 52276 - protein, 438 aa, Glycine max
  Clone ID: 700829731_FLI.pep
SLPMASSLSTKPFSADALSAFASLNSDLGSLPPAYLRLSLRPRLPKRLHIQAAGSTYGNHFRVTTYGESHGGGVGCVIDGCPPRLPLSEADMQVDLDRRRPGQSRITTPRKETDTCKIFSGVSEGITTGTPIHVSVPNTDQRGHDYSEMAVAYRPSHADATYDMKYGVRSVQGGGRSSARETIGRVASGAVAKKILKEFSGTEILAYVSQVHKIVLPEDLIDHDTLTLDQIESNIVRCPDPEYAEKMISAIDAVRVRGDSVGGVVTCIVRNCPRGLGSPVFDKLEAELAKAAMSLPATKGFQFGSGFAGTFLTGSEHNDEFYIDEHGNTRTRTNRSGGIQGGISNGEIINMRIAFKPTSTIGKKQKTVTRDKKETEFIARGRHDPCVVPRAVPMVEAMVALVLVDQLMAQYAQCNLFPVNSDLQEPLVPILRPEEALL

SEQ ID NO: 52277 - protein, 188 aa, Glycine max
  Clone ID: 700847727_FLI.pep
DDMRIPLDMIIHKLVKAYICSSSLRKSALRALAKTLTVAQLAYLRDQFTLLGPNKSGLISMQNFKTAVLRSSTDASKDSRVLDYVSMVSSIQYRKLDFEEFCAAAISVHQLEGMETWEQHARHAYELFKKEGNRPIMIEELASELGLSPSVPVHVVLQDWIRHSDGKLSFLGFVRLLHGVSSRAFQKA

SEQ ID NO: 52278 - protein, 530 aa, Zea mays
  Clone ID: LIB3078-002-H4_FLI.pep
QPPLAELRNTPGDGIQQQRAPLSPTRRRPAAADKPVPMGKQKEGVDKRTARKMIRSTEGCAKSITFERNNKSDDVQLHDLPNDILGSILSRLTFRESSQMGLVSHTWRRLWRSCCRKLVFTSATMFQPGNRSIKHTRTNFAMRVNSFLRQLRTHPTLNKFVIKFGLRRKHTRHVNRWIRFCSVSRARHITINFTPGVKDFFMGPANSKYIFPLNVFSGPEGSSTHVRTLHLGYVCLDTTSSDFMIFANLKKLTLHKISFLGDLQCLMLPECNSLECLSISFCSLPGLSTCQPLQRLRCVRLHYCYLKKIELEAPNLTSFDLTNQPIPFVLGGSLNVMEANIKLLAKDSPYGDNLDYIYTELPAALSHVHKLSITSGLFVYDQLQGFSKTSARFINLRHLTMYLPLYGEPKSISGILRLAYLLELAPALEELELHVNGGGVDVGWALRRNMLPYSHNRLKRVLISGATVWEGLMELAYYILRSANRLESMVLDPKIRIGGPQLDGWMIDIGRETIKNIFEGEEFQSIITIL

SEQ ID NO: 52279 - protein, 474 aa, Zea mays
  Clone ID: LIB3075-046-C12_FLI.pep
RPPFCRRCVRASPRSPIAAPGRRVRRRIWARDGAPDEPMARAALRLGVRALALLVLVSVALLPLVSSDDGYRHCEGVVRGWADASSGRVKDGDTLSLKDLLFFLHIPRTGGRTYFHCFLKKLYTNAQECPRSYDKLRFDPSTLDIWPWKYLVPWMREDLFARRDARGVYKVHSSKKVNAYDVDDMVMPLHRYINDPVAHEIIHNGATFQITGLTNNSYFDGAHEVRHCVRNHPDLGRIVLEVAKNRLDQMLYVGLTEDHEESARLFAHMVGAQVLSQSGTLTLDLKEDLLIETDSHPSMEPEDEETNGHLNSTHGWQNNEAMNSTNDEHGKGNMTVGKLMEAYETCIAKLWKSQSGRRKISLKKVQEANFSKEARKLVPEAILNQIISLNSLDMELYDHAKKIFTQEHLMLKAQQSMVGQHRQFGEQKGWIGVMCSDGICPPWMVVLVVLGISTIIVLVTLAVTTRKRTSKLKV

SEQ ID NO: 52280 - protein, 177 aa, Zea mays
  Clone ID: LIB3078-017-F2_FLI.pep
ALRHRKILSSCLNARGSLPFHTRFVRHSDPDMLEVGNGGMSEAEYRSHFSIWALAKAPLLIGCDVRAMSQQTMGILSNSEVIAVNQDSQGAQGKKVQSSNGLEVWAGPLSNNRKAVVLWNRQGYQATITAQWSSIGLASSTAVTARDLWAHSSFSAQGQLSASVPPHDCKMYVLTPN

SEQ ID NO: 52281 - protein, 131 aa, Zea mays
  Clone ID: LIB3078-033-D2_FLI.pep
GDFKSIPLIDIGPLVEKIDDPSMANDKDLLQVVRLLDDACKEAGFFYVKGHGIDESLMREVRNVTREFFQLPYEEKLKIKMTPQSGYRGYQRIGENITKGKPDMHEAIDCYTPIRPGKYGDLAKPMEGSNL

SEQ ID NO: 52282 - protein, 314 aa, Zea mays
  Clone ID: LIB3070-006-H7_FLI.pep
GEEIWEVHLKSLIPQRPTVGDVNGDGHTDVVVPTVSGNIYVLSGKDGSKIQPFPYRTHGRIMSPVLLLDMSKHGDNAKGLTLATTSFDGYLYLIEGSSGCADVVDIGETSYTMVLADNVDGGDDLDLIVTTMNGNVFCFSTQSPHHPLKEWRSSNQGRNNAAYQYNREGIYVKHGSRTFRDEEGKNFWIEFEIVDKYRVPYGKQAPYNVTVTLLVPGNYQGDRRIVVSGVYHQPGKQRMMLPTVPVRTTGTVVVEMIDKNGLYFSDEFSLTFHMHYYKLLKWLLLLPMLGMFGVLVILRPQEGAPLPSFSRNID

SEQ ID NO: 52283 - protein, 275 aa, Zea mays
  Clone ID: LIB3079-002-D3_FLI.pep
SAVSSPDQPASLVRNASMRGMPINGSFRKDNSTESFDLECQEKHLDIVPTSSSPERKFSFSSCSSNGLLLSKESSKQQTSIHNLDKCNGGHLHVSDETFSEAAPKTHKSAEDHDDRSKPPLIRGRFRVIPGHVDSKAQPPGLQKCHSMQTISRLPSLSIPSSAEVASTIIGGSFYMQLYSILQTNMLQRDQILNAMKQVSGCAMASPGVPSMASPCIPSTSRSTSPSGVPSVDRSMLEAAQEREKELLNEVLELQWRLLCTQDEVQKLKANAAQI

SEQ ID NO: 52284 - protein, 570 aa, Zea mays
  Clone ID: LIB3078-016-E6_FLI.pep
RLSKICLQEISIFDQISFEKWSYPLPTLIKEEVLPKICDLQDRFDQLNALNIQLETEVAVLKDGMKELDEDLGTSRSELQKKVSELEQLDQKFSSVKEKLSIAVAKGKGLIVQRDSLKQSLLEKSGEIEKLTQELQLKETLLKELEAKLKSYTEADRIEALESELSYIRNSATALRDSFLLKDSVLQRIEEVLEELDLPEQFHSRDIVEKIELLSKMAIGTPFTLPDGDKGSSVDGHSESGVAMNVIDDEQNSNSNSVSDEVKSKYEELNRRFCELAEQNNMLEQSLVERNSLIQKWEEVLGQISIPPQFRMLEAEDKLAWLGNRFLEVEQERDSLQLKIEHLEDSSEMLIADLEESHKRISELSAEVVAIKAEKDFFSQSLEKLRFEFLGLSEKVVQDEFVRDKLRMDLSELRDKFAEKSEESRHYHEMDTEVHKLLNLVQNTLQDSTNSEISSGGISAVLCLGKMLKKLLDDYGTLLYKSTEGNFAERDIQLEDIKPSKDASKSDTGAYEKEMELNSLNNELDHAHNNLALAQQECDEAVEKAQSLMMEIETLHAQISKLQESDAEQM

SEQ ID NO: 52285 - protein, 195 aa, Zea mays
  Clone ID: LIB3075-011-G11_FLI.pep
IHVDVMDGRFVPNITIGPLVVDALRPVTDLPLDVHLMIVEPEQRVPDFIKAGADIVSVHCEQTSTIHLHRTVNQIKSLGAKAGVVLNPATPLTAIDYVLDVVDLVLIMSVNPGFGGQSFIESQVKKIAELRRLCAEKGVNPWIEVDGGVGPKNAYKVIEAGANAIVAGSAVFGAPDYAEAIKGIKTSQRPLAVAA

SEQ ID NO: 52286 - protein, 247 aa, Zea mays
  Clone ID: LIB3075-026-G3_FLI.pep
DNLYGCRHSLPDGLMRATDVMIAGKVAVVCGYGDVGKGCAAALKQAGARVIVTEIDPICALQALMEGLQVLPLEDVVSEADIFVTTTGNKDIIMVDHMRKMKNNAIVCNIGHFDNEIDMLGLETYPGVKRITIKPQTDRWVFPETNTGIIVLAEGRLMNLGCATGHPSFVMSCSFTNQVIAQLELWKEKSSGKYEKKVYVLPKHLDEKVAALHLGKLGAKLTKLTKSQADYISVPIEGPYKPAHYRY

SEQ ID NO: 52287 - protein, 204 aa, Zea mays
  Clone ID: LIB3078-001-B4_FLI.pep
RPPRSPIASCAFSPSISRGGAARSSASPGRHSSARSPTRSSSSRPPTASRISTRAPPSARSTSRRSGSTSCRHRPTRSGTCSRARPGTASSTSTRAWAARSSSRRSCMAWSSLSPSLSRGTSRNGLPRRMARCGFRRCEPSFIPLARSSLCASAIPFYVTDLMKNNSLMGKTCHWLTFVLLNVECNGCCNVESRCNYRSSMFHG

SEQ ID NO: 52288 - protein, 168 aa, Zea mays
  Clone ID: LIB3078-011-H12_FLI.pep
SRCFLIYDKIKSRCNTHSVRMRVDNCSLLKFQIVAIRDILGFSVFFCTVPMSQLIGTEFDSSSRQASVPLVAQEAPLQMRIHRSFQSASLTAEVMRPWTSSASTAEEGVEHLTTEHGDGCPRRQRAGEVSGEVGRGEHPHPGPRRGQRLGSRRARGATPHYGHARRAR

SEQ ID NO: 52289 - protein, 270 aa, Zea mays
  Clone ID: LIB3075-017-E2_FLI.pep
RVKILMQTHSVRVAGESAKKGVGFLEAMADIGKKDGLKGYWKGNLPQVIRIIPYSAVQLFSYEVYKKIFRRKDGELSVFGRLAAGACAGMTSTLVTYPLDVLRLRLAVQSGHSTLSQVALNMLREEGLASFYGGLGPSLVAIAPYIAVNFCVFDLMKKSVPEKYKNRPETSLATALLSATFATLMCYPLDTVRRQMQMKGTPYNTVFDAIPGIVERDGLTGLYRGFVPNALKNLPNSSIKLTVFDTVKTLIATGQKEMDKLIQENEEKRS

SEQ ID NO: 52290 - protein, 120 aa, Zea mays
  Clone ID: 700572756_FLI.pep
KGLSVWLDVPLDALARRIAKVGTASRPLLDQPSGDPYTMAFSKLSMLAEQRGDAYANADVRVSLEEIASKQGHGDVSKLMPTDIAIESLHKIESFVIEHAADNPASDSQAESQIQRIQTL

SEQ ID NO: 52291 - protein, 215 aa, Glycine max
  Clone ID: 700669753_FLI.pep
MEAMEAELDLVVCITEGIPQHDMVRVKAALNRQSKTRLIGPNCPGIIKPGECKIGIMPGYIHKPGRIGIVSRSGTLTYEAVFQTTAVGLGQSTCVGIGGDPFNGTNFVDCLQKFLTDPQTEGIILIGEIGGTAEEDAAALIKESGTEKPVVAFIAGLTAPPGRRMGHAGAIVSGGKGTAQDKIKTLREAGVTVVESPAKIGAAMLDVFKQRGLVQ

SEQ ID NO: 52292 - protein, 413 aa, Zea mays
  Clone ID: LIB3068-007-A9_FLI.pep
FATNKSASISLSSLLVTQPRTEAPPSMALQAALLPSTLSSVPKKCSLAVAAKDTAFLSVSQKKVQAASLSVRTRVATTAPVATPGSSTAAKDGKKTVRQGVVVITGASSGLGLAAAKALAETGKWHVVMACRDFLKAAKAAKGAGMADGSYTIMHLDLASLDSVRQFVDSFRRAGMPLDSLVCNAAIYRPTARTPTFTADGYEMSVGVNHLGHFLLARLLLDDMQKSDYPSRRLIILGSITGNTNTLAGNIPPKAGLGDLRGLAAGLRGQNGSAMIDGSESFDGAKAYKDSKICNMLTMQELHRRYHEETGITFASLYPGCIATTGLFREHIPLFRLLFPPFQKFVTKGFVSEAESGKRLAQVVSDPSLTKSGVYWSWNKDSASFENQLSQEASDPEKAKKLWEISEKLVGLA

SEQ ID NO: 52293 - protein, 245 aa, Zea mays
  Clone ID: LIB3068-008-A11_FLI.pep
TFSSWGIDYLKYDNCNDAGRSVMERYTKMSNAMKTYGKGIFFSLCEWGRQNPATWAGGMGNSWRTTDDIADNWGSMTSRADQNDRWASYAGPGGWNDPDMLEVGNGGMSEAEYRSHFSIWALAKAPLLIGCDVRAMSQQTMGILSNSEVIAVNQDSQGAQGKKVQSSNGLEVWAGPLSNNRKAVVLWNRQGYQATITAQWSSIGLASSTAVTARDLWAHSSFSAQGQLSASVPPHDCKMYVLTPN

SEQ ID NO: 52294 - protein, 319 aa, Zea mays
  Clone ID: LIB3068-008-A6_FLI.pep
GSCKCIKVSAPLVTNYARSRLFDVILHSSVGDVSPELVEQFRTRQRNFDTESRAGAAAKVKQNQHMTAIPGLRISRRVKVYKPLLLEAMYANGFIGAKMIRAKLFHKFLWAYVNSLPNWCNAFGCTKAGQYDKSLNQSCLLFSMEAAMKEMPLELFLQIVGSAKKIDNMITLCRLGKTLSEIPTEEYNQILDTHANGRLSRLVNILDKLKLVQLAKEFLEDAGVSSNAMYTHSMELRPYIEEPMPRILPSSQLNNHRKIRHDFVLSKKEFVDSYWETLECCYLTAGLADPLSAFPGSSVPEVCLICCTSLMHRIIAYVE

SEQ ID NO: 52295 - protein, 517 aa, Zea mays
  Clone ID: LIB3068-050-H11_FLI.pep
QALRRAPARHRGRLPAPHPPPPRRQPLQRHPPALEPVVAQVLNVSYNNFSGPVPVTPVISQVGAAAFAGNPELCGEVVRRECRGSHLLFFHGGGANGTAAPPVQSAAASDSGPQRENLSVPDSSVPNAKRARRRMTKLAVAVAAGSVLAALLVFAMIAMKRSNKRRRPSTASYESPNPKKSAPASEVSRDNADMGYVECVPDEETAAIMVPEEKARRLERSGCLTFCAGEAASYSLEQLMRASAEVLGRGSVGTTYKAVLDGRLVVIVKRLDAAKIGPAALEAEAFEQNMDAVGRLRHPNLVPLRAFFQAKEERLLVYDYQPNGSLYSLIHGSRSSRAKPLHWTSCLKIAEDVAQGLAYIHQASRLVHGNIKSSNVLLGSDFEACLTDNCLSFLLESSEVKDDAAYRAPENMKSNRMLTPKSDIYAFGVLLLELLSGKPPLEHSVLVASNLQTYVQSAREDEGVDSDRITMIVDIATSCVRSSPESRPATWQVLKMIQEVKEADATGDNDSDLTSNS

SEQ ID NO: 52296 - protein, 383 aa, Zea mays
  Clone ID: LIB3069-026-C7_FLI.pep
TSSGGTGGCRRCSRGSTSRRCGASRHSPDGDLIDCVPAHLQPAFDHPRLRGQRPLAGPPPARPKGNRLRDPIRNDTAEAAGVQQLWAASGESCPEGSVPIRRVTESDVLRASSVRRFGRAPAGRVRRDSVSGGHEHAVGYVAGDEYYGAKASINVWAPQVSTASEFSLSQIWVIAGSFGNDLNTIEAGWQVSPELYGDNAPRFFTYWTTDAYQTTGCYNLLCSGFIQTNSRIAMGAAISPTSAYNAGQFDISLLVWKDPNHGNWWLEFGSGELVGYWPSLLFSHLASHASMVQFGGEVVNTRASGSHTATQMGSGHFAGEGFGRASYFRNLEVVDWDNSLVPLAAGFHVTADHPSCYDIQGGVNAVWGNYFYYGGPGRNVRCT

SEQ ID NO: 52297 - protein, 363 aa, Zea mays
  Clone ID: LIB3067-022-F4_FLI.pep
GQHTNRCESWPAGWWDPADSVARLCSPHPPASLTRGLGQVPPHRVVSSLSRFPRSVQLRLARRTRVCSSPRFASFLRSPRLEFARGGRNRGARMTVIDILTRVDAICQKYDRYDVDKLNGANVAGDDPFARLYASVDADINQCVDKAETAKQEKNRAAVVALNAEIRRTKAKLLEEDLPKLQRLAVKKVKGLTREEIATRSDLVAALPDRIQSIPDGSSTATKKNGSWGASGSRTGGAIKFDSTADGNFDDEYFKGTEESNQFRREYEMRRMKQDEGLDVIGEGLETLKNMASDMNEELDRQVPLMDEMDDKVDRANADLKNTNVRLKETVLQLRSSRNFCIDIILLCVILGIAAYLYNVLKK

SEQ ID NO: 52298 - protein, 245 aa, Zea mays
  Clone ID: LIB3067-047-A9_FLI.pep
STRQTPPPGERRGGEGIGSKGTGEMAILYALVARGTVVLAEHSAAATNAGAIARQVLERLPDGGADSHVSYTQDRYVFYAKRTDGITALCMADDAAGRRIPFAFLEDIHGRFVKTYGRAALTALAYAMNDEFSRVLSQQMDYYSNDPSADRINRMRGEINQVRSVMIDNIDKVLERGDRLELLVDKTANMQGNTVRFKRQARRFRNTVWWRNVKLTAALILLLLVIIYVVLVFVCHGFTLPTCIR

SEQ ID NO: 52299 - protein, 301 aa, Zea mays
  Clone ID: LIB3069-010-A7_FLI.pep
ENPTAVGVASGDGCGGDPAGAGDAGAHPGRGGRGHRVRGGAVGAGLQGARDRVGGVVRVGAGRGVRAPGAVARGHPGRAAPAGRAGGLRGRVLEPARPAGLLPLRHGVARGAPHRAPRLRLRRHPRVRRLPRARPRLRRLPPRRLLHVAPRVRLRRPRPLGQGQGLPRRLRHLQEARAPGRLHQRRPVLSVAPLPAPVRVLQAAVGVRVQLREPDGVVRPGGAAGGGRGLRAVEQRPGAAVLRVRVLQGGPPGGAPGPVAQGQRRPRRRHRRPRHPLPRRLQRLQERAGRRHLRTPQVLAS

SEQ ID NO: 52300 - protein, 184 aa, Zea mays
  Clone ID: LIB3069-032-B12_FLI.pep
QTAVQVVKGPGPAHPAMPGYHFGDTTVIDDALTDGPSASSSRLVGRAQGTYMLASLTEPVLAVSMTVALTAGAYNGSAVVVVGATTSRRASGSSRWSAAPARSGELRATCCGGRPGWSPGTTWCWSSTSTPPCRPLVRLRLRAPDWRVRWPECLTSTVPRRDVTGLGFDFTMHAARLLCVWSIV

SEQ ID NO: 52301 - protein, 353 aa, Zea mays
  Clone ID: LIB3067-022-A11_FLI.pep
CTQRHSSRRMAVVPAAPVVLGVAMVLVVLAASAGAAGQLRMGFYAESCPGVERVVGDFVRQHVRRVPTVAAALLRLHFHDCFVRGCDASVLLNSTAGSVAEKDAPPNLTLRGFDLVDRVKALVEDACPGVVSCADVLALAARDAVVAIGGPSWRVATGRRDGTVSAMQEALDDIPKHTMTFPQLASLFASKGLGVRDLVWLSGAHTIGIAHCSSFADRLYGYPGGGVGAAGNDTAEADPALDATYAANLRRRKCRAASGGYAEDGVVEMDPGSHLTFDLGYYRALLKRRGLLRSDAALLTDAAARADVEGVAAGPEEVFFQLFARSMARLAALQVKTGAEGEVRRNCAVVNGG

SEQ ID NO: 52302 - protein, 302 aa, Zea mays
  Clone ID: LIB3068-008-F2_FLI.pep
GFLTSSEYGSELQRSPSPSPEPLQRSWTREQSPRAAGFDFFLSNRSNDSPPVYRKEPEDAASQSESDAKSADGEDDGIAYTLHQRVLELEDELNATNQKLQDANEKLEVLEEKSLRCHCDYKENGNGAQRTTEVSGKEGELEAEIVNLQEQADSARRRFEEALSERDGEISKLKQELAGASEKLQREKYANGVQVSELQRSVEHIRSELERVSEEKLLSENKIKELEAANAEADKYGHELTRAAEKISEEKFALEAEILTMRQNIEDLKSRIESLAREKSLLKSWFEDLEQVVGRGRGIFAD

SEQ ID NO: 52303 - protein, 460 aa, Zea mays
  Clone ID: LIB3069-039-C1_FLI.pep
NESKSLNCFYLTVLYAAGISSSAGPESPVTARCALGLALSTPPPTSSPTSSSATHTTNIAVAATVPIASLLLVSLVALLVWRYRHELSKDRRSIQISEERRSRPRPNTGSVMFDICELAKATGGFAERNLIGRGGFGVVYRGVLVDGTVVAVKKMLEPDVEGGDEEFTNEVEIISHLRHRNLVPLRGCCIVDADADPDPDEGKQMFLVYDYMPKGSLDQYIFDDAQGRRRPALSWAQRRTVLLDVARGLEYLHYGVKPGIYHRDIKATNILLDADMRARVADFGLARRSREGQSHLTTRVAGTHGYLSPEYALYGQLTEKSDVYSFGVLVLEVMSGRRALDLSDPSGVVLITDWAWAHAKAGRPGDVLAQALRKEPSTSVAAMERYVLVGILCAHVTVAFRPTMPEALRMLEGDMDVPDLPDRPQPFGQRIAFDEGETNFSASSILSGGGPFVDFGDMLR

SEQ ID NO: 52304 - protein, 121 aa, Zea mays; identical to SEQ ID NO: 44954
  Clone ID: LIB3069-057-F6_FLI.pep

SEQ ID NO: 52305 - protein, 335 aa, Zea mays
  Clone ID: LIB3180-045-G11_FLI.pep
RAAKSMDAEAAAAAEGQVRHWTADVNGISLHVAERGAADAPAVLLIHGFPELWLSWRHQMAALAARGFRALAPDLRGYGDSSVPTDPAAYSILHIVGDLVALLDHLQLTKVFVVGHDWGAMVAWHLCLFRPDRVRAAVVLGIPYFPRGPRPMTDSFAKLGDGFYINQFQEPGRAERAFARYDVATVLKKFYALKIDEMIAPPGVEIIDFLQAPSSPIPWMTDEELGQYAEKFEKTGFTGPLNYYRMLETNWRLTAPWSGSKITVPAKFILSKNDVGLQSFGTEKYVKSGALKENVPDLEISIIEGHHFVQQEEAGTVNSEILSFLGKFPSEGGSA

SEQ ID NO: 52306 - protein, 248 aa, Zea mays
  Clone ID: LIB3180-053-C6_FLI.pep
KAPLLFLTLIPSLCSSNQTLHRGDRYKRHLPTRALLAAAATPPPPPTQHQALQQNSTRSSPARRPTMIIPKKNRNEICKYLFKEGVLYAKKDYNLAKHPQIDVPNLQVIKLMQSFKSKEYVRETFSWQYYYWYLTNDGIEHLRNYLNLPSEIVPATLKKSARPLGRPFGSGPPGDRPRGPGRFEDRPRFGDRDEYRGGPRGASGDFGGDKSGAPAEFQPSFRSSGARSGFGRGGGSGFGAGPTSSSME

SEQ ID NO: 52307 - protein, 193 aa, Zea mays
  Clone ID: LIB148-007-H11_FLI.pep
PVLPAAEGQHAGAVRGGVRAAGRDHDPDGEARQHLHLHLGAEPGAHHVVGAQGQPDHGEGERRRPQGPGGAGVPAQEAHPAGGVRELRKPRGHLRQLHRRQLPHATRQGGGGEGVPRQARLHAARGRRRLRRRRQLLRHHRHARRAGQVLQEVAQRRAVIQSLVGTYYSWLGGEHIVGTVIVWLGGEHLTIYL

SEQ ID NO: 52308 - protein, 192 aa, Zea mays
  Clone ID: LIB148-008-F5_FLI.pep
LVLEAMDCVLIEIFQVYGEICTGIARFLISGVQGGPAMLTTRKEVMAAGVKVLWRAAEQSAQLSSYFDLCRELGVANARKLPTSLVRLKDDDVRDLERILMSESDIQNESGEEAEAEAEAEAEAAADVKDAGSTSTNTAVVMATTEWVTFDEERPSAGVVAYHGGGHVSNHWNPFVAAPLDGREGGNLIELF

SEQ ID NO: 52309 - protein, 321 aa, Zea mays
  Clone ID: LIB189-031-F8_FLI.pep
DRQYISRDRSGMVFIDTYTILVHSLLVCVPPRDEQVDAEVSGAEHGQQPEEVVEVRPVDVVGDPAVPPAPRGGARHHGDERGADVVPEREGRHGEPRAEAPHRVGRLVVEELHLADEREHLRRAHHHVLRHLPEDGQRQVLAVPAGARVGVIHAVTRDDAAPRHLQRPRGEHGGGEHDEAHAHARQLREPAVVARGAPRQRDHQAVVERHPQHDAERVEDGEHGGGHAEAAHVRVQRVALQDEGGGHLRVRRREHDPARPHRQQPEHALELLHLRHRAQTPRARRTRLVVRWLHRRCLVQEPELIGVREPAAPLYRGHAAA

SEQ ID NO: 52310 - protein, 252 aa, Zea mays
  Clone ID: 700152089_FLI.pep
IHSHSKYPQSTARTEDVRKHRKDPDHRRPDGQQQECAPQGQPGAHAQDRARLRRHQHRRLPHGRPRRVPRPRRHLPTRQLHRRRPQQREPREGGSGGEPGAVAAAPAAASGRRGPVPRHLRLGGGEARRPGRHHREEQPRLRVLPQDHHHRRRPRPRPHRLRRQLMGVPAVQVPLQPRLLLQRHVPPQPDAGGAEALPRRRAPQPEGRRPAGPVPGARPRLPLRRLQRPRQPRRQKPAPRPRRLQAPPLPAP

SEQ ID NO: 52311 - protein, 218 aa, Zea mays
  Clone ID: 700093019_FLI.pep
HGRMLKGVVENALSCWESFLSPMTLKMMDDMRNQFFDLLSDIGFVSKTAGVKAYNRYGNDLEMVCAVLCAGLYPNVVQCKRRGKRTAFYTKDVGKVDIHPSSVNAFVNQFPLPFLVYSEKVKTASIYVRDSTNISDYALLLFGGSLSPSKTGEGIEMLGGYLHFSAPKRTIELIQKLRGELDKLLQKKIEEPGLDIFSQGKGVVAAAVELLHSQNFDH

SEQ ID NO: 52312 - protein, 71 aa, Zea mays
  Clone ID: 700241801_FLI.pep
LLYVQHYNECQHSYIQTDHTLQPTRKFDAFPCVGGLSTPNRLQCNTTIGFPMRPVLCDQMVGHLGPDSSMA

SEQ ID NO: 52313 - protein, 145 aa, Zea mays
  Clone ID: 700244078_FLI.pep
MPSSSPLGSCRQLAPAGCSFVSKPSKGGRLLTFSCHICCPLLPPSLFKLASSWLNGPRASHGDGAQEEVELSCCPRLGFALALRHGRRASEEASEQRRRIRINGDIGIHAAAAGRRRNGCGGPRENSQAGEDERLRELRLFADHG

SEQ ID NO: 52314 - protein, 465 aa, Zea mays
  Clone ID: 700352631_FLI.pep
HVMFIPSAGMGHLIPFFRFIAALAGQSVDISVVTVLPTVSAAEEDYFTSLFAALPRVRRVDLHLLPFDASKLPSNDRDPFVLRWEALRRSAHLLGPLIAGAAPRVSAVITDVTLTSHVIPIAKELGVQCHVLFPSSATMLSLLAYTPVHIDKKAEQGSDIGDVDIPGVCRIPQSCLPQVLLHLDKLFTKQFIANGREIINADGFLVNTFDALEPVALAALRDGKVVPGFPPVYAIGPLMSQQHSVDEGGKEEGSGSPVAWLDEQPARSVVYVAFGNRCAVSHDQIREIAAGLEASNCRFLWVLKTTTVDRDDSAVLTELLGEGFLERVQGRGLVTKAWVDQEALLKHPAMGLFLSHSGWNSVTEAAAASVPLLAWPRGGDHRVNAKVAVSGGVGVWMEHWSWDGEDWLVTGEEIAKKVKEVMSDEAVRARTTRTAEEAAKAVAEGGTSYRSMEEFISSVKATVAS

SEQ ID NO: 52315 - protein, 180 aa, Zea mays; identical to SEQ ID NO: 37897
  Clone ID: 700449823_FLI.pep

SEQ ID NO: 52316 - protein, 218 aa, Oryza sativa nipponbare
  Clone ID: LIB3431-030-F4_FLI.pep
PEPVPEGHLHQHQLDPQGQDHVGAGGGVPHRARPDAHRPVRHRPGLLVHRLPHRHRRPLRHPAARVFHDDRVHARPRRAVPPLDDEGEPHRLRRHVRLHLLLRQLRPQLHHLHRAGGDLPGEAAFHLPRHLGGGGEGRRHHRIVRVPVRGAGPAQARRRVQTRDRGEELAVRARRMQPARVHLHVPRAGVEGEVAGGDVRRGGGRRRRGGRRRRWRRR

SEQ ID NO: 52317 - protein, 248 aa, Zea mays
  Clone ID: 700072769_FLI.pep
LPSSVMAPQTATRVASGRLVFGAPTTTDGKLVKGGSRLRVRSLDNNGRRVAVEAVNGAARPNGAAAVADVRQVPAPPPPEGDGDGVAFRLGKFAEGRLVYRQQFVVRSYEIGPDRTATMETLMNLLQETALNHVMCSGLAGDGFGATRQMSLRKLIWVVTRINIQVDEYSRWGDVVEIDTWVASSGKNGMRRDWIIRDRNTKNMIARATSNWVMMNRETRRLSKIPDEVRQEVLPFYLDRSIIAAATG

SEQ ID NO: 52318 - protein, 134 aa, Zea mays
  Clone ID: LIB3354-085-C2_FLI.pep
KDKMAQPSSWGTNPPVQAEMRSSSFMPRNAKHNGFLSGDSQIDHEMLNILEENARLLNQIEVNILTSQAHNNINLFHHIRRNINGLLQSMCQIPGIMSKMPPLPVSVDERLASYILPRAHTVNFLWHKFLAAVI

SEQ ID NO: 52319 - protein, 209 aa, Zea mays
  Clone ID: LIB3078-019-C9_FLI.pep
SCQTVLMAHLLYLVRAISPIMPHLAEDVWQNLPFQYTLQDGSLANFVFDLKWPEKNEEWLSAPKDDVDFLGVILELRSEVNKILENARTGKLIGSSLDAKVYLHTESSDTVLKLKELSSASNDADALHRLFITSQVDILPILNEEITSSVPYTGKFSNPRTGVIWIGVTRADGAKCERCWNYTQDVGSFHDHPTLCVRCYGVIELQTQT

SEQ ID NO: 52320 - protein, 210 aa, Zea mays
  Clone ID: LIB3357-023-B7_FLI.pep
QLISLCQSIHPSMEKLVYFATIISLSMAALLVPLRVQCEEAARAAAARSCHAGTGASASAPAAAAAWKRSCGGGKAGKQQPQVEGMFVFGSSLVDNGNNNFLNGSGVRADYLPYGVDFPLGPSGRFSNGRNVIDALGELLGLPGRVPPFADPRTRRARAALRGVNFASGGSGILEHTGQVTGKVVSLRQQITNFESVTLPDLRAQLRGPA

SEQ ID NO: 52321 - protein, 211 aa, Zea mays
  Clone ID: LIB3591-077-D6_FLI.pep
RGDDHLHSLSSLVVYKKPAPAVVPYPPTHPGPLLPLHPWPPTSRTPTPRGSSCSARSSSPPTRKNAGRTRATTRRHRRPFLLLLPLPRPRPRSRRPRLGVPAPSRCRARGAAAGRPSSATSTTTTCGSRATSAAPAAATGRPAARSAAWPPRPRAAAGRAPPPDRRPSLPPRRPPPQPPRRWAGRVDSAVVGGRGVGLRLPSRVMPDGRKL

SEQ ID NO: 52322 - protein, 137 aa, Zea mays
  Clone ID: LIB3591-089-D1_FLI.pep
ARALRHHQPLLRRAHGHRLVLVVVGELGPPALGAAPPEDAAVGDAGEGPVAAVVEGEALGPERRPAEAHGENPLAHVDGLHLLVAAGHGRQLHKQQQQQKKTQRRGGGEGELEQGGGSLHVLGRERKKKEALLAFGI

SEQ ID NO: 52323 - protein, 221 aa, Glycine max
  Clone ID: 700871114_FLI.pep
PIIEEPIMDMDPMTATISMISCGEDVSSQGLKSTDIDILQNDQFLHEVFYECEKDLLEKAAIEPPFSEILEIKVPLLNIDENTIQENKLLPDMQLAKSVSSGSLSSMDWMRGAAMKPAFIDIPAIDFNADYGMRRSFSEGDIKTLGNGNMNIVQSPLERPLLISNCTSEERFQKLSRYRNKRTKRNFGRKIKYACRKALADSQPRIRGRFARTEESDVKRE

SEQ ID NO: 52324 - protein, 135 aa, Glycine max
  Clone ID: 700788139_FLI.pep
CTHMKCTFGGIWNGGGGDGQKNLFVASFFFDRAAEAGFADPNLPVAIVRPADFEDAAKQACQTKLENAKSTFPRVDEGNLPYLCMDLIYQYTLLVDGFGIYPWQEITLVKKVKYDDALVEAAWPLGSAIEAVSSA

SEQ ID NO: 52325 - protein, 469 aa, Glycine max
  Clone ID: 700875432_FLI.pep
DTNPAKESNEFVDNLIKDIDTLGIKYEQITYTSDYFPELMEMAEKLIRQGKAYVDDTPREQMQKERMDGIDSKCRNNSVEENLKLWKEMIAGTERGLQCCVRGKLDMQDPNKSLRDPVYYRCNPMPHHRIGSKYKVYPTYDFACPYVDSIEGITHALRSSEYHDRNAQYYWIQEDMGLRKVLIYEFSRLNMVYTLLSKRKLLWFVQNGKVDGWDDARFPTVQGIVRRGLKIEALIQFIVEQGASKNLNLMEWDKLWTINKKIIDPVCPRHTAVIADRRVLLTLTDGPEKPFVRIIPRHKKYEAAGDKATTYTKRIWLDLADAVSLSAGEEVTLMDWGNAIVKEIEKDQDGNIIGLSGVLHLEGSVKTTKLKLTWLPEIDELVSLTLVEFDYLITKKKLEEGEDFIDVVNPCTKKETLAYGDSNMRNLQRGDLLQLERKGYFRCDLPFIRPSQPIVLYAIPDGRQQTSLK

SEQ ID NO: 52326 - protein, 116 aa, Glycine max
  Clone ID: 700875923_FLI.pep
VTFVTLNLKMNFPQWFFILVLHPFFSYCNLLPSTKFNKEYIFLFTETFLLLNTSGSAETHFSFAEPQDDQAASVQAMLPAQHDQQQTPFVCSCLIPHWRIQLLLLKHLRQWLQIYL

SEQ ID NO: 52327 - protein, 253 aa, Glycine max
  Clone ID: 700872843_FLI.pep
LDHIGYWYRWAAIASYLPQRTDNDIKNYWNTHLRKKLKKMQAGGEGGSFGEGFSASRQIPRGQWERRLQTDIQMAKRALSEALSPEKKPSCLSASNSNPSDSSSSFSSTKPTTTQSVCYASSADNIARMLKGWMKNPPKSSRTNSSMTQNSFNNLAGADTACSSGAKGPLSSAELSENNFESLFDFDQSLESSNSDQFSQSLSPEATVLQDESKPDINIAAEIMPFSLLEKWLLDEAGCQEKLVGCCGDAKFF

SEQ ID NO: 52328 - protein, 281 aa, Glycine max
  Clone ID: 700872947_FLI.pep
GCCMEEDQLLLIYEYMENNSLAHALFAKNDDSEKCQLRLDWQTRHRICVGIAKGLAYLHEESKLKIVHRDIKANNVLLDKDLNPKISDFGLAKLNDEDKTHLSTRIAGTYGYIAPEYAMHGYLTDKADVYSFGIVALEIVSGMSNTISQPTEECFSLIDRVHLLKENGNLMEIVDKRLGEHFNKTEAMMMINVALLCTKVSLALRPTMSLVVSMLEGRTRIQEVVLDKREVLDDDKFEIMQQYYQHRGENNIIESQNLSDPTGESSKLFADTSSSGEQIES

SEQ ID NO: 52329 - protein, 172 aa, Glycine max
  Clone ID: 700869211_FLI.pep
LIRLGFEGYRNVMENCRDNMLVLKEGLEKTGRFSIVSKDNGVPLVAFTLKDHTHFDEFQISDFLRRFGWIVPAYTMPPDAQHVTVLRVVIREDFSRTLAERLVADVEKVLHELDSLPARVISSTSVTVTAEENGKVVVAKKSAMETQREITAIWKKFVLERKKNNDKMNGVC

SEQ ID NO: 52330 - protein, 257 aa, Glycine max
  Clone ID: 700870190_FLI.pep
SIHSISFQHTLSLSIFGCLSFCSLLMMSRAAVLLHAPEEDAAAEECCTSTSSSSIGRNSDVSSERSMEEGENEVESAYHGPLHAMETLEEVLPIRRGISNFYNGKSKSFTTLADAVSSPSVKDIAKPENAYTRRRRNLMALNHIWDKNNRNYPLRSSGGGICKRSISLSRSSLALAVAMNNSDSSSSITSDDSGSSSNSIPPPSPLPPLHPRNRVSSLRNFSPWRSFSLTDLQQHCAIAATIKISSPSIGNETAHPS

SEQ ID NO: 52331 - protein, 518 aa, Glycine max
  Clone ID: 700877250_FLI.pep
DKGRTLLLGVDDMDIFKGISLKLLAMEQLLIQHPEYREKVVLVQIANPARGRGKDVKEVQAETKATVKRINETFGKPGYDPVILIEEPLKFYERVAYYVVAECCLVTAVRDGMNLIPYEYIISRQGNETLDKVLGLASSPKKKSMLVVSEFIGCSPSLSGAIRVNPWNIDAVADAMDSALEMADLEKELRHEKHYRYVSTHDVGYWARSFLQDLERTCSDHVRRRWWGIGFGLSFRVVALDPNFKKLSMEHIISAYKRTATRAILLDYDGTLMPQSSTIDKSPSSKSIEILSSLCRDKNNMVFLVSARSRKMLSEWFCPCENLGVAAEHGYFLRMKRDEEWETHVAATDTSWKQIAEPVMKLYTETTDGSTIEDKETALVWCYEDADPDFGSCQAKELLDHLESVLANEPVTVKSGQSNVEVKPQGVSKGLVATRLLSAMEEKGMCPDFVLCIGDDRSDEDMFEVITSSMGSPIAAKAEVFACTVCRKPSKAKYYLDDTTEIVRLLQGLACVSEQIDK

SEQ ID NO: 52332 - protein, 404 aa, Glycine max
  Clone ID: 700839572_FLI.pep
LGRVLGHGSFAKVYHARNLKTGQHVAMKVVGKEKVIKVGMMEQVKREISVMKMVKHPNIVELHEVMASKSKIYISIELVRGGELFNKVSKGRLKEDLARLYFQQLISAVDFCHSRGVYHRDLKPENLLLDEHGNLKVSDFGLTAFSDHLKEDGLLHTTCGTPAYVSPEVIAKKGYDGAKADIWSCGVILYVLLAGFLPFQDDNLVAMYKKIHRGDFKCPPWFSLDARKLVTKLLDPNPNTRISISKVMESSWFKKQVPRKVEEVVEKVDLEEKIENQETMNAFHIISLSEGFNLSPLFEEKRKEEMRFATAGTPSSVISRLEEVAKAGKFDVKSSETKVRLQGQERGRKGKLAIAADIYAVTPSFMVVEVKKDNGDTLEYNQFCSKQLRPALKDIFWNSAPASA

SEQ ID NO: 52333 - protein, 565 aa, Glycine max
  Clone ID: 700653543_FLI.pep
TMAMSTILLLTFFSFIYGSAATHHVYRNLQSLSSDSSNQPYRTAYHFQPPKNWINDPNGPLRYAGLYHLFYQYNPKGAVWGNIVWAHSVSKDLVNWTPLDPAIFPSQPSDINGCWSGSTTLLPGNKPVILYTGIDLLNQQVQNLAQPKNLSDPFLREWVKSPKNPLMAPTSANKINSSSFRDPTTAWLGKDGHWRVLVGSKRRTRGIAILYRSKDFVNWVQAKHPLYSILGSGMWECPDFFPVLNNDQLGVDTSVNGYDVRHVLKVSLDDKKHDYYMIGSYNAAKDAFIPDEESNEFVLRYDYGKYYASKTFFDDGKKRRILLGWANESSSVAADIKKGWSGIHTIPRALWLHKSGKQLVQWPVVEVEKLRAYPVNLPPQVLKGGKLLPINGVTATQADVEISFEVSNLREAEVLDYWTDPQILCSKKGSSIKSGLGPFGLLVFASEGLQEYTSVFFRIFRHQHKYLVLLCSDQSRSSLNKDNDLTSYGTFVDVDPLHEKLSLRTLIDHSVVESFGGEGRACITARVYPTLAINDEAQLYAFNNGTADVNITKLNAWSMKKAQIN

SEQ ID NO: 52334 - protein, 196 aa, Glycine max; identical to SEQ ID NO: 48998
  Clone ID: 700863840_FLI.pep

SEQ ID NO: 52335 - protein, 155 aa, Glycine max
  Clone ID: 700842849_FLI.pep
EKMSLIPSFFGGRRSSVFDPFSLDVWDPFKDFPFPSSLSAENSAFVSTRVDWKETPEAHVFKADIPGLKKEEVKLEIQDGRVLQISGERNVEKEDKNDTWHRVERSSGKLVRRFRLPENAKVDQVKASMENGVLTVTVPKEEIKKPDVKAIDISG

SEQ ID NO: 52336 - protein, 270 aa, Zea mays
  Clone ID: 700344343_FLI.pep
ITIPSLNPLPTPITAPSTNIPSPSTMLPPVPVIYPLPTPSTSSPPAVPVTNPAVTTPSTSPPSTPTPFNNPPLLNPTPTPAPTVTAPAASGREVWCVAKAAGSSEAALQNALDYACGIGGVDCSAIQPSGSCYYPNTIQAHASYAFNTYYQRNPVSSSCDFGGTAMLVTANPSSGSCVFASSLPSSSSSTVGYDPASTATPSSPSSGSDSGAPVLNASGAGSSESSDFGFDIPGAVNLGSGWRSVSPPNWPWAALVWILVALCVHKEGMV

SEQ ID NO: 52337 - protein, 242 aa, Zea mays
  Clone ID: 700344496_FLI.pep
QASSISQKDDTYEDIPNSQIRKVIAKRLLESKQTTPHLYLSKDVVLDPLLAFRNELKELHGIKVSVNDIIIKAVAIALRNVPEANAYWNNDKEETQKCDSVDISIAVATEKGLMTPIIRNADQKTISAISAEVKQLAEKARAGKLAPNEFQGGTFSISNLGMYPVDHFCAIINPPQSGILAVGRGNKVVEPVVDSDGTEKAAAVTKMSLTLSADHRVFDGQVGGKFFTELALNFSDIRRLLL

SEQ ID NO: 52338 - protein, 217 aa, Zea mays
  Clone ID: 700345584_FLI.pep
TGQVISTFSTGKVPYVVKLNPDEDKQHILLAGMSDKKIVQWDMKSGQITQEYDQHLGAVNTITFVDNNRRFVTSSDDKSLRVWEFGIPVVIKYISEPHMHSMPSMSLHPNSNWLAAQSLDNQILIYSTKERFQLNKKKRFAGHIVAGYACQVNFSPDGRFVMSGDGEGSCWFWDWKSCRRFKTLKCHNGVCIGCEWHPLETSKVATCGWDGVIKYWD

SEQ ID NO: 52339 - protein, 226 aa, Zea mays
  Clone ID: 700348029_FLI.pep
SSISPPRRPRWPPPPHRPPPLANRCSRGSAGSSKSRGRSRAPAPRPSTAARCLARSSTASSARPPCATTATRPSCPHPIRRQSTTSSTSPAIAAGTVRPCAAPCSASPTSSATWSPSSLTPPRTSPCHTSTPLSRRTTTRSAVATRNDPGKLTDLMLVNLPGILVVLGLHEQLHKFRFSFQISPFSASFLVVKDDGGNNMVLELTGCTFLVTCIPKLYLPETIVTV

SEQ ID NO: 52340 - protein, 395 aa, Zea mays
  Clone ID: 700347978_FLI.pep
GLTRKRRLIALLRRFPGVFDVVEEGVYSLRFRLTPAAERLYLDELRLRNESEGLAVAKLRKLLMMSQEKRILIEKVAHLKHDLGLPPEFRDTVCLRYPQYFRVVRMDRGPALELTHWDPELAVSAAELAEEESRAREAEERNLIIDRPLKFNRVRLPKGLKLTRGEARRIARFKEMPYISPYADFSHLRSGSDEKEKHACGVVHEILSLTVEKRTLVDHLTHFREEFRFSQSLRGMIIRHPDMFYVSFKGDRDSVFLREAYKDSQLVEKNQLVLLKEKMRALVAVPRFPRRAAVGTGEEAEGMNGSLQSRDQVSDEEYDDEDEGLSDMEDLISELSGGKSDADYEWGDGWFGENDDSPPDFGDDEVKVAMKIADGSANGSAPVPVFPDGRPRERW

SEQ ID NO: 52341 - protein, 610 aa, Zea mays
  Clone ID: 700348731_FLI.pep
EKSPHPLTITGSLPFHLQVPAAMVKKPNGVAKATATSADAAAQPSKENPSTPGLVKASKFKKRKVKANRAKQAVAAAAIDEVAPVGAGTGDGDASASAALPQPSDVAEALLVVQTPKSTTFAEASPVAQTQKPATDAEGLVPAPIPTTAVASASLPKPKPAQANADAAAAISASKGNGVGADNSRGDGEMKNKKERAMSDKGKEVMEEGGSKGKGKGKGKKAVVKKEERGDRKVAGFIFMCNAKTKKECYQSRLFGMPSGKIEMVKKIRPGVKLFLYDFDLKLLYGVYKAASHGGLNLVHEAFNGKFPAQVKFKIDKDCRPLPESSLKQAIKENYNAKSKFDPELTTKQVQRLLLLFKPVSAPQSVSNNHLGERRHYEKRRKPRHFEERRPIEAARRPRFDEERRPAVRHVPFEDPYRAPRYAPVPVDSQHGHSLASDHHRYYQPALTPEPRQLPLVLEPRYVPPALDHHHVPELRHAPPAYYRTLAPSGDSYYRSVENLVPERYADRTMADLTTRDPIIRDHTALPGEALARADRLDDLYRSDRVEELYRSDRLVNRAVDRPHPAYFTAAYETNPAYAETSIRPVSARVNGPSAAVSSLYSFSGGPVYR

SEQ ID NO: 52342 - protein, 310 aa, Zea mays
  Clone ID: 700350874_FLI.pep
TIFTLFATKTEASLLRMLKGSPDVYLSGPIKKYITDRGGRFHLRWGCREVLYEKSPDGETYVKGLLLTKATSREIIKADAYVAACDVPGIKRLLPSEWREWEMFDNIYKLDGVPVVTVQLRYNGWVTELQDLEKSRQLQRAVGLDNLLYTADADFSCFSDLALSSPADYYIEGQGSLIQAVLTPGDPYMPLPNEEIISKVQKQVVELFPSSRGLEVTWSSVVKIGQSLYREAPGNDPFRPDQKTPVKNFFLSGSYTKQDYIDSMEGATLSGRRTSAYICGAGEELLALRKKLLIDDGEKALGNVQVLQAS

SEQ ID NO: 52343 - protein, 491 aa, Zea mays
  Clone ID: 700351289_FLI.pep
EFEERYDQIFNVNNKVDSKELSVGRAALSSLLGGVGYFYGQSKIALPKGFTQKNGDKYISYWPAALYTAVPSRSFFPRGFLWDEGFHQLVIWRWDVHISMDIIGHWLDLLNSDGWIPREQILGAEALSKVPEEFVLQYPSNGNPPTLFLAIRDLASGIHAQQFSDEEAEKISSFLERAYIRLNAWFQWFNSTQSGKYEGTFYWHGRDNITTKELNPKTLTSGLDDYPRASHPNDEERHVDLRCWMLLATNCICSIAEFLKMDSALEKDYYKMSNQLSDFGTLNKLHLDDTIGAYFDYGNHTEKVRMRWFDVKDNNNMRREFLRETLQAPQLQLVPHVGYVSLFPFMMGTIPPESWVLEKQLNLISNTSILWTDYGLRSLSRTSSIYMKRNTEHDPPYWRGAIWINMNYMVLSALHHYAHKDGPYSGRAKELYDKLRSNLIRNIVQNYDATGFFWENYDQKDKGKGKGARSFTGWTSLIVLIMAESYPTLHR

SEQ ID NO: 52344 - protein, 357 aa, Zea mays
  Clone ID: 700352002_FLI.pep
FGSSSAASTPTLASVFATGSSTVPSAAAASAASGSSFPAVSTSGFSFAVAPSSSAAAATATTTTVTSASTSAGMTTTAPLTGTTGFPNFNLQTTTPASTSSPTLAFGVSTTAASSSATSTTTQATSSAVQVSSTGPTTTTSITPAASQAPKLPSEIVGKNVEEIIRDWNNELQDRTAKFRKHATAIAEWDKRILQNRNVLIRLEAEVAKVVETQTGLERQLELIETHQREVDKALQSMEEEAERVFQDERVLLHEDGAASARDTMYEQAEVVEHELQHMTEQVKSIIQTMNATQGGELESADSMTPFDVAVRILDNQLRSLMWIDEKVNEFSGRIQRLPNNSVSAERDSGIPRFWLS

SEQ ID NO: 52345 - protein, 534 aa, Zea mays
  Clone ID: 700351990_FLI.pep
DIFKGINLKLLAFENMLRTHPKWQGRAVLVQIANPARGRGKDLEAIQAEIEESCQRINGDFGQSGYSPVVFIGRDVSSVEKIAYYTIAECVVVTAVRDGMNLTPYEYVVCRQGAPGSQSVSEVSGPKKSMLVVSEFIGCSPSLSGAIRVNPWNIEATAEAMNEAISMPEQEKQLRHEKHYRYVRSHDVAYWSKSFIIDLERVCKDHFKRTCWGIGLGFGFRVVALDPHFTKLNMDSIINAYELSESRAILLDYDGTLVPQTSLNKEPSPQVLSIINTLCSDSRNIVFLVSGRDKDTLGKWFSSCPRLGIAAEHGYFLRWSREEEWQTCTQALDFGWMQMAKPVMNLYTEATDGSYIEAKESALVWHHQDADLGFGSSQAKEMLDHLESVLANEPVSVKSGQFIVEVKPQGISKGIVAERILASVKERGKQADFLLCIGDDRSDEDMFENIADIIGRNLVAPRTALFACTVGQKPSKAKFYLDDTFEVVTMLSALADATGPELETDSADESVAYISSLDIGDEQSESSDKPVEGS

SEQ ID NO: 52346 - protein, 356 aa, Zea mays
  Clone ID: 700352235_FLI.pep
NCRFFTYEELYQITNCFSSQNLLGEGGFGSVYKGCLADGREVAVKKLKDGGGQGEREFHAEVDIISRVHHRHLVSLVGYCISDDQRLLVYDFVPNDTLHYHLHGRGVPVLEWPARVKIAAGSARGIAYLHEDCQPRIIHRDIKSSNILLDNNFEALVADFGLARLAMDACTHVTTRVMGTFGYLAPEYASSGKLTERSDVFSFGVVLLELITGRKPVDASKPLGDESLVEWARPLLTQALETGNAGELVDARLNKNYNEVEMFRMIEAAAACIRHSASRRPRMSQVVRVLDSLADVDLTNGVQPGKSEMFNVASTAEIRLFQRMAFGSQDFTTDFSQSSWNNSQSRGLDASGSRPL

SEQ ID NO: 52347 - protein, 280 aa, Zea mays
  Clone ID: 700352582_FLI.pep
LINHGVPDDVMEAMKASTQSFFALPAEAKQQYRQQAGQLEGYGQLFVVSEDQKLDWADVLYLNTQPPEHRNLSFWPAGESFRQTLDTYSAAVKHVADRLLGAMYMNLGLLSSMDMDPERGAGIQSVRMNYYPPCAEAADKVLGFSPHSDSDLLTLVLQVNQLQGLQIKRPPDGGGAWAWLPVTPLQGAFVVNVGDVLEIFTNGRYRSVEHRALVNAHTERLSIAAFHSPSIHATIGPLPELLGDQEVPKYKTLDHQSFITLFFSAKLQGKSFLERMKKLS

SEQ ID NO: 52348 - protein, 381 aa, Zea mays
  Clone ID: 700352855_FLI.pep
KLHWLQLLHFHIGSMIPTTGKVYDAVSEAAGIYCNLVNEHGAKWLATLDCGGGLGVDYDGTRSGDSDMSVAYGIQEYASAVVQAVRLKCDYNGVAHPVVCTESGRAMASHHSMIILETLSAIPEPQDEDTSEQLLNRIQDLSYKQPRAPVGGATAAVYSHAADLKKHGIEMYKLGKKLGKRVVADANTVYNYHMNLSVFSLLPDFWGIGQLFPMMPVSRLNEEPTLKGTLVDITCDSDGKIENFISRENTLPLHLFEPSLGGYYVAVLVSGAYQEAIAGKHNLFSGPTLVRVNSSTTKDGGFEIERVDLGPAADEIIGSMRYSVEEDIITVIEKKAKGTEEEERVWAWEMVEPLMTKALTTMPYLNEYKVPEPEPEPEPIP

SEQ ID NO: 52349 - protein, 505 aa, Zea mays
  Clone ID: 700354663_FLI.pep
RSVMATAAPLLLFHGLLLLLSLALGAHGVNVKPGEHHILNRQSFPPGFVFGTASSAYQVEGNTHRYGRGPCIWDTFLKYPGTTPDNATADVTVDEYNRYMDDVDNMVRVGFDAYRFSISWSRIFPSGIGRVNKDGVDYYHRLINYLLANHITPYVVLYHYDLPQVLQDQYNGWLSPRILGDFTAFADFCFKTYGDRVKNWFTINEPRMMAQHGYGDGFFPPARCTGCQFGGNSATEPYIAGHHLLLAHAAAVKLYRSKYKVRQAGKIGILLDFVWYEPLTKSVEDEYAAHRARMFTLGWFLHPITYGHYPETMQKIVMGRLPNFTFEQSAMVKGSADYVAINHYTTYYASNFVNATETNYRNDWNAKISYERDGVPIGKRAYSDWLYVVPWGLYKALIWTKEKFNSPVMLIGENGIDQPGNETLPFALYDKFRIDYFEKYLYELQCAIRDGANVFGYFAWSLLDNFEWRLGFTSKFGIVYVDRNTFVRYPKDSARWFRKVIKNEN

SEQ ID NO: 52350 - protein, 244 aa, Zea mays
  Clone ID: 700354870_FLI.pep
AMRGVKHLLVRKTVPNGLVFVGELPFGRNGGFSPKMDHLVCFLPGTLALGATKGITKRKALETNLLTDEDIENLQLAEDLAKTCVEMYFVTSTGLAPEIAYFHIEGDTEGGPDGGNKSSKYINDIVIKPLDRHNLLRPETVESLFVLYRITEDSKYREWGWQIFQAFEKYTKVDSGGYTSLDDVTSLPPSTRDKMETFFLGETLKYLYLLFDENNTLPLDKYVFNTEAHPLPVMRSAEQASHSV

SEQ ID NO: 52351 - protein, 482 aa, Zea mays
  Clone ID: 700355426_FLI.pep
KTLGIGSFGKVKIAEHISTGHKVAIKILNRRKIRGMEMEEKVKREIKILRLFMHPHIIRLYEVIDTPADIYVVMEYVKCGELFDYIVEKGRLQEEEARRFFQQIISGVEYCHRNMVVHRDLKPENLLLDSKCNVKIADFGLSNVMRDGHFLKTSCGSPNYAAPEVISGKLYAGPEVDVWSCGVILYALLCGTLPFDDENIPNLFKKIKGGIYTLPSHLSGAARDLIPRMLVVDPMKRITIREIREHDWFKILLPRYLTVPPPDSAQQVKKVDEETLREVLGMGYDKNLLVESIQKRLQNEATVAYYLLLDNRLRTTSGYLGAECQEAMDSSFSNIASYETPSSARGNRQQIFMESPVGLRPHLPAERKWALGLQSRAHPKEIMSEVLKALQELNVYWKKIGHYNMKCRWSPGFPAQIHNNHNFSAGSIETDSLSERLSLIKFEIQLYKTRDEKYLLDLQRVSGPQLLFLDLCAAFLTQLRVL

SEQ ID NO: 52352 - protein, 330 aa, Zea mays
  Clone ID: 700356246_FLI.pep
PRILGDFTAFADFCFKTYGDRVKNWFTINEPRMMAQHGYGDGFFPPARCTGCQFGGNSATEPYIAGHHLLLAHAAAVKLYRSKYKVRQAGKIGILLDFVWYEPLTKSVEDEYAAHRARMFTLGWFLHPITYGHYPETMQKIVMGRLPNFTFEQSAMVKGSADYVAINHYTTYYASNFVNATETNYRNDWNAKISYERDGVPIGKRAYSDWLYVVPWGLYKALIWTKEKFNSPVMLIGENGIDQPGNETLPFALYDKFRIDYFEKYLYELQCAIRDGANVFGYFAWSLLDNFEWRLGFTSKFGIVYVDRNTFVRYPKDSARWFRKVIKNEN

SEQ ID NO: 52353 - protein, 492 aa, Zea mays
  Clone ID: 700467803_FLI.pep
RALPFDDNINFHKTIAAAIVVGVVLHAGNHLVCDFPRLISSSEVKYAPLRKYFGENKPTYLDLVKGVEGITGIIMVVCMLIAFTLATRWFRRSLVKLPRPFDKLTGFNAFWYSHHLFIIVYISLVIHGECLYLIHDWYKRTTWMYLAVPVGLYVGERTLRFFRSGSYSVRLLKVAIYPGNVLTLQMSKPPTFRYKSGQYMFVQCPAVSPFEWHPFSITSAPGDDYLSIHVRQLGDWTRELKRVFSAACEPPVGGKSGLLRADETTKKALPKLLIDGPYGSPAQDYSKYDVLLLVGLGIGATPFISILKDLLNNIIKMEEEEEASSDLYPPIGRSKAHVDLDTLMRITSKPKRVLKTTNAYFYWVTREQGSFDWFKGVMNEIAELDQRNIIEMHNYLTSVYEEGDARSALITMLQALNHAKNGVDIVSGTKVRTHFARPNFKKVLSKIATKHPYAKIGVFYCGAPVLAQELSKLCYEFNGKSTTKFEFHKEHF

SEQ ID NO: 52354 - protein, 149 aa, Zea mays
  Clone ID: 700469921_FLI.pep
PCRRPRRAAPTHYTLAAAETRQTASRSMGCVGSTPATKDAGGSSDVNHGTKRVRKPKAWKHPQPITMAQLRQMREEFWDTAPHYGGQKEIWDALRVASESEVSHAQAVVESAGIIVSNADLTLCYDERGAKYELPKYVLSEPTNLIRDS

SEQ ID NO: 52355 - protein, 383 aa, Zea mays
  Clone ID: 700550363_FLI.pep
FQMEYAVNFPLYSTLERLEHKRNIEHFDAWGSLMLTTKSSSFRINQEFLALAVEDFSFSQRVYRDELRHLDSWVKENKLDQLQFARQKLTYCYLSAAATVFSSELSDARISWAKNGVLTTVVDDFFDVGGSKEELENLIALVEKWHAHHAVEFYSEQVKIVFSAIYTTVNHLGAMASAAQGRDLTNHLVEIWLDLLRSMMVEAEWQRCQYVPTVEEYMTNAVVSFALGPIVLPALYFVGQELLEHAVKDEEYDKLFRLVSTCGRLLNDYQSLEREGNQGKLNSVSLLVLHSGGSMSIEAAKKAMQKSIDVSRRDLLRLVLRKESAVPRPCKELFWKMCKILHLFYSQNDGFSSPKEMVSAVNAVINEPLKVQNSTTFLSSSSR

SEQ ID NO: 52356 - protein, 413 aa, Glycine max
  Clone ID: 700562473_FLI.pep
GSFLGPLFVHTALQTDPEAVESARGRQLRFLANVDPIDVARNITGLNPETTLVVVVSKTFTTAETMLNARTLREWISSALGPSAVAKHMVAVSTNLTLVEKFGIDPKNAFAFWDWVGGRYSVCSAVGILPLSLQYGFSVIEKFLRGASSIDQHFYSQPFESNIPVLLGLLSIWNVTFLGYPARAILPYSQALEKFAPHIQQVSMESNGKGVSIDGVPLPFEAGEIDFGEPGTNGQHSFYQLIHQGRVIPCDFIGVVKSQQPVFLKGEVVSNHDELMSNYFAQSDALAYGKTAEQLQKENVSPHLIPHKTFSGNRPSLSLLLPSLNAYNIGQLLAIYEHRIAVEGFIWGINSFDQWGVELGKSLATQVRKQLNASRTKGEPVQGFNFSTTTMLTRYLQASSDVPADLPTVLPKI

SEQ ID NO: 52357 - protein, 124 aa, Glycine max
  Clone ID: 700562580_FLI.pep
KTCKVKKETHGVVQIKGYEQVPSNSEKALLKAVAHQPVSAYVEAGGYAFQFYSSGIFTGKCGTDIDHSVTVVGYGKARGGNKYWLVKNSWGTEWGEKGYIRMKRDIRAKEGLCGIATGALYPTA

SEQ ID NO: 52358 - protein, 455 aa, Glycine max
  Clone ID: 700563502_FLI.pep
SMKHWMSMRRMAVGAVSNSTLFLPSSLLSSSKPNPLTIPFSFYLTKTSPFSISVLTRQRRFLSVSSLTADHHNLSDFGDGDSVAISNEGLKMLLKGMTYPELEKWVQSHGYRPGQAMMLWKRMYGNNIWAHHIDELEGLNKDFKKMLNENAEFKALTQKEIRTASDGTRKILFTLEDGLVIETVVIPCDRGRTTVCVSSQVGCAMNCQFCYTGRMGLRRHLTAAEIVEQAVFARRLLTDEVGSITNVVFMGMGEPLHNIDNVIKAADIMVDEQGLQFSPRKVTISTSGLVPQLKRFLHESNCALAVSLNATTDEVRNWIMPINRKYKLELLLQTLREELCFKKNYKVLFEYVMLEGVNDSDGDAERLIELVKGIPCKINLISFNPHSGSFFKPTKDERMIEFRNTLAGAGLVVILRLSRGDDQMAACGQLGKPGTIQAPLLRVPEQFQMAIGSSA

SEQ ID NO: 52359 - protein, 368 aa, Glycine max
  Clone ID: 700563918_FLI.pep
AVLYMAHGGTNFGFYNGANTGVDEADYKPDLTSYDYDAPIRESGDVDNSKFNAIRRVIARYSSVPLPSIPSNNEKARYGPIHLQREAFVFDMFDFTNSTNVFKSETPMSMEYVGQLFGFVLHVTEYKAKRGGRILFIPKLHDRAQVFISCPSEESGARPTYIGTIERWLNNKVTLPDIKCHSKINLFILVENMGRVNYGSFIFDRKGILSSVYLDKEQVKGWKMFPIPLHNLNEMSTYNPITQVAYSAFSGISSFRKKLIYKNGNTSKEPAFYSGHFLIDKSSQVKDTFISFNNWGKGIVFVNDFNIGRYWPLRGPQCNLYVPAPLLKQGDNFLVILELESPDPELVVHTVDEPDFTCGSSGTSLHQL

SEQ ID NO: 52360 - protein, 327 aa, Glycine max
  Clone ID: 700732655_FLI.pep
FSSVFLRRIKMATLTVPPVPPSPRDDAMQLYRAFKGFGCDTSAVINILAHRDATQRAYIQQEYKAMYSEELSKRLASELSGKLETAVLLWLHDPAGRDATIIRKSLTADNKTLEGATEVICSRTPSQLQYLKQIYHSMFGVYLEHDIQTNTSPGDHQKLLLAYISTPRHEGPEVNREIAQKDAKGLYKAGEKKLGTDEKTFIHIFSERSAAHLAAVSSYYHDMYGHSLKKAVKNETSGAFEHALLTIIQCAVNPGKYFAKVLHKAMKGLGTDDSTLIRVVVTRTEVDMQYIKAAYLKKHKKTLNDEVHSETSSHYRTFLLSLLGPNH

SEQ ID NO: 52361 - protein, 87 aa, Glycine max
  Clone ID: 700733562_FLI.pep
ESCSLPRQFQEAYNIQINMMNFVYHPILQEIRSPHISFSMIKLREIVVLNIKMLYFHYAVSKMQTMIKLYGIHYLPTAIYIKLKVGV

SEQ ID NO: 52362 - protein, 504 aa, Glycine max
  Clone ID: 700738818_FLI.pep
PHQHHILLASDSEMPSKEDSPLVEAKLPLLEAHPLTDEREQDQSFPRRFWLESKRLWHIVGPSIFSRIASYSMLVITQAFAGHLGDLELAAISIANNVVVGFDFGLLLGMASALETLCGQAFGAKKYYMLGVYMQRSWIVLFICCIFLLPLYLFASPVLKLLGQPEELAELSGAVSIWMIPVHFAFAFQFPLQRFLQCQLKTAPIAWVSLVALVVHVFVSWLFVFKLQFGVVGAAATINFSWWVLTLGLFGYVVWGGCPHTWSGFSVEAFSGLWEFLKLSAAAGVMLCLENWYYKILIVMTGNLENAEIAVDALSICMTINSLELMIPLAFFAATGVRVANELGAGNGKGAKFATMVSVVTSVIIGLFFWMLILILHDKFGYIFSNSKAVLDEVNNLSLLLAFTILLNSVQPVLSGVAVGSGWQSYVAYINLGCYYIIGVPLGILMGWVFNQGVMGIWAGMIFGGTATQTLILSLITIRCDWDKEAERAKLHLTKWTDPKQELN

SEQ ID NO: 52363 - protein, 508 aa, Glycine max
  Clone ID: 700903722_FLI.pep
RQKKGLGFVLVIEAKRSKMGGSVRDVKSKGEVDEVVASGSPVILHFWASWCEASKHMDQLFSHLSTDFPNARFLRVEAEEQPEISEAYSVSAVPFFAFCKDGKTFDTLEGADPSSLANKVAKVAGSINPGESASPASLGMAAGASVLETVKELAKDNDSSKEKNQVQPGLSGPLKKRIQQLVDSNPVMLFMKGTPEEPKCGFSRKVVVVLNEERVKFGSFDVLSDSEVREGLKKFSNWPTFPQLYCKGELLGGCDIAIAMHESGELKEVFKDHGIDTTNEAKEKESGNGKGGISKSTDLSTTLSSRLESLVNSSAVMLFMKGKPDEPKCGFSRKVVEILQQENVPFESFDILTDEEVRQGLKVYSNWSSYPQLYIKGELIGGSDIVLEMQKSGELRKNLHEKGILPAETIQDRLKNLIASSPVMLFMKGTPDAPRCGFSSRVADALRQEGLNFGSFDILTDEEVRQGLKVYSNWPTYPQLYYKSELIGGHDIVMELRNNGELKSTLSE

SEQ ID NO: 52364 - protein, 408 aa, Glycine max
  Clone ID: 700905113_FLI.pep
KNLNLVYSVKEGKLIQYINSRSKVNESLEQAYKFYAGYGNDGTETAQASGAYIFRPDGSPSPIKSNGKSPLTVFRGPIVHEVHQKISPWIYQTTRLYKGKEHAEVEFIVGPIPIDDRVGKEIATEIKTNLASNKTFYTDSNGRDFIERVRDYREDWHLEVNQPVAGNYYPINLGIYLKDKSKEFSILVDRAVGGSSIIDGQLELMVHRRLLEDDSRGVAEALNETVCIHDNCTGLTVLGKYYFRIDPVGEGARWRRSFAQEIYSPLLLAFTEGEGHWGDSHVTTFSAIDSSYNLPDNVAIITLQDLGDGRVLLRLAHLYEIDEDKYLSVKATVELKKVFPNKQINKITEVSLSANQERAEMERKRLVWQVKGSPPEPKVWRGGPVDPENLIVELAPMEIRTFIISFRH

SEQ ID NO: 52365 - protein, 274 aa, Glycine max
  Clone ID: 700905152_FLI.pep
RIQTLSLNQLKELPPQFIRPANERPENTKAIEGVIVPLISLSQSHHLLVKEIAEAASEWGFFVITDHGMSQTLIQRLQEVGKEFFALPQEEKEAYANDSSEGKFEGYGTKMTKNLEEKVEWVDYFFHLMAPPSKVNYDMWPKHPSSYREVTQEYNKEMLRVTNKVLELLSEGLGLERKVLKSRLGDEEIELEMKINMYPPCPQPHLALGVEPHTDMSALTILVPNEVPGLQVWKENSWVAVNYLQNALMVHVGDQLERKQRGKENGYADLAHWC

SEQ ID NO: 52366 - protein, 110 aa, Zea mays
  Clone ID: LIB4073-016-G12_FLI.pep
QRRGKKELPAGLRHMPIQSSQERSKRAGLLRVDAPGQLRVDVRLHREVRPVPRRLRHPGEDAPDVCDVVPGLPHCRQHQPGDPRRRSAGTESRRVMVMLPVPANGCVAIC

SEQ ID NO: 52367 - protein, 139 aa, Zea mays
  Clone ID: LIB4073-017-F8_FLI.pep
WRWWWLRRWRRRLRRWPWRLRRWRLWRWRRRLRWWQPRRRWLRQLRWELEELSGGARAAKLSCSLLLPCCVVTLVHRVYLSSCCSSSSCPCVCCCCPSVFLIASCVSAVFVLVLSPVHQSSMNWAPGIDGCCCQVISQS

SEQ ID NO: 52368 - protein, 153 aa, Zea mays
  Clone ID: LIB4073-020-C6_FLI.pep
VSEEELRQYDGSDTKKPLLMAIKGQIYDVTQSRMFYGPGGPYALFAGKDASRALAKMSFEPQDLTGDISGLGPFELDALQDWEYKFMSKYVKVGTVKKTVPVEDGSTASTAPEASEATTEAEKAQTTEEKPREVSAEAVKEKEAPSDEGAQEN

SEQ ID NO: 52369 - protein, 203 aa, Zea mays
  Clone ID: LIB4073-020-D11_FLI.pep
DSTRPQMELSSSDAAVSSGTGAGGGGMGFLDPRGDALDAGVEVGEHPIPAPPPPLHGVALERPHQPAPRVVLVVSSDDAHSSDVSAEPQAAADDGVREQPGVVVDLQQLLRRPDADLPRGGARRQGGHVADAPGPAVLPFRELAHVDAREVPVQRAEAGDVRPRRGRWRRRQSRLHRALPLLLLLLLRLRLCRRLLLHLSRGQ

SEQ ID NO: 52370 - protein, 107 aa, Zea mays
  Clone ID: LIB4073-021-E4_FLI.pep
STHWIPTRLSRHVSTTMAWPVPLSSMNGVPSHSSPSLVRSTPRPLKRVRKLACPWCSNTEMLNVLGSRILFSVQVDWNKHGLESSLRHHFDLELLFFSHMINLIGKY

SEQ ID NO: 52371 - protein, 115 aa, Zea mays
  Clone ID: LIB4074-003-G11_FLI.pep
VLHGGLHQPWLQDVVRDAGHPRQRLVRVQQLLPEERPGRRGLRVPGPRDDHGPGPQHRDLQVRGHDRGRLRLLVEAAGAWEQPPPVPPAWGSPAIPVLLLDAEVLRGMGGVAVSA

SEQ ID NO: 52372 - protein, 400 aa, Zea mays
  Clone ID: LIB4074-008-E9_FLI.pep
SKTRAMEQTLVKVRKIHDGCSSAVNRLHTVLHSTEQQLESNKRQANYLAQVAAKSLPKGLHCLTLRLTNEYYFTNSKNKDFPYVEKLEDPKLYHYALFSDNVLAAAVVVNSTLVHAKKPEKHVFHIVTDSLNYAAMKMWFLANPFGKAAIQVQNIEEFTWLNSSYSPVLKQLETRFMIDYYFRTGHARHDENPKFRNPKYLSILNHLRFYLPEIFPRLNKVLFLDDDTVVQRDLSALWLVDLKGKVNGAVETCRQDFHRFDKYLNFSNPLIAKNFDPHACGWAYGMNMFDLSDWRKQNITEVYHTWQKLNENRLLWKLGTLPAGLVTFWNRTFPLDRSWHQLGLGYNPNVNVKDIRRAAVIHYNGNLKPWLEIGLPKYRKYWSAHVNYDQVFLRECNINP

SEQ ID NO: 52373 - protein, 54 aa, Zea mays
  Clone ID: LIB4074-009-H12_FLI.pep
AQLNSSSTADLFIFQYCYLVVQDQISRPGADCCMVCGLLSLLKTRNARTNVALL

SEQ ID NO: 52374 - protein, 192 aa, Zea mays
  Clone ID: LIB4148-001-C8_FLI.pep
RRANREHPNMREVESAQDLADSLLSAGDKLVVVDFFSPGCGGCRALHPKIAQFAEKNPGVQFLQVNYETHKSMCYSLRVHVLPFFRFYRGAEGRVSSFSCTNATINKFKDALAKHGAERCSLGPARGLDESELMALAENRDLHFTYDKPGGLVPLAEAIAKEAAAPGGPWLPLPASLLGQGSADNSLLPSGR

SEQ ID NO: 52375 - protein, 336 aa, Zea mays
  Clone ID: LIB4149-001-H4_FLI.pep
SRAAKSMDAEAAAAAEGQVRHWTADVNGISLHVAERGAADAPAVLLIHGFPELWLSWRHQMAALAARGFRALAPDLRGYGDSSVPTDPAAYSILHIVGDLVALLDHLQLTKVFVVGHDWGAMVAWHLCLFRPDRVRAAVVLGIPYFPRGPRPMTDSFAKLGDGFYINQFQEPGRAERAFARYDVATVLKKFYALKIDEMIAPPGVEIIDFLQAPSSPIPWMTDEELGQYAEKFEKTGFTGPLNYYRMLETNWRLTAPWSGSKITVPAKFILSKNDVGLQSFGTEKYVKSGALKENVPDLEISIIEGHHFVQQEEAGTVNSEILSFLGKFPSEGGSA

SEQ ID NO: 52376 - protein, 196 aa, Zea mays
  Clone ID: LIB3595-011-F8_FLI.pep
EGDNKYQSEEHGLQDAKKGMLFIDFPPVLQLQLKRFEYDFVRDTMLKINDRYEFPLQLDLDRDDGKYLSPDADRSVRNLYTLHSVLVHSGGVHGGHYYAFIRPKLSDQWYKFEDERVTKEDMKRALEEQYGGEEELPHTNPGLDTAPLRFTKHSNAYMLVYIRESDKDNIICDLDDEDISEHLKVRLRKEHEEKEY

SEQ ID NO: 52377 - protein, 209 aa, Zea mays
  Clone ID: LIB3600-005-C8_FLI.pep
MFKKSQTHESLNWAIPKELWIAHYLAEQKLTDSKQRSAIMAEIKYLMSGYEKKQRSENLSTWASQHPPTESKRRNRKRKEEEQEHHEAQYNQQQQEQNENKLIQGKRHQLHQEENMAQVTQQQHMQPTTRPATLKLPTPAIPLVLNAAQIQNFARPAYAAVPGVHNYPAQPGWPAAQGSPFVPQFMSPQYMGLPFNPFGLHPTCYPRRR

SEQ ID NO: 52378 - protein, 213 aa, Zea mays
  Clone ID: LIB3600-006-B10_FLI.pep
RQSPLPLRPPAEADPMSCGRGSTGEVEGGKSVAAMTPWHDSLAPPPRVLISHRPSDASGQGIVLSLQHPRSGDEVGYLFIDGQLQEINWFKERYGAWFLGDYVCEDGGLYYCTPVDPIFIFLPTFEAARMSNDKDPGKFRQLDEILYVEGYPGYQQLMNVANHHMELVCEVKEVSNMKFFRLDNSKVLSWLCCKVYDLKEVFPKLGKNYAAQT

SEQ ID NO: 52379 - protein, 214 aa, Zea mays
  Clone ID: LIB3606-017-E5_FLI.pep
QQGLPPTGHHPTRVSRHGQRVVPAIAQAVELGLGAGGRGDDGRRHGPSAVPAAGPAVRAHLHQPVRLPLPPAGGAGHRAHPHRARHQPQRRARALRALHRLHPLRRRAPRHRPPRRRRAARHLLPPAPPPGAPRRCRARAPRPRPPLRRRAPPHGAGCGRRDRRRGRGAALVPPLLRPHRQPHHRRPRLPRGRRAGEPLGDAALPRLNFFYQLD

SEQ ID NO: 52380 - protein, 117 aa, Zea mays
  Clone ID: LIB3606-018-G12_FLI.pep
KSVCVAWRDSCETPSSLRSSWAPPTRRRPPPLRLSLVPCLCRSGPPPSASAWYRASAAFASVLRLGLRPPRLRLATLPCTARRRPVARPEPLTRVSVQHSSDQRLFVQSTNRSRQEV

SEQ ID NO: 52381 - protein, 176 aa, Zea mays
  Clone ID: LIB3608-013-H2_FLI.pep
QPPYSSSQQQYQQQQHEVAHSFYGQGNTVLLPVADHNAQHQQPQPVQLHSQGPSCPPQPGKPSHCSAAPYAVQGNGQTYSSAYKNPSNCPATAAVVALLPQPPAIACMAYHPLGPQVVHNHPFGNTMVETSRSSVVGYPRDQFEMLPAITAAQPVLPVDKLNAGSNVTSSPREWSA

SEQ ID NO: 52382 - protein, 293 aa, Zea mays
  Clone ID: LIB3608-038-H6_FLI.pep
AQLRHAMSESDGDGAMEKVLGMDWSRKPGDPVNSAVDAEWIAGIARLGLDTNFVVVHGAGSFGHFQASRSGVHKGGLHSTLVKAGFVATRISVTSLNQEIVRALAREGIPSVGMSPFACGWSTQQRKLASANASQIIQSLHAGFVPVLHGDAVLDELLDCTILSGDVIIRHLAQLLSPKYVVFLTDVHGVYDRPPTDSNAVLLREIEVDDIGGWSIVKPALLQGNTKGVEISVAAHDTTGGMETKILEAAVIARLGIDVYITKAGTEHSLRALKGDVSTDSEDWLGTIIRSSK

SEQ ID NO: 52383 - protein, 134 aa, Zea mays
  Clone ID: LIB3608-040-F5_FLI.pep
QHNGQRSHISKPSSLDVLNAHARCPDKKAKRAHTSIMAVHGVSPCLPIILLLWPCVGLCPEEWSFGEWRERPLTSHFCEVGMESETRCTGDSFHCCVIVLIWVKNCTPALPDIPSHAIVLVTHELFGKDQAVLG

SEQ ID NO: 52384 - protein, 159 aa, Zea mays
  Clone ID: LIB3596-052-C8_FLI.pep
RERPRARPHGLTQQRRQEIKEAFDLFDTDNSGTIDAKELNVAMRALGFEMTEEQIRQMIADVDKDGSGAIDYEEFEHMMTAKIGERDSKEELSKAFRIIDQDGNGKISNIDIQRIAKELGVNLTLDEIQDMVQEADRNGDGEIDFDEFIRMMRRTSFGY

SEQ ID NO: 52385 - protein, 189 aa, Zea mays; identical to SEQ ID NO: 43384
  Clone ID: LIB3596-060-G11_FLI.pep

SEQ ID NO: 52386 - protein, 140 aa, Zea mays
  Clone ID: LIB3596-063-B11_FLI.pep
SPSRSSPSAMGDANGGSMHVVMLPWLAFGHILPFTELAKRIARQGHRVTLFSTPRNTRRLIRIPPELAGHIRVVDIALPRVERLPEDCEASIDLPSDDLRPYLRVAYDAAFADKLSAILQEPGPQRPDWVLIDYAAYWAP

SEQ ID NO: 52387 - protein, 189 aa, Zea mays
  Clone ID: LIB3596-064-D6_FLI.pep
QTRTNNILIICKERSWLEHALHIASSSGHTAACLARAISRAEGDLVVAVAAAGMGLGVVAGKQVGVWAAGPAAADGELGQRHGRLPRERAGECAAAVARLAAPAAAVEGAPRAPPHPAGLGPRRHVHGPRLPGVKLRAAAHRGGRRPHRRAAVVGDGECGRPRTGGHQGRDEEQEGRGSSSPGRHGCYS

SEQ ID NO: 52388 - protein, 139 aa, Zea mays
  Clone ID: LIB3958-019-F1_FLI.pep
PKGYVRLMGLGPTPQDVGTPGLKCYAPTRLQMEVMARKKAESDRDALEQRVFELQAQMEQRAQQDRDARLNETGDAGLDEGEEDYVSEDDVDDNLHDQVHGLTSSRTTAHKKEPHQGVMKLLALNMMLLLEKMSYYMPC

SEQ ID NO: 52389 - protein, 164 aa, Zea mays
  Clone ID: LIB3958-024-E9_FLI.pep
LKSNCTVRMRSYVEAGCRLHYQNISNINQLSSSEAGLKDHIKKAKTLLEELECLVENVYGITLTSSLSALEVSDSHCLDNMPSTDCYAMEEDKRADHLDMDVSLVTVMAMVRNMLKLDYTMQEKIVTALSLKTPSSELEGYCLMWDLRPYIDDDVMRLAWNMCP

SEQ ID NO: 52390 - protein, 155 aa, Zea mays
  Clone ID: LIB3959-012-E4_FLI.pep
LQVPTFQVTDRKSNAEDQTEPAISAPDLIKLLEESILTFRLFLKKDKRKSGVLMSASHGHAGSSIQQVQSSLDKKEAKVKELLKKRKGWKSKAWPGTMEEVQLLFALIDIKVVSRVLRMGKLSKEQLLWCEEKMSKVDLTENRLRRDGSPILFPC

SEQ ID NO: 52391 - protein, 390 aa, Zea mays
  Clone ID: LIB3732-023-D12_FLI.pep
SEFRMESSRSRKRTRQAHDCAAAPPPEREVVARGGASPPWREDDRDGHFVFDLGENLTRRYKILSKMGEGTFGRVLECWDRETHEYVAIKVVRSIRKYRDAAMIEIDVLNRLAENEKYRSLCVQIQRWFDYRNHICIVFEKLGPSLYDFLKRNRYQPFPVELVREFGRQLLESVAYMHELRLIHTDLKPENILLVSSEYIKVPSTKKNSQGEMHFKCLPKSSAIKLIDFGSTAFDNRNHNSIVSTRHYRAPEIILGLGWSFPCDIWSVGCILVELCSGEALFQTHENLEHLAMMERVLGPLPEDMIRKASSSAQKYFRRATRLNWPEGAVSRESIRAVRKLDRLKDLVSRNADHSKVALVDLLYGLLRFEPSERLTAEEALDHPFFRNPT

SEQ ID NO: 52392 - protein, 158 aa, Zea mays
  Clone ID: LIB3732-033-B6_FLI.pep
MSSPSKRREMDLMKLMMSDYKVEMVNDGMQEFFVEFKGPAESIYQGGVWKVRVELPDAYPYKSPSIGFINKIYHPNVDEMSGSVCLDVINQTWSPMFDLVNVFEVFLPQLLLYPNPSDPLNGEAAALMMRDRPVYEQKGKGEEQVIQEEPQGEEYDLI

SEQ ID NO: 52393 - protein, 204 aa, Zea mays
  Clone ID: LIB3597-017-C10_FLI.pep
PHAWRTEAKPKRPFPFALFDPSKKTAAEMVYYALLVGAELDGLTNLQPSGGCDDPSFPYYLKLKCENCGEVTAKSTYVTLSEQVDLPKGHGTAHLVQKCKLCGRDGTIVMIPGQGTPLTIEQSQKEEKTCLMVFDCRGYEPVEFSFGAGWKAESVHGTPFEIDCSEDEFSEYDEKGECPVELSKLQSTFKVVKKHEKGGKTRFV

SEQ ID NO: 52394 - protein, 134 aa, Zea mays
  Clone ID: LIB3597-018-E8_FLI.pep
KKGIAAGSGMGTSPVIPATMLFVALLVAVCFGATAARSSHARHTDADDAIRLPSSFGAGGRPWNCCDSAIKDASLPAWRCNDVVDKCSADCQDCEASPAGDGFVCGDFILSLTEPPVCTPRPWDCCRTWISTSN

SEQ ID NO: 52395 - protein, 195 aa, Zea mays
  Clone ID: LIB3597-044-B11_FLI.pep
ITSHNTTENQECRAAALPAGNDTQAARRESTHLSHSEIPEPRTSSQLPVGKHYSLAVAATTALYASSGMPSRAGLQPSPSRATPAPSSGSERGGARATCPPSDTAAVTMCRRLGAFAAPPPPPPPLHCRHATPAAMRSSSPLLTTILARTPPSPPRDTTVMTTPPPLWSACGRRGLPERKKQPCMLAGDGRQARR

SEQ ID NO: 52396 - protein, 359 aa, Zea mays
  Clone ID: LIB3595-053-A5_FLI.pep
SASMLLVVDLDVEEVDGALAERERIPEPVAEGLGLEPPVNRGPVLAHQLLRGLQVLVRLRLVEEHERHPLPAAGDHAVRGRPEHRVAHDLHLLADDDEQLVAGEHGHVHPPAGARPPEQHLEAADVAVEEEHGDDGVVRVGLQPVHEVRARAGRVVGEPRVRAALLAHVPEEEPLAEPQHPRHGPEHAPGHLLAAQGVLVQEPHERRRPRGPELHPPLLLRLHRQVQPVAPVQHLTVGVHAVDAVTLGLELAGVVPVGVLQLLRRWQVEELQPGVPDAVQQGYRHAVAGHLEEAPGFERRPELAGLLHVTGVGKTLTSTVGKANSGAATSPVGRSSSLSTYRLGSAGRPAAATSCTICP

SEQ ID NO: 52397 - protein, 109 aa, Zea mays
  Clone ID: LIB3595-058-F8_FLI.pep
PTHSVTFFHMMNVLVLQKFLKYIQHCILSLTTHNSGISHMHKKIFDCFCSAPPRYKKKRLTRTSHELFSYFTETVLSSGNCMDPHIPNGAWVILQSLCTQYTVLHGSNR

SEQ ID NO: 52398 - protein, 198 aa, Zea mays
  Clone ID: LIB3595-064-G3_FLI.pep
CINFIAFAVCYSNKALFAILYFISFVLDGVDGWFARKFNQASTFGAVLDMVTDRVSTACLLALLSQFYRPGLVFLILLGLDITSHWFQMYSSFLSGKTSHKDVKHTGNWLLKLYYGYRPFMAFCCVSCEVLYIFLFLFADEESTSLLSVCKGILNQSPVVILVFVSTLVGWAVKQATNVIQMKTAADACVVYDLKRSK

SEQ ID NO: 52399 - protein, 182 aa, Zea mays
  Clone ID: LIB4071-007-C5_FLI.pep
KAWNSAIHCTGLAAGPERSTTCTNLSPSMASRTAWLVVRYASFMKGSTSKRWRRAAGTRCASAGLPGPVGSSARDRPGTRLSSFRASASAKTAARRCSVCGASSDASCVICSRYKLARSKAPAATSAAHWYSRLMRRRPCWSWLSSCTHDDPCGCGDGVHSDDAGDDVADDSVSSWNMSMSA

SEQ ID NO: 52400 - protein, 177 aa, Zea mays
  Clone ID: LIB3597-066-E12_FLI.pep
LQNRDENVCQTILLAMDRSTIHQQQFLQRKEKTRKYSTPMGSSAAAAGDLTRGSQSQHPDRSRVQCSPVRAAAPPVERLVVGVALLGAAEQPSAAPGLAPAAVGPRRHRHLHRLAPPARRALAVAPRRPRPDQRLRRRRPLAVADLLWWTRILEPVMRRSTTVGRAQAVRGGGRRRG

SEQ ID NO: 52401 - protein, 274 aa, Zea mays
  Clone ID: LIB3632-044-B12_FLI.pep
SVTMMTVEEKPDVTYNDVGGCKEQIEKMREVVELPMLHPEKFVKLGIDPPKGVLCYGPPGTGKTLLARAVANRTDACFIRVIGSELVQKYVGEGARMVRELFQMARSKKACIVFFDEVDAIGGARFDDGVGGDNEVQRTMLEIVNQLDGFDARGNIKVLMATNRPDTLDPALLRPGRLDRKVEFGLPDLEGRTQIFKIHTRTMNCERDIRFELLARLCPNSTGADIRSVCTEAGMYAIRARRKTVTEKDFLDAVNKVIKGYQKFSATPKYMVYN

SEQ ID NO: 52402 - protein, 347 aa, Zea mays
  Clone ID: LIB3632-047-C3_FLI.pep
VQRIRARSNDICMELDRKMMMLLLIYISHLLFCSRDLLKDRQPPALLPVRHRHVEQSQHLVLDPVIVVALAPAPALIRRASSSVTAATARPRRMRHDPGQQLLHFPDDLAVLLVAGLQVPPGEHVGEDELGVGEPGLLDEAEGEVARLVGVRVDHLRLPVHHLRRHEVALLHVRPREVAQDARCLLLDGDVDLAAVRAGALGGPAMERLAEVDLAELLLEQLDLLLGPPAGLVEVQEDVVQRLLGLLRAQVPQRPDGVDGLRQVPALLHHHRHVLERAVQLVARADRLPEPRDRRVQVLLHQLEVLGPRVRPVAGRDLVRDVRRGRARRLSHRCHGDKLMIIHASSY

SEQ ID NO: 52403 - protein, 136 aa, Zea mays
  Clone ID: LIB3594-053-E1_FLI.pep
RLVEAGADVVDGLERGGAEREVGRRLLLAGLGGRGVQQDGGVAALHEAVVEVEPDQRRGEPHVLPDRRRQELPHDGLRLGAALLVEVERQARSQRRVPGPLGRQGHDGCCQCQCQDKQSSCRAPRRSSSRHCCSAR

SEQ ID NO: 52404 - protein, 220 aa, Zea mays
  Clone ID: LIB3608-051-C8_FLI.pep
LSTDRRHECFAFWLLGARHGEVAVLREGAHQQGRVDQGGGRAAGGVRPGARRGVLALAAQGGGAAALRQELQAALDELPPPGPQARQLHRRRGRAHHPPAQPPGQQVVPHRRAAAWPDGQRDQELLEHAHQAQAPRPRHRPEDAPPARRRRRRRRATRRGRAPGAAAPRSPRRARREAGAGGVIRRRRPEQRHQQRRRRRRQRGGAAVPRPQPRPVRGPA

SEQ ID NO: 52405 - protein, 196 aa, Zea mays
  Clone ID: LIB3637-196-G2_FLI.pep
CHFCLSCFNMNNLQDNGLVPIVEPEILLDGDHGIERTLEVAEKVWSEVFFYLAQNNVLFEGILLKPSMVTPGADHKEKASPEAIAKYTLTMLRRRVPPAVPGIMFLSGGQSEVEATLNLNAMNQSPNPWHVSFSYARALQNSVLKTWQGRPENVEAAQKALLVRAKANSLAQLGRYTGEGESDEAKKGMFQKGYTY

SEQ ID NO: 52406 - protein, 155 aa, Zea mays
  Clone ID: LIB3632-035-F3_FLI.pep
MSDFCSVRRLFSSACAQPRWVSSRMNISQARANTTGASAAIMRTSSSAFMIFLMRASGRLWFLKSVVASISRYCSAQNSCSCAAAAPPWCEEGGPGAGGGGYSAPNAACACAYGPAEYAAPAAGGYATAAPITGGGMLELGSIARVFRRQWSERV

SEQ ID NO: 52407 - protein, 99 aa, Zea mays
  Clone ID: LIB3600-002-C9_FLI.pep
LGCLYSLNKIYFHQVLDPNCSVCTPFPQLLVCVEGEAQNIFNDIHKLLTTHRSEMTHFTQQLREVSHKLTMSYDFSLPCRILSSHLLIGGYSWFCRVSK

SEQ ID NO: 52408 - protein, 160 aa, Zea mays
  Clone ID: LIB3994-005-G5_FLI.pep
PVPGHQAPGGHGNRPCRAIDPGGRPRPREHGQHGLDPAGFPVAGLAAGDLCRQPHGWQGPGRDIAALPGVHAGDDWLQAGTLTRRPIADLPYKRRLGAIDHPVADNPRLVDHRIVGRHRACIAPVPIEGFALAHIRRPQRVEQFSGGTLDQFRDHHLRRG

SEQ ID NO: 52409 - protein, 116 aa, Zea mays
  Clone ID: LIB3591-121-E11_FLI.pep
AELRWGAFHFLVLSSDWRSAHSGIAPRPPNTHRHRTCSYARTHGMRTVLLAIAVDSPGFTPLSRVCVWLPCSWVRALLRQEGGPGARAVPAYGRQEVAVLQGGRPGLQVLRAPHAP

SEQ ID NO: 52410 - protein, 213 aa, Oryza sativa nipponbare
  Clone ID: LIB3599-054-D1_FLI.pep
HLIRISCSLALFLELAPAMADPSFFVGIVGNVISILVFASPIATFRRIVRSKSTEEFRWLPYVTTLLSTSLWTFYGLHKPGGLLIVTVNGSGAALEAIYVTLYLAYAPRETKAKMVKVVLAVNVGALAAVVAVALVALHGGVRLFVVGVLCAALTIGMYAAPMAAMVSKLARRSLLTHPPPFTSTNKTCQIRHQKKKLVEGVTLQKINNAIKV

SEQ ID NO: 52411 - protein, 192 aa, Zea mays
  Clone ID: LIB3801-004-F2_FLI.pep
TQTGGCSCGQQQSHEQQHHPQQHHPQKQQHQPPPQHHQQQQHQQQQFQGHDKQQQPQQPQQYQQGQEKSQQQQCHCQEQQQTTRCSYNYYSSSSNLKNCHEFLRQQCSPLVMPFLQSRLIQPSSCQVLQQQCCHDLRQIEPQYIHQAIYNMVQSIIQEEQQQQPCELCGSQQATQSAVAILTAAQYLPSMCG

SEQ ID NO: 52412 - protein, 289 aa, Zea mays
  Clone ID: LIB3088-031-B5_FLI.pep
PFPTPAVELSTTQSRLGPPRHGDPDEQQRDRRAEPGDTPALGPHPRLGNLAAVARRRHRVRPPPVHPGHRAGRGAHGHRCRGPRRRLLPRHLAAMALPPHHARVHRRAALLHRLRLRRHQQGRRGSRVGGRLQGVPPRGLLHLAAAPRRKPQGLGPDPELPRRRARLQAPGGEGEQGRGGSGSARPVPGRVRVLQAAHELQLHVHRRHGVDQDSGGLRARRPGLQRVGQRRGRPLLRVPVVQGRRGGRAQAGLEAGRHRQRRHPLLHRRRLLRRLLRLQEQPPGQLRLP

SEQ ID NO: 52413 - protein, 79 aa, Zea mays
  Clone ID: LIB3912-047-A12_FLI.pep
GSCKLSEAIQIKIVPTNTLAYFSSHKKQLLLYRRRHTSTHTHTPLVVSCRSVGSIPHPGSVLAAQAPERVGASPAFLQW

SEQ ID NO: 52414 - protein, 434 aa, Glycine max
  Clone ID: 700790064_FLI.pep
MGADDFEPLTMIGKGAFGEVRVCREKATGHVYAMKKLKKSEMLRRGQVEHVKAERNLLAEVDSNCIVKLYYSFQDEEYLYLIMEYLPGGDMMTLLMRKDILTENEARFYVGETVLAIESIHKHNYIHRDIKPDNLLLDRNGHMKLSDFGLCKPLDCSNLQEKDFSIGSNRSGALQSDGRPVAPKRSQQEQLQHWQKNRRMLAYSTVGTPDYIAPEVLLKKGYGMECDWWSLGAIMYEMLVGYPPFYSDEPMLTCRKIVNWRNYLKFPEEVKISAEAKDLISRLLCNVDQRLGTKGADEIKAHPWFKGIEWDKLYQIKAAFIPEVNDELDTQNFEKFEEADNQTQPSSKSGPWRKMLSSKDVNFVGYTYKNYEIVNDDQLPEIAELKKKSTKPKRPSIKTLFDDESATAANQPTQGSFLKLLPTQPEVPEKSESQ

SEQ ID NO: 52415 - protein, 428 aa, Glycine max
  Clone ID: 700787747_FLI.pep
LIKMQQSNGSDSSTTEQKAPPPRQSPAVARPQQWLPMQYPAAAMVMPHHMLPPQHYAPPPYVPFHHHHHHHQYAAPHVPNQHQQQQQHHHHQNGSGGENKTIWIGDLHHWMDENYLHRCFASTGEISSIKVIRNKQTGLSEGYGFVEFYSHATAEKVLQNYAGILMPNTEQPFRLNWATFSTGDKGSDNVPDLSIFVGDLAADVTDSLLHETFASVYPSVKAAKVVFDANTGRSKGYGFVRFGDDNQRTQAMTQMNGVYCSSRPMRIGAATPRKSSGHQQGGQSNGTANQSEADSTNTTIFVGGLDPNVSDEDLRQPFSQYGEIVSVKIPVGKGCGFVQFANRNNAEEALQKLNGTSIGKQTVRLSWGRNPANKQFRMDFGNPWTGAYYGAPMYDGYGYALTPRHDPSIYAAAYGAYPLYGGHQQQVS

SEQ ID NO: 52416 - protein, 332 aa, Glycine max
  Clone ID: 700834772_FLI.pep
GMLSRLMDFLTACWRRRSFSDGKGGSEVTGRKEGLLWYKDAGQHLFGEYSMAVVQANNLLEDQSQIESGPLSLLDTGPYGTFVGVYDGHGGPETSRYVCDHLFQHLKRFASEQKSMSEEVIRKAYQATEEGFLSVVTKQWPMNPQIAAVGSCCLVGVICGGILYIANLGDSRAVLGRVVRATGEVLAIQLSSEHNVARESVRQEMHSLHPDDSKIVVLKHNVWRVKGLIQISRSIGDVYLKKAEFNKEPLYAKFRVREGFKRPILSSDPSISVHEIQQHDQFLIFASDGLWEHLSNQDAVDIVQNNPHNGIARRLIKAALQEAAKKERDEVL

SEQ ID NO: 52417 - protein, 250 aa, Glycine max
  Clone ID: 700863770_FLI.pep
ECPVCKGEVTLKSVTPIYGRANNVRGPEEDSALKIPPRPQAKRVESLRQTIQRNAFALPVEEMIRRLGSRIELTRDLVQPPEPDAARETAERTTSLLRFLTAQGIRREHQNLVAPPEDVMGLAQNNVNTSEAGDPRTRVQSHLLRRTQSHRATLSTLSSALTSAERLVEAYFRSNPLGRNQEQPPPPVEDRDSFSSIGAVINSESQLDTAVEIDSMVSLSTSSSRRRNDASRVSDVDSGDSRAPRRRRLN

SEQ ID NO: 52418 - protein, 217 aa, Glycine max
  Clone ID: 700866722_FLI.pep
IWMDFLLETMYAGYMRVLLNCFAFSQCLSNKILFSILYFLSFVCDAVDGWCARKFNQVSTFGAVLDMVTDRISTACLLVVLSQLYKPSLIFLSLLALDIASHWLQMYSTFLTGKTSHKDVKDSSSWLFRAYYGNRMFMAYCCVSCEVLYLILFYLVENQTQKLVDVISSNLQKISLLSLLMGSSLFGWAAKQIINVIQMKTASDACVLYDIEKKHKN

SEQ ID NO: 52419 - protein, 290 aa, Glycine max
  Clone ID: 700893453_FLI.pep
LISGNSSKIDDDFESEVMLISNVHHRNLVQLLGCCSKGQDRILVYEYMANNSLDKFLFGNRRCSLNWKQRYDIILGTARGLTYLHEEFHVSIIHRDIKSCNILLDEELQPKISDFGLVKLLPEDKSHLSTRFAGTVGYTAPEYALHGQLSKKADTYSYGIVVLEIISGQKSTDVRVDDDGEEESLLRQAWKLYERGMHLELVDETLNDNYDAEEVKKIIEIALLCTQASAAMRPAMSEVVVLLSSNALEHMRPSMPIFIESKLKPHRDIFASTSSSTSNATASSSIVPAR

SEQ ID NO: 52420 - protein, 242 aa, Glycine max
  Clone ID: 700891906_FLI.pep
AATNWVNKYVKAYSQNVKFKYIAVGNEIHPGDSLAGSVLPALENIQKAISAANLQGQMKVSTAIDTTLLGNSYPPKDGVFSSSASSYIRPIVNFLARNGAPLLANVYPYFAYVNNQQSIGLDYALFTKHGNNEVGYQNLFDALLDSLYAALEKVGAPNVKVVVSESGWPSEGGVGATVQNAGTYYRNLINHAKGGTPKRPSGPIETYLFAMFDENQKDGPEIERHFGLFRPDKSPKYQLSFN

SEQ ID NO: 52421 - protein, 414 aa, Glycine max
  Clone ID: 700735790_FLI.pep
LSAMNALAATNRNFRRAAHILGLDTKLENSLLIPFREIKVECTIPKDDGTLVSYVGFRIQHDNARGPMKGGIRYHPEVDPDEVNALAQLMTWKTAVADIPYGGAKGGIGCNPRDLSVSELERLTRVFTQKIHDLIGIQRDVPAPDMGTNSQTMAWILDEYSKFHGHSPAVVTGKPIDLGGSLGREAATGLGVIFATEALFAEYGKSISDMTFVIQGFGNVGTWAAKSIYERGGKVIAVSDISGAIRNPNGIDIPALLKHKEGNGNLKEFSGADIMDPDELLVHECDVLIPCALGGVLNKENAADVKAKFIIEAANHPTDPDADEILSKKGVIILPDIYANAGGVTVSYFEWVQNIQGFMWDEEKVNRELKKYMTKAFRNIKAMCQIHNCDLRMGAFSLGVNRVARATLLRGWEA

SEQ ID NO: 52422 - protein, 188 aa, Glycine max
  Clone ID: 700788792_FLI.pep
LRLDGSVEPEKRFEIVKAFNSDPTIDVLLLTTHVGGLGLNLTSADTLVFVEHDWNPMRDHQAMDRAHRLGQKKVVNVHRLIMRGTLEEKVMSLQRFKVSVANAVINSENASMKTMNTDQLLDLFASAETSKKGASVVKSPENNSDGDAKLVGSGKGLKSILGGLEELWDQSQYTEEYNLSLFLARLNG

SEQ ID NO: 52423 - protein, 254 aa, Glycine max
  Clone ID: 700892170_FLI.pep
FSLSQMEAKLVAQCNSPTLTLAHWKLKQPCVVGVLARPADDISGEARKTNHVYKDGLFDRIAINYLSKCVQEATGLKNSKSGYESLVEAATLASQRFSPIEQHQLVIQSLDRAFPKPMLLLIRTLLPPSKFARKLFAIFTTLFFAWLVGPSEVRESEVEGRRERNVVHIKKCRFLEETNCVGMCINLCKLPSQSFIKDSLGMSVNMVPNFDDMSCEMIFGEDPPESTDDPALNQPCFKLCKAKRSHGTNCLVIN

SEQ ID NO: 52424 - protein, 213 aa, Glycine max
  Clone ID: 700894355_FLI.pep
SSIVDTNFTVGTIFGVWPGDKLTGITGRDQVAAAMGVLGPRTTYVLALKDFPGTHEFLLLDEGKWQHVKETTEIGEGKLFSPGNLRATSDNPDYAKLIDYYVNEKYTLRYTGGMVPDVNQIIVKEKGIFTNVSSPSAKAKLRLLFEVAPLGFLIEKAGGYSSDGHQSVLDKVISNIDDRTQVAYGSKNEIIRFEETLYGKSRLKGGVAVGAAA

SEQ ID NO: 52425 - protein, 386 aa, Glycine max
  Clone ID: 700672387_FLI.pep
VSSMAISFSPKHPPYDEMIYTAIGALKERDGSSKRAIGKYIEQVYKDLPPTHPALLTHHLNRLKSSALLVLVKKSYKLPGSHHLPALQPQKTRGRPPKPKPHPVWPAAALTDSPALLSAKRGPGRPKKIGVSPPGPRGRPPGTGRSKLPKRPGRPPKPKSVSAISSGLKRRPGRPPKAQSNVNVIPFAAPVAPGLPTVQPILPTASVPNGSPRPRGRPKKSFTAAGAPALSAVAGAARGRGRGRPRGVFPVVRPGRPQKLAVGRSKNPVRRPVGRPKGSTAAAITAHKAANEDLRKKLEHFQSKVKESLGTLKPYFNHESPVTAIAAIQELEVLSTLDLKAPLRDETQQQPPPLPQTQTQVYEQQYPQPQSQQLPQFFQPHTSAPS

SEQ ID NO: 52426 - protein, 251 aa, Glycine max
  Clone ID: 700892015_FLI.pep
NPKKLPLIVFFHGSGFIVTSAASTMFHDFCAAMSAAVPAVVASVEYRLAPEHRLPAAYDDAAEALEFIRDSSEEEEWLTKHADMSNCYLMGSSAGATIAYFAGLRATDTASDLSPLKIRGLILRQVFFGGTQRSKSEVRLENDEVLPLCVTDLLWELALPVGVDRDHEYCNPRAEKWVGKMGKMRELGWRVLVSGNGGDPVIDREKDLVLLLEEKGVVVVSDFDEEGCHGVEFGDESKANQLIQVVKRFVS

SEQ ID NO: 52427 - protein, 235 aa, Glycine max
  Clone ID: 700865877_FLI.pep
AMDYPGFGLSEGLHCYIHSFDGLVDDVIEHYSKIKENPEFHSLPSFLFGQSMGGAVALKIHLKQPKAWDGAILVAPMCKIADDMVPPKFLTHILIGLANVLPKHKLVPNKDLAEAAFRDLKKREQTAYNVVAYKDKPRLKSAVEMLKTTEEIEQRLKEVSLPIFILHGEADTVTDPSVSKALYENASCSDKKLQLYKDAYHALLEGEPDEIITQVFGDIISWLDEHSLTHNQSSS

SEQ ID NO: 52428 - protein, 333 aa, Glycine max
  Clone ID: 700875617_FLI.pep
SNDETAPMVVQLVPLIMMELHQTLENQKVSSDERQNELQGLLCGCLQVIIQKLGSSEPTKYHFMQYADQIMGLFLRVFASRSATAHEEAMLAIGALAYATGADFAKYMTEFYKYLEMGLQNFEDYQVCAITVGVVGDVCRALEEKVLPYCDGIMTQLLKDLSSNQLHRSVKPPIFSCFGDIALAIGENFEKYLLYAMPMLQSAAELSAHTSGADDDMTEYTNSLRNGILEAYSGIFQGFKGSPKTQLLMSYAPHVLQFLDSLYMEKDMDDVVTKTAIGVLGDLADTLGSSAGPLIQQSVSSKDFLKECLSSDDHLIKESAEWAKLAISRAISF

SEQ ID NO: 52429 - protein, 191 aa, Zea mays
  Clone ID: LIB3067-053-H7_FLI.pep
TASLPSRHKKKIRLGCLSLANCNGCCCHCYCYSVRGAGGRRPEGGGTASRRGGSGAGAGAGGEARAGGGRQLRGPRGDRQDPAQLQVQSDDRGFGDARAGAAGAGAGPRREHDHHGLLDARDDRVRAAEARLPPLQPDPVTARARMEDLVARSDLIRGVVRIQFFVCSFVRSFFSFFLLGHRSAAAAAAVD

SEQ ID NO: 52430 - protein, 364 aa, Glycine max
  Clone ID: 700844704_FLI.pep
VEVNTLELKIDEEVEIEIEESASAESPNIGWGRWYSLKELENATEGFAEVNVIGEGGYGIVYKGILMDGSVVAVKNLLNNKGQAEKEFKVEVEAIGKVKHKNLVGLVGYCAEGAQRMLVYEYVDNGTLEQWLHGDVGPVSPLPWDIRMKIAVGTAKGLAYLHEGLEPKVVHRDVKSSNILLDKKWNAKVSDFGLAKLLGSEKSYVTTRVMGTFGYVSPEYASTGMLNEGSDVYSFGILLMELITGRSPIDYSRPPGEMNLVDWFKVMVASRRGDELVDPLIDIQPYPRSLKRALLVCLRCIDLDVNKRPKMGQIVHMLEADDFPFRSEHRTNREKDPVHSKAAVSSKILYPTRHVEPADKSSWR

SEQ ID NO: 52431 - protein, 151 aa, Glycine max
  Clone ID: 700902285_FLI.pep
ERVVMEGEEGGIATKKRGKEGETETTRYKGIRMRKWGKWVAEIREPNKRSRIWLGSYSTPVAAARAYDTAVFHLRGPSARLNFPELVAAEGPAADMSAASIRKKATEVGARVDALHRQHPHALPAGEFADRVDLNKMPEPENSDCDYWDRD

SEQ ID NO: 52432 - protein, 139 aa, Zea mays
  Clone ID: LIB143-051-F1_FLI.pep
QQQTTQRSVTAAAGRPSLPTKAWELSLIFNGWSSSSWATTVSPSVSASKTTTLPTAPSTATAAIVPFSFSRFQELVDAHRLLGTLITLSIFLLLILVRTLREQKNIEEPVQSSANLRYQSINYRETNQLNENFIIFFLV

SEQ ID NO: 52433 - protein, 90 aa, Zea mays
  Clone ID: LIB148-030-G11_FLI.pep
LCQAIPDPGRPRRFEASTHRRPRHVSVSCLVLFLKCQNTCKFPLLLDLAEKNEMIQVLVDQELQMWDPTCIFSFADVSSSSLLLIFFVSS

SEQ ID NO: 52434 - protein, 89 aa, Zea mays
  Clone ID: LIB3059-026-C11_FLI.pep
PYILAAGMKANSQQHPIILRSTFNLTLRQCLLGEGTRSASIHWLSPPSFSTSTNCILWLSPHHLHGRHLSVHKQTQSVFVRTMAIPICA

SEQ ID NO: 52435 - protein, 250 aa, Zea mays
  Clone ID: LIB3060-024-C10_FLI.pep
AFLSSPRPPVPPPRLPFLSRAKMNVEKLKKMAGAVRTGGKGSVRRKKKAVHKTTTTDDKRLQSTLKRIGVNSIPGIEEVNIFKDDVVIQFVNPKVQASMVLIHGWSVELHRQRSCKICFRRLSTSLVLTTWTICGGSQSNSRSRPLVLLVQRLVPALGLFRTMMMTFLSLSLERHLRRPRKRKRSPHDFATCLLLLNHAIRRDLLRTLTYLICACGTGYVMIENLVGRAGGILHEVCLFFFIHISLAFVW

SEQ ID NO: 52436 - protein, 53 aa, Zea mays
  Clone ID: LIB3060-025-E10_FLI.pep
LILPQNWKRPPATGTLRVLLITYNNMGSKTLSTECTFASLTRLRENDSQGYAG

SEQ ID NO: 52437 - protein, 177 aa, Zea mays
  Clone ID: LIB3061-021-C2_FLI.pep
RIQQAIATGILPLSPLFLQQPSALLQQLPLVHLVAQNIRAQQLQQLVLANLAAYSQQHQFLPFNQLAALNSAAYLQQQLPFSQLVAAYPQQFLPFNQLAALNSAAYLQQQQLLPFSQLADVSPAAFLTQQQLLPFYLHAMPNAGTLLQLQQLLPFNQLALTNSTVFYQQPIIGGALF

SEQ ID NO: 52438 - protein, 77 aa, Zea mays
  Clone ID: LIB3061-024-G12_FLI.pep
SGLVVVVVSTGSSSGSGSSLILNERNDPRCFVLILDAKLLHVGDHSGGVVSPLEGRLGDPVPLLHLLPLRHGQGHPV

SEQ ID NO: 52439 - protein, 224 aa, Zea mays
  Clone ID: LIB3061-052-D3_FLI.pep
SLQLGEHRLPLLQEGSDGLLQIVRPHHTRVPCGYMLQALFYGRIPASQQNGLGSNHRPCRLVSYFFGDLCDARIQVLLGIKDPGNQPHVLGLHGVDLASGEREVSSVAVADDPREALQRAEVGDDGHVHLLEHEGGVPGAAPDVAGGHEVDAAADAGAVHRRDDGLPAPLDGRERRLHVEDRAAEPLRGGHGIGGGGGQRVPGAPELDARAEVRARGGQHHGAR

SEQ ID NO: 52440 - protein, 158 aa, Zea mays
  Clone ID: LIB3061-053-B1_FLI.pep
NPREKTPLLGQGEKGLVFDGSDPQGRAGSAEVAAVWPRLRPKGWTSEAESMPPSDSSAMGSRQSAAARRRSWRCRRTTSSVSGGAGSSAKARAVRAEVVQAAILAAAIALPLEWIDWRCFAENTDGSTVRHSLSSARDGLQLQRAAGFSLVDVNSTPL

SEQ ID NO: 52441 - protein, 148 aa, Zea mays
  Clone ID: LIB189-018-D12_FLI.pep
EQRQHTQLSSKRDRDAGVMATVSAAVVTTIVARAAIARPNALGLPALRARSERVRCSYAKDAKNAAPVSTKGAGASLLAAAGAVTASAGPALALVDERMSTEGTGLSLGLSNNLLGWILLGVFGLIWSLYTIYTSDLDEDEESGGLSL

SEQ ID NO: 52442 - protein, 154 aa, Glycine max
  Clone ID: 701154561_FLI.pep
CIAFFIVHYSMATTAALSGTMVSTSFMRKQPMTTKSLKTFPNALFGLKGGRGGRVTCMASYKVKLITPEGEVEFECPDDVFIVDKAEEEGIELPYSCRAGSCVSCVGKIVKGDVDQSDGSFLDDEQIESGWVLTCVALPRSDAVIETHKDGEIE

SEQ ID NO: 52443 - protein, 131 aa, Zea mays
  Clone ID: LIB3076-013-D3_FLI.pep
EENNNLKKVLQFSCIRIFLLRERATTVKDISFTHCLLKKHFLVTLNDRKMEAHFSSNELIDPRLAGNFTAEGMKELVGLAFQCLNPSSRRRPRMRLVATELDRILETEMSMTTFMGDGTTIVTLGSQLFSS

SEQ ID NO: 52444 - protein, 223 aa, Zea mays
  Clone ID: LIB3059-057-C1_FLI.pep
FVANKAQRTFSILTGYLTNTFYSIGLVQGWAAIVMGILSGSIPWYTMMVLHKKWSFMQRIDDTLGVFHTHAVAGLLGGATTGLFAEPVLCNLFLAIPDSRGAFYGGDGGSQFGKQIAGALFVIGWNIVITSIICVLIGLVLPLRIPDAQLLIGDDAVHGEEAYAIWAEGELNDVTRQDESRHGSVVKPVSLTSIRFISINVQFERSSECILKEQGSILFILSR

SEQ ID NO: 52445 - protein, 463 aa, Zea mays
  Clone ID: 700075357_FLI.pep
ATIAAVGENKNSGPESVVMRPTKSQLGDENMNSEHNGFVGVRKDAVQTGIVSHNLDGSIRRDGNTDQAGNSHGPLVQGGKDHKASDASTDHEKGRLFQQASLQNAGAPGSYVPPGVVPHPSGPDKMLPQHMTNHGHMHGFSENIRPPLQQPYGVFHSGTITRPFGENQIQMPMPQPGGIRPGDGMIRPCLVGPLPGHHGAVLPSFDLERLGQPRPLGMLNSNDFGGEGFNASGGAAYPERHDNTEDSRKHFPAPAPLDDQGLRRDPRHFERALGRPDGFLDSVPGRPPFANHRSAGLHEDFPRKQNATASHPDFLSHGAEFDHHRAIGMPNFRNPGPFAQGTSGGPGGPPKHQLGSGDMHPGDPHLVAEYAQHGFPKTAAHFGLGGFLRNGNSGWCRICMFNCGSAENLDLHVQTREHQQCAMDIVLKMKQDVAKRQKLNYGGPKSFNNKKVSGKGHFRGNRR

SEQ ID NO: 52446 - protein, 332 aa, Zea mays
  Clone ID: 700086332_FLI.pep
SFCAEAVGALDSARCRRGHLALARSPRTKAASVSFRPAMRNPPGRHLLCLSSRAVRSSSSSSALGPGPGAVTSAASPRPRAIAPGRPLRASSPSPPYAVAAAAYVEDGDWEEVVAGGPGTGEMEEEQDYRVVFWSPPTIDEVTGAVTSIQQVFENPLGLDSDTTDRQTTLLSASGHSSGNSSGSDDWIEPAAYVLNSTALLSREHRNVVDAFRLLQKDPTVQKMVMSLSCDKAVWNAVMNNEAVQDFRRSLHDGKENDRNENTGGPAEVFKWILESAQAKIFEFLENVQKIINMLIHTPEDDDNPDGYSDAVKVSFMLTVFVFIVVAIARIK

SEQ ID NO: 52447 - protein, 267 aa, Zea mays
  Clone ID: 700050856_FLI.pep
RKKHVQVKMLYRPNGTLGPAEAPKPRRRKQSDEEVPHNLHRLMNSSPRISHAGLPKRPRTTAAGDAKNGAVAPGGGNGAGVCNGSSVQVPTEAGGWLGNGCSEAKSHERTVPLLNHEVSGEDSSRHAAKSSGGIADNGVGVGNSSAGQKVKVKRKELLLNQNTGKEREEPEEATQTEPFVRSITLDESKPNSKGKGRSNPNGNGTERLAGPADTKGRGEGVTPPKITSVWKIKKLKTSHCSSDSKVLHKVCVPPPTAAETSASVKAD

SEQ ID NO: 52448 - protein, 350 aa, Zea mays
  Clone ID: 700073073_FLI.pep
QTRRGRCGEWANCFTFYCRAFGYDARLILDFTDHVWTECFSNLYGRWMHLDPCEGVYDNPLLYEKGWNKKLNYVIAISKDGVRDVTKRYTRKWHEVLSRRIITSEETVVSVLSSITGKYRTGLSPDALSVIENREKEESEELRKSAYLQVETALSLPGRLSGSVEWRKARSELGQADSLSCSSCPIRKCVDGHVSNIYDALSAFLSHFFDKKIPKERIIEAFEALKTLMLTLKSSNFKSRSATLDQKAHHLFEEIFPSIERLLSAISLKAELGTAGYQSVTVSGNPVHSSLALPVALDAVNEILSNYKNNTFFTEGNHFPRGNRVCSGSVLASREQLPIGIVCECNSCIF

SEQ ID NO: 52449 - protein, 526 aa, Zea mays
  Clone ID: 700083984_FLI.pep
RRPSDRVSAAEESKAMEVVASAPGKVLIAGGYLVLERPNAGLVLSTTARFYAVVRPLRDSLPADAWAWAWTDVKVTSPQLSREATYKLSLTKSTLQLTSARESTNPFVEQAIQFSVAAAKATIIDKERKDVVDKLLLQGLNITILGCNDFYSYRKQIEARGLPLTPEALLSLPPFSSITFNSEVANGTMTGEKCKPEVAKTGLGSSAAMTTSVVAALLHYLGVVSLSCPGQSSGDNTTRRELDLVHSIAQSAHCIAQGKIGSGFDVSAAVYGSQRYVRFSPEILSSQATGGTFLPDVVSDIVTQRWDHENKQFSLPPLMTLLLGEPGTGGSSTPSMVGSVKRWQKSDPEKCKDTWSKLAFANSALENQLRILKGLSENHREAYESVVLSCSHLTYEKWTEVATNQHQELIIKSLLAARDACLEIRLHMREMGIAAGVPIEPDSQTRLLDATMNMEGVLLAGVPGAGGFDAVFSVTLGDASNAVANAWSSAGVLPLLVREDCRGVSLEDADPRTREVSAAVSSIQIN

SEQ ID NO: 52450 - protein, 146 aa, Zea mays
  Clone ID: 700088188_FLI.pep
AIEHAHIRDVDYNPKKQNIVATAEEEFGIRLWDLRMLKYPLKDLPGHSHWTWAVRHNPAYDELLLSAGTDSTVNLWLAKVSSDDPESDSPSALSNRQEVPLLNSYTDYEDSIYGIAWSSHDPSLFASLSYDGRVVLESVKPYLQRK

SEQ ID NO: 52451 - protein, 274 aa, Zea mays
  Clone ID: LIB3150-075-G12_FLI.pep
NHQALCIFNPPRRHADLTMICLKAISSPLHLPTLRRLTPTSSLRAAAAMSSSSSAVAAPIEHFVLFKARPEAVASGAAAAMVSSLQALATLVPGLAYIHAGPVLRLRSPAAEALGPTHLLHTRYATKEDLASYAAHPAHVAAVQGHVLPNALDITAVDWVNAAPLPSPAAPGSAVRLTLAKVKEGVEVAQLVEKVAAATQAAGDAKVSFGENFSPARAKGYQFGMVAVFDSVEELDAVEGDGKVEEAKALVRPLLDEVMVLDFVVGDAPTPASL

SEQ ID NO: 52452 - protein, 158 aa, Zea mays
  Clone ID: 700208843_FLI.pep
ARRFMIYVHSKMMIVDDEYIIVGSANINQRSMDGGRDSEIAMGAYQPCHLNTKGQVARGQVHGFRMSLWYEHLGMLHDDFLNPGSLECVRRVNQMADRYWDLYAGDSLDADLLGHLLRYPVTVTKEGTVTELPGAKFFPDTQALVLGALSKLPPILTT

SEQ ID NO: 52453 - protein, 247 aa, Zea mays
  Clone ID: 700075811_FLI.pep
RLSPILPPRRRLPLPPSSVPCSAADTFARLNLTMAAAASAITAVSGVVLPQTFLSHRLPPPQVLAVASSFRRLSLCASPHRITHIIPRADASAEAGEPEPATASAESEEEVAEGSVAVAEAEEPTPPSKPKVKFGEIIGILNKQFIEEAEKVKTVPDLRPGDIIELRMQRPNKRRLSLFKGIIIAKHKAGVHTTIRVRRIIAGVGVEITFPVYSPRIKEITVIRHKKVRRAKLYYLKDKLPRFSTFK

SEQ ID NO: 52454 - protein, 181 aa, Zea mays
  Clone ID: 700212795_FLI.pep
NLLEGEPTRTFTSLPIRTNSQIRETEAPAVLLSFLAPFTREVSGVFDSSRVPMALQWMILACVVAVEAAVAALVTLPVPRAVRGQIVALTSLFLQPLSSVIPFAAFQILDLYWKKEHRLMCTSEICTAEERIRFEKSMFKAQRNVILCVSACLLYWCIYRIVKLNKDIKALEETEKRLKEE

SEQ ID NO: 52455 - protein, 175 aa, Zea mays
  Clone ID: LIB3115-001-A11_FLI.pep
ASCPARTSAPSRSRPPRGGRRRPGPPPRRRRSPSSTAAGWSCSTTSRRRRRPRSCASQLAPSARRPRPRRRRRATTCPSPGRRRCSGSWPSARTASWSAPPTPARPHPRRRRRRSRPPRGSGSAARTPSASTSRCDLDLACYPPGSTGGDLIGWVPGFLWVCWIGVGVEIGDGGL

SEQ ID NO: 52456 - protein, 224 aa, Glycine max
  Clone ID: 701152196_FLI.pep
NTFWQVMKDGKIVESGSYKDLIACPNSELVQQMAAYQETLHQINPCQEDDSASCRPCQKNQIEVAEENIQEIMEDWGRSKEEEAETGRVKWSVYSTFVISAYKGVLVPVILLCQILFQVMQMGSNYWISWATEQKGRVNNKQLMGTFALLSFGGTIFILGRTVLMAAVAVETAQRLFLGMITSVFRAPVSFFDTTPSSRIMSRVSFTIISLFDILLLSFDYYQL

SEQ ID NO: 52457 - protein, 459 aa, Glycine max
  Clone ID: 700837087_FLI.pep
ECQIQKLNALKPDNRIESEGGFIETWNPNNKPFQCAGVALSRCTLNRNALRRPSYTNGPQEIYIQQGNGIFGMIFPGCPSTYQEPQESQQRGRSQRPQDRHQKVHRFREGDLIAVPTGVAWWMYNNEDTPVVAVSIIDTNSLENQLDQMPRRFYLAGNQEQEFLKYQQQQQGGSQSQKGKQQEEENEGSNILSGFAPEFLKEAFGVNMQIVRNLQGENEEEDSGAIVTVKGGLRVTAPAMRKPQQEEDDDDEEEQPQCVETDKGCQRQSKRSRNGIDETICTMRLRQNIGQNSSPDIYNPQAGSITTATSLDFPALWLLKLSAQYGSLRKNAMFVPHYTLNANSIIYALNGRALVQVVNCNGERVFDGELQEGGVLIVPQNFAVAAKSQSDNFEYVSFKTNDRPSIGNLAGANSLLNALPEEVIQHTFNLKSQQARQVKNNNPFSFLVPPQESQRRAVA

SEQ ID NO: 52458 - protein, 378 aa, Zea mays
  Clone ID: LIB3137-062-G6_FLI.pep
SMADGEDIQPLVCDNGTGMVKAGFAGDDAPRAVFPSIVGRPRHTGVMVGMGQKDAYVGDEAQSKRGILTLKYPIEHGIVNNWDDMEKIWHHTFYNELRVAPEEHPVLLTEAPLNPKANREKMTQIMFETFNAPAMYVAIQAVLSLYASGRTTGIVLDSGDGVTHTVPIYEGYALPHAILRLDLAGRDLTDCLMKILTERGYSFTTTAEREIVRDIKEKLAFVALDYEQELETAKSSSSVEKSYELPDGQVITIGAERFRCPEVLFQPSLIGMEAPGIHETTYNSIMKCDVDIRKDLYGNIVLSGGTTMFPGIADRMSKEITALAPSSMKIKVVAPPERKYSVWIGGSILASLSTFQQMWISKDEYDESGPAIVHRKCF

SEQ ID NO: 52459 - protein, 736 aa, Zea mays
  Clone ID: 700154686_FLI.pep
ELAAQAKERHILRTQTLLCDMLLRDAPVGIFTRSPNVMDLVKCDGAALYYQNQLLVLGSTPSESEIKSIATWLQDNHDGSTGLSTDSLVEAGYPGAVALREVVCGMAAIKISSKDFIFWFRSHTTKEIKWGGAKHEPVDADDDGRRMHPRSSFKAFLEVVKWRSVPWEDVEMDAIHSLQLILRGSLPDEDANRNNVRSIVKAPSDDMKKIQGLLELRTVTNEMVRLIETATAPVLAVDIAGNINGWNNKAAELTGLPVMEAIGRPLIDLVVTDSIEVVKQILDSALQGIEEQNMEIKLKTFHEHECNGPVILKVNSCCSRDLSEKVIGVCFVAQDLTRQKMIMDKYTRIQGDYVAIVKNPTELIPPIFMINDLGSCLEWNKAMQKITGIKREDAINKLLIGEVFTLHDYGCRVKDHATLTKLSILMNAVISGQDPEKLFFGFFDTDGKYIESLLTVNKRTDAEGKITGALCFLHVASPELQHALQVQKMSEQAATNSFKELTYIRQELRNPLNGMQFTCNLLKPSELTEEQRQLLSSNVLCQDQLKKILHDTDLESIEQCYMEMNTVEFNLEQALNTVLMQGIPLGKEKQISIERNWPVEVSCMYLYGDNLRLQQILADYLACALQFTQTAEGPIVLQVMSKKENIGSGMQIAHLEFRIVHPAPGVPEALIQEMFQHNPGVSREGLGLYISQKLVKTMSGTVQYLREADTSSFIILMEFPVAQLSSKRSKPSTSKF

SEQ ID NO: 52460 - protein, 58 aa, Zea mays
  Clone ID: LIB3059-047-C9_FLI.pep
EVLPHEEVCYQGLGQNCEMLRLAYHRLCFNFWFVWTFAVGRKYDVFLHFHKWLNWFDW

SEQ ID NO: 52461 - protein, 120 aa, Zea mays; identical to SEQ ID NO: 51523
  Clone ID: LIB3061-005-C7_FLI.pep

SEQ ID NO: 52462 - protein, 124 aa, Zea mays
  Clone ID: LIB3061-005-H8_FLI.pep
LPLHQHLVRLGVGDHILHSVEAPEDLLDLAGAPFAVHVDPHLDLLRRRGRRRRRRVLLLLLVLLLVLGLLAAAAYFLGLVVLLLLLCRGGLLGLLHLLLLGRLLAHGFPPSPDPLLLCSAPHVC

SEQ ID NO: 52463 - protein, 131 aa, Zea mays
  Clone ID: LIB3059-011-C2_FLI.pep
AGVTTPSYLALFVRHFYSQLSANLGAGVQLHNGDDLAYSFRAKKAVLFKPDNGFLGLNLKGRLLTDKELKPTKTTGSVELAWTILDLKQGQDVRLKVGYELCDKVPYFQLRENGWTLNAYMDGKWDVRFEM

SEQ ID NO: 52464 - protein, 110 aa, Zea mays
  Clone ID: LIB3059-022-B8_FLI.pep
IAAQTKAIAEKIKDWSNVVVAYEPVWAIGTGKVATPAQAQEVHASLRDWLKTNASPEVAESTRIIYGGSVTAANCKELAAQPDVDGFLVGGASLKPEFIDIINAATVKSA

SEQ ID NO: 52465 - protein, 95 aa, Zea mays
  Clone ID: LIB3060-036-G6_FLI.pep
QPVRAPPGHPYARRRRQGDGDGCRVGIGDGRPVSGQAAVLHRAAAVQQEVEEGRGGGRVLDRPLPEPGDDHRLTVGRSEAAQGSTVVGSCQIDLA

SEQ ID NO: 52466 - protein, 127 aa, Zea mays
  Clone ID: LIB3061-044-F8_FLI.pep
LAAYSQQHQFLPFNQLAALNSAAYLQQQLPFSQLVAAYPQQFLPFNQLAALNSAAYLQQQQLLPFSQLADVSPAAFLTQQQLLPFYLHAMPNAGTLLQLQQLLPFNQLALTNPTVFYQQPIIGGALF

SEQ ID NO: 52467 - protein, 155 aa, Zea mays
  Clone ID: LIB3061-049-G4_FLI.pep
NLFKYVESMSLISLNLQHHVLEICLCGVENADTIQTKVSKRKKEDQNVMAMHSSRTSAKRSELMYLSPPLGNTVTIILPLFSCLEATFKQAARFAPEEMPTSRPSSLASLLAFAMASSVLTVTVSSMTEVSRTSGRNPGPTPWILCLPGAPPEIT

SEQ ID NO: 52468 - protein, 218 aa, Zea mays
  Clone ID: LIB189-025-F3_FLI.pep
SAGSLTTRSSWPPPPPSWEPHPRPSQPPSSSAPTRYPSSSPLPPPPPPVASSRASSTPHPPPRSPSSTPSRAPTSASTSGARSPSWSTGRARWCRRRRTSRTRATRRRSGGAAAVRRPRLESTPWTMPASTSRRVSALPTLLGLLTPSISSSPLPRTTDVVLTDYYHSSVNVTCFLFSWASASVAAFVFWSLSRTVIHPANLQTLLIGYAGRRILYSA

SEQ ID NO: 52469 - protein, 71 aa, Zea mays
  Clone ID: LIB3059-004-H11_FLI.pep
KSPTGPAKLGHDTILLLIIQSSRWSPDRFPRYYKATREHTQELEICITIYNTNERAQLHRTSLESVDGTRL

SEQ ID NO: 52470 - protein, 185 aa, Zea mays
  Clone ID: LIB3060-026-D10_FLI.pep
SHSSVARGSGGPILPVTSSEQGTWQMWSTPLVQESLGLQGPQSQWFQQNTNQFNHSANLFSSEGRARSPLGTGLNDSDPWLQKAPFQQLPPDTSSLFLSHEMPGKLHNDLAFGSPNKSAREHPFGPPCYLLPKEELGLDGAQEGGGGHVLSPSGAHAGLFSPTSPDVQPLWPFSEKREHRTNRLL

SEQ ID NO: 52471 - protein, 180 aa, Zea mays; identical to SEQ ID NO: 48070
  Clone ID: LIB3060-054-B12_FLI.pep

SEQ ID NO: 52472 - protein, 173 aa, Zea mays
  Clone ID: LIB3061-033-A7_FLI.pep
PLSPLLFQQSPALSLVQSLVQTIRAQQLQQLVLPVINQVALANLSPYSQQQQFLPFNQLSTLNPAAYLQQQLLPFSQLATAYSQQQQLLPFNQLAALNPAAYLQQQILLPFSQLAAANRASFLTQQQLLPFYQQFAANPATLLQLQQLLPFVQLALTDRAASYQQHIIGGALF

SEQ ID NO: 52473 - protein, 49 aa, Zea mays
  Clone ID: LIB189-021-G8_FLI.pep
WTGDHLKAKLKMSYAVALSCPEHICVFLGKKHTIFCSHSSIVYLCQTTI

SEQ ID NO: 52474 - protein, 52 aa, Zea mays
  Clone ID: LIB3062-019-A9_FLI.pep
YRSQWFSHSHGEKTADRYRQLQHYYIIFIHDSTDAKYIMKLHVVLALQKGKL

SEQ ID NO: 52475 - protein, 90 aa, Zea mays
  Clone ID: LIB3066-016-F7_FLI.pep
PQPERTADGYELRSRGPASRGFQVLDNDPLEKANASIRSRTLMNKLVLPLLLVELVITNPNCQKIWCCYICINLYLSLCFCKLMHVPPHV

SEQ ID NO: 52476 - protein, 54 aa, Zea mays
  Clone ID: LIB3062-021-F3_FLI.pep
PLPVCLPGSVHMLYVLMYIRRVVLSSSKNLVLIQTVNLDHLVLWLYRAEQTDVG

SEQ ID NO: 52477 - protein, 155 aa, Zea mays
  Clone ID: LIB3062-021-G5_FLI.pep
VQGQGQGSSVTKIGLWGGPGGSAQDITAERPPQRLHSVTVRAGVAVDSIEFTYTDSAGQRRAAGRWGGLGGNVRTIDLGNAEDVREVSGTYGAFEGATTLTSLRLVTSSRTWGPWGVENGTRFSVTAPIGSSIVGFYARAGTRLVDAIGVYLRQI

SEQ ID NO: 52478 - protein, 93 aa, Zea mays
  Clone ID: LIB3062-021-G8_FLI.pep
NPLFCFHDSQTVKGSTVPHTPFGYSPFYVQNIKQLKPVSQRVTSLELQHSASKDGLSFPDLLLWSNDEHPVWRPLSTTNMYFNLATFFHSHYR

SEQ ID NO: 52479 - protein, 150 aa, Zea mays
  Clone ID: LIB3061-057-B4_FLI.pep
GKITTLEMKMETLVPNYTMADRNPQSPPFVEGCFSSNPPLISSSREPEWSSCKTSVLHCCTVLVICVRVAAKIIHRVEVGGKGPEFYRHSLVSSLSASSPGATGCSASTLLRAVHFLYGTKPRRQAGIALAHFLEPGTGTATLSSPLFTF

SEQ ID NO: 52480 - protein, 99 aa, Zea mays
  Clone ID: LIB3062-013-A7_FLI.pep
EKSTLNPNAKEFKLNPNAKSFTPSASLRPPHPTSSDASYYYPNNMPAVPLGPGLPVGMGFPPAYGAQPVMYNTQPGASPHGYMHPAGPQEMQQYRGRNF

SEQ ID NO: 52481 - protein, 75 aa, Zea mays
  Clone ID: LIB3062-022-F4_FLI.pep
RMALLALGIHFTPHTRLNSKSQHCLLTAIYWEKEKKTKQKKKQMKKTYKYNFLPHTPFFLRRDGTRIRSYNCYAA

SEQ ID NO: 52482 - protein, 64 aa, Zea mays
  Clone ID: LIB3066-015-F12_FLI.pep
FLGRFKSIPSIVELDSLKVSGDVWFGSGIVLKGKVTITAKPGVKLEIPDGAVIGNKDISGPEDL

SEQ ID NO: 52483 - protein, 87 aa, Zea mays
  Clone ID: LIB3066-032-D8_FLI.pep
GQLFRALGVFAQRKINLTKIESRPHKERPLRVSDDCSSLLKNFDYLFYVDLEASMADPKIQNALGNLKEFATFLRVLGSYPTNVNEP

SEQ ID NO: 52484 - protein, 154 aa, Zea mays
  Clone ID: LIB3062-019-D9_FLI.pep
ARKQRGVELFLCWAIMQGFVMMLQNRYQRQRLYTRIALGKAKRMDVVWGETAGVEGQLLLLCPLLFLLQGFEGYVGFLLLRTAHTGVVPEWQVVVCGILLIAMAIGNFANTVDTLVTKSRFKAKMKKSKGRRDLDTCPSPTGSSSPIDSATTKA

SEQ ID NO: 52485 - protein, 94 aa, Zea mays
  Clone ID: LIB3062-028-D1_FLI.pep
PAYCYHNHDTRCSSICSRMLTAKNPVNIFYTQTLLQRLLEQASQLLSTQQHIIRHQNKNQLDEIDFPTTEKSVGMWLTSSCASRLKAPVLARYR

SEQ ID NO: 52486 - protein, 105 aa, Zea mays
  Clone ID: LIB3062-039-G11_FLI.pep
YLLTVAELKKKDRKFIPHISIATLYICSAHIVTPYCYYLYLSPSPSIASHYTYTLHDASKSPVQEKTELCVSPMSMKEEQSFWGIGGIKENIFILVCNVLAEHCR

SEQ ID NO: 52487 - protein, 136 aa, Zea mays
  Clone ID: LIB3062-053-A10_FLI.pep
MVDVKRARTRAPRNQGEQHSQPQQAEQGRGQGNQDNQSPAGNGTADSGNSVSYDSKKVFIGGLRDNITEKEFRAYFETFGTVTDVVVIYDSATSRSRGFGFVTFDSEEAVGKVMRQSFHDLNGTKVEAKIAIPKDE

SEQ ID NO: 52488 - protein, 50 aa, Zea mays
  Clone ID: LIB3066-049-G8_FLI.pep
HKEQFWMRDLLDRHASSIYIPSMIMYFNSYSRCYACMHDEVLSPFVFFVW

SEQ ID NO: 52489 - protein, 67 aa, Zea mays
  Clone ID: LIB3088-019-C3_FLI.pep
IGILLVTTPNFVAWNKRKGYLKGESSHSLRPQRRLFASLQRKILVGVNHSLVTIHHLSTTAQNAASS

SEQ ID NO: 52490 - protein, 253 aa, Zea mays
  Clone ID: 700580708_FLI.pep
ANISMLNHPNLAELAGYCSEHGQCLLAYEFYRNGSLHDFLHLKDEHSKPLSWNNRVKIALGSARALEYLHETCSPSVVHKNFKSSNILLDGELTPHLSDSGFAGLLANQEFQESDENSGYRAPEVILAGQYSLKSDVYSFGVVMLELLTGRKPFDRTRPRPEQSLVRWATPQLHDIDALDQMVDPALQGLYPSKSLSRFADAIALCVQPEPEFRPPMSEVVQSLVRLVQRANMTRMHESQSRRHGESGGDYEF

SEQ ID NO: 52491 - protein, 61 aa, Zea mays
  Clone ID: LIB3158-006-D7_FLI.pep
SYSSRRRLPLAEMMPLAACIWRLVLSDIFLKLKAWTSSYLGCCLILHFLTISCNLVSCGLV

SEQ ID NO: 52492 - protein, 92 aa, Zea mays
  Clone ID: LIB3066-055-F3_FLI.pep
EVSNMKQENNKVTKELQAGLEHVRGLQVEIGRTVLKLRDNIELSIGRSSRAHQNFRYLSGKAGVPQRTSLFGSRTKKTSLFSCMPPIAKADF

SEQ ID NO: 52493 - protein, 144 aa, Zea mays
  Clone ID: LIB3067-016-F3_FLI.pep
EMATVPGDLIWQVVRKNNSFLVKQFGNGNAKVQFTKEPNNLYNIHSFKHSGLANKKTVTIQPAAKDSAVVLSTTKTKKQNAPAKLSHKSVMRKEFRKMAKAVKNQVSDNYYRPDLTKPALARLSSVYRSLQVAKSGVKKKNRQS

SEQ ID NO: 52494 - protein, 385 aa, Glycine max; identical to SEQ ID NO: 44000
  Clone ID: 700852465_FLI.pep

SEQ ID NO: 52495 - protein, 107 aa, Glycine max
  Clone ID: 700663110_FLI.pep
KHIAEGKHGDGFSNKKQHRHVLLGCCRWTFPDPSQAIVHWPCMWQVSHRAIRIMLFKSVIQKEMVKKNCYFHLGKIIPRTQSTSSSKGKEFSSLVLFIPSIRVKFLW

SEQ ID NO: 52496 - protein, 139 aa, Glycine max
  Clone ID: 700661275_FLI.pep
QAFEDGNDELRRSPGTPVFTAPECCLGLTYHGKASDTWAVGVTLYCMILGEYPFLGDTLQDTYDKIVNDPLVLPDDINPQLKNLIEGLLCKDPELRMTLGDVAEHIWVIGEDGPIPGYLCWCKRKSMVTEDSDGSDILA

SEQ ID NO: 52497 - protein, 174 aa, Glycine max
  Clone ID: 700661527_FLI.pep
KKVTAVHKANIMKLADGLFLESCREVATRYPGIKYNEIIVDNCCMQLVSKPEQFDVMVTPNLYGNLVANTAAGIAGGTGVMPGGNVGADHAVFEQGASAGNVGNDKVVEQQKANPVALLLSSAMMLRHLQFPAFADRLETAVKKVILEGKYRTKDLGGTSTTQEVVDAVIDALD

SEQ ID NO: 52498 - protein, 114 aa, Glycine max
  Clone ID: 700661828_FLI.pep
GRIVNIASVVGLVGNVGQANYSAAKAGVIGLTKTVAKEYASRNITVNAVAPGFIASDMTAKLGQDIEKKILETIPLGRYGQPEEVAGLVEFLALNQAASYITGQVFTIDGGMVM

SEQ ID NO: 52499 - protein, 242 aa, Glycine max; identical to SEQ ID NO: 41726
  Clone ID: 700662109_FLI.pep

SEQ ID NO: 52500 - protein, 49 aa, Glycine max
  Clone ID: 700662030_FLI.pep
KPLNNIQVKSRSKQYDKERLEFESLELNHMSISHSIIWYIMLACPYRAE

SEQ ID NO: 52501 - protein, 309 aa, Glycine max
  Clone ID: 700667926_FLI.pep
LLKEDSSTTSFSISLPRATPSSMTPALDLIPNHTNPFICLLTSILLCWDELLQTLNKYRLRSKVEIDDVSSDFSCWQRYGAGLLEKTSQVEEPEAASVGWGAGVDRTAMSSSQGSDQGWQWFKDPRLVCLGFRGIFPSNITPPLIEVDKETDEQNFLLWRIEKGVAEGSTEIPKGEAVPLEYNLAGLNAISFDKGCYVGQELIARTHHRGVIRKRIVPLRFLDNDGKELVNKVIPGSEVMNTASGKQAGTVTTALGCRGLGLLRLEEEALKGSSALSVQGQEDVKVVASRPDWWPSEWLQDHGQHAAFA

SEQ ID NO: 52502 - protein, 208 aa, Glycine max
  Clone ID: 700839615_FLI.pep
ATQQIAECWTRAVRKLLERVVESVERKTLEKAARECHAVERIWKLLTEVEDVHVMMDPEDFLRLKKELGMMRNCGEMVAFCFRSRELVEVARMCRDLRQKVPEILEVEVDPTGGPGMMEAAMKVYSEKEKRNGFEKVHVLQGMQAIEVAMKRFFYAYKQVVAVMMGSSEADNGFTQIFLEPTYFPSLDAAKTFLAYYWENNNQNGVPC

SEQ ID NO: 52503 - protein, 158 aa, Glycine max
  Clone ID: LIB3051-032-H7_FLI.pep
EKLEWLPEGFEERILGQGKGLIIRGWAPQVMILDHESVGGFVTHCGWNSVLEGVCAGVPMVTWPMYAEQFYNAKFLTDIVKIGVSVGVQTWIGMMGRDPVKKEPVEKAVRRIMVGEEAEEMRNRAKELARMAKRAVEEGGSSYNDFNSLIEDLRSRAC

SEQ ID NO: 52504 - protein, 320 aa, Glycine max
  Clone ID: LIB3052-014-G7_FLI.pep
ITTVTDAQAKAAGGRGRAYVTFLAGNGDYVKGVVGLAKGLRKVKSMYPLVVAVLPDVPEHHRNILTSQGCIVREIEPVYPPENQTQFAMAYYVINYSKLRIWEFVEFSKMIYLDGDIQVFDNIDHLFDLPDNYFYAVMDCFCEPTWGHTLQYQIGYCQQCPHKVQWPTHFGPKPPLYFNAGMFVYEPNLDTYRDLLQTVQVTKPTSFAEQDFLNMYFKDKYRPIPNVYNLVLAMLWRHPENVELEKVKVVHYCAAGSKPWRYTGKEENMEREDIKMLVKKWWDIYEDETLDYNNPFNVDRFTAALLEVGEVKFVRAPSAA

SEQ ID NO: 52505 - protein, 156 aa, Glycine max
  Clone ID: LIB3039-025-F10_FLI.pep
LIAMATRGKLEVDIDLKSNADKYWQTLRNSTEIFPKAFPHDYKSIEVLEGDGKSPGSIRHISYGEGSPLVKSSFEKIEAVDEEKKVVSYTIIDGELLQHYKTFKGDISVTPIGDGCEVKWSAVYEKVSHDISDPTLVKDFAVKNFLEVDAYVQANA

SEQ ID NO: 52506 - protein, 247 aa, Glycine max
  Clone ID: 701210833_FLI.pep
ARSENEMIKPTIQGVLNIMKACLKAKTVRRLVFTSSAGTTNITEHQKPIIDETCWTDVEFCRRLNMTGWMYFVSKTLAEKEAWKFAKEHGMDFIAILPALVIGPFLLPTIPSSVISALSPINGIEAHYSIIKQAQFVHIEDICLAHIFLFEQPKAEGRYICSACDVTIHDIVKLINEKYPEYKVPTKFQNIPDQLEPVRFSSKKITDLGFQFKYSLEDMYTGAIDTCIEKGLLPKPAEIPANGIEHK

SEQ ID NO: 52507 - protein, 722 aa, Zea mays
  Clone ID: 700224048_FLI.pep
EKMALSVSMEGIEARARDLGVDLSAVDLDSITLPAGEDFGIVSDDEEVLRGEDLPELEMGLSNIIVVDNLPVVPPEKFEKLENVIRKIYSQIGAIKENGLWMPVNPETKKTYGYCFIEYSTPQEAELAREKTNGYKLDKSHIFAVNLLDDFEKYMKVPDTWTPAEIKPYTAGENLLKWLTDEKARDQFVIRAGTLTEVYWNDARKLAPELVFQKQYWTDSFIQWSPLGTYMATVHRQGSQVWGGENGFERLMRFAHSMVKLIDFSPGERYLVTYSSHEPSNPRDTHRVVLNIFDVRTGKVMRDFKGSADDFTTGGNIGVSGVSWPIFRWGGGKDDKYFARLGKNIISVYETDTFSLLDKKSLKVENVVDFSWSPTDPIISLFVPEMGGGNQPARVSLVQIPGKEELRQKNLFSVSDCKMYWQNSGEYLAVQVDRYTKTKKSTYTGFELFRIKERDIPIEVLELENKNDKIIAFAWEPKGHRFAIIHGDGPKPDVSFYTMRTSNNTSRVSKLTTLKAKQANTLYWSPAGRFIVLAGLKGFNGQLEFYNVDELETMATGEHFMATDIMWDPTGRYLATAVTSVHEMENGFQIWSFSGKHLYKVSKDHFYQFIWRPRPPSLLTAEKEEEISRNLKKYSKKYEQEDQDAFNQLSEQDRKRRTQLQEEWDSWVAKWKQMHEEERAYRRELRDGEASDDEEEYEAKEVEVEEVVDVRQEVLAFDLDQE

SEQ ID NO: 52508 - protein, 511 aa, Zea mays
  Clone ID: 700240133_FLI.pep
RKVHGIIDKYAERGLRSLAVARQEVPERNKESPGGPWQFVGLLPLFDSPRHDSAETIRKALVLGVNVKMITGDQLAIGKETGRRLGMGTNMYPSSALLGQNKDATLEALPVDELIEKADGFAGVFPEHKYEIVKRLQEKKHIVGMTGDGVNDAPALKKADIGIAVADATDAARSASDIVLTEPGLSVIISAVLTSRCIFQRMKNYTIYAVSITIRIVLGFMLIALIWQYDFSPFMVLIIAILNDGTIMTISKDRVKPSPLPDSWKLKEIFATGIVLGSYLALMTVIFFWAMHKTDFFSDKFGVRSIRDSEHEMMSALYLQVSIVSQALIFVTRSRSWSFVERPGLLLVTAFLLAQLVATFLAVYANWGFARIKGIGWGWAGVVWLYSIVFYFPLDLIKFFIRFVLSGRAWDNLLENKTAFTTKKDYGREEREAQWATAQRTLHGLQPPEAATSTLFHDKNSYRELSEIAEQAKRRAEIARLRELNTLKGHVESVVKLKGLDIDTIQQNYTV

SEQ ID NO: 52509 - protein, 296 aa, Zea mays
  Clone ID: LIB3061-014-C4_FLI.pep
STTPQYRTAAQLFSSPIPMDMGSGSSPVITDPISISPPLLGGLTSNLMPFSVMSGGCSSSPSMSASSRRKIEEVLVNGLLDAMKSSSPRKKHNLAFGQDNSPDEDPAYTAWLSKCPSALASFKQIVANAQGRRIAVFLDYDGTLSPIVDDPDKAFMSPVMRAAVRNVAKYFPTAIVSGRSRKKVFEFVKLTELYYAGSHGMDIVTSAAAHATEKCKEANLFQPACEFLPMIDEVSKCLVEVASSIEGARVENNKFCVSVHYRNVAEKDWKVVAGLVKQVLEAFPRLKVTNGRMVGA

SEQ ID NO: 52510 - protein, 849 aa, Glycine max
  Clone ID: 700838355_FLI.pep
SDEKGDGLVFGSTEAANKFLEDLELHQSRDAERIVTDSDEEEESDDEGEGKELFDTATLAALLKAASGADQDGGSITITSQDGSRLFSVERPAGLGSPLQSGKPAVRQTRPSLFTPSMSRPSAISDSNLSQEEKNKLEKLHEIRVKYLRLVHRLGFTTEESIAAQVLYRMTLVAGRQSGQMFSVESAKETASRLEAEGRDDFDFSVNILVLGKAGVGKSATINSIFGETKTSINACGPATTSVKEIVGVVDGVKLRIFDTPGLKSSALEQNFNMKVLSAVKKLTKSPPDIVLYVDRLDLQTRDMNDLPMLRSITSVLGSSIWRNVIVTLTHAASAPPDGPSGAPLSYEVFVAQRSHTVQQTIGQAVGDLRLMNPSLMNPVSLVENHPSCRKNRDGQKVLPNGQSWRPLLLLLCFSMKILSDASNSTKTQESFDHRRLFGFRPRSPPLPYLLSSLLQTHTYPKLPADQSGPDNGDSDVEMADLSDSDLDEDEDEYDQLPPFKPMKKSQVAKLTKEQQKAYFDEYDYRVKLLQKKQWREELRRMREMKKKGNTKENDYGYMEEDDQENGSPAAVPVPLPDMAMPPSFDSDNPAYRYRFLEPTSQLLTRPVLDNHGWDHDCGYDGVNIEQSLAIINKFPAAVTVHVTKDKKDFTIQLDSSVAAKLGENGSAMAGFDIQSVGKQLSYSVRGETKLKNFKRNKTSAGVSVTYLGENVCTGLKVEDQIAVGKRLVLVGSTGVVKSKTDSAYGANVEVRLREADFPIGQDQSSLSLSLVKWRGDLALGANLQSQISVGRGYKVAVRAGLNNKLSGQITVRTSSSDQLQIALVAILPIAKAIYKNFWPGASENYSIY

SEQ ID NO: 52511 - protein, 136 aa, Glycine max
  Clone ID: 700656055_FLI.pep
HRGRSRRSRFRMPATPPSNKGRISTLFAFTPRQVLLSNQTMKHTTDNGTPISEHKVLLHQSIARYLERSGFSKTLKKFLSEAHIEKNDLEGSPVDLEEMCLKYLEICGKDGKSNINDQNEQVAGGHSKNKEEGKSK

SEQ ID NO: 52512 - protein, 299 aa, Glycine max
  Clone ID: 700794341_FLI.pep
LFNENNEMILVYDFMARGTLRDHLYNTDNPPLTWKQRLQICIGAARGLHYLHTGAKHTIIHRDVKTTNILLDDKWVAKVSDFGLSRIGPTGNAKAHVSTVVKGSIGYLDPEYYKRQRLTEKSDVYSFGVVLFELLCARPPLIRTAEKKQVSLADWARHCCQNGTIGQIVDPTLKGRMAPECLRKFCEVAVSCLLDDGTLRPSMNDVVWMLEFALQLQESAEQRENTNIVDNEINERREEEASDDLFSTGTSVGQVSDFNKSSGVVSVSTDSEELSSSYKESDKLMSGTVFSEIVDPKPR

SEQ ID NO: 52513 - protein, 361 aa, Glycine max
  Clone ID: 700836407_FLI.pep
SALPSRFNTDNPQKSPLICASCSMAKLPVEYNGDCATTASASASAAAESQRSIPTPFLTKTFQLVDDQSIDDVISWNDDGSTFIVWNPTVFARDLLPKYFKHNNFSSFVRQLNTYGFRKVVPDRWEFSNEYFRRGEKRLLCEIQRRKISSPASSPTAPATVSVTAPMPLTAIPIISPSNSGEEQVTSSNSSPAELLDENERLRKENVQLTKELAEMRSLCNNIYSLMSNYANANGKGNSNGSYKTKGGAGVAHGSLESGMTAVKLLDLMPVMRSSDEDAAEMAPEEMNPKLFGVAIGAKRAREGGGGGDCGGGGEEDTLLRLHHAGSADVKSEPLDFQNHRENQKTPWLSPCYRTNQRVCN

SEQ ID NO: 52514 - protein, 364 aa, Glycine max
  Clone ID: 700864206_FLI.pep
RIEMEIDGNRVVILGGGVAGSVVAKSLQFHAHVTLVDPKEYFEITWASLRSMVEPSFAERSVINHRDYFTNGDIVTSNAVNVTETEVLTADGHRIGYDYLVIATGHADPLPKSRRERLNQFKEDNQKIKSAQSILIIGGGPTGVELAGEIAVDFPDKKLTLVHKGARLLEFIGAKAGDKTLNWLKSKNVVVKLEQSVDLNAFKDGQKIYQTSNGETIEADCHFLCIGKPLASAWLKETVLKNDLDGQGRIKVDEKLRVKGKDNIFAIGDITDIPEIKQGFLAQQQAEVVVKNLKVILEGGRECRMETYKPHSAIAIVSLGRKDAVAQLPFLTIGGRIPGFIKSGDLFVGKTRKQMGLNPDIVQA

SEQ ID NO: 52515 - protein, 339 aa, Glycine max
  Clone ID: 700864696_FLI.pep
PNKKKETMNDLFSGSFSRFRSDQSSPDRHHDIEMGAAAGGPRGGEVNLDKFFEDVEGVNEELKELEGLAQSLRSSHEQSKTLHNAKAVRDLRSGMDGDVSAALKKAKLIKLKLEALERSNAANRNLPGCGPGSSSDRTRTSVVNGLKKKLKDSMESFNEIRGLVSSEYRETVQRRYFTVTGENPDDKTLDLLISTGESETFLQKAIQEQGRGRILDTINEIQERHDAVKEIEKNLKELHQVFLDMTVLVQHQGEQLDDIESHVARAHSFVRTGAEQLQTARKYQKNTRKWTCYCIILLLVIIFFVVLFTVRPWKNNSSGGGNNGNQPAPAQTPPPPVNA

SEQ ID NO: 52516 - protein, 284 aa, Glycine max
  Clone ID: LIB3051-027-C4_FLI.pep
DGLVFRENFSIRSYEIGADRTASIETVMNHLQETALNHVKSAGLLGDGFGSTPEMCKKNLIWVVTRMQVVVERYPTWGDIVQVDTWVSGSGKNGMRRDWLLRDCKTGEILTRASSVWVMMNKLTRRLSKIPEEVRQEIGSYFVDSDPILEEDNRKLTKLDDNTADYIRTGLSPRWSDLDINQHVNNVKYIGWILESAPQPILESHELSSMTLEYRRECGRDSVLDSLTAVSGADMGNLAHSGHVECKHLLRLENGAEIVRGRTEWRPKPVNNFGVVNQVPAEST

SEQ ID NO: 52517 - protein, 313 aa, Glycine max
  Clone ID: LIB3049-050-E1_FLI.pep
SERMGEKSKILIIGGTGYIGKHIVEASAKAGNPTFALVRESTLSDPSKAQLIHNFEALGVNLVRGDLYDHEKLVKAIKQVDVVISTLGHLQLADQLKIIAAIKEAGNVKRFFPSEFGNDVDRVHAVEPAKSALAIKAQIRRSIEAEGIPYTYVSSNYFAGYFLPTLAQPGAFAPPPPKDKVIILGDGNPKAIFNKEEDIGTYTIRAVDDPRTLNKILYLRPPKNIYSFNELVALWENKIGKTLEKIYVPEEKVLKDIEEAPLPINVVLAINHSVFVKGDHTNFEIEPSFGVEASELYPDVNYTTVEEYLGQFA

SEQ ID NO: 52518 - protein, 405 aa, Glycine max
  Clone ID: LIB3049-050-G10_FLI.pep
LVLSSIKSHWYLKSGKMVSVAEIRQAQRAEGPATILAIGTANPPNRVDQSTYPDYYFRITNSDHMTELKEKFQRMCDKSMIKTRYMYLNEEILKENPNMCAYMAPSLDARQDMVVVEVPKLGKEAAVKAIKEWGQPKSKITHLIFCTTSGVDMPGADYQLTKQLGLRPYVKRYMMYQQGCFAGGTVLRLAKDLAENNKGARVLVVCSEITAVTFRGPSDTHLDSLVGQALFGDGAAAVIVGSDPIPQVEKPLYELVWTAQTIAPDSEGAIDGHLREVGLTFHLLKDVPGIVSKNIDKALFEAFNPLNISDYNSIFWIAHPGGPAILDQVEQKLGLKPEKMKATRDVLSEYGNMSSACVLFILDEMRRKSAENGHKTTGEGLEWGVLFGFGPGLTIETVVLHSVAI

SEQ ID NO: 52519 - protein, 177 aa, Glycine max
  Clone ID: LIB3049-002-B2_FLI.pep
RALKRAVGDPFKGGIEQGPQIDSEQFQKILKYIRSGVESGATLETGGDRFGNSGFYIQPTVFSNVKDDMLIAKEEIFGPVQSILKFKDLDDVIQRANNTHYGLAAGVFTKNINTANTLTRALRAGTVWVNCFDTFDAAIPFGGYKMSGQGREKGEYSLKNYLQVKAVVTSLKNPAWL

SEQ ID NO: 52520 - protein, 179 aa, Glycine max
  Clone ID: LIB3051-045-F2_FLI.pep
FTHIIKKGEPTFSVLVSRFLLGKAFPIPVYLSLLPIIGGGALAAVTKLNFNMIGFTGAMISNLEFVYCNIFSKKGMKGMSISGMNNYSCFSIMLLSILTTFAIVVEDPKVWAAGWQTNVSQIGPNFVWWVAAQSVFYHLYNQVPYTSLDQISPLTFSIGNTMKRILVIVSSILIFPTLV

SEQ ID NO: 52521 - protein, 130 aa, Glycine max; identical to SEQ ID NO: 36583
  Clone ID: LIB3049-040-C8_FLI.pep

SEQ ID NO: 52522 - protein, 207 aa, Glycine max
  Clone ID: LIB3050-022-E11_FLI.pep
KTTEGALEHDVLEAFSSILPPVYSIGPLNLHVKHIDDKELNAIGSNLWKEESKCVEWLDTKQPSSVVYVNFGSIAVMTSEQLIEFAWGLANSNKNFLWAIRADLVAGENAVLPPEFVKQTENRGLLSSWCSQEQVLAHPSVGGFLTHSGWNSTLESMCGGVPMICWPFFAEQQTNCRFCCKDWGIGLEIEDVEREKIETLVRELMDG

SEQ ID NO: 52523 - protein, 408 aa, Glycine max
  Clone ID: LIB3028-056-D2_FLI.pep
AGACLFEELGLFYIGPVDGHDIEDLVHILKSVKGMPTLGPVLIHVITEKGKGYHPAEVAPDKMHGVVKFDPKSGKQLKSKASTRSYTQYFAESLTAEAEVDEKIVAIHAAMGGGTGLNLFQKRFPERCFDVGIAEQHAVTFAAGLAAEGLKPFCAIYSSFLQRGYDQVAHDVDLQKLPVRFALDRAGLVGADGPTHCGAFDTTFMACLPNMVVMAPSDETELMHMIATAAAIDDRPSCFRYPRGNGIGTILPPNNKGTPLEVGKGRVLKEGSRVALVGYGTMVQSCMEAAKVLEAHGISTTVVDARFCKPLDGDLMRRLAREHEILITVEEGSIGGFGSHVSHFLGLNGLLDGNLKWRALTLPDRYINHGSQTDQIQMAGLSSNHIAVTALSLTNVHWDSRLLLSLQI

SEQ ID NO: 52524 - protein, 118 aa, Glycine max
  Clone ID: LIB3053-003-C11_FLI.pep
IPAEKVREIMLIASVSAKSAEMKSGIPLTSFIPKSPSSSQGNSTNLPSPQSVKSSIRRLQDEFPLARRQSLQRFLEKRINRLANRSPYALTKKVIHNIDNNFSPDDTPDFGSLNLNFL

SEQ ID NO: 52525 - protein, 138 aa, Glycine max
  Clone ID: LIB3040-018-F12_FLI.pep
VNKRMASDRKLHTFEEVAKHDQTKDCWLIISGKVYDVTPFMEDHPGGDEVLLSATGKDATNDFEDVGHSDSARDMMEKYYIGEIDSSTVPLKRTYIPPQQAQYNPDKTPEFVIKILQFLVPLLILGLAFVVRHYTKKE

SEQ ID NO: 52526 - protein, 675 aa, Glycine max
  Clone ID: 700789791_FLI.pep
EAFVKGVPIGQALDIDIPPPRPKRKPNNPYPRKTNVGGAPTLHSGARHGKPLISIVSSLGKQALGLEKEPLPEKHDVDLRPSTVKENKDQSCSKVFTILQEAPCSSVSSANKNSTSILVPLRNSCALRKFIPSVKDVITQDETNDSFVTDDLENQKLEIDDGKHTQKSNGTCKVSKSENSGASELVQTEKTDGLNCALTIEGVQGNQNYPRHVPVHVVDGNLGTSTQNPSPDMVFQDSIFQPKGGVNGQPNLVTISATSNISESQNNTARSSIHQSFPPCPTFTQDDYHSFLQVSSTFSSLIVSTLLQNPAAHAAASFAATFWPYANAETSADSPMCTPDFPSRQIGSPPSVTAIAAATVAAATAWWAAHGLLPLCAPLHTAFACPPASAIAVPLMNIDESPQKTEQEEIKPQNSSLQDQILDPEHSEAQHSAPKSPAVFSSKSEERGDANLNTSPKATNHETNQVISENPDSNKMKGRKPVDRSSCGSNTTSSSEETELLLKDEKEKEEPKTPDANILDTELSNRRSRSINNLTDSWKEVSEEGRLAFQALFSREVLPQSFSPTHDLINEDNQIDSIKDNDQNTDYKDEDLESKKCSSNSDGVQKNLLFVKDNNEEEGLLIIGLGPGKLKTRPTGFKPYKRCSVEANENRIGTACNQGEEKGPKRIRLNGEAST

SEQ ID NO: 52527 - protein, 340 aa, Glycine max
  Clone ID: 700834313_FLI.pep
KGEIDGGTTKVAIKRGNPLSEQGVHEFQTEIEMLSKLRHRHLVSLIGYCEENTEMILVYDCMAYGTLREHLYKTQKPPRPWKQRLEICIGAARGLHYLHTGAKHTIIHRDVKTTNILLDENWVAKVSDFGLSKTGPTLDNTHVSTVVKGSFGYLDPEYFRRQQLTDKSDVYSFGVVLFEVLCARPALNPTLAKEQVSLAEWAAHCYKKGILDSIIDPYLKGKIASECFKKFAETAMKCVADQGIDRPSMGDVLWNLEFALQLQESAEESGNGFGDIHCEVEPLYTDSKGKDSNPGYDGNATDSRSSGISMSIGGRSLASEDSDGLTPSAVFSQIMNPKGR

SEQ ID NO: 52528 - protein, 430 aa, Glycine max
  Clone ID: 700864654_FLI.pep
NNIRGSIPQWFHEKLLHSWNNITHIDLSFNKLQGDLPIPPNGIRYFLVSNNELTGNIPSAICNASSLYILNLAHNNLTGQILQCLATFPSLLALDLQMNNLYGNIPANFSKGNALETIKLNGNQLDGPLPWSLAHCTNLEVLDLADNNIKDTFPHWLESLQELQVLSLRSNKFHGVITCFGAKHPFLRLRIFDVSNNNFSGSLPASYIKNFRGMMSVNDNQTGSKYMGNQYFYNDSVVVVMKGQYMELERILTIFTTIELSNNMFEGELLKVLGELHSLKGLNLSHNAITGTIPRSFGNLRNLEWLDLSWNQLKGEIPVSLINLNFLAVLNLSQNQFEGIIPTGGQFNTFGNDSYAGNPMLCGFPLSKSCNKDEDWSPHSTFHLEESGFGWKAVAVGYACGFLFGMLLGYNAFMTGKAQWLARLVEGVLN

SEQ ID NO: 52529 - protein, 306 aa, Glycine max
  Clone ID: 700845570_FLI.pep
FHRDLKLENVLVDNKGNIKITDFGLSALPQHLREDGLLHTTCGSPNYVAPEVLANKGYDGATSDTWSCGVILYVILTGHLPFDDRNLVVLYQKIFKGDVQIPKWLTPGARNMIRRILDPNPETRITMAGIKEDPWFKKGYIPVNPEDEDVYVDQEAFSIHEQPNEAEQRNSGSPSLINAFQLIGMSSCLDLSGFFEKEDVSERKIRFASNLSVKDLIERIEDTATEMEFRVEKKNGKLKVIRENKVHKTLGCLSVVVEVFGISSSLYVVELRKSYGDGSVYKQLCNKLLNDLGIPPKQPLVRSAAN

SEQ ID NO: 52530 - protein, 126 aa, Glycine max
  Clone ID: 700848334_FLI.pep
ERCEINGYEIPAKSKVIVNAWAIGRDPNYWIEAEKFSPERFIDCSIDYKGGEFQFIPFGAGRRICPGINLGIVNVEFSLANLLFHFDWKMAPGNSPQELDMTESFGLSLKRKQDLQLIPITYHTAA

SEQ ID NO: 52531 - protein, 527 aa, Glycine max
  Clone ID: 700853065_FLI.pep
EKLRLVLTLLCCVHFHVQSSLGFEDGISRSQFPEGFLFGTCTSSYQIEGAPLEDGKGLSNWDVFSHIPGNINNDENGDIADDHYHRYLEDIELMSSLGINVYRFSISWARILPRGIYGDINPSGVMFYNKIIDNLLLRGIEPFVTIHHHDYPGELEERYGAWLSPLIQRDFVHFAEVCFKSFGDRVKYWATINEPNLFADMGFIRGTYPPGHCSPPFGNCNTGNSDVEPLIAVHNMILSHAKAVELYRKHFQAKQGGIIGIVTHTFMYEPLRDEECDRQAVKRALAFVVAWSLDPLVFGEYPPEMHSILGSQLPRFSPEEKSLIKGSIDFIGINNYGTLYAKDCSLTACPLGTDRPIRGFVEATGTRDGIPIGDLTGNPRFFVVPRGLEKIVDYIKIRYHNMPMYITENGYSSPHKPNVTMDDLLQDFKRIDYHKAYLAALLRAIRKGADVRGYMIWSLMDNFEWTSGYGVRYGLYYVDRHTLERIPKRSVQWFSSFLNDTIHSNKQDLSEQYVRSKDVTTAGFKVV

SEQ ID NO: 52532 - protein, 264 aa, Zea mays
  Clone ID: LIB3070-013-F8_FLI.pep
DDAPGETWHMVFSTEGEIPYREGQSIGIIADGEDKNGKPHKLRLYSIASSALGDFGDSKTVSLCVKRLVYTNDQGEIVKGVCSNFLCDLKPGADVKITGPVGKEMLMPKDPNATVIMLATGTGIAPFRSFLWKMFLEEHEDYKFSGLAWLFLGVPTSDSLLYKEELEKMKEMAPDNFRLDFAVSREQTNAAGEKMYIQTRMAEYREELWELLKKDNTYVYMCGLKGMEKGIDDIMLNLAAKDGIDWMQYKKQLKKGEQWNVEVY

SEQ ID NO: 52533 - protein, 243 aa, Zea mays
  Clone ID: LIB3079-002-A4_FLI.pep
IQVEWAEKRPPDRAEPTADAAHAMVAAGNPPPKPWERAGNSSGPVPFKPPSGGSTSDVVEASGTAKHGEVVSASGNNVASNVNSTISMPVPPRPWQQQGYENSYGGYGSSMYSSYGGYSGPYGNNMYSGYGGGYGGMYGGSGMYGGPMYSGGMGGPYGGYGMGMSPYNQGPSSFGPPTPPPGFWVSFLRVMHGVVNFCGRVSFLVSQNTQAFHMFITALLQLCDRAGMLYGELARFVLRLLGI

SEQ ID NO: 52534 - protein, 89 aa, Zea mays
  Clone ID: LIB3078-056-A5_FLI.pep
SSFLMAVMKSSTIVALLLAVAILSSLSPCYEAGGCIGKPKKSPPPPRRPYFSSYSEDHQNCRLICSSKGFKDGGWCDESVEHKVCCCSH

SEQ ID NO: 52535 - protein, 467 aa, Zea mays
  Clone ID: LIB3075-008-C2_FLI.pep
SVSQHKAEQDRFVAQLASLESRHSSAEGKLGAAREHAASAQDEAAEWKKKYEMAAVQAKTALERLASVQEQINKIAQERESSIRAEFASHLEGKEEEIRKLVAKIREAESEESVLTERLLVVESKTQGHNKETTGLRDEIKELTSKLEYLRDRAVSYEKQARMLEQEKNHLQEKFLSECKKYDEAEQRYKSAERDAKKAVELADAARTEAIAYQKEKDKAQQLSIEKVAVIERVQRQVDRLEQEKVNLLGEVQRMHNSESDAWSKVTLLESRVAEREKEMDDLLSRSNEQRSSTVRVLESLLATERAARAEANKRAEALSLQLQSAQGKLDILHQELTSIRLVETALDSKLRTTTYGKRLRDNEVRLYSIQDMDIDPPERSRKRTKSNTSPLKPVQTEDGGSVHMREDSVTVSTDVKDDNPDGYKKFTIAKLKEELTKHGFGTQLLELKNPNKKDILALYKKHVLCE

SEQ ID NO: 52536 - protein, 195 aa, Glycine max
  Clone ID: 700567896_FLI.pep
VVTQEYIQEMEKLSFKILELIALSLGLEAKRFEEFFIKDQTSFIRLNHYPPCPYPDLALGVGRHKDPGALTILAQDEVGGLEVRRKADQEWIRVKPTPDAYIINIGDTVQVWSNDAYESVDHRVVVNSEKERFSIPFFFFPAHDTEVKPLEELINEQNPSKYRPYKWGKFLVHRGNSNFKKQNEENIQIYHYKIA

SEQ ID NO: 52537 - protein, 421 aa, Glycine max
  Clone ID: 700892234_FLI.pep
SRDRTSIDDFEIIKPISRGAFGRVFLAKNRTTGDLFAIKVLKKADMIRKNAVESILAERDILITVRNPFVVRFFYSFTCRENLYLVMEYLNGGDLYSLLRNLGCLDEEVARVYIAEVVLALEYLHSLRVVHRDLKPDNLLIAHDGHIKLTDFGLSKVGLINSTDDLSGPAVNGTSLLEEDETDVFTSADQRERREKRSAVGTPDYLAPEILLGTGHGFTADWWSVGVILFELLVGIPPFNAEHPQIIFDNILNRKIPWPAVPEEMSPEALDLIDRLLTEDPNQRLGSKGASEVKQHVFFKDINWDTLARQKAAFVPASESALDTSYFTSRYSWNTSDGFVYPASDVEDSSDADSLSGSSSCLSNRQDEVGDECGGLTEFDSGTSVNYSFSNFSFKNLSQLASINYDLTKGWKDDPATNSSA

SEQ ID NO: 52538 - protein, 681 aa, Zea mays
  Clone ID: 700100682_FLI.pep
MWVLSFVVPPDHETLDFKFLLKPKDAETPCIIEEGPTRLLTGGMLEGDVRVALFKLNGDDEVLEFGVVNKADLVSPLELAASWRVYKENFQPSKVRGIPDISINVTPTNGAEEGSAATLELDLEHYVVPSPPTAPPNGYAANLAATPASVIQTEALLTNDILLSDGIQSPSSVSAKLEDCTNHKNIEAWATDSSKKIQNSGLIESKSVGTFTPMQKLDGQKGLFVDRGVGSSMLPKSASACSLASGFSFGSAKTMPEAAGAVAAAAVADRLHGSKEDRKLAIVLVGLPARGKTFTAVKLTRYLRWLGHETRHFNVGKYRRLKLGANQSADFFRDDNPEGIEARNEVAALAMEDMIDWMNGGGQVGIFDATNSTRKRRYMLMKMAEGNCKIIFLETICNDPNIIERNIRLKIQQSPDYAEQLDYEAGLEDFKERLINYEKVYEPVGEGSYIKMIDMVKGQDGQLQVNNISGYLPGRIVFFLVNSHLTPRPILLTRHGESLHNVRGRVGGDTVLSETGELYAKKLANFIEKRLKCEKTATIWTSTLQRTILTASPIVGFPKIQWRALDEINSGVCDGMTYEEIKKIMPEEFESRKKDKLRYRYPRGESYLDVIQRLEPVIIELERQRAPVVVISHQAVLRALYAYFADRPLREVPEIEMPLHTIIEIQMGVTGVEEKRYKLMD

SEQ ID NO: 52539 - protein, 433 aa, Zea mays
  Clone ID: 700212780_FLI.pep
RARSSMHHGRQGQHFPLHGSEFGIMKMGNGRSRFRSKYMSTEELENILRIQHAATHINDPYIDDYYHQACLASRYVDARSKHRFCPTLIRDPSSCTRSKDEPHAYLKVDALGRLPFSSVRRPRPLLDVEPASATDDDTVISKPLDQEPLLAARITIEDGLSLLLDIDDIDRLLQFSQQQDGGFELKNRRQSLLGQLAESLQLVDPLGANKNTHLSANDDLVFLRIVSLPKGRKLLSRYINLMVPGSDLARIVCMAVFRHLRFVFGNLPSDDGAAETVTKLASAVASCIRGMDLSGLSACLAAIVCSSEHPPLRPLGHAAGDGATVVIKSVLDRATELLTEQPAAPDYGAPNRALWQASFNAFFGLLTKYCMSKFDSMVHTMHKLGAAAATAIRKELPVELLRASLPHTDEQQRRLLLEFAQRTVPVSGHGSDG

SEQ ID NO: 52540 - protein, 571 aa, Zea mays
  Clone ID: 700336462_FLI.pep
PPVPFAAAAAADAAEEAFEAARSTNDMLAAFSRLEATVPANDKRLALACLKLGQHLEASGSADTSRVLALALRCLGILEASPNASTPSSASDAVSLAMALHLAGSASFDLSRFHDALSFLSRALRLLAPLLPETGVAFEVGEEPGGFDVRPVAHAVRLQLANVKTALGRREEALADMRACLDLKESILPPGSRELGVAYRDLAEAHATLLDFKQALPFCQKALELHESTLGKNSVEVAHDRRLLGVIYTGLEQHEQALEQNEISQRVIKSWGAASPDLLLHAEIDAANINIALGKFDEAVSVLKNVAKQVKKDSETRALVFISMAKALANQEKAGDTKRCLEIACDILEKKKFATPDKVAEMYIEVSSLFETVNELEKAISLLKKSLGMLERMPQAQHLEGNVAARIGWLLLLTGKVSEAVPYLEDAVERMKDSFGPKHYGVGYVYNNLGAAYMEMDRPQSAAQMFALAKEVMDVSLGPHHSDTIEACQSLANAYNAMGSYPLAMEFQKRVIDSWRNHGADARDELKEAMRLYNQIKAKALACLSPGGSANALPESQEQETDSDTAKAAQR

SEQ ID NO: 52541 - protein, 151 aa, Zea mays
  Clone ID: 700332980_FLI.pep
CCTRGLMCMHRLKIVHRDLKSANCLVNKYWTVKICDFGLSRVMSNSAMNDNSSAGTPEWMAPELIRNEPFTEKCDIFSFGVIMWELCTLCRPWEGIPPVQIVYSVANDGARLEIPDGPLGSLIADCWAEPERRPCCQEILTRLLDCEYTLC

SEQ ID NO: 52542 - protein, 103 aa, Zea mays
  Clone ID: 700337932_FLI.pep
GTEVVEAKAGSGSATLSMAFAASKFADACLRAMRGEAGIVECSYVASEVTELPFFATKVRLGRGGAEEILPLGPLNDFERAGLEAAKKELGESIQKGIAFMSK

SEQ ID NO: 52543 - protein, 55 aa, Zea mays
  Clone ID: 700338029_FLI.pep
IHVQYSHRSRNLGHDSMAMNQNSTSRIMWTTLADLFILVFIAGSTVALNLQVVLE

SEQ ID NO: 52544 - protein, 165 aa, Glycine max
  Clone ID: 700737288_FLI.pep
NRERLLIYVSDVALFSVTYLLYRVATMKGLVWLLCVYGVPLLIVNGFLVTITYLQHTHYALPHYDSSEWDWLRGALATMDRDYGILNKVFHHITDTHVAHHLFSTMPHYHATEATNAMKPILGEYYRFDDTPFYKALWREARECLYVEPDEGTSEKGVYWYRNKY

SEQ ID NO: 52545 - protein, 83 aa, Glycine max
  Clone ID: LIB3030-009-B5_FLI.pep
AILAQDKDRLMDMLTYPKVEEENMIRVEEKAKKFGLVVDLNAKKPRAEPLYIINPSVVSDLYGHWVMPLTKEVQVAYLLRRLD

SEQ ID NO: 52546 - protein, 276 aa, Glycine max
  Clone ID: LIB3051-025-B1_FLI.pep
FMTAVKQNYGEKVLVQFEDFANHNAFELLAKYGTTHLVFNDDIQGTASVVLAGVVAALKLIGGTLPEHTFLFLGAGEAGTGIAELIALEMSKQVIKPTVLIGSSGVGRTFTKEVVEAMTSNNDKPLILALSNPTSQSECTAEEAYQWSEGRAIFASGSPFDPVEYKGKVYASGQANNAYIFPGFGLGLVISGAIRVHDDMLLAASESLAKQVSEENYKNGLIYPPFSNIRRISANIAANVAAKAYELGLATRLPRPQNLVKCAESCMYTPVYRNYR

SEQ ID NO: 52547 - protein, 148 aa, Glycine max
  Clone ID: LIB3049-047-D11_FLI.pep
AIRNIYKDGGVGAFYAGISPTLVGMLPYSTCFYFMYDTIKESYCRTKSKKSLSRPEMLLIGALAGFTASTISFPLEVARKRLMVGALQGKCPPNMAAALSEVIREEGLKGLYRGWGASCLKVMPSSGITWMFYEAWKDILLVQNGNPL

SEQ ID NO: 52548 - protein, 134 aa, Glycine max
  Clone ID: LIB3028-013-F12_FLI.pep
KQAVAVKSQLQLIARPMYSNPPLHGALIVSTVLGDPDLKKLWLKEVKVMADRIIGMRTTLRENLEKKGSTLPWQHITNQIGMFCYSGLTPEQVDRMTNEFHIYMTRNGRISMAGLNTGNVGYVADAIHEVTKSF

SEQ ID NO: 52549 - protein, 222 aa, Glycine max
  Clone ID: LIB3028-051-H9_FLI.pep
LDRKTGSNLLQWPVAEIESLRLRSDEFKNLKAKPGSVVSVDIETATQLDIVAEFEIDKETLDKIPQSNEEYTCSTSGGSKQRGALGPFGLLVLADEGLSEYTPQYFYVIKGSNGNLKTSFCADQSRSSQANDVRKQIVGSAVPVLKGEKFSLRILVDHSIVESFAQGGRTVVTSRVYPTKAIYGAARLFLFNNATEATVTASLKVWQMNSAFIRPFHPDQKS

SEQ ID NO: 52550 - protein, 268 aa, Glycine max
  Clone ID: LIB3049-024-H1_FLI.pep
GFDLLDICINGPKEKLDSTVISQPAIYVTSLAAIELLRAREGGQQIIDSVDVTCGLSLGEYTALAFAGAFSFEDGLKLVKLRGEAMQDAADAARSAMVSVIGLDSEKVQQLCDAANQEVPEAEKVQIANYLCPGNYAVSGGLKGVEVLESKAKSFKARMTVRLAVAGAFHTSFMEPAVSRLEAALATTEIRTPRIPVISNVNAQPHTDPNTIKKILARQVTSPVQWETTVKTLLTKGLKKSYELGPGKVIAGIVKRMDKGADIENIGA

SEQ ID NO: 52551 - protein, 128 aa, Glycine max
  Clone ID: LIB3028-004-G6_FLI.pep
SSTGAAKAVGKVLPALNGKLTGMAFRVPTVDVSVVDLTVRLEKEASYDEIKNAIKEESEGKLKGILGYTEDDVVSTDFVGDNRSSIFDAKAGIALNKNFVKLVSWYDNEWGYSSRVIDLLVIVAKKSF

SEQ ID NO: 52552 - protein, 364 aa, Glycine max
  Clone ID: LIB3028-006-A9_FLI.pep
KVTMDPLSLFCTGALLAGGLYWFVCVLGPAEQKGKRATDLSGGSISAEKVQDNYKQYWSFFRRPKEIETADKVPDFVDTFYNLVTDIYEWGWGQSFHFSPSIPGKSHRDATRLHEEMAVDLIEAKPGNRILDVGCGVGGPMRAIAAHSRANVVGITINEYQVNRARMHNKKAGLESLCEVVCGNFLKMPFPDNSFDGAYSIEATCHAPKLEEVYAEIFRVLKPGALYVSYEWVTTDKYRGDDPEHVEVIQGIERGDALPGLRNYTDIAETARKVGFAVVKERDLAKPPAQPWWSRLKMGRIAYWRNHIVVTVLAALGIAPKGTVDVHEMLFKTADYLTRGGDSGIFSPMHMILCRKPHDKDDHN

SEQ ID NO: 52553 - protein, 527 aa, Glycine max
  Clone ID: 700698063_FLI.pep
KKQFRDQTVLLGVDDMDIFKGISLKLLAMEQLLLQHPDKRGRVVLVQIANPARGRGKDVQEVQSETYATMKRINNAFGRPGYTPVVLIDTPLQSYERIAYYVIAECCLVTAVRDGMNLIPYEYIICRQGNEKIDEILGTDLLTQKKSMLVVSEFIGCSPSLSGAIRVNPWNIDSVAEAMDSALMVPEAEKQMRHEKHYRYVSTHDVAYWARSFLQDLERACRDHLRRRCWGIGFGLGFRVIALDPNFRKLSVEHIVSAYKRTKHRAILLDYDGTMVQPGSMSLTPNAEAVSILNILCRDTKNCVFIVSGRERKTLTEWFSSCERMGIAAEHGYFVRTNRNAEWDTCIPVPDFEWKQIAEPVMQLYMETTDGSNIEAKESALVWNYEYADRDFGSCQAKELFDHLESVLANEPVSVKSSPNIVEVKPQGVSKGIVAERLLLTMQQKGVFPDFVLCIGDDRSDEDMFGVIMNAKATLSPVAEVFPCTVGQKPSKAKYYLEDTSEILRMLQGLANASEHSTRTSLQPASH

SEQ ID NO: 52554 - protein, 325 aa, Glycine max
  Clone ID: 700843201_FLI.pep
PNELSVFYKFLYISLGLAGFLLVMIIVQKQVHFSQSEYGVSAGVVLFLLFLPLAVVFVEQYKIRESQKLAFIDPSPVKIVAEGESANGNTSNTPISTEIEETRWWQKVLSPPPRGEDYTILQALFSLDMILLFFAGTCGVGGTLTAIDNLGQIGTSLGYPKASISTFVSLVSIWNYLGRVFSGFVSEHFLQKYKFPRPLMLTLTLLLSCAGHLLIAFDVPNGLYVASVIIGFCFGAQWPLVFAIISELFGLKYYSTLYNFGGAASPIGLYVLNVRVTGHLYDKEALKQLAVAGIPRNDAKELTCIGSSCFKLSFIIITAATFFGA

SEQ ID NO: 52555 - protein, 357 aa, Glycine max
  Clone ID: 700786128_FLI.pep
HNIRPHKAVLRVEERRRKKMSGMGDGYVGTAQDAVRIRRLEKQREAERRKIQELKTKSASAKDQPGLLQFGSSTSEILETAFKKETVGLVTREQYVEKRVNIQSKIEEEEKEKLQKQQQEEEELQLQKRKKRKIRGNSRLSFAEDIDNEPQEDEPHHSKDNLEANRLRCGKLGKDPTVETSFLPDSEREAEEQAERERLRKQWLREQEQIRNEPLEITYSYWDGTGHRRVIQVRKGDSIGEFLRAVQQQLAPEFREIRTTSVENLLYVKEDLIIPHQHSFYELIVNKARGKSGPLFHFDVHEDVRTIADATIEKDESHAGKVVERHWYEKNKHIFPASRWEIYDPTKKWERYTIHGD

SEQ ID NO: 52556 - protein, 214 aa, Glycine max
  Clone ID: LIB3039-012-H6_FLI.pep
PQSHLTSLGSNLWNEDLECLEWLESKESRSVVYVNFGSITVMSAEQLLEFAWGLANSKKPFLWIIRPDLVIGGSVILSSEFVSETRDRSLIASWCPQEQVLNHPSIGVFLTHCGWNSTTESVCAGVPMLCWPFFAEQPTNCRYICNEWEIGMEIDTSAKREEVEKLVNELMVGEKGKKMREKVMELKRKAEEVTKPGGCSYMNLDKVIKEVLLN

SEQ ID NO: 52557 - protein, 144 aa, Glycine max
  Clone ID: LIB3028-019-B11_FLI.pep
SVLTEVRLNMRSGKARRRVLVEEMNLEAGMVNRKRLGRKTRFAYLCIAEPWPKVSGVAKVDLESGEVKRHEYGERRFGGEPFFLPTRGGNGNEDEGYVMAFVHDEMTWQSELQILNALDLKLEATVMLPSRVPYGFHGTFVEAH

SEQ ID NO: 52558 - protein, 533 aa, Glycine max
  Clone ID: 700982534_FLI.pep
FDWCGSNPMPPEFWILPSFLPMHPAKMWCYCRLVYMPMSYLYGKRFVGPITPLILQLREELFTQPYEKVNWKKARHQCAKEDLYYPHPLIQDLIWDSLYIFTEPLLTRWPFNKLIREKALQVTMKHIHYEDETSRYITIGCVEKVLCMLACWVEDPNGDAFKKHLARVPDYLWVSEDGMTMQSFGSQEWDAGFAVQALLATNIIEEIGPTFAKGHDFIKKSQVKDNPFGDFKSMHRHISKGSWTFSDQDHGWQVSDCTAEGLKCCLLLSMLPPEIVGEKMEPERLYDSVNVLLSLQSKKGGLAAWEPAGAQEWLELLNPTEFFADIVVEHEYVECTGSAIQALVLFKKLYPGHRKKEIENFITNAVRFLEDTQTADGSWYGNWGVCFTYGSWFALGGLAAAGKTYTNCAAIRKAVKFLLTTQREDGGWGESYLSSPKKIYVPLEGSRSNVVHTAWALMGLIHAGQADRDPMPLHRAAKLLINSQLEEGDWPQQEITGVFMKNCMLHYPMYRDIYPMWALAEYRRRVPLPSTEV

SEQ ID NO: 52559 - protein, 156 aa, Glycine max; identical to SEQ ID NO: 49748
  Clone ID: 700842857_FLI.pep

SEQ ID NO: 52560 - protein, 315 aa, Glycine max
  Clone ID: LIB3051-048-H11_FLI.pep
ENETFICTVPMFHIYGLVAFATGLLASGSTIVVLSKFEMHDMLSSIERFRATYLPLVPPILVAMLNNAAAIKGKYDITSLHSVLSGGAPLSKEVIEGFVAKYPNVTILQGYGLTESTGVGASTDSLEESRRYGTAGLLSPATQAMIVDPESGQSLPVNRTGELWLRGPTIMKGYFSNEEATTSTLDSKGWLRTGDICYIDNDGFIFIVDRLKELIKYKGYQVPPAELEALLLTHPAILDAAVIPYPDKEAGQHPMAYVVRKAGSSLSETQVMDFVAGQVAPYKRIRKVAFISSIPKNPSGKILRKDLIKLATSKL

SEQ ID NO: 52561 - protein, 306 aa, Glycine max
  Clone ID: LIB3051-054-H6_FLI.pep
RAIELENLPYGLSQKPAVLKVRDWYVDSFRDLRAFPNIKNVNDEQDFTEMIKAIKVRHNNVVPTMALGVQQLKKRMDPKIVYEDLVEIHQFLDRFYMSRIGIRMLIGQHVELHNPNPPPHVVGYIHTKMSPVEVARNASEDARAICCREYGSAPDVHIYGDPDFTFPYVPAHLHLMVFELVKNSLRAVQERFMDSDKVAPPIRIIVADGIEDVTIKVSDEGGGIARSGLPKIFTYLYSTARNPLDEHSDLGIGDNVTMAGYGYGLPISRLYARYFGGDLQIISMEGYGTDAYLHLSRLGDSQEPLP

SEQ ID NO: 52562 - protein, 225 aa, Glycine max
  Clone ID: LIB3049-025-A9_FLI.pep
GRRDTVRKNSPVVAQRLSTDHNVADEEVRKEVEALHPDDSHIVVYNRGVWRIKGIIQVSRSIGDVYLKKPDFYRDPVFQQFGNPIPLKRPVMTAEPSIIIRELESQDLFLIFASDGLWEQLSDEAAVQIVFKHPRAGIAKRLVRAALHEAAKKREMRYDDIKKIDKGIRRHFHDDITVVVIYLDHHAGSSNGRFKQTGVDYTTAPVDIFSLNADEAEKRMLGTVA

SEQ ID NO: 52563 - protein, 497 aa, Glycine max
  Clone ID: LIB3030-005-A3_FLI.pep
DLLALQKNQIPPSIVIIIIIASIYLSIFYSFSLIVSDLCCFLLTQAMEVVEKEKKKYITSEELKGHNKEGDLWISIQGKVYNVSDWVKEHPGGDVPISNLAGQDVTDAFIAYHPGTAWSHLDKFFTGYHLSDFKVSEVSKDYRKLASEFSKLGLFDTKGHVTSCTLASVAVMFLIVMYGVLRCTSVWAHLGSGMLLGLLWMQSAYVGHDSGHYVVMTSNGFNKVAQILSGNCLTGISIAWWKWTHNAHHIACNSLDHDPDLQHMPVFAVSSRFFNSITSHFYGRKLEFDFIARFLICYQHFTFYPVMCVARVNLYLQTILLLFSRRKVQDRALNIMGILVFWTWFPLLVSFLPNWPERVMFVLASFAVCSIQHIQFCLNHFAANVYVGLPSGNDWFEKQTSGTLDISCSSSMDWFFGGLQFQLEHHLFPRLPRCQLRNISPLVSDLCKKHNLPYRSLSFWEANQWTIRTLRTAALQARDLTNPAPKNLLWEAVNTHG

SEQ ID NO: 52564 - protein, 186 aa, Glycine max
  Clone ID: 700733752_FLI.pep
DPRTENSPYLGFIYTSFQERATFISHGNTARLAKEHGDIKLAQICGMIASDEKRHETAYTKIVEKLFEVDPDGTVMAFADMMRKKIAMPAHLMYDGRDDNLFDSYSSVAQRIGVYTAKDYADILEFLVGRWKVEQLTGLSGEGRKAQEYICGLPPRIRRLEERAQARVKESSTLKFSWIHDREVLL

SEQ ID NO: 52565 - protein, 392 aa, Glycine max
  Clone ID: LIB3049-031-B6_FLI.pep
DGNIVASLLAHKLGVTQCTIAHALEKTKYPESDIYWKKFEEKYHFSCQFTADLFAMNHTDFIITSTFQEIAGSKDTVGQYESHTAFTLPGLYRVVHGIDPFDPKFNIVSPGADMSIYFPYTETERRLTEFHPDIEELLYSSVENEEHICVLKDRNKPIIFTMARLDRVKNITGLVEWYGKNARLRELVNLVVVAGDRRKESKDLEEKAEMKKMYGLIETYKLNGQFRWISSQMNRVRNGELYRVICDTRGAFVQPAVYEAFGLTVVEAMTCGLPTFATCNGGPAEIIVHGKSGYHIDPYHGDRAAEILVEFFEKSKADPSHWDKISQGGLKRIHEKYTWQIYSDRLLTLTGVYGFWKHVTNLERRESKRYLEMFYALKYRKLAESVPLAIEE

SEQ ID NO: 52566 - protein, 265 aa, Glycine max
  Clone ID: LIB3028-023-G10_FLI.pep
PEDERKSPDIEIPLDAPTMTHDFAITENFVVIPDQQVVFKLGEMIKGGSPVIYDGEKKSRFGILPKYASDASSIVWVDSPDTFFFHFWNAWEERDKDEVVVIGSCMTPPDSIFNDREERLKSVLTEVRLNMRSGKARRRVLVEEMNLEAGMVNRKRLGRKTRFAYLCIAEPWPKVSGVAKVDLESGEVKRHEYGERRFGGEPFFLPTRGGNGNEDEGYVMAFVHDEMTWQSELQILNALDLKLEATVMLPSRVPYGFHGTFVEAH

SEQ ID NO: 52567 - protein, 366 aa, Glycine max
  Clone ID: 701139365_FLI.pep
VEIADYIVLKKIILVLFCIILFCKIVRYMFSLLKEEKEPITILVTGAAGQIGYALVPMIARGAMLGPNQPMILHMLDIEPATESLKGLKMELIDAAYPLLRGVVATTDVVEACKDVNIVVMVGGFPRKEGMERKDVMSKNVSIYKAQASALEQHAATDCKVLVVANPANTNALILKEFAPSIPEKNITCLTRLDHNRALGQISERLNVLVSDVKNVIVWGNHSSTQYPDVNHATVTTNSGEKPVRELVVDDNWLNNEFITTVQQRGAAIIKARKQSSALSAASAACDHIRDWVLGTPKGEWVSMGVYSDGSYGIPTGLIYSFPVTCERGDWNIVQGLKIDQFSREKMDKTAQELIEEKTLAKSCLN

SEQ ID NO: 52568 - protein, 353 aa, Glycine max
  Clone ID: LIB3030-009-F2_FLI.pep
VYVDDGKTKYLDRCYGRVGRRKLKERLVQGCVSNGVRFHKAKVWQVQHQEFESKVLCDDGVELKGSLVVDASGFASNFVAYDKVRHHGFQIAHGVLAEVDDHPFDLDKMVLMDWRDSHLGNEPYLRASNSRFPTFLYAMPFSSNLIFLEETSLVSRPVLSYMEVKRRMVARLRHLGIRVKRVLEDEKCLIPMGGPLPRIPQEVMAIGGTSGVVHPSTGYMVARTMAVAPVVAFAITQCLGSTRMIRGKQLHDKVWNSMWPIENRLVREFYSFGMETLLKLDLNGSRSFFDAFFNLKPYYWQGFLSSRLTLNELLWLSISLFGHASNPSRFDIVTKCPVPMAKMVGNIALEYIG

SEQ ID NO: 52569 - protein, 420 aa, Glycine max
  Clone ID: 700667092_FLI.pep
ALVIHPRHSGSDNESVKITVAGSSVSVGAASETRTVPGSEASDIQMVEAGNMVISIQVLKNVTDNFSEKNVLGQGGFGTVYRGELHDGTRIAVKRMECGAIAGKGAAEFKSEIAVLTKVRHRHLVSLLGYCLDGNEKLLVYEYMPQGTLSRHLFDWPEEGLEPLEWNRRLTIALDVARGVEYLHGLAHQSFIHRDLKPSNILLGDDMRAKVADFGLVRLAPEGKASIETRIAGTFGYLAPEYAVTGRVTTKVDVFSFGVILMELITGRKALDETQPEDSMHLVTWFRRMSINKDSFRKAIDSTIELNEETLASIHTVAELAGHCGAREPYQRPDMGHAVNVLSSLVELWKPSDQNSEDIYGIDLDMSLPQALKKWQAYEGRSQMESSASSSLLPSLDNTQTSIPTRPYGFADSFTSADGR

SEQ ID NO: 52570 - protein, 157 aa, Glycine max
  Clone ID: 700786051_FLI.pep
GILKLLDTRLVPSAASGDSKVFYLKMKGDYHRYLAEFKTGADRKEAAESTLSAYKAAQDIANTELPPTHPIRLGLALNFSVFYYEILNSPDRACSLAKQAFDEAIAELDTLGEESYKDSTLIMQLLRDNLTLWTSDMQDDGADEIKEAAPKGDGEQN

SEQ ID NO: 52571 - protein, 244 aa, Glycine max
  Clone ID: 700746124_FLI.pep
SCFFFLPEFQLPDGCQVKVLRSMRPLRLEDVVIGQYKSHTRGGVTYPAYVDDKTVPSGSLTPTFAAAALFIDNARWDGVPFLMKAGKALHNKRAEIRVQFRHVPGNLYNRNFGTDLDRATNELVIRVQPDEAIYLKINNKVPGLGMKLDRSNLNLHYAARYSKEIPDAYERLLLDAIEGERRLFIRSDELDAAWSLFTPVLKELEEKKIIPEYYPYGSRGPVGAHYLAARHNVRWGDLGTDVDH

SEQ ID NO: 52572 - protein, 79 aa, Glycine max
  Clone ID: 700747359_FLI.pep
VYRQCRVADHSIGPLEIRVVRNGTFEELMDYAISRGASINQYKVPRCVNFTPIMELLDSRVVSVHFSQELPHWTPERRR

SEQ ID NO: 52573 - protein, 515 aa, Glycine max
  Clone ID: 700762456_FLI.pep
DDPEPPPILLFITYSMASSLLSPSFTSFLRTKDLSLSAFTSQRCFKAVPRKIIRCAIAAPQRQPSTTGSVRTAMTMTEKILARASEKAQLTPGDNVWVNVDILMTHDVCGPGSIGIFKREFGEDAKVWDREKLVIIPDHYIFTSDERANRNVDILRDFCHEQNIKYFYDIKDLSNFKVNPDYKGVCHVALAQEGHCRPGEVLLGTDSHTCTAGAFGQFATGIGNTDAGFVLGTGKLLLKVPPTLRFVMDGEMPDYLLSKDLILQIIGEITVAGATYKSMEFVGTTVESLTMEERMTLCNMVVEAGGKNGVVPADSTTFKYLEGKTSLPYEPVYSDDQARFLAEYRFDVSKLEPVVAKPHSPDNRALARECKDVKIDRVYIGSCTGGKTEDFMAAAKVFLASGKQVKVPTFLVPATQKVWMDLYSLPVPGSGGKTCSQIFEEVGCDTPASPSCGACLGGPKDTYARMNEPKVCVSTTNRNFPGRMGHKEGQIYLASPYTAAASALTGYVTDPREFL

SEQ ID NO: 52574 - protein, 393 aa, Glycine max
  Clone ID: LIB3028-048-G9_FLI.pep
AFCYLIPLRTRTFSSKTTMAPTAKTLTYLAQEKTLESSFVRDEEERPKVAYNEFSDEIPVISLAGIDEVDGRRREICEKIVEACENWGIFQVVDHGVDQQLVAEMTRLAKEFFALPPDEKLRFDMSGAKKGGFIVSSHLQGESVQDWREIVTYFSYPKRERDYSRWPDTPEGWRSVTEEYSDKVMGLACKLMEVLSEAMGLEKEGLSKACVDMDQKVVVNYYPKCPQPDLTLGLKRHTDPGTITLLLQDQVGGLQATRDNGKTWITVQPVEAAFVVNLGDHAHYLSNGRFKNADHQAVVNSNHSRLSIATFQNPAPNATVYPLKIREGEKPVMEEPITFAEMYRRKMSKDIEIARMKKLAKEKHLQDLENEKHLQELDQKAKLEAKPLKEILA

SEQ ID NO: 52575 - protein, 371 aa, Glycine max
  Clone ID: LIB3052-015-C9_FLI.pep
VPNTADGYNSSTSRFCYVNSVDKHLVKGKIVLCDGNASPKKVGDLSGAAGMLLGATDVKDAPFTYALPTAFISLRNFKLIHSYMVSLRNSTATIFRSDEDNDDSQTPFIVSFSSRGPNPLTPNTLKPDLAAPGVNILAAWSPVYTISEFKGDKRAVQYNIESGTSMACPHVSAAAAYVKSFHPNWSPAMIKSALMTTATPMSPTLNPDAEFAYGAGLINPLKAANPGLVYDISEADYVKFLCGEGYTDEMLRVLTKDHSRCSKHAKKEAVYDLNLPSLALYVNVSSFSRIFHRTVTNVGLATSSYKAKVVSPSLIDIQVKPNVLSFTSIGQKKSFSVIIEGNVNPDILSASLVWDDGTFQVRSPIVVYGDT

SEQ ID NO: 52576 - protein, 514 aa, Glycine max
  Clone ID: LIB3065-013-A3_FLI.pep
FSKMEKENKVKDTASDDGYCWWWLVQKGTTAVFITVGLFALLVRVAVSLHPYSGAGNPPKFGDYEAQRHWMEITINLPIKEWYRNSSNNDLRYWGLDYPPLTAYQSFIHGLFLKFFHPDSVAPFASRGHESYLGKLLMRWTVLSSDALIFFPAALYFIIVYYNQSSRTRKSELAWHTAVLLLSPCLILIDHGHFQYNCISLGFTIGAVAAILSGNDLVASVLYCLALNHKQMSAYFAPSFFSHLLGKCLRRKYPILEVSKLGLLVLGTFAAVWWPYLYSTQSILEVLSRLAPFERGIFEDYVANFWCASSILIKWKRLFTTESLKLLSLTATVITCLPSMVQQIKSPSKRGFLYALLNSSFSFYLFSFQVHEKSILLPLLPATLLAVEEPFIFRWFTQFAMLSMFPLICRDNLVVPYLALLALFVLIMNAPGQHRVRESNYLGSATMFLILCCYFVLHIVYLTMHPPEKYPFLFEAIIMNLCFSQFVLVTLGCNIKQWLLNRPAKLEETEKKQI

SEQ ID NO: 52577 - protein, 364 aa, Glycine max
  Clone ID: LIB3053-009-G5_FLI.pep
MAFGKFIMNIGVVAMVLGLWIRVGFAQQVPCYFIFGDSLVDNGNNNQLNSLAKANYLPYGIDFAGGPTGRFSNGKTTVDVVAELLGFNGYIRPYARARGRDILSGVNYASAAAGIREETGQQLGGRISFRGQVQNYQRTVSQMVNLLGDENTTANYLSKCIYSIGMGSNDYLNNYFMPLIYSSSRQFTPQQYADVLVQAYAQQLRILYKYGARKMALFGVGQIGCSPNALAQNSPDGRTCVARINSANQLFNNGLRSLVDQLNNQVPDARFIYINVYGIFQDILSNPSSYGFRVTNAGCCGVGRNNGQVTCLPLQTPCRTRGAFLFWDAFHPTEAANTIIGRRAYNAQSASDAYPVDINRLAQI

SEQ ID NO: 52578 - protein, 177 aa, Zea mays
  Clone ID: LIB3078-013-A6_FLI.pep
MDWNCTVLDHLQFSLHLVLEEVVVEVVERLGGGLLDDVRVRHLVVGLVELHGPADDGAALALRLGRSHLQRDLEVLVEVRQLAVHHAVRHHLVLVVRRLKLLLGERQHRHRLGVLEEADGAGRLAVALDGLDALVLLGEDLGEQLRRVTQRRPQLVSRGLDLHHQLNLGRHCLCTDS

SEQ ID NO: 52579 - protein, 158 aa, Zea mays
  Clone ID: LIB3078-024-B11_FLI.pep
IIFIDEIDAIGTKRFDSEVSGDREVQRTMLELLNQLDGFSSDERIKVIAATNRADILDPALMRSGRLDRKIEFPHPSEEARARILQIHSRKMNVNPDVNFEELARSTDDFNGAQLKAVCVEAGMLALRRDATEVTHEDFNEGIIQVQAKKKSSLNYYA

SEQ ID NO: 52580 - protein, 183 aa, Zea mays
  Clone ID: LIB3078-039-A2_FLI.pep
TEKPSPESEYIAIRAPLSPVILPEAERSDDLGSSYEVVTECLKDEPEEPTLGAVEKPYQAPFARVTSLENASDNSPLPESLAHANSIKARVPEPVYTVSVEGHVVSEKPRSKEPKGLRKLLKFGRKSHAEGAMDSSVDEASAGDGSMLKNLISQDDSGASSSKASRSFSLLSPFRSKHKVIVL

SEQ ID NO: 52581 - protein, 203 aa, Zea mays
  Clone ID: LIB3078-040-A9_FLI.pep
AHRASLRYRSLLQDYQELIKETQAKKERLYMERLRKKRLLAEVKFLRKRYQSMAKNPSQTIACRVKNPALSSASWRAASVSDAQHQLVRAVGSSSRNQLVQPRRGGSPRVYPAIDLNEACEPGYEMEIVEERHGNRAPLGINKSKRYPMESDAAAGNNSKRYPMEMGSDVVAGPTQGRMPVFWDVQNPAGRSGKRKISCQDQR

SEQ ID NO: 52582 - protein, 136 aa, Zea mays
  Clone ID: LIB3078-053-D8_FLI.pep
SNGRTVVCSLLSMATSTAAATALLRPRPAVPAKLAQRRCLHAVAGWTTMRRRGAAGVVRAFFNPLGDERILREAIKEPVAFMGGVFAGLLRLDLNEDPLKEWISRTVEASGIAEENSSEESSEADQNDAPQQIEIE

SEQ ID NO: 52583 - protein, 125 aa, Zea mays
  Clone ID: LIB3076-029-C12_FLI.pep
AVPVPWHPRARRPSLQPVLGGRRRERGARRRRARARLRRREGRPQGQGRLVLREPQGQRLPWRGGAARVHGRGPRLLLHEPALRQGAGDGGARPRLPAQVSERRSARLATRLRWNNFTVSRCGGV

SEQ ID NO: 52584 - protein, 136 aa, Zea mays
  Clone ID: LIB3076-041-C9_FLI.pep
RQNSRRPTAYGNCQGEAIYRNGRSGWPRPPGRGRREARAVRLRGEHCPVLQVRRQRVQGRRRHELHRAEGVGSDGRSLLNWAWAGGRTRCRCRSRLSNTVGFLAAFPSPPPSYLVVLFDCLLRNRTTVISTPMPFI

SEQ ID NO: 52585 - protein, 90 aa, Zea mays
  Clone ID: LIB3076-041-H6_FLI.pep
PLTETLQQVQAICNSCLQPSALERHSSAVMAACRIKKGWFLPVILCSVHSLAPYVLRIYNPLRVVSGELNASRISCHDKLEYSFMVVISD

SEQ ID NO: 52586 - protein, 141 aa, Zea mays
  Clone ID: LIB3075-009-B1_FLI.pep
GNAKLVSTKQEISKDTRKNIGTSPSPNGSAVVKKQMPKESKKEVATERRSPPKLHRSSPTPARTSPTKLSPAAKQNGNSGPVSSVSTVKKRVSETISWDSLPTSLINSGKAVVRRKNIALIVAAEAQREAAAAAYLVKGLG

SEQ ID NO: 52587 - protein, 100 aa, Zea mays
  Clone ID: LIB3075-011-B6_FLI.pep
GNRRRRRRRRRIEVSTRRSDHEGQVEEEAHEEAQEEAQKDEAEIQVGRSRWIVDLMTCVGTYISSDALVCLWRDVNLPWCHGPPSVERLACTSVGHFSWF

SEQ ID NO: 52588 - protein, 206 aa, Zea mays
  Clone ID: LIB3075-011-C12_FLI.pep
YVVSVATASRRRRKRRRKKRRTKRSRRRPKRSTSLCPTRTRCRTPRCARAGRGSARLSSSASAARSLRLRRPSRRRSRRRAPVRATPPVSAARHRRRSGHRCRRRSGRPRGAPATSSPRRARAPSCDATRLLCHVLVAVGLLLCCHRYWTSVLLGPVPFCVVKVQCIVCRCACLLQSLIRTCHALFYCSNYVASSHNLLLCICGIR

SEQ ID NO: 52589 - protein, 196 aa, Zea mays
  Clone ID: LIB3078-008-F1_FLI.pep
KKLISGPILASGSATDDGRNGNKSAKHVQTQHEPGDIHIYSRHTQAATIHEKQGENPLLGLEHVADQVDDAVAVAPLVVVPRDKLDEVVVQSDPGLGVEDARPAVTKEVGRNQILLHITHDTLEWTLGSSLNSFLDILIGGPLLDSDGEVNNRDIHSRNAEGHTSELAIQIRENFTNSLGSTGAARNDVKAGSPAT

SEQ ID NO: 52590 - protein, 280 aa, Zea mays
  Clone ID: LIB3078-034-D12_FLI.pep
KTLSLSQGEIVFNIGKSVVENKSDALAFKRPGLQKEGSKVVYGVPKHGKKKFMEVSKHYYAGQFDKISEGNASNRFVKHLVTQLPRERENDSKVDPIRGRRVGETRSRLPKPTKSQSVRASSAPGNDSFPMHVQNTCVSQRSFGFAGSSTSTSNNEKSTSEKNNPALGVGFRTEVPSVSELQTASTVPTNRAKKKYIPTVSNINRSILNTSEKANSDSGEPRRTTSDSTEPRRSNRRIQPTSRLLEGLQSSLIISKVPGEKVPRSNYKSASSRGRAQSHG

SEQ ID NO: 52591 - protein, 105 aa, Zea mays
  Clone ID: LIB3078-048-E4_FLI.pep
TYILDSLILIMGPRYITLCIFLVLVLHGDTTLAETCRQFVKWDPFCFSAMCKASCFIEGKSSDGSYVKGHRCESNGYHAVCVCFLCKNLVSNDMRIYLLLFLSVI

SEQ ID NO: 52592 - protein, 55 aa, Zea mays
  Clone ID: LIB3078-048-G2_FLI.pep
ISGNTTTPFSARIYNICKRQKLGKIIIKRLHSEVIKYTSRVNCSDPKPTILDSHV

SEQ ID NO: 52593 - protein, 135 aa, Zea mays
  Clone ID: LIB3078-049-B1_FLI.pep
DVVILSSDGEKLNSMNLLLYMAPIAVIFLLPATIFMEDNVVGVTIELAKKDFTIVWLLLFNSCLSYFVNLTNFLVTKHTSALTLQVLGNAKGAVAVVVSIMIFRNPVSITGMLGYTLTVFGVILYSESKKRSNKP

SEQ ID NO: 52594 - protein, 164 aa, Zea mays
  Clone ID: LIB3079-005-A11_FLI.pep
SAPTGELPRAYHGDQGHVSAPYVAPWAQPQSQTAGSQQPTRTQAQVSYSSYAYPPPPWASQDSTESNPFVAAASSSQQYQSTSRTPTMPPNLRPLLQQSHSFGVPLPTASLDSPINGNLKQPLSAGARRPSYVSSNKFFDDLFERNSDGSLKVGSTRHSDVYGK

SEQ ID NO: 52595 - protein, 69 aa, Zea mays
  Clone ID: LIB3076-015-A10_FLI.pep
YYLISMLIQVVWSLATLIEWVQNIQGFMWAEEKVDDELEKDMSSAFQHMKAMCESLVLPKCAVTLELRV

SEQ ID NO: 52596 - protein, 120 aa, Zea mays
  Clone ID: LIB3076-034-D4_FLI.pep
IEMSHTDYTNIFGRARWPDAPQRVLETPFYDEWKNNFPDQETEEDQPIIGHSIIHGVHKDIRRFAGTVPNATATGDIDIMAMYSGQGVGLITEIIPAAQVVKSLVAEAKEVIREKLSGYQ

SEQ ID NO: 52597 - protein, 76 aa, Zea mays
  Clone ID: LIB3076-052-G8_FLI.pep
LCLLIPCFLLSLSSVYMDFCMYDCIVLCMRLHMARRCLVSTDHTMTRGPHLLIPRLCMQVVEKLMEGTQCLLTSST

SEQ ID NO: 52598 - protein, 292 aa, Zea mays
  Clone ID: LIB3075-006-B1_FLI.pep
VAISPPPRHRRPCPHGAPARPWPTGERHPDTRDRAAGEHGIAHHGRGQEAGAVRCEVRKRLLIALPPVPRSAHRVLGRGRHRYRHSPAMESATAAVRSASLARARPAPLVHGRARGAGRVVGAGLAARARRRALVAVASHQEHHEPLPPRAQEGGAVAVATQADEAEVHAIDAPAAAAETSSSQLAAGKTVRVRFVLKRQCTFGQSVCLVGDDPALGLWDLSNAFPLKWAESHDWTLEKDLPANKLIEFKFLLQDSTGKLHWQGGPNRSFQTGETAANTLVVFEDWGDVKNQ

SEQ ID NO: 52599 - protein, 237 aa, Zea mays
  Clone ID: LIB3075-015-E7_FLI.pep
GFLSINRAMSLDSVEVDLSQELQAPTRPILQTQVEAAWRGRAIGAEAVNGASAPRWRLVPTRREQAKWDRAAKAATGGSDVILRESKSRVQQGDPKVLAARSREDYLQLKQRLQWFTLGIGGVGVISAYISYTPEIAVSFGAGLIGSLVYLRMLGTSIDSLAGGTGETVKSAAAQPRLLIPVVLVMMYNRWNQILVPDYGFMQLELIPMLVGFFTYKIATFAQAIQDSIPPVGNREG

SEQ ID NO: 52600 - protein, 112 aa, Zea mays
  Clone ID: LIB3075-015-H7_FLI.pep
GRQRRLPERMLGRSLLLLHARHVLLSSSSGAQGTGMARLESRPISIMQSGEKQCMELFFFFPSFLNHDDDTSLFPFPSCICFPVLCMETSLATPAGIMFSGVHARVFLSSEV

SEQ ID NO: 52601 - protein, 168 aa, Zea mays
  Clone ID: LIB3075-027-G6_FLI.pep
AAAVSASPIFATPALHLALPPSLALGTQAAAAAAVAALRFGLSATASAASTPASRQLPRALASGPPHTAGYPSKTPHPQMKHIFKIAAILVAISAIWIALLETSTVPRSYTWLLPIYLVVALGCYGLFMVGFGLMFFPTCPREAVLLQQDIVEAKEFLGKRGVDVGSE

SEQ ID NO: 52602 - protein, 222 aa, Zea mays
  Clone ID: LIB3075-028-D12_FLI.pep
SLAINRYLMDDQENENEHEKHADAGTDVEDEEEDEDGHKRVVVLGPQVPLKEQLELDKDDESLRRWKEQLLGQVDTEQLGETAEPEVKVLNLTILSPGRPDLVLPIPFEADDKGYAFTLKDGSLYSFRFSFTVSNNIVSGLKYTNTVWKTGVKVENQKMMLGTFSPQQEPYVYEGEEETTPAGIFARGSYSAKLKFFDDDGKCYLETSYYFEIRKEWPGPAT

SEQ ID NO: 52603 - protein, 126 aa, Zea mays
  Clone ID: LIB3075-030-A9_FLI.pep
QRSSCHCTRRGDLFPSKATNFLPRFICCSACLRTRHSPNSLHPRCVVASTVPGDGSADISAAVQHEQATREMDRVHEQHLDRNWTDVDRNRMEMDRVREQHGSTGCQGEKNGLAPMKTDLVAKYYI

SEQ ID NO: 52604 - protein, 168 aa, Zea mays
  Clone ID: LIB3075-032-D12_FLI.pep
TYVKKTEREKARCLVLTWTCSNIHQKERKIRQNLVFPNGCAYFQDKSPQQAITLSCSRESSLKITGKNSLLLDDNADLALVKHVIEGPSLPLLVPVVHLPHASRDQTQGQSNEDLLHHTRALEGGMRNPAACHLLSCLLRSDAKRHAGDGEGPEPPPRGGNRRLGEPN

SEQ ID NO: 52605 - protein, 216 aa, Zea mays
  Clone ID: LIB3075-048-G10_FLI.pep
RRRRRPLLLVPRAPVGAAGADRAGVPEPAVGQVRGGGGRRRRPRGGQQRARRGPARRRGGLPVLPREAAQGQGLSGQQLLPQQPGKDRHLQLRLATAHGEGGAGARQGVRRERHPLGRGLLRRAPQAQPAAHAAAQQGRDQEDVPLGQPPLILLKLCTRPDGNIPDGSSRRFVSIFFHFVAVCLFDYYLMICMCFFMRLISCCILFFHVCMDYGQQ

SEQ ID NO: 52606 - protein, 105 aa, Zea mays
  Clone ID: LIB3078-016-A4_FLI.pep
FSQRKASRACPSCGTGWPCQDGEADDVNEPGEEELASPANHPSGKKRRRVKAELVEENDIAGPSTEVPRTRRTLRSAKAEAVEADQEASSTAASQPGRGSKTRKK

SEQ ID NO: 52607 - protein, 144 aa, Zea mays
  Clone ID: LIB3078-025-G4_FLI.pep
ESLRPPIAKMLIFAGRHSPVSKLLPLANHFTCCGSRPSIEIAMPHGHAAAVVDRLLRRLGSAACRLEVPPNIDGDLAHVWTTLARLQDMLVSLEIRPELQEWMGDIKQVAYDVEDLVDELEDHNSMESQMSGCVAVGEVWFIDP

SEQ ID NO: 52608 - protein, 253 aa, Zea mays
  Clone ID: LIB3078-055-G9_FLI.pep
EGTAVSHTHTPHGGRSGGATINWCSLRPKCSLKFPPNIPATAVVQSKCQTMPAVAFASAPAIFASASARPCRSAAPGILSSDSGRPRRGARGAVQCEVASSSAPSAAGPQAARWAQRTVVIPPQRRGCHLITNKIVNEIGNDLADFKCGMAHLFLQHTSASLTINENYDSDVQVDTETFLSRIVPEGPSAPWRHTIEGPDDMPAHIKSSMFGCSLMIPITNGRLNMGTWQGIWLCEHRDYATPRQIVITLNGI

SEQ ID NO: 52609 - protein, 279 aa, Zea mays
  Clone ID: LIB3076-013-D10_FLI.pep
SANRRSEERPAAVEHLGRGLLLLPGGGRLLHRGRVGTSGVCAGCGCCGTALPAATVVYVQGWKLHFGQGIRELLHTLHVHVHDLVPVHLHLLLDVDADHRLVHGSLRRGAGRVRRRDLLDGAGRVDLRVGGLRRCLRLVVSRRVGVPGRLRAGVRLRGGRELRGRHAADRRVALEGAHRVGGAVVRREAIYEAHGGVPAQGRGAVIVLRGQEAVAALRFHGRARQPGVLGDHDLVLLHEIQVRELDLLVLLPVPDAVGGVVPRLVLLLRVGQRRLGRRR

SEQ ID NO: 52610 - protein, 122 aa, Zea mays
  Clone ID: LIB3076-031-H1_FLI.pep
HIDELTAGGAHHLGRVRPDLPGGQSAQGEREARGEGDGEGDPQRGAPAAAGGQQALQPSPPRLPAAPFVHRRLTSNGSAQAKQLSLLGCLLLWLSIIILPRAFPAFLFVCRVEEALPPSVFV

SEQ ID NO: 52611 - protein, 125 aa, Zea mays
  Clone ID: LIB3076-044-E8_FLI.pep
LERGFGAAVGGSSGGQTAGAAGTQGIMFFFFFFFFSLDAAAERDAVADGELADLDAVVGGERAVEGEDEVAVEADVLAHGRVVGEHDGAVPQRVVVADEAAGPHQLQEPLVVAEVVVLVGVHEGE

SEQ ID NO: 52612 - protein, 98 aa, Zea mays
  Clone ID: LIB3076-046-C10_FLI.pep
NTGHGSESSLARVRSVPAFDLYSTQQLTENGRQNCSLSPRLLLEERARTSELGGGADEGHVGDQIQNPVAVAPLVVIPRHELHERRAQSDTSLGIKDA

SEQ ID NO: 52613 - protein, 150 aa, Zea mays
  Clone ID: LIB3075-022-G12_FLI.pep
TSHTSPVYQRAFATDEPSASTRGITVETTIYIASSITIGITTSSIATRIAVDTTTRVRRLHRRHQQQHHRNHRLIHHQLRHQNHHLIHRRHQQLHHRRLHPHHLNHEGYFKSSSSLVKLDMRFRILVDMRPLFCSHRMQQCVSYVVAYLS

SEQ ID NO: 52614 - protein, 200 aa, Zea mays
  Clone ID: LIB3075-047-F4_FLI.pep
HACAHQQTETNVLYVYGIFFLKKKRARELLFGRLGILGRLVVEVVGAEQLAAVGERLLAEEGDGVGVADAALLDAVVAGERDAAAVAGVVDLGAVRLGALEQAHVADLVLVVAADLHPVPAAGARRRLRLVVDLLRLEVAALHLHRRALDGVGHVCLEPGAAVVAVDAAGDDKPNAGSGGYGRGHEDQRDEATQLWHHRR

SEQ ID NO: 52615 - protein, 127 aa, Zea mays
  Clone ID: LIB3070-016-G3_FLI.pep
LPPSLCPGFPGKPTPRSKSSEATEIKDGAGGGCAFAGEVPGGGSDHDGRRGAPAGVHDLPQQAFAFLRLRRGALLLLQADVGTKGSSDLSEWVNRSPSPDACHSVCFGTARSSNCFSRLGIITSNTS

SEQ ID NO: 52616 - protein, 168 aa, Zea mays
  Clone ID: LIB3078-012-D3_FLI.pep
LLVGVHVEPDRVQAISRAAKEASDVAVVHHLDTERGALVPAVRSVSTFVADKFERLDQIVNVVGWARGPGDLRQALVEPAQINLVLRASMAETPWPLLVRFAIGSDVDEGDGADAAAVVRRDLHLDQPVRSSPQIPTIAGVSTPLSDLRRLPHVCRRVVEETMYVCRS

SEQ ID NO: 52617 - protein, 172 aa, Zea mays; identical to SEQ ID NO: 36930
  Clone ID: LIB3075-004-F10_FLI.pep

SEQ ID NO: 52618 - protein, 140 aa, Zea mays
  Clone ID: LIB3078-035-C8_FLI.pep
KRLIQSRGRSFIFSTALPVPVVASVHAALYVSSKETWRRSVIWRHVQYFASLTKLEITSPIISIVVGSEAGALRASRYLLRSGFHVTPIRPPTVPPNSCRLRITLSASHSSDDIKRLVDALTPWLPVKYGNGSYATASKL

SEQ ID NO: 52619 - protein, 194 aa, Zea mays
  Clone ID: LIB3076-020-A4_FLI.pep
KGNFLWDFFIYIIKTMLDLREHFFFFFLLNRSIHLLSQQRRRTLAPPTLNKRIQPREGEGGKKNEIGPLKITATNRRPYLFRLFCDAEPIEVLAASSESDQTRGSGGEMPCDDDLLSVSHRCPGLQGDALLARDGEHGCVVQEVLELDDGLQHPPEVVGAHEPGGAEPAHGVDVDGEAALAELEARHLAAREAA

SEQ ID NO: 52620 - protein, 83 aa, Zea mays
  Clone ID: LIB3076-022-A10_FLI.pep
QRCFAIEESGCYCILGHARSFIISPHHHHPTWTNVVWRLLILVSSNCNICSEFFPSVFIFFFRVSASVIAISSSAKHVFSLLL

SEQ ID NO: 52621 - protein, 190 aa, Zea mays
  Clone ID: LIB3076-022-B9_FLI.pep
CGWPQTQLIQNLSKAFVLKENPKKKKARTQELLAYTGAGDQAKSVEDRVLENTHPSTENVVAIRDSNPVQDFEAMLAKRSSSTWTQKAIGDMQNYIAALLQNSSDGGNYQKALECFASLRKACIIEQEPQEFNQFLTNIYERLKEGDAAKFFQLLSSKNISLINKEEAPDSDVTEEMARSFYLKREKASQ

SEQ ID NO: 52622 - protein, 104 aa, Zea mays; identical to SEQ ID NO: 44964
  Clone ID: LIB3075-017-E1_FLI.pep

SEQ ID NO: 52623 - protein, 248 aa, Zea mays
  Clone ID: LIB3075-032-D5_FLI.pep
VGSTGDTTTAEAEAPAPVGDYELLERLGGRPPYTSVWRAVSRSTGAPVAVKQVRLTGVPARLRDSLDCEVRFLAAVSHPNIIRLIDVVQTQSCLYLVLELCEGGDLAAFIRRNGSVDERVARNFMKQIGAGLQVLHRHHVVHRDLKPQNILLSSPRSSDAILKISDFGLARVLGPGEYADTSCGSCLYMAPEVMLFQKYNDKVDMWSIGAILFELLNGYPPFHGRSNVCFSASTEARLSRSQNHWRLP

SEQ ID NO: 52624 - protein, 167 aa, Glycine max
  Clone ID: 700740810_FLI.pep
AAGDKATTYTKRIWLDLADAVSLSAGEEVTLMDWGNAIVKEIEKDQDGNIIGLSGVLHLEGSVKTTKLKLTWLPEIDELVSLTLVEFDYLITKKKLEEGEDFIDVVNPCTKKETLAYGDSNMRNLQRGDLLQLERKGYFRCDLPFIRPSQPIVLYAIPDGRQQTSLK

SEQ ID NO: 52625 - protein, 225 aa, Glycine max
  Clone ID: 700748836_FLI.pep
ATPASITNVTVEFLQFPAVVTPPASTKSYFLGGAGVRGLNIEEEFVKFTGIGVYLEDKAVSSLGAKWKGKSAAELLDSLDFYRDIIKGPFEKLIRGSKLRTLDGREYVRKVSENCVAHMESVGTYSEAEEKAIEEFRNAFKDQNFPPGSTVFYKQSPTGTLGLSFSKDETIPEHEHAVIDNKPLSEAVLETMIGEIPVSPALKESLATRFHQFFKELEANPNNEN

SEQ ID NO: 52626 - protein, 155 aa, Glycine max
  Clone ID: 700749034_FLI.pep
ILHSLYDNCMKYHIGVLVDKSLIQISDDRVTLHDLIENMGKEIDRQKSPKETGKRRRLWLLKDIIQVLKDNSGTSEVKIICLDFPISDKQETIEWNGNAFKEMKNLKALIIRNGILSQGPNYLPESLRILEWHRHPSHCLPSDFDTTNLAIRDLE

SEQ ID NO: 52627 - protein, 166 aa, Glycine max
  Clone ID: 700759039_FLI.pep
AGCIFAELLLRRPFLQGTSDIDQLGKIFSAFGTPTASQWPDMVYLPDYVEYQYVPAPPLRSLFPMVTDDALDLLSKMFTYDPKARISVQQALEHRYFSSAPLPSDPDKLPRPAPKRESRTSDFNLQEGPTVLSPPRKSRRVMPGRDGFEGSSLQADKVDASFGDFN

SEQ ID NO: 52628 - protein, 107 aa, Glycine max
  Clone ID: 700764716_FLI.pep
MQKELATQKKEAKMSQAELDKQAARQHNTAAKQAATAGHMGQPMGTHQTSAMPGHGTGQPTGHVTEGVVGSHPIGTNRGPGGTATAHNTRAGGNPNDYGYGTGGTYN

SEQ ID NO: 52629 - protein, 162 aa, Glycine max
  Clone ID: 700748929_FLI.pep
WSYGIVLYEMLYGTTPFKGANRKETFYRILTKEPELTGEKTALRDLIGKLLEKDPDRRIRVDEIKGHDFFKGVKWDMVLRIVRPPYIPENEVKNKVGFGKSDVEVFVDKVFFPTGDDGGREKTKMVLEKKDSNNNGENINNMVKVDELSHVPTEKIDDFLIF

SEQ ID NO: 52630 - protein, 121 aa, Glycine max
  Clone ID: LIB3039-021-G1_FLI.pep
AIGTLALCYNNIEVFRGVVKMRRGLTAKVIDRTTTMADVYGAFFDFASMLESKVDKNDPNATKALSRLEAIQKTCRESGLLSKRKSYIVKDESGYGSTMIIVLVIMVSIIFSYLSASHQNN

SEQ ID NO: 52631 - protein, 229 aa, Glycine max
  Clone ID: 700786129_FLI.pep
DFLLRLHIDGGCDSLTTFPLDIFPILRKIFIRKCPNLKRISQGQAHNHLQSLYIKECPQLESLPEGMHVLLPSLHDLCIIDCPKVEMFPEGGLPSNLKYMSLYGSYKLMSSLKSALGGNHSLESLVIGGVDVECLPDEGVLPHSLVYLEIRKCGDLKRLDYKGLCHLSSLKELLLVGCPRLECLPEEGLPKSISTLWIINCPLLKQRCREPEGEDWPKIAHIKRVSLLD

SEQ ID NO: 52632 - protein, 282 aa, Glycine max
  Clone ID: 700751756_FLI.pep
NIMAEFTSTTTNTNSNSGLRLKAKVAIVTGGASGIGEATARVFAEQGARMVVLADIQDELGNQVAASIGTQRCTYIHCDVADEEQVQNLVQSTVDAYGQVDIMFSNAGILSPSQQTVPELDMSQLDRLFAVNVRGMAACVKHAARAMLEGRVRGSIVCTASVGGSHGGPNATDYIMSKHAVLGLMRSASVQLAEHGIRVNCVSPNGLATPLTCKQRGMSEEEGQEVYRKYARLQGVVLTPKHVADAVLFLVSDDSAFVTALDLRVDGGFTLPSISISNSILL

SEQ ID NO: 52633 - protein, 179 aa, Glycine max
  Clone ID: 700753405_FLI.pep
ALWLLRFPAAGEMRLRAYAAAQGVQPDQIIFTDVAMKNEHIRRSSLADLFLDSPLCNAHTTGTDILWAGLPMVTLPLEKMATRVAGSLCLATGLGEEMIVSSMEEYEDRAVSLALNRPKLQALTNKLKAVRMTCPLFDTARWVRNLERSYFKMWNLHCSGQRPQHFKVTENDLECPYDR

SEQ ID NO: 52634 - protein, 256 aa, Zea mays
  Clone ID: LIB3068-001-D6_FLI.pep
DGLREHLLDVDGGGAAAVPKIRVRGLRRRADATGEEILRGVHLDVPRGAVMGVIGPSGSGKSTLLRALNRLWEPAPGAVLLDGADICALDVLALRRKVGMLFQLPAMFDGTVADNVRYGPQLRGKKLTEAEVKSLLHLADLDPALCSKPASELSVGQAQRVALARTLANDPEVLLLDEPTSALDPISTQNIEEAIVRLKKTRGLTTVIVSHSVKQIQRIADLVCLVVAGEVVEVLAPSDLSDAKHPMARRFLELSG

SEQ ID NO: 52635 - protein, 307 aa, Zea mays
  Clone ID: LIB3067-030-B4_FLI.pep
RRRAMAGALLSSPHTLPSPTSQSPFRPRSRGPLHAGAARVLPPRRRAFVLASCSREPAARNRGLEVERRRLLMSGLVSSFAIMLPISEAYAVMETDEDVKMNTQIDEINAYSFLYPVELPGKKFTFKWVESRKPERYSSAAPLSPDARQRIVSERVDMIHNVVISVSIGPPNSRFLPSKDKSSWDPKDVADCILSDRSTMKVTTGQRMTESSVLDAHVAEVDGEPYWYYEYLVRKSPTKSAPEPNLFRHNVACTAERDGYLYSLNASTLSKQWESMGPFLQKTVASFRLLPGTENYVPPYKDPWRFW

SEQ ID NO: 52636 - protein, 207 aa, Zea mays
  Clone ID: LIB3067-040-D4_FLI.pep
ALRSPRQHARAPNRVPYPIDPRRPPFPAILLEPTQLSGTFSLSPRSLPTEIPRRHGVVTAAEAASWSGSPSPPTTALSPLRRRRSRSRWSGGLRRSLASAPREKMCKMVINSTGRWPLRIGPVPSFPREIWSVRCVPERFSGTIPFVATGVRGSPGVPWAAKPNGSWLAFTVVWVLKRLTCSSRSKCYAQCLNRDSGLFITPYTSTC

SEQ ID NO: 52637 - protein, 66 aa, Zea mays
  Clone ID: LIB3067-051-D8_FLI.pep
LVGTYAMAQYKLVVQWAGDHAASNRNCKTCIIHKRYCFYRLTRKGGDHASMLLLLQPDTEGCHFFL

SEQ ID NO: 52638 - protein, 345 aa, Zea mays
  Clone ID: LIB3067-051-G7_FLI.pep
SGPKEGKKAGKRQEGGEAMASDGDGKGRVATAPGAGGYGYGYGYAGFEGEEDRKWWPWLVPTVIVACIAVFVVEMYENNCPKNRSQLGGDCVAGFLRRFSFQPLRENPLLGPSSSTLEKMGALDWNKIVHQNQGWRLISCIWLHAGLIHLVVNMLSLLFIGIRLEQQFGFVRIGAIYLLSGFGGSVLSALFLRNNYISVGASGALFGLLGSMLSELLMNWTIYSNKAAAIITLLFIIALNLAIGILPHADNFAHIGGFATGFLLGFVLLARPQFGWMEHHELPQTNQPPKYKAYQYILWVVALVLLLVGFVISLVMLFKGKNGNDGCHWCHYLYCVPTSKWKCNT

SEQ ID NO: 52639 - protein, 106 aa, Zea mays
  Clone ID: LIB3068-036-D7_FLI.pep
QNFTQDLPPARVRTVKNRRISYSEAIPLRGSTSNDTEHLKSFGSTKPVSSVVVSVLADPREAGDGDGEGRISSKSLSRILVVVLIDSVKYVTYSCVLPFKSHSPHL

SEQ ID NO: 52640 - protein, 157 aa, Zea mays
  Clone ID: LIB3068-050-A7_FLI.pep
GVQRGTVAFIRSVSIEAVGLGVHLAAGAHDILMKTEHALTTVPPPLASCEAKRTKHNIRANQPESAQQGMKQAYESLTVGFGRTASALIGNPIKVYNRGAGVGSVLATAICGAPAAAVAPVSASARALHYALLGLRNSLDPEHKKESMYKYQGPSQA

SEQ ID NO: 52641 - protein, 156 aa, Zea mays
  Clone ID: LIB3068-053-A4_FLI.pep
TPQEAGQSKFTPRLPSSGVGGESGDDGVLGLELGLPVGEDAELLVGEPGEVPGDVGLVLGHLAEGAAGLAAREDGVGAAGAVEAAAGGDVVDLAPDGDVDGLGRVGAVVRAQLRRRQLRRHRSPGKGVRVAGGAALGWCRWIVLPCWSHSQVATAN

SEQ ID NO: 52642 - protein, 238 aa, Zea mays
  Clone ID: LIB3069-004-D7_FLI.pep
HAALAGHRRAPGRGGRHAPAGVRGGRRAHGHVPHPGRRALLLALRRRAGLRRAVLAPVQPLVLLRGRAGARRRRRRRGGNAGAAQGGRQGRAGEAADRAVRVRGRGRPGRGAAGVRHLPRRVRARGRGPRAPALRTRLPRGLRRHLAPLHVHVPLLPHRPRAGAGAGAAGVRGPPDAVLRLRVGAGLGGAGRVPRTPPPPRRRRRRARTLPDVSTVGWRCPAASVQLTPTPCTYSPDY

SEQ ID NO: 52643 - protein, 99 aa, Zea mays
  Clone ID: LIB3069-006-B12_FLI.pep
MPSRTTTFSLIQLFRLSLRRLDQLLAEVPELLRQLLAPRQFARLLHVAVSKVLSCHSLELRAQSYVASSRSSLGYILPQYVSGNLKHLHENKGVPHQIG

SEQ ID NO: 52644 - protein, 138 aa, Zea mays
  Clone ID: LIB3069-026-G11_FLI.pep
HHRFLCFINSHFKMASAGLKPGVPVILRELEPSSEMFKQGASLRVTGSLQSFDVESATATIQDGSVSLKVDTQHLRDVSFRTNSVYQFIGELQIREVDDAILLARIGRNVDGLDMNLYQQALLIRRQHEAKLLSSRRA

SEQ ID NO: 52645 - protein, 273 aa, Zea mays
  Clone ID: LIB3067-046-E8_FLI.pep
VLSLARSLATTMKAATGSSSVSRALALLLAACLLWKEAACFSASGLNKAFATFYGGSDASGTMGGACGYGNLYSTGYGTDTAALSTALFNDGASCGQCYRISCDYQADPRFCIRGTSVTITATNLCPPNYALPNDDGGWCNPPRQHFDMAEPAWLKIGIYRGGIVPVNYQRVPCVKKGGVRFSINGRDYFELVLISNVGGCGSIQSASIKGSRTGWMAMSRNWGVNWQSNAYLNGQSLSFQVTSSDGQTKTFPDVAPASWGFGQTFATSQQFS

SEQ ID NO: 52646 - protein, 196 aa, Zea mays
  Clone ID: LIB3067-047-D10_FLI.pep
DASTSQALISSHVTNLPGLMNRSSNAIPSPGISNFQSGNIHYVVNQNAMGVSSKPPGVLKTESTDSLSCSYGYIGGSTSVDSGLFSSQSKNPQYGLLQNQNDVNGSWSPSQDFDSFGNSLGQGHPGTTSSNFQSSALGKLPDQGRGRNHGFVGKGTCIPSRFAVDEVESPTNNLSHSIGNSGDIVNPDIFGFSGHM

SEQ ID NO: 52647 - protein, 191 aa, Zea mays
  Clone ID: LIB3067-058-B10_FLI.pep
ADSLEAKELKKHCEDLAIRNLDYIFTVGASSIMNASSEILVNLEKLLDEKSSEPWSQHRLPTMTATYPAVIDSDVEEDEAREFPKTRKCGKSASRPSAMSSDDSFLQKDCTAEQAVSKQIRALRKKLQQIEILEAKQLAGHQLDSQQVAKLESRAALEGELAELGIPSEIYSTSSACPAEGRTNRKPEVSK

SEQ ID NO: 52648 - protein, 231 aa, Glycine max
  Clone ID: 700843710_FLI.pep
LCALDHLHSMGIAYRDLKPENVLVQNTGHVTLTDFDLSRKLNPKPKPNPNPVIVPSIPLPNSNVPQPRRKHRRNLSRWISFFPPDGTNNNNKNGLKKAKSAQVSPVSRRKPSFSSGERSNSFVGTEEYVSPEVVRGDGHEFAVDWWALGILIYEMLYGKTPFKGRNRKETFRNVIMKPPEFVGKRTALTNLIERLLEKDPTKRLGYTRGAAEIKEHEFFRGVQWELLTEVV

SEQ ID NO: 52649 - protein, 210 aa, Zea mays
  Clone ID: LIB3069-003-F4_FLI.pep
QVPWFTSNRLLASISTLILAVIQVCTVFSCRSPLQHSTNESAFFIISLSCTFPRFPQMCRFPFDEERGRGPAARGGETKRLLLRHGRVELQDFDRATNGPGAPFGAPGSRDPAHELGDPVLAAQWGHPEGPSRHEGEPVGRGAAHHDAVDGLLQAPDPDRLDRWGRGGGAVGRGASVFLGEIDLDDLDLGGEATEGSGCGGSGGGGGGAG

SEQ ID NO: 52650 - protein, 192 aa, Zea mays
  Clone ID: LIB3069-009-C2_FLI.pep
LNQLHADLVEVSKATELLTNGLTKQKEMLTMRTLVMKMMTKYGGKMRMEAMTIMVMEDQMSHRAQKMKIPSDKNELPTDKSDQPGHKQQNGQSLSNEGRDKSSSDIPPCSTIFIANLGHTCTEDELKEVLSKEPGFHVLKMRRRGGMPAAFADFMDIESSTAAMNRLQGTVLASSDNDGLHIEYARSKMRKS

SEQ ID NO: 52651 - protein, 165 aa, Zea mays
  Clone ID: LIB3069-021-F12_FLI.pep
LNHSFIAHVFRYQNCSAVSCSPQQHYNISTHITHAHKVLTPMSPTHNYTHQNPTGNNNLFHRVTWFGWGGFGTHQQKCQVVCKRNHACNLSTWRSGGPHYNTQQVGVHGYFQATKLVRASSTCCRVGSAGIAPLCVTVRAPQTFANFRASLNRPSSWSREKSVAN

SEQ ID NO: 52652 - protein, 287 aa, Zea mays
  Clone ID: LIB3069-034-A3_FLI.pep
ISCEHFGQLVFSLGSRLGGCGMGAKAEECEVPPLAANAEEAASTNQCTLIFKGCSNSMEKVYAISSPSKKRKSQYELSDPKLLPLKCKFRKRLYCQDDESATTESLGYDGIFMNKTSGTDMVSIPEELDSCENTISLFCGCIEVDSKNGIQEQSLRKMFEIRTSASSSSSNNFSSEAFSSSHSSGTRDTDSWAMDDIERHHPYVMLKPHNDDLERIFNVLEQYDDLMEDELMAGDVFGSAAQVMDEKLYSNSVDDFQILPTGQTGYHGEKKLTIDQEFEQYFANLML

SEQ ID NO: 52653 - protein, 352 aa, Zea mays
  Clone ID: LIB3069-043-F6_FLI.pep
NNEDSSGALTRGGFAGELQVQQVEQDELLPPPKLESSKSPDGGKSVSSFPNQGCFSQFFEGLDWMIPPSCYQDSNGIHSVTASDSIFNPSEGIPPSTMNADGMDAFQTSCLSECFPNSIQEFISSPDINTLTFMSPEMQHLDAQHDGSNLQSTSNSYVQMSFSEESQSASLSGLHMEAVHINSSCLQPLATGSFDAGTFSKLSNIKECQALPLQEIHSSSMGTPSCSMDAAAVEYCMDRSVKPLKPPVRTYTKVQKLGSVGRSIDVTRFRDYHELRSAIACMFGLQGKLEHPGSSDWKLVYVDYENDVLLVGDDPWEEFINCVRCIRILAPSEVQQMSENGVHVLNDCMQMA

SEQ ID NO: 52654 - protein, 175 aa, Zea mays
  Clone ID: LIB3067-030-F1_FLI.pep
VCHRATDYPAAAASAAAMASSLSRALLRRVAELARGRLRANHRMLSSASSTAAIERASQLPAEAQAVRMTEGCVRRLKELHAKKPSAEGKMLRLSVEAGGCSGFQYSFALDDKKNADDRFFETDGVRLVVDDISYNFVKGATVDYEEELIRSTFVVSTNPSAVGGCSCKSSFMVK

SEQ ID NO: 52655 - protein, 165 aa, Zea mays
  Clone ID: LIB3067-045-A3_FLI.pep
ASPSIFSVGFSSAKGSIALLSGSPASVPLLFFSLPTSPAISSFSLSCSSLPRMAAARVELLDSKNLATSSSKFTCDDPHAPASRPASDWRATSVRESPADSRKAATEATTAALAPGTGAAAAAAAPLATLALAFFFSFLDSSLAMAEEAAARGCDEAASTTWRGT

SEQ ID NO: 52656 - protein, 344 aa, Zea mays
  Clone ID: LIB3067-049-D12_FLI.pep
LLYSPVAMGKIKIGINGFGRIGRLVARVALQSEDVELVAVNDPFITTDYMTYMFKYDTVHGHWKHSDITLKDSKTLLFGDKPVTVFGIRNPEEIPWGEAGAEYVVESTGVFTDKDKAAAHLKGGAKKVVISAPSKDAPMFVVGVNEDKYTSDVNIVSNASCTTNCLAPLAKVIHDNFGIVEGLMTTVHAITATQKTVDGPSAKDWRGGRAASFNIIPSSTGAAKAVGKVLPDLNGKLTGMSFRVPTVDVSVVDLTVRIEKGASYEDIKKAIKAASEGPLKGIMGYVEEDLVSTDFLGDSRSSIFDAKAGIALNDHFVKLVSWYDNEWGYSNRVVDLIRHMFKTQ

SEQ ID NO: 52657 - protein, 163 aa, Zea mays
  Clone ID: LIB3068-028-B9_FLI.pep
SSSESGRREGTVKTDRRTGRQRVQPRERSAMGSFFSTLVTPPPAADDPNCAVVAAHSKATYDEQWAAHKSSSKLMVIDFSASWCGPCRFIEPAFKELASRFTDAIFIKVDVDELAEVARTWKVEAMPTFVLVKDGKEVGRVIGAKKDELERKIRMFVTSSSSS

SEQ ID NO: 52658 - protein, 132 aa, Zea mays
  Clone ID: LIB3069-035-B8_FLI.pep
LLGPDGEELRVLVVKEAVRVTEAITIGTLIDSYNASPAFLKPLISSGNPAGPFKFSEAEQEQMLELRDQVFRVWGLLRSSNNFDPSLLQPIVQVLQEPEARVLGSRVAGGVTQRLAARLLQQLLRIPSPGSS

SEQ ID NO: 52659 - protein, 246 aa, Zea mays
  Clone ID: 700572669_FLI.pep
KHIYSTSIRRYLLQLYFPFSSATWMHELREDAARGQLVRLHAGEAPSHHAQSRRRRRGGGRGRTVRGRLVRVKPGDDKRRRPVRGRRRRSVGDDDDAAAVLRAPLQLQRELEVPEHVGHGRPVDAAVRHALLRGLRELEEALRGDLPLQVRVDDLPEHALPLAVQRPVGQAHLLLGERGAQGGPRAQDLQQHDPERVDVRLLRQLLPPEVLRVEVPEAALHDRAHVGVVDVVGTRLGQPEVGNLGD

SEQ ID NO: 52660 - protein, 397 aa, Glycine max; identical to SEQ ID NO: 51429
  Clone ID: LIB3028-026-F9_FLI.pep

SEQ ID NO: 52661 - protein, 58 aa, Zea mays
  Clone ID: 700572455_FLI.pep
FRRFSYARRRPLTTHALLVCSCWTSYISICMILVLLLLNRDYNTCNCKEVCGHGSISL

SEQ ID NO: 52662 - protein, 175 aa, Glycine max
  Clone ID: 701203907_FLI.pep
DLVSILNEVKSTKTTGPVLLHVVTEKGHGYPYAERAADKYHGVTKFDPATGKQFKSNAATQSYTTYFAEALIAEAEADKDIVGIHAAMGGGTGMNLFLRRFPTRCFDVGIAEQHAVTFAAGLACEGLKPFCAIYSSFMQRAYDQVVHDVDWARLRIRERSNGLQKRASATVARKP

SEQ ID NO: 52663 - protein, 142 aa, Glycine max
  Clone ID: LIB3065-004-F11_FLI.pep
ATLGAHVTLTDLPHVVPNLRFNADANAAVVGPTGGVITVAPLRWGHAADVEAIGREFDLVLASDVVYHDHLYEPLLETLRLMMLSERNGKMVFVMAHMRRWKKESAFFKKARKHFNVDVLHTDTPCDGSRVGVVVYRFVAKG

SEQ ID NO: 52664 - protein, 267 aa, Glycine max
  Clone ID: 701212459_FLI.pep
DGLLDGNPPERLCMPIVDHIQSLGGEVHLNSRIQKIELNDDGTVKSFLLNNGKVMEGDAYVFATPVDILKLLLPDNWKGIPYFQRLDKLVGVPVINVHIWFDRKLKNTYDHLLFSRSPLLSVYADMSVTCKEYYSPNQSMLELVFAPAEEWISRSDEDIIQATMAELAKLFPNEISADQSKAKILKYHVVKTPRSVYKTVPNCEPCRPLQRSPLEGFYLAGDYTKQKYLASMEGAVLSGKLCAQAIVQDSELLATRGQKRMAKASVV

SEQ ID NO: 52665 - protein, 312 aa, Glycine max
  Clone ID: 700850494_FLI.pep
WMMLDWKPRRPDMLIDPFGIGKIVQDGLVFRQNFPIRSYEIGADKTASIETLMNHLQETALNHVKTAGLLGDGFGSTPEMCKKNLIWVVTKMQVVVDKYPTWGDVVQVDTWVSASGKNGMCRDWLVRDAKSGEILTRASSVWVMMNKVTRRLSKIPEEVRAEISSYFVDSAPVVPEDNRKLTKLDDSANFIRTGLSPRWNDLDVNQHVNNVKYVGWILESAPQPLLESHELCAMTLEYRRECGRNSVLDSLSDLSGADVGNLADGGFFECKHLLRLDDGAEIVRGRTQWRPKPLSSNFGHVLSQVPVPAEST

SEQ ID NO: 52666 - protein, 76 aa, Zea mays
  Clone ID: 700573080_FLI.pep
FIQRLEWEGTGTQLLVKLLTGGTATRCCVRCLQITSLGTDHYSLGRWNKSLFVPALFVSVFLQRWRCRIENKSIFC

SEQ ID NO: 52667 - protein, 143 aa, Glycine max
  Clone ID: 700833677_FLI.pep
GRPAVDPQLAREQVNLAEWGLEWLQKGMVEQIVDPHLVGQIQQNSLKKFCETAEKCLAEYGVDRPAMGDVLWNLEYALQLQESGQQREPHANRHASEEFVSVTNAIIPGNPSTNRRTERDHYNCSSDVSTSQVFSQLMNNEGR

SEQ ID NO: 52668 - protein, 51 aa, Glycine max
  Clone ID: 700844834_FLI.pep
RSKSYLTSRPYGKFLWILYDICILAVGRLVQYLYLNYLCLVSTTKESDHIS

SEQ ID NO: 52669 - protein, 91 aa, Glycine max
  Clone ID: 700843866_FLI.pep
AHGLFTSPGRRNPAHSPPAIAVYISANDFRAFFLYIFQILIFVLTCCSDIFHKDKVSFFVNDNCLACVRVTDLNICCNFRILCLRVWLRDN

SEQ ID NO: 52670 - protein, 106 aa, Glycine max
  Clone ID: 700843978_FLI.pep
VYAASKAAINQLTKNLACEWAKDNIRSNCVVPWATRTPLVEHLLRDQKFVDDIMSRTPIKRIAEPEEVSSLVTFLCLPAASYITGQVICVDGGLTVNGFQPSMRIT

SEQ ID NO: 52671 - protein, 536 aa, Glycine max
  Clone ID: LIB3056-010-G10_FLI.pep
NSFLISINPMDSPNALSTAPAAGSRKNATLICVPIMGESVEKMEIDVDKAKAGGADLVEIRLDSLKTFDPYRDLNAFIQHRSLPLLFTYRPKWEGGMYDGDENKRLDALRLAMELGADYIDIELQVAHEFYDSIRGKTFNKTKVIVSSHNYQLTPSIEDLGNLVARIQATGADIVKIATTALDITDVARMFQIMVHSQVPFIGLVMGDRGLISRILSAKFGGYLTFGTLESGVVSAPGQPTLKDLLYLYNLRQLAPDTKVFGIIGKPVGHSKSPILFNEVFKSIGLNGVYLFLLVDDLANFLRTYSSTDFVGFSVTIPHKETALKCCDEVDPVAKSIGAVNCIVRRPTDGKLIGYNTDYVGAITAIENGLRGKHNGSSTTISPLAGKLFVVIGAGGAGKALAYGAKAKGARVVIANRTYDHARKLAYAIGGDALALADLDNYHPEDGMILANTTSIGMQPKVDETPVSKHALKYYSLVFDAVYTPKITRLLKEAEESGATIVTGLEMFMGQAYGQYENFTGLPAPKELFRKIMENY

SEQ ID NO: 52672 - protein, 178 aa, Glycine max
  Clone ID: 700740020_FLI.pep
LYLYCYYVAGTVGLMSVPVMGIAPESNASSESIYNAALALGIANQLTNILRDVGEDARRGRVYLPQDELAQAGLSDDDIFRGRVTDKWRKFMKGQIKRARMFFDEAERGVAELNSASRWPVWASLLLYRQILDSIEANDYNNFTKRAYVGKVKKLLSLPTAYGFSLLGPQKFTKMVRR

SEQ ID NO: 52673 - protein, 359 aa, Glycine max
  Clone ID: LIB3056-002-C2_FLI.pep
KAMGSLEAERTTVGLAARDPSGILSPYTYNLRNTGPDDVYIKVHYCGICHSDLHQIKNDLGMSNYPMVPGHEVVGEVLEVGSDVSRFRVGELVGVGLLVGCCKNCQPCQQDIENYCSKKIWSYNDVYVDGKPTQGGFAETMVVEQKFVVKIPEGLAPEQVAPLLCAGVTVYSPLVHFGLKESGLRGGILGLGGVGHMGVKIAKALGHHVTVISSSDKKKQEALEHLGADQYLVSSDVTAMQEAADSLDYIIDTVPVGHPLEPYLSLLKLDGKLILMGVINTPLQFVSPMVMLGRRSITGSFIGSMKETEEMLEFWKEKGLSSMIEVVNMDYINKAFERLEKNDVRYRFVVDVKGSKLVD

SEQ ID NO: 52674 - protein, 175 aa, Glycine max
  Clone ID: LIB3029-011-F2_FLI.pep
GDSWFNCQKLHLPENCGYEFQMQYGSIGWSVGATLGYAQAATDKRVIACIGDGSFQVTAQDISTMIRCGQKTIIFLINNGGYTIEVEIHDGPYNVIKNWDYTRFVDAIHNGQGKCWTAKVRTEDDLTEAIAKATGPQKDSLCFIEVFVHKDDTSKELLEWGSRVAAANSRPPNPQ

SEQ ID NO: 52675 - protein, 244 aa, Glycine max
  Clone ID: LIB3028-015-A6_FLI.pep
DSAKINYCKGTSFFETTLMITCASKIAKMQSLLLGGSLCDLGSGGVFLLNTLDDSNSYGLTHVPHSKTTKGRILRESFNHHGLGWNHLNHTSITILQKFGLLLKLLTRSPVNLGQDFRKLHSNVRSVAVKDWCVSITNLARMVHDNDLGCEVGSFLGRVVLGVGCNKTTLEILDCNILHIKSNIVTWKSLCESLMVHLNRLNLSCQPSGTKSHHHTRLHNPSLYTSHWHSTNTTNLVDILQWKP

SEQ ID NO: 52676 - protein, 176 aa, Glycine max
  Clone ID: 700841043_FLI.pep
AKSRIYKDPALRYVFLMNNGRYIVQKTKDSELGTLLGDDWIRKHAAKVRQFHVHYQRCSWTKVLGILKLDSNGSSLPPNGLAKSMKETLKLFNTVFEETCREHSSWFVFDEQLREEIRISLEKILLPAYGNFVARFESVAELGKNADKYIKYGTEEIQATLNGLFQGSSGSTGSRK

SEQ ID NO: 52677 - protein, 186 aa, Zea mays
  Clone ID: 700343477_FLI.pep
VGRYKSPDEHPFFSKDLPEPRLPPMQYPRVLHPIADSININKEIWKMYFDELLPRLVKEGSDGNAGSSALCDTTCLQALSRRIHYGKFVAEAKFQESPEAYTPAIIAQDRDQLMNLLTYETVERAIEHRVEAKAKIFGQEVNIGAKDNGSPPVYKIRPSLVAELYSYRIMPLTKEVEVAYLLKRLD

SEQ ID NO: 52678 - protein, 168 aa, Zea mays
  Clone ID: 700343673_FLI.pep
WWGVVEREGPGRYDWEAYAELVRMVERAGLRLQAVMSFHQCGGNVGDTCNIPLPPWVLEEMSSNPDIVYTDRSGRRNPEYISLGCDTLPVLKGRTPIQVYTDYMRSFRERFRDYLGNVIAEIQVGMGPCGELRYPSYPEANGTWRFPRHCRWMLMPVRAHRHMRRAVV

SEQ ID NO: 52679 - protein, 93 aa, Zea mays
  Clone ID: 700343788_FLI.pep
FRMVEAAAACIRHSASRRPRMSQVVRVLDSLAEVDLTNGVQPGKSEMFNVANTAEIRMFQRMAFGSQDFRTDFSQSSWSSQSRGLDASGSRPL

SEQ ID NO: 52680 - protein, 104 aa, Zea mays
  Clone ID: 700344346_FLI.pep
ICVNLKNVNPKSCTRRFSRGSVESNHVLREIASPELNILEDKVHDDSEDSPSLSFSEIQRKWKEELDQELKREREMRSGGYGKAPSPSSTSRRLTGKRDRSPVY

SEQ ID NO: 52681 - protein, 76 aa, Zea mays
  Clone ID: 700345381_FLI.pep
CLHHLRKKGSYCETRDICTISLLYQASVLIMIPMDMWLSITQMLIQMFSSFLGTVAHVAARGCSYTGTQIQGSELQ

SEQ ID NO: 52682 - protein, 230 aa, Zea mays; identical to SEQ ID NO: 50035
  Clone ID: 700345191_FLI.pep

SEQ ID NO: 52683 - protein, 144 aa, Zea mays
  Clone ID: 700344060_FLI.pep
ACWTGPRCVLPMINQSITNSNHTNQQLNIQRAFGSLFKGWSEEKIYFAPTYKYSCNSDSYAGETATSKKKRRTPAWCERILWHGDGIAQLSYFRGGSQFSDHRRVCRTFTVEVKRLDGRSMRRPSNTNIRIDAEELLPTRDKHN

SEQ ID NO: 52684 - protein, 242 aa, Zea mays
  Clone ID: 700344603_FLI.pep
GGVRRVLEAWRLGVVKYGEALQLQERLVADRKAGRVGDLVLSLQHPPTYTLGKRREKAERNLLAPEADLRALGAEIHRTERGGDVTFHGPRQAVLYPLLSLRTLGLGARRYVEGLESAMIQVAALHGVSARPGDPGETGVWVGDRKIGAIGVRISSGFTWHGLAFNIDPDLEYFEHIMPCGIAGKGVTSLRREVGDGAELPADGVIHDQLVGCLATTLGFTDVEFKDDSERGDLIGVTASQY

SEQ ID NO: 52685 - protein, 438 aa, Zea mays
  Clone ID: 700344725_FLI.pep
TRPRASPLSRPPPPMDAGNGCSARALAACVVGGIVLGASVLALHLAGGPAAIPPLPLPPPIGALLRRRRRRRPVRVYMDGCFDMMHYGHCNALRQARALGDELVVGVISDDEIKANKGPPVTPLHERMVMVRAVKWVDDIIPDAPYAITEEFMNKLFNEYNIDYIIHGDDPCLLPDGTDAYALAKKAGRYKQIKRTEGVSTTDIVGRMPLCVRERSSDAHNHSSLQRQFSSGHGQKVDDTGSGTGTRVSHFLPTSRRIVQFSNSKGPGPDSRIVYIDGAFDLFHAGHVEILRLARELGDFLLVGIHTDQTISATRGRHRPIMNLHERSLSVLACRYVDEVIIGAPWDVSKDMITTFNISLVVHGTIAENMDFTEDDLHPYAVPMAMGIYRRLESPLDITTSTIIRRIVANHEAYQKRNEKKEASEKKYYEGKSFVNGE

SEQ ID NO: 52686 - protein, 65 aa, Zea mays
  Clone ID: 700345914_FLI.pep
YFIYCLHMVCVLLMMAHGSCKICVRIWISMRALPQSTGCSSLVFLALASIRSFLKPHWQNELYGV

SEQ ID NO: 52687 - protein, 268 aa, Zea mays
  Clone ID: 700346343_FLI.pep
PIFSSFAMDMSNRDHLRRREEDDDDLFLFILPSLHLLGYLGRSKKKLRHTSALTGEEKVRELLEGHIKNYRVSFRMEPYIFKSLANYLRMEGLVKDTRIKVEEKLGFFLYMISHNATFEDLQVFFGHSNDTFHRVIKHFFDIVIPGLSMRFLKPPSNQVHPKIHGDNRFYPYFKNCIGSIDGTHVPVSMSPDQAAPFRNRLGVVVLGSLQLTGNIGHMETVLHSVLSADMSYIYVAFLHVWAQHVIELKEGCCETCMTCLNFWIKSSI

SEQ ID NO: 52688 - protein, 223 aa, Zea mays
  Clone ID: 700346619_FLI.pep
KHTMAPERMLLGVCAVLMVVGVTNAAEGQVASVVVGLARCADSTRKNMKAEAGFKGLQVAIKCKNSNGEYETKAVSEIQSSGAFSVPLAADLHGADCHAQLHSAANNAPCPGQEPSRIAPMSGGTFVAVPGKMHYPSAECASAFLCSPIKKHLLDHFHKAPLPVPEYHPVPDHSKPPVPEYHPVPEHSKPAPEYHPPTPEYHPPTPVYGQPKPTPIYHPPAEH

SEQ ID NO: 52689 - protein, 94 aa, Zea mays
  Clone ID: 700347009_FLI.pep
KKHSASICDLKSAESAAFFYRFYTRNVSTCAGIEWTSEQLPFQLTVYSQSSKRVRISWQLGRFSGSAQQSAINLPRGPSGISSREPSLATAYTT

SEQ ID NO: 52690 - protein, 378 aa, Zea mays
  Clone ID: 700349253_FLI.pep
KGRLGGLSYFAGAEKKDDRVLVPDLGSLTSIHDRARELFYYLKGGQVDYGEEHSKVCGHNRFGRIYHTGHYPVWDEHNPVHFVGHSAGAQVVRVLHQMLADKAFPGHDTSEDWVVSLTSLSGALNGTTRTYYDGMLVVDGRSMKSICLLQLCRLGVIVYDWLDIPWLKNYYNFGFDHYEMSWRKVGFSGLINLLLGHTGPFASGDWILPDLTIQGSMKLNSTLRTFPNTFYFSYATKKTRKIFGITVPSSVLGVHPILFLRVLQMCMWRHPQNAPLPYKGYRDEDWEDNDGALNTISMTHPRIPIEHPHHFVVDDSDCHPLQPGIWYYKIIEADHILFIVNRERAGVQFDLLYDGIFQRCRKHAFRKSPPTVPNETSR

SEQ ID NO: 52691 - protein, 171 aa, Zea mays
  Clone ID: 700349578_FLI.pep
HYISTAGMEASGTSNMKFAMNGCILIGTLDGANVEIREEVGEENFFLFGAEAHEIAGLRKERAEGKFVPDPRFEEVKEFVRSGVFGTYSYDELMGSLEGNEGYGRADYFLVGKDFPSYIECQEKVDEAYRDQKLWTRMSILNTAGSSKFSSDRTIHEYAKDIWDISPAILP

SEQ ID NO: 52692 - protein, 108 aa, Zea mays
  Clone ID: 700351225_FLI.pep
LGGWMFSPHVAIRNKQQPSGTSSYMPTTKNSRLQNLKAIQDDCSFCFTCFASNRCSSFPLFVHESNTLLNACLQLGLQRLKCLGLILSHSLEVGRNDGLNTILAQLDS

SEQ ID NO: 52693 - protein, 156 aa, Zea mays
  Clone ID: 700351266_FLI.pep
DRSLEPRVSDFGLARLLVDSAAHVTTVVAGTFGYLAPEYLQNGHATEKSDVYSFGVLMLELVTGKRPTDSCFIKKGLNIVGWLNTLTGEHRLEDIIDERCGDVEVEAVEAILDIAAMCTDADPGQRPSMSAVLKMLEEEILSPCMSELCYEQHLEL

SEQ ID NO: 52694 - protein, 152 aa, Zea mays
  Clone ID: 700351705_FLI.pep
EPIKSNLKVVNRHNHDTISMAVIDKMGHIAVGTSTNGATFKIPGRVGDGPIPGSSSYGDDEVGACGATGDGDIMMRFLPCYQVVESMRQGMDPRDAATDAISRIARKYPDFIGAVFAVNKEGVHAGACHGWTFQYSVRNSSMQDVEVITVYP

SEQ ID NO: 52695 - protein, 70 aa, Zea mays
  Clone ID: 700352693_FLI.pep
KTRFTWICTHLFSLADERIMQERLLNLNEMLSPPHLAIVAGPQHSNGQATARWPCTGRRSRTWSGTCGCS

SEQ ID NO: 52696 - protein, 302 aa, Zea mays
  Clone ID: 700353002_FLI.pep
EVQVGMGPGGELRYPSYPTEKLNQPGSSSELGEFQCYDKFMQASLSARAQIFGLQQWGNGGSTGTDGSQQNLEETSFFRTDGGYWNTPYGHFFLKWYSGMLLLHGERLCMIADAIFSGTGVTISGKVAGIHWHYYTCSHPSELTSGYYNTLLRDGYLPIAQMFAKYKATLCCSCFDLRDAERTNSESSPEGTLRQLAGAAKMCNLPLNGENSATRLDDASLNQVIRSSRLYSGCTSGTSFSFNYVRMNKSLFEFHNWNRFTKFVRQMSDARTFLARLYVRRGQQYLSSMSVVWVVSRACAYT

SEQ ID NO: 52697 - protein, 300 aa, Zea mays
  Clone ID: 700353236_FLI.pep
RRLRPGLRGPRPLRRAAGLRAGFRRAGAGLRRVLHLGGGGGGAVAVQGRPPTSPVPARGVHGRRRGSPPPPPAPRVLERRRAGGAHVQDRRRHAASPAGGQHPQGHDHHHPDVEDRAQQRRHRRGVQEPGEEGRDPQQPLLLQGQAATQDRLRAAQSQLGPRAQPPPPGVVAVPDRARRGRQGDGPVGERAAVPIGGEPGQDAQVLSGHVARPHLWRVARQHPSRFPRHHRLARPQITRHGTGGAGVVGGGAEGQARRPAPPGAAPGRQQIASCLLACCFLLFTERTVSFGHAWIHIMSQ

SEQ ID NO: 52698 - protein, 149 aa, Zea mays
  Clone ID: 700353539_FLI.pep
RTFIAIKPDGVQRGLISEIVNRFERKGYKLVAIKLIVPSKGFAEKHYHDLKERPFFNGLCDFLSSGPVLAMVWEGEGVIKYGRKLIGATDPQKSEPGTIRGDLGVVVGRNIIHGSDGPETAKDEIALWFEPKELVSYTSNAEKWVYGVN

SEQ ID NO: 52699 - protein, 120 aa, Zea mays
  Clone ID: 700353843_FLI.pep
VDERWVSRQRKGRTSDAVLSCPACFTTLCLDCQRHEKYVNQYRAMFVRNCKIKTDQVLREGKSKRKKRRGGSAGDPAAASEGESKGQSYHPVCCEVCSTEVGVLDEDEVYHFFNVIPSNS

SEQ ID NO: 52700 - protein, 177 aa, Zea mays
  Clone ID: 700353959_FLI.pep
QYVNHGINNMLITRIKKGAAQLPDPTLEVLGGLVRFAELPVAGRDVPGGSLAVVGGHDAERQRLAGEVDLRGPELAPAALHRRPLDALVALHPQRHHVPGAAHVGHLHLAVVLVPCDRVPDAAFPLARHLAVGDGHDAGLLLGDLEERRYGEVKVLALLPAHRRRGLVGGRHHHGAL

SEQ ID NO: 52701 - protein, 83 aa, Zea mays
  Clone ID: 700354921_FLI.pep
MSKSIWRQCGVGFPRGRNIVGCRSQGTPDILRQTVARCPRAAPRSSSGWSSSGTIMWQRRCPGLRTYMLLTPTLNIAVVSACF

SEQ ID NO: 52702 - protein, 105 aa, Zea mays
  Clone ID: 700355774_FLI.pep
STSTFNDLAPSKTNPASNSLFQEDIEALTKKTQDGGTKVVEAKAGKGLCNIVYGISLEHMNRCHCQHVYWLHYRISCLFISLLEFYDYFLLCFVTIQSVDASCLH

SEQ ID NO: 52703 - protein, 236 aa, Zea mays
  Clone ID: 700357140_FLI.pep
LQQISHRPFIHSLTHNLPVSFPFAQAAAPAMVLSLPVAAVDGGVHAALSVLDEIVRAWQAAGEAELVGLGSHLGGDARGDGADVGEGREDEPLGEVLLGYLLRQRLRGGQQHVVADADGAGDDDAEAEPREDVGVVGLPRHQHLAVQLHAVEGAAAREHRAALGPGVGLLRRALRVRGRVRQREDDRLLVLGRHRLHHLLGEGAALARGADQHRRLQGLHGLQQGRHGLVLVRPWL

SEQ ID NO: 52704 - protein, 87 aa, Zea mays
  Clone ID: 700377471_FLI.pep
CSTNHYDTITPVIGFRQSDKKNLFSEALPGKKHNSLCMLSSLFACFHQFVHLLGDVHVADQVDHSGAVSPLVVVPGHKLHKVAVQSN

SEQ ID NO: 52705 - protein, 63 aa, Zea mays
  Clone ID: 700377840_FLI.pep
KILFKLFFPGGTSSMQHKRLTSSAPLLSSLVGILGQEVRYLRGTFIRALNASAQGNSCNIVPS

SEQ ID NO: 52706 - protein, 112 aa, Zea mays
  Clone ID: 700378722_FLI.pep
WSLISAYDSGELGQALAEGRDGWQKWVKGFGKSIKRKGKGLFMPLRVLLTGKLHGPDMGGSIALIHKAGVCCAVTPQSNFVTLDERFRMLKDVDWESLAKEQETPAVPAAAS

SEQ ID NO: 52707 - protein, 77 aa, Zea mays
  Clone ID: 700379562_FLI.pep
GVGAVKGGGSNSMGGAGSGNSGGGVAGHGDGAGKSGSGGDGMMKAPGGGGYIPRSYFEANPKEFFQGLHQQGGGGKK

SEQ ID NO: 52708 - protein, 162 aa, Zea mays
  Clone ID: 700381459_FLI.pep
SQVIGMHFFNPPPVMKLIEIIRGADTSDEVFAAVRSFSERLGKSVICSQDYPGFIVNRILMPMINEAFWALYTGVATKEDIDAGMKLGTNHPMGPLQLADFIGLDVCLSVLRVLHSGLGDSKYSPCPLLVQYVDAGRLGKKRGVGVYSYGHRPSSVRPKSSL

SEQ ID NO: 52709 - protein, 104 aa, Zea mays
  Clone ID: 700381585_FLI.pep
IYPNSLSFLVMKPLLCLQGLASKPLGICSSTAASLPEYAITSLYDSSPLSEHKSRGNYAAFRVWSPYCSYCCDGPCDFESCFNFCSLIGCGFKMNELNIQNMFA

SEQ ID NO: 52710 - protein, 188 aa, Zea mays
  Clone ID: 700382180_FLI.pep
SGGAKVGGGVGGNAGGSGKAYTGTGADAGVSGGGSGGVDAGVSGGAKVDGNIGGKAGGSGNAYTGADAGTSVSGGGSGGASAGTSATVGAGVSGGAKVGGGVGGNAGGSGNVYTGTGADAGVSGGGSGGADGGIGANIGAGVFGGVKFGGGAGGSVGGSGSAAAGASGGSKSSGGGSDFGYGSASKEL

SEQ ID NO: 52711 - protein, 194 aa, Zea mays
  Clone ID: 700382715_FLI.pep
ERCLLACMRASTNRNKCAICIWDFFLKKKRARELLFGRLGILGRLVVEVVGAEQLAAVGERLLAEEGDGVGVADAALLDAVVAGERDAAAVAGVVDLGAVRLGALEQAHVADLVLVVAADLHPVPAAGARRRLRLVVDLLRLEVAALHLHRRALDGVGHVCLEPGAAVVAVDAAGDDKPNAGSGGYGRGHEDQR

SEQ ID NO: 52712 - protein, 82 aa, Zea mays
  Clone ID: 700422831_FLI.pep
YRRIRSQSYLPHYKGSRTCCARVQAQGGSRVLQSLAGRREVLRRPGPLQISQAFSYSSLIGQLLCAWTQSRCMQIRSVHSAV

SEQ ID NO: 52713 - protein, 217 aa, Zea mays
  Clone ID: 700422989_FLI.pep
RVVVPRPRPHQVGGAGAVGVAALVVGDGEHSVGRGRPPLITGHHRHRRRRDEEAATATATLGGGWLRCRNLLLIVTERKHRKQIIVVVVVVVLQVVKDLIGRWPVTSACRVIGKIHLRFLAADLASFGVVCPSCLLGGVVGSEPDADALVRVPDLSCPFAPRPLPDSPVLVLPAALFYCSISLDILWRRSHHAINCRLGRGGEGKPRRLRRRKLLDL

SEQ ID NO: 52714 - protein, 139 aa, Zea mays
  Clone ID: 700423404_FLI.pep
TRRRARAPSSRTASTWRTSGPASRRTRTGCAARPSTCWRWRTCWARTPPTTSTSTSASSPPSCTTTSTSSSPPPKTSRPSSTSPTASSTASRRSRRPSQPRTTPGSATATPRQSSSSRSSWPRWPSRTTIFHSYIMMCK

SEQ ID NO: 52715 - protein, 54 aa, Zea mays
  Clone ID: 700423342_FLI.pep
CCCATCNSTTKQTGSTTPSSRPSPRGSTGLLILVERHRHQSLQTQSVITSEKRM

SEQ ID NO: 52716 - protein, 81 aa, Zea mays
  Clone ID: 700423938_FLI.pep
LCLSPIRSGCLSLRHACCRCNRKQNNSYGMLFWLELGSQYMEKEDSTKGWSVPLLVNLPKHRQSGSNLARRGSQSTCPSSS

SEQ ID NO: 52717 - protein, 156 aa, Zea mays
  Clone ID: 700423970_FLI.pep
KWTCSSSSIGIKGTIGYIPPEYGVGGHASTCGDVYSFGIVLLEILTSKRPTDPMFEDGLNIINFVENNFPNQIFQVIDAHLLEECRNSTQGNNLVQENEIYQCLVDLLQLALSCICPLPSERLNMKQVASRMHEIKKHHILGGSTSNNSKGDRSRI

SEQ ID NO: 52718 - protein, 204 aa, Zea mays
  Clone ID: 700427304_FLI.pep
GGNDLQPGIRRPDHLLQEGDEGQVRERDELLRLPLHHVAGDPPALRRRHGGAQGVGSGLADSSRRDRSQLRLVGGGAERVLPPVQPGVLHVPGRDLAAHLLHRQHHEADLRHRRVHHHLPDARPAHQRARGRHRHPRNLHLLPGQAVAALGARVWLSGLSSVHRRISSALEDITDYITFEDIYLACIIVLLLDPLFFFSVFSFS

SEQ ID NO: 52719 - protein, 291 aa, Zea mays
  Clone ID: 700451080_FLI.pep
SDPFSDMSLEIEDLIIPWSELVLKEKIGAGSFGTVHRADWNGSDVAVKILMEQDFHPERLKEFLREVAIMRSLRHPNIVLLMGAVTQPPNLSIVTEYLSRGSLYRLLHRHAARENLEERRRLSMAFDVAKGMNYLHKRNPPIVHRDLKSPNLLVDKKYTVKVCDFGLSRLKANTFLSSKTAAGTPEWMAPEVLRDEPSNEKSDVYSFGVILWELMTLQQPWSNLNPAQVVAAVGFKGQRLEIPSSVDPKVAAVIESCWVREPWRRPSFASIMESLKLLIKTLPPNQLLEEN

SEQ ID NO: 52720 - protein, 196 aa, Zea mays
  Clone ID: 700453413_FLI.pep
ATVYACRNSVAGWWYFTRACPEPSSTSSTAASPSAASAPLSRSLYAVKPSSTGAPSADRGSRSGTGGSVTALADADAAAFFLRAPRFLGPTRDLIRSTRSSKSSSAVAVLVAAGAGSWSAAAAVSSPEEAARGGNGSSSSRARCRRGERRAVGAKGLESGVAIAPLGECTHQHFMARARARACSLRLGLPLVLDRV

SEQ ID NO: 52721 - protein, 114 aa, Zea mays
  Clone ID: 700453648_FLI.pep
EYEILPRHGEIWAVYKNWEAVWTAQDFEKCEYELVEILGHTDSSIQVQLLRKVDGYKMVFMSYRAEGSVMTIRNDEYPKFSHQIPCFRLTHEKGGKLRGYLELDPLSVPEEFLD

SEQ ID NO: 52722 - protein, 182 aa, Zea mays
  Clone ID: 700454037_FLI.pep
AVAHRLSKEVKPVAIYSSDLKRAAETAQTIARICNVPNVVFDPALRERHIGDLQGMTLQDAATERPEAYKAFMSHKRNQQVPGGGESLDQLSERCVSFLYDIVGKHKGERVILVSHGGTIRELYRHVSPTKPLHGKIHNTSVSVILVSDATGRCIVKMCGDVSHLQETGVLENAFGGDKTSA

SEQ ID NO: 52723 - protein, 124 aa, Zea mays
  Clone ID: 700454413_FLI.pep
FMGWTASTSCVGAVVKTIYQTGVDVIGLDWTVDMTDGRRRLGNGISVQGNVDPAFLFSPLPVLTDEIHRVVKAAGPKGHILNLGHGVLQKTPEEAVAHFFDVTRRLRYDTLFQGSVAEELHHVA

SEQ ID NO: 52724 - protein, 86 aa, Zea mays
  Clone ID: 700454550_FLI.pep
SSSGTVVVEAKPCLTGHLTPPATRPPRRILEDASYHQRVFPSPRHHQALTEWLRFPWQVGRSPLRRRYQLDSPRLQGPEAPPPTSS

SEQ ID NO: 52725 - protein, 155 aa, Zea mays
  Clone ID: 700458652_FLI.pep
IETRYMLLLKSFQASSKLLRRLGLVGRLDEARNFSVHHPPRPPVEFGWHDRHRLAGVILPVLLLVELLGDGGPDDAGVEGGDVGADEWREGARRAVGLHHVPQHRLLPLVELPVRVPPPEPARHRSHLLLPLLPSQYHPCLRSRDLAAGGPVLET

SEQ ID NO: 52726 - protein, 132 aa, Zea mays
  Clone ID: 700468053_FLI.pep
QEPPPPRKATSTPSLLGAQPMVAAKKTKKSTDNINNKLQLVMKSGKYTLGYKTVLRTLRNSKSKLVIIANNCPPLRKSEIEYYAMLAKVTVHHFHGNNVDLGTACGKYFRVCCLSIIDPGDSDIIKTTPGEQ

SEQ ID NO: 52727 - protein, 377 aa, Zea mays
  Clone ID: 700471870_FLI.pep
GATKMAPTTATKDDSGYGDERRRELQAFDDTKLGVKGLVDSGVKSIPSIFHHPPEALSDIISPAPLPPSPPSGAAIPVVDLSVTRREDLVEQVRHAAGTVGFFWLVNHGVPEELMGGMLRGVRQFNEGPVEAKQALYSRDLARNLRFASNFDLFKAAAADWRDTLFCEVAPNPPPREELPEPLRNVMLEYGAAVTKLARFVFELLSESLGMPSDHLYEMECTQNLNVVCQYYPPCPEPHRTVGVKRHTDPGFFTILLQDGMGGLQVRLGDGQNGGCWVDIAPRPGALMVNIGDLLQLVTNDRFRSVEHRVPANKSSDTARVSVASFFNTDVRRSERLYGPIPDPSKPPLYRSVRARDFIAKFNTIGLDGRALDHFRL

SEQ ID NO: 52728 - protein, 218 aa, Zea mays
  Clone ID: 700474549_FLI.pep
RNRRAFMVTEGRNRKKKQENQMKLEAKLHNLQIEWNGGSDTMDEILARIQQREEAAVKRERAMAYAFNHQWRARSATSLGNFSYEVGKGGWGWSWMDRWIAARPWEPRSMVHPENPKKAQAKKENTTNPSALKLQGSITLSNNINDRKTLKKKPLPSASPADQKKPSPSPSSDQKKPVPKEQRAKAAGTPPKPKAKDMKGSQEKKPQPQQKVPPPVSA

SEQ ID NO: 52729 - protein, 200 aa, Zea mays
  Clone ID: 700475325_FLI.pep
TSFPAKRLTRILDPNPMTRITIPEILEDEWFKKGYKRPEFDEKYDTPLDDVDAVFNDSEEHHVTEKKEEEPVALNAFELISRSAGLNLGNLFDSEQEFKRETRFTSKCPPKEIIRKIEEAAKPLGFGVQKKNYKLRLEKVKAGRKGNLNVATEVAPSLHMVQVRKAKGDTLEFQKFYKNLSKTLKDVVWKSEDLQMRAAS

SEQ ID NO: 52730 - protein, 90 aa, Zea mays
  Clone ID: 700552159_FLI.pep
ASVSRKGGAVTCHCDIDYSATQVTLSYKYVTLHLQQQARMPQIVKHPRGNAQLQPQVPVSRRGHFTIQHRSIASLHVLESISRQCLMGLL

SEQ ID NO: 52731 - protein, 365 aa, Glycine max
  Clone ID: 700555604_FLI.pep
SLSSDPSSKDTEKGIQRFTQSFVPGVHLFTYDELEEATNYFDSSKELGEGGFGTVYFGKLRDGRSVAVKRLYENNFKRVAQFMNEIKILANLDHPNLVTLFGCTSRHTRELLLVYEYIPNGTIADHLHGQRSKPGKLSWHIRMNIAVETASALKFLHQKDIIHRDVKTNNILLDNNFCVKVADFGLSRLFPDHVTHVSTAPQGTPGYVDPEYHQCYQLTKQSDVYSFGVVLVELISSLPAVDITRHRQEIKLSDMAINKIHSEALHELVDPSLGFESNFKVRKMINAVAELAFQCLQSSKEMRPSMEEVADTLKDIQSDGKHKSQPEVMDITSTADDVVLLKDDPPPPSPDSNAVSKLTTPNASG

SEQ ID NO: 52732 - protein, 386 aa, Glycine max
  Clone ID: 700555748_FLI.pep
MGSVCEERWITVTITTVALVIASSAPLLLAACPYTSIFSFGDSLADTGNLYFSPYPPTNHCLFPPYGETFFHHVTGRCSDGRLIIDFIAESLGIPRVKPYLGIKNIGRWSVEEGGANFAVIGATALDFSFFEERGVPVKTNYSLSAQLNWFKELLPTLCNSSTGCHEVLRNSLFLVGEIGGNDFNHPFSIRKSIVEVKTYVPYVINAISSAINELIGLGARTLIVPGNFPIGCSASYLTIYETEYKNQYDQFGCLKWLNKFAEYYNNELQSELDKLRRLYPRANIIYADYFNAALLFYRDPTKFGFTGLKVCCGMGGPYNYNTSADCGNPGVSACDDPSKHIGWDSVHLTEAAYRIVAEGLIKGPYCLPQINTLCLMNVSSGYFNS

SEQ ID NO: 52733 - protein, 493 aa, Glycine max
  Clone ID: 700556108_FLI.pep
ENGMVSSEGETSFTCVMKFGGSSVASADRMKEVATLILSFPEERPIVVLSAMGKTTNKLLLAGEKAVSCGVINVSSIEELCFIKDLHLRTVDQLGVDGSVISKHLEELEQLLKGIAMMKELTKRTQDYLVSFGECMSTRIFAAYLNKIGVKARQYDAFEIGFITTDDFTNADILEATYPAVAKRLHGDWLSDPAIAIVTGFLGKARKSCAVTTLGRGGSDLTATTIGKALGLPEIQVWKDVDGVLTCDPNIYPKAEPVPYLTFDEAAELAYFGAQVLHPQSMRPARESDIPVRVKNSYNPKAPGTLITKARDMSKAVLTSIVLKRNVTMLDIASTRMLGQYGFLAKVFSIFEELGISVDVVATSEVSVSLTLDPSKLWSRELIQQASELDHVVEELEKIAVVNLLQNRSIISLIGNVQRSSLILEKAFRVLRTLGVTVQMISQGASKVNISLVVNDSEAEQCVRALHSAFFESELSELEMDYKNGNGSVDELS

SEQ ID NO: 52734 - protein, 235 aa, Glycine max
  Clone ID: 700556183_FLI.pep
VFALEGESLVYTHHHMKSMVTPLTRVLPFRHPNGHNTLPFSLTRYPSSPNFSFSPLTLTLSMAASPQSSAPTVSPGDVNIDKDGVFQLIQAHQEKAARLPPVEEIRTVLDRSVRGMLSTFSKKFDGYPSGSMVDFACDSNGYPILAVSDLAVHSKDLTANPKCSLLVARDPEDRTDLVITVHGDAISVPENEREAVRAAYLARHPNAFWVDFGDFQFLRIEPKVVRFVSGVATAF

SEQ ID NO: 52735 - protein, 110 aa, Glycine max
  Clone ID: 700557015_FLI.pep
KELIYFFFFITGTKVITNFLYLLEQFSILELNDLRNMDRVTINAISPRPINRCLNASVALPHSTVAFKPTPERYLPHPITLLHPSLGLNVVELIPQRRRGSVPKPVKGHS

SEQ ID NO: 52736 - protein, 300 aa, Glycine max
  Clone ID: 700557848_FLI.pep
LLGICGLPDTIFRNAVEMALADSECYGLENPNARLSCFVNKAFANIGSDMAKLVPGRVSTEVDARLAYDTHAIIRKVHDLLKLYNDSNVPPQRLLFKIPSTWQGIEAARLLESEGIQTHLTFVYSFAQAAAAAQAGASVIQIFVGRIRDWARNHSGDTEIESAQLRGEDPGLALVTKAYNYIHKYGHKSKLMAAAVRNKQDLFSLLGVDYIIAPLKVLQSLKESVASPDEKYSFVRRLSPQSAAKYTFSDEELVRWDEDSLSKAMGPAAVQLLAAGLDGHADQAKRVEELFGKIWPPPNV

SEQ ID NO: 52737 - protein, 146 aa, Glycine max
  Clone ID: 700557644_FLI.pep
KVGDFGLARLLPMLDRYVLSSKIQSALGYMAPEFACKTVKITEKCDVYGFGVLVLEIVTGKRPVEYMEDDVVVLCDMVRGALEEGRVEECIDERLQGKFPAEEAIPVMKLGLICTSQVPSNRPDMGEVVNILELIRCPSEGQEELA

SEQ ID NO: 52738 - protein, 389 aa, Glycine max
  Clone ID: 700558959_FLI.pep
KPLVLWLNGGPGCSSVGAGAFVEHGPFKPSENGLLKNEHSWNKEANMLYLESPAGVGFSYSANKSFYDFVNDEMTARDNLVFLQRWFTKFPELKNNDFFITGESYAGHYVPQLAQLIVQTKTKFNLKGIAIGNPLVEFNTDFNSRAEFFWSHGLISDSTYEIFTKVCNYSQIRRQHQGGTLTPICSGVNRLVSTEVSRYIDTYDVTLDVCLSSADQQAYVPNQLTQLQEGAKIDVCVEDETIAYLNRKDVQEALHAKLVGITSWSTCSDVLKYDMQNLEIPTISILGALAKSGIRVLVYSGDQDSVIPLTGTRSLVNGLAKDFGLNTTVSYRAWFEGRQVAGWTQVYGDILSFATIRGAAHEAPFSQPERSLVLLKAFLEGKPLPEPFL

SEQ ID NO: 52739 - protein, 96 aa, Glycine max
  Clone ID: 700559082_FLI.pep
RKRKIRVNTISAGPLRSRAAKAIGFIDMMIDYSSANAPLQKELSAEEVGNTAAFLASPLASAITGTVLYVDNGLNAMGVGVDSPIFKDLDIPKDQH

SEQ ID NO: 52740 - protein, 215 aa, Glycine max
  Clone ID: 700559335_FLI.pep
GNVSLRYLPVSFNQAVGATTPFFTAVFAYVMTFKREAWLTYLTLVPVVTGVVIASGGEPSFHLFGFIVCIAATAARALKSVLQGILLSSEGEKLNSMNLLLYMAPIAVVFLLPATLIMEENVVGITLALARDDVKIIWYLLFNSALAYFVNLTNFLVTKHTSALTLQVLGNAKGAVAVVVSILIFRNPVSVTGMMGYSLTVLGVVLYSQAKKRSK

SEQ ID NO: 52741 - protein, 412 aa, Glycine max
  Clone ID: 700559512_FLI.pep
REAVRIRQREKNKQTKRLPMATLQFTFTDSTTLFRPSLPSTRTFSRNRSLIVKASSSSSDDFSKSRRRFIAETAALSVSLPQLAARAEDALSEWERVYLPIDPGVVLLDIAFVPDDPNHGFLLGTRQTILETKDGGNTWAPRSIPSAEDEDFNYRFNSISFKGKEGWIVGKPAILLYTSDAGDSWERIPLSAELPGDMVYIKATGEKSAEMVTDEGAIYVTANRGYNWRAAVQETVSATLNRTVSSGISGASYYTGTFNTVNRSPDGRYVAVSSRGNFYLTWEPGQPFWQPHNRAVARRIQNMGWRADGGLWLLVRGGGLYLSKGTGLTEEFEEVPVQSRGFGILDVGYRSTDEAWAAGGSGILLRTTNGGKSWIRDKAADNIAANLYSVKFIDEKKGFVLGNDGVLLRYLG

SEQ ID NO: 52742 - protein, 271 aa, Glycine max
  Clone ID: 700559636_FLI.pep
YMPQGTLTQHLFDWGENGCAPLTWKQRVAIALDVARGVEYLHSLAQQSFIHRDLKPSNILLGDDMRAKVADFGLVKNAPDGKYSVETRLAGTFGYLAPEYAATGRVTTKVDVYAFGVVLMELITGRRALDDTVPDERSHLVSWFRRVLINKENIPKAIDQTLDPDEETMESIYKVAELAGHCTAREPYQRPDMGHAVNVLGPLVEQWKPTTHEEEEGYGIDLHMSLPQALRRWQANEGTSTMFDMSISQTQSSIPAKPSGFTDSFDSMDCR

SEQ ID NO: 52743 - protein, 268 aa, Glycine max
  Clone ID: 700560231_FLI.pep
QGQVDKDNAFVNELESLSRLHHKNLVRLLGFYEDSKERILVYDYMDNGSLSDHLHKLQSSALMSWAVRIKVALDAARGIEYLHQYATPPIIHRDIKSANILLDAKWTAKVSDFGLSLMGPDPEDEDAHLSLLAAGTVGYMDPEYYRLQHLTPKSDVYSFGVVLLELLSGYKAIHKNENGVPRNVVDFVVPFIFQDEIHRVLDRRVAPPTPFEIEAVAYVGYLAADCVRLEGRDRPTMSQVVNNLERALAACLAKPILSRSTTDSISSQ

SEQ ID NO: 52744 - protein, 305 aa, Glycine max
  Clone ID: 700560821_FLI.pep
LAMGHTSLFTPSSSLRFNSLLVSSTPSSSSRSNSVSFPALSRNIRKSVEDRKINKNSAVKAVYGDEFWTPARSSPQDIWSIRSDLQVPSSPYFPTYAQGQGPPPMVAERFQSVISQLFQYRIIRCGGAVDDDMANIIVAQLLYLDAVDPNKDIVMYVNSPGGSVTAGMAIFDTMRHIRPDVSTVCVGLAASMGAFLLSAGTKGKRYSLPNSRIMIHQPLGGAQGGQTDIDIQANEMLHHKANLNGYLAYHTGQSLDKINQDTDRDFFMSAKEAKEYGLIDGVIMNPLKALQPLEAAAEGKDRASV

SEQ ID NO: 52745 - protein, 134 aa, Glycine max
  Clone ID: 700561131_FLI.pep
EGHDMIILAGAEYGSGSSRDWAAKGPMLLGVKAVIAKSFERIHRSNLVGMGIIPLCFKPGEDADSLGLTGQERYTIDLPSNVNEIRPGQDVTVVTDTGKSFVSTLRFDTEVELAYFNHGGILQYVIRNLINAKH

SEQ ID NO: 52746 - protein, 342 aa, Glycine max
  Clone ID: 700561776_FLI.pep
DNLIGRGGCSYVYRGCLPDGEELAVKILKPSENVIKEFVQEIEIITTLRHKNIISISGFCLEGNHLLLVYDFLSRGSLEENLHGNKVDCSAFGWQERYKVAVGVAEALDYLHNGCAQAVIHRDVKSSNILLSDDFEPQLSDFGLASWGSSSSHITCTDVAGTFGYLAPEYFMHGRVTDKIDVYAFGVVLLELLSNRKPINNECPKGQGSLVMCAIPILEGGKFSQLLDPSLGSEYDDCQIRRMILAATLCIRRVPRLRPQISLILKLLHGDEEVIRWAEQEVIAPQELDGCDEEPVPTNIQSHLNLALLDLEDDTISISSTEQSVSLEDYLHGRWSRSSSFD

SEQ ID NO: 52747 - protein, 164 aa, Glycine max
  Clone ID: 700562266_FLI.pep
GKLADVWSCGVTLYVMLVGAYPFEDPNEPKDFRKTIQRVLSVQYSIPDGVQISPECRHLISRIFVFDPAERITMSEIWNHEWFLKNLPADLMDEKIMGNQFEEPDQPMQSIDTIMQIISEATVPAVGTYSFDQFMEEQIYDLESESDAESDLDIDSSGEIVYAI

SEQ ID NO: 52748 - protein, 185 aa, Glycine max
  Clone ID: 700562612_FLI.pep
FSYNTFFLDTQHLEDFLILFGAKPLGYSNNMLGMKRHRDNEGSESLDLAKCLVLFSCPIESNKAQQKGFGAVEFECKTCSRKFSSFQALGGHRASHKRQKLEGEELKEQAKTLSLWNKPKMHECSICGLEFSLGQALGGHMRKHRAALNEGFPIIPSIDQVIAKIPVLKRSNSTRVMCLDLELHL

SEQ ID NO: 52749 - protein, 414 aa, Glycine max
  Clone ID: 700562414_FLI.pep
AMAPHDLRRPFKRPAISDQERRREQSLLRQAQSRQDAQRHARFLASAALSLPPKTPEPESEPKPELAETEASSDSGYESLDIVGASTLSAAEARKWFAKQLMHPEWMIDIPNNLAQDWFVFARPSGKRCFVVSCNGTTISRLRNGAILHRFPSALPSGARKKDPSYSILDCIFHEVDQTYYVIDMVCWRDYPLSDCTAEFRFFWLTSKLAETGAFDPPSYYHKYRFSLVPVYSCDSSGLYAAYSAPVPYVKDGLLFYNKHSHYQAGITPLALVWKDENCSQYVLDTDSKGQVPNQQQVVLELQEDGKLTTSDDPPVVFGCLDGSFIQQSGLHSGCLLRFSIGEGGFVLMDGKLEKADLHYLGKANRARASADSFSKVMFQHSVRHSPLRIEGLLESVGLPVDQESKACDVEMDG

SEQ ID NO: 52750 - protein, 282 aa, Glycine max
  Clone ID: 700562704_FLI.pep
EELRELGSGTFGTVYHGKWRGSDVAIKRIKKSCFAGRSSEQERLTIEFWREADILSKLHHPNVVAFYGVVQDGPGATLATVAEYMVDGSLRNVLLRKDRYLDRRKRLIIAMDAAFGMEYLHSKNIVHFDLKCDNLLVNLKDPMRPICKVGDFGLSKIKRNTLVSGGVRGTLPWMAPELLNGSSNKVSEKVDVFSFGIVLWEILTGDEPYANMHYGAIIGGIVNNTLRPTIPSYCDLDWKTLMEQCWAPNPAVRPSFTEIARRLRVMSAAASQIKGQGHKASK

SEQ ID NO: 52751 - protein, 64 aa, Glycine max
  Clone ID: 700563030_FLI.pep
HGARQREMRFTVIKVLALYVPNWVIFLFFVFCFLFSKTCGIHVKLFDNLACCLKLLLFFLGHLF

SEQ ID NO: 52752 - protein, 193 aa, Glycine max
  Clone ID: 700891472_FLI.pep
NYTAKVSDFGLSKSILDDEKDYVSTQVKGTMGYLDPDYYTSQKLTEKSDVYSFGVLILELITARKPIERGKYIVKVVRSTIDKTKDLYGLHKIIDPAICSGSTLEGFEKFVDLAMECVEDSGADRPAMSDVVKEIEDMLQSVGMHLTSESVTSTTSSHRYQEVSIVSFHLDQPYSNESFGSSAEHIQKLNLVS

SEQ ID NO: 52753 - protein, 467 aa, Zea mays
  Clone ID: LIB3068-050-B8_FLI.pep
CSPAPSAAPRASEPPLLPRRVPGLPLPRSSGMRAGRPKIGDQATSDVVVRLRTPEGRDEWLYCHSAVLAAGSTYFADRLSDAWPTCQILGSRYCVEVYCQELDLSSYVTALRLLYAIEPCSHFGVRGALGVLQAAVHLGCGQIAAACAGYIESAPWEEADEEEILRTVPSLGPQYECILARLRPIDPAPVTSIFLSAFRHATLSSAAGPARELKSAAQEQLEYMLTEDDDAPLVALDNDTVKSQVKDCATALLSQFSAFMSSILTKQKEAPPLDGEHGQLQQELQFFLCDISWVSQVLSKLEMMKCIVVYWVGVSTDMVETVDAVCTGDDCLKTRLKVVEVSAKVLEAVAFGNVILPAEKRRHMVNLWIRFARVTKSLADQADQDGDGEAETPKENLDNEVWQGLESAIVSIVLTLPSNSQAEILSEWLQSKHVRYPDLTEAFEAWCYRSKVAKRRLSFLSDIGQVS

SEQ ID NO: 52754 - protein, 326 aa, Zea mays
  Clone ID: LIB3069-006-A11_FLI.pep
TACTDAGGPRRPTPPGRSRGRPWAPAGTWRWRCAARARRTAPGASRCGASRCSTPGKRNETLGVVRKKARLGSEACRVVWRVVYRADVADVDEEGAGDGVHGHELTGGGVQHLEAADALVLLEHGEEARVRVGLHAGGAHRLLRVVVPVDAELARPVLERVLLQAQPQAGGQLAGDADDHVVHLLRVGLDGLPDFGRRVEARAEGVDVGGRGGVEEPEGLVERVGGAGRDVAAAGDDVGVAALGVVGEVEERAHGGLHVGQEPRGRAVAGHPKAAQALARVAQPRRLVGRRAGEAQVDHRDLRHRRCPAPAGFACVVRGWWGAADG

SEQ ID NO: 52755 - protein, 448 aa, Zea mays
  Clone ID: LIB3069-014-H10_FLI.pep
SMPMRAGLVLFVDLCSWRRHACVFIIIQHKHDASHVWLHVEPGGNLHPQRRVALGEEVYPDGPELLADLWVSERVGESLHESVLSVGVPGAVPLPWLLEVVGLAYGCLLPPPRDRPGRQWRGRRRLPQRRVPGRVVVHLLVAVHEVHGAVVVVVVVRAARRVDGQHQVVGPQPVALRVGVGEHPALQHLVVRVVDPWHHQPRAERQLLVLVEEVVHVPVQHQPPHGAERQQVLRPRLGVVQRVEVVLLLRVRLHHLHVQRPLREAPRRDGVVQVLRRVAVVPSPDQRRLLVRQDAPHAARRLPVELDVLRLPRRAHERVRVHAEPFHVAVVGRHAHVVEEEEEGVQALGEVRQEVEHPPVLLHVRPRVGLERVDHVGELDAVADEEDGEVVAQQVPVALAGVELHGEPARVADRLRGPPLVDHRREAHDHGRPHAGRAQEVGARQRRH

SEQ ID NO: 52756 - protein, 506 aa, Zea mays
  Clone ID: LIB3069-028-D6_FLI.pep
KTAGNPNIGKDAPAPSAGSGGSNDSLSGGGSSGSIGNNGGSSPSSAGVIVGSVVGTVVGLGLVAALGFYCYKRKQKPFGRVQSPHAMVIHPRHSGSDDMVKITVAGGNANDGARASETYSQASNGPRDIHVVESGNMVISIQVLRNVTNNFSEENILGRGGFGTVYKGELHDGTKIAVKRMEAGVMGNKGLNEFKSEIAVLTKVRHRNLVSLLGYCLDGNERILVYEYMPQGALSQHLFEWSEKNLRPLEWKKRLSIALDVARGVEYLHSLAQQTFIHRDLKPSNILLGDDMKAKVADFGLVRLAPADGKCVSVETRLAGTFGYLAPEYAVTGRVTTKADVFSFGVILMELITGRKALDETQPEDSMHLVTWFRRMQLNKETFRKAIDPVIDLDEETYASVSTVSELAGHCCAREAHQRPDMGHAVNVLSTLSEVWKPADPDSDDSYGIDLNMSLPQALKRWQAFEDSSHFDGATSSFVASLDNTQTSIPTRPPGFADSFTSADGR

SEQ ID NO: 52757 - protein, 395 aa, Zea mays
  Clone ID: LIB3069-047-A7_FLI.pep
AKAIAKASARRVGRRRGRMARGLRGVRDDLSELGRHLLDIACFLHPLLNPAHTDSPPPTPTGRRRPRRSPSPHPAAPPSPSLLAGILSDLAEIGGSFRGGFSRSSPAPDHPAPDALESQQAASSPSPRPPPPAAADQIADDVVGAARALAARPEAWIDFPVLALDEGSVISGIQRDHMESIEKLVPDLASLRGRLCPSYMDEDIFWKIYFRLLESNINEHSSEEDIRSVPNSVHHNNEIESDSPPHVCEIESVKSNQEGYQSSDGRAFPKTRSERSIDQWVFAKSKSEESMDQWSEIPSDVESFREGKRYLSSEELSDVDSANVVVMDKYMDSLLSDRRNLPYASSSVRRDSVRRKPASSADYSRRPPQPTPPASLSKKESWDVIEDSEFDILDS

SEQ ID NO: 52758 - protein, 180 aa, Zea mays
  Clone ID: LIB3068-016-A10_FLI.pep
WSCVSRGCHLTGRSLLLVVAAPPVHFAAPVAARAYEVHREVRDGQHGEQEVELVEVPLVEVSRDPPGPPSRRGEPGHRAHDDVTEVVAERHGHHAQRAPEAFEPVGHLAVEELELPDVHHHLRHADQRILRHLPHDMQVAAHRCGGPGLPEVLDRPGRGHGQGTHDQAEAHPLQLGGASR

SEQ ID NO: 52759 - protein, 306 aa, Glycine max
  Clone ID: 700839576_FLI.pep
AMHAPVYFEKFEVHGNMKAVPPEVLDSIRKNKVCLKGGLVTPMGGGVSSLNVQLRKELDLYASLVNCFNLPGLPTRHDNVDIVVIRENTEGEYSGLEHEVVPGVVESLKVITKFCSERIAKYAFEYAYLNNRKKVTAVHKANIMKLADGLFLESCREVATKYPGIKYNEIIVDNCCMQLVSKPEQFDVMVTPNLYGNLVANTAAGIAGGTGVMPGGNVGAEHAVFEQGASAGNVGSDKIREQKKANPVALLLSSAMMLRHLQFPAFADRLETAVEKVILEGKCRTKDLGGTSTTQEVVDAVIDALD

SEQ ID NO: 52760 - protein, 545 aa, Zea mays
  Clone ID: LIB3069-008-A3_FLI.pep
GVDLAHGNGQPRANTVTAHRGSFITEHILHHGVSSDAIGNSSRNAECFVGAAGQDSHHAAFKRKYLDGCHAESSANGSSRNRHQNNSTLLPPPTTCESFTIPTATNFSVPYHPVEQLNQSTNIAASSTLSDHYSSYSDPRGNEFVRNTRMRINPSDYDQSLPSLLPEGSFRCSAYQSTQQQSSFIPAQPRQVSSSSGSHSRSHVPAVTQFSQNLRRPSTVSFGSRIGNSSTSGSTIPIPASQDPGTSLLGSDYPEPLLLGSLFTADSTNFLSASGSISNQQNSGSSSSSMLRPAVNVGTQVPEFNVSQPSTTLRGSSDVFRRSLISAGISHSRSSSIPLQHRGNSSTSHEIRNHQPGSSSRAHQQHPLRPGHSSVDRQSSGYLDLQSFMQTIASREGGRPMSEIRNVFDQIRQGRNARLEDLLLIDRSLIMRRANLIDRHRDMRLDVDNMSYEELLALGERIGYVNTGLTEEKILSNLKQWKCVLKSLDDPPTSVEPCCICQEDYVEGEDLGRLDCGHDFHTACIKQWLVIKNLCPICKKTALDT

SEQ ID NO: 52761 - protein, 224 aa, Zea mays
  Clone ID: LIB3069-055-B11_FLI.pep
APIQIQRTVHLSLPPSLPLAPPRDTNTRATQPARTRSHRRGGSQGKAPLYRRRWTWASAARVVPAEEGEGAGAGAGAVGTARSLSAGAARRRLRGPGSSAPAWRTSWWLRREEEEEVEDARGREREACRRATFWTPASSAGSPSPATATSSCTGVTSRSVPRSAGRSRSKWTRRWSGRRAPRRRSWRRELPLPRTWSPRRGLPRPGPGQSLPANTVKTKSSQTS

SEQ ID NO: 52762 - protein, 389 aa, Glycine max
  Clone ID: 700892447_FLI.pep
APLGAKGWKVLAVYEKSTRSWSWTGPVIHNSPDYDTTEEVTSPEAWGLPHKMLVKLVDSFANWLKCGQETLQQIGSLPAPPLALMQVNLDEKERFRDLRAQKSLNTISPSSEEVRTYFRKEEVLRYSIPDRAFSYTAADGKKSIVAPLRRCGGKPTSKARDHFMLKRDRPPHVTILCLVRDAAARLPGSIGTRADVCTLIRDSQYIVEDVSDAQINQVVSGALDRLHYERDPCVQFDGERKLWVYLHREREEEDFEDDGTSSTKKWKRQKKDAADQSDQGTVTVACPGTGEQSGYDLCSDLNVDPPPCIDDDKGMEPLSTDTRPNAEAHVDVNRASEEGNVCDGNSMAWEALDLNPTRELCQENSTNEDFDEESFGRERPVGLLSASLL

SEQ ID NO: 52763 - protein, 554 aa, Glycine max
  Clone ID: 700789528_FLI.pep
NEAPSPLANTSIVFISQDRFIPTTTTMAEVAAPKKENPNLLLGRFELGKLLGHGTFAKVHHARNIKTGEGVAIKIINKEKILKGGLVSHIKREISILRRVRHPNIVQLFEVMATKTKIYFVMEFVRGGELFNKVAKGRLKEEVARKYFQQLVSAVEFCHARGVFHRDLKPENLLLDEDGNLKVSDFGLSAVSDQIRHDGLFHTFCGTPAYVAPEVLARKGYDGAKVDIWSCGVVLFVLMAGYLPFHDRNVMAMYKKIYKGEFRCPRWFSSELTRLFSRLLDTNPQTRISIPEIMENRWFKKGFKQIKFYVEDDRVCSFDEKQLQHHDGDDYLATSDSEVEIRRKNSNCNSTSNGNSLPRPASLNAFDIISFSQGFDLSGLFEEKGDEARFVSSAPVSKIISKLEEVAQLVSFTVRKKDCRVSLEGCREGVKGPLTIAAEIFELTPSLVVVEVKKKGGDKAEYEKFCNSELKPALENLGMEDSASSSSSCHQSTHTQSEFQQQHRTFSDSALNRHSDNNECLYDQELGLAEETSIPQLGEPKFEFQQENVPMFTI

SEQ ID NO: 52764 - protein, 727 aa, Glycine max
  Clone ID: 700874082_FLI.pep
LAREFKMGKREFNGVVLMMLCLWVCGVTASVTYDHKAIVVDGKRRILISGSIHYPRSTPQMWPDLIQKAKDGGLDVIQTYVFWNGHEPSPGQYYFEDRFDLVKFVKLAQQAGLYVHLRIGPYICAEWNLGGFPVWLKYVPGIAFRTDNEPFKAAMQKFTAKIVSLMKENRLFQSQGGPIILSQIENEYGPVEWEIGAPGKAYTKWAAQMAVGLDTGVPWVMCKQEDAPDPVIDTCNGFYCENFKPNKNTKPKMWTENWTGWYTDFGGAVPRRPAEDLAFSVARFIQNGGSFVNYYMYHGGTNFGRTSGGLFIATSYDYDAPLDEYGLENEPKYEHLRALHKAIKQSEPALVATDPKVQSLGYNLEAHVFSAPGACAAFIANYDTKSYAKAKFGNGQYDLPPWSISILPDCKTVVYNTAKVGYGWLKKMTPVNSAFAWQSYNEEPASSSQADSIAAYALWEQVNVTRDSSDYLWYMTDVNVNANEGFLKNGQSPLLTVMSAGHVLHVFINGQLAGTVWGGLGNPKLTFSDNVKLRAGNNKLSLLSVAVGLPNVGVHFETWNAGVLGPVTLKGLNEGTRDLSRQKWSYKVGLKGESLSLHTESGSSSVEWIQGSLVAKKQPLTWYKTTFSAPAGNDPLALDLGSMGKGEVWVNGRSIGRHWPGYIAHGSCNACNYAGYYTDTKCRTNCGQPSQRWYHVPRSWLSSGGNSLVVFEEWGGDPNGIALVKRT

SEQ ID NO: 52765 - protein, 515 aa, Glycine max
  Clone ID: 700832904_FLI.pep
QMNGGDEVVAAPAAPPHPLEWKFSQVFGERTAGEEVQEVDIISAIEFDKSGDHLATGDRGGRVVLFERTDTKDHGGSRRDLERMDYSIGRHPEFRYKTEFQSHEPEFDYLKSLEIEEKINKIRWCQTANGALFLLSTNDKTIKFWKVQEKKVKKISEMNVDPSKSMGNGSIASSSNSSSSRPYLVNGGSPDRYNYISNDFSFPPGGLPSLRLPMVSSHETSLVARCRRVYAHAHDYHINSISNNSDGETFISADDLRINLWNLEISNQSFNIVDVKPANMEDLTEVITSAEFHPTHCNTLAYSSSKGSIRLVDLRQSALCDSHAKLFEEQEAPGSRSFFTEIIASISDIKFGKDGRYILSRDYMTLKLWDINMDSGPVATFQVHEYLRPKLCDLYENDSIFDKFECCLSGDGLRVATGSYSNLFRVFGCAPGSAEATTLEASKNPMRRQVPTPSRPSRSLGNSITRVVRRGAEAPGVDANGNSFDFTTKLLHLAWHPSENSIACAAANSLYMYYA

SEQ ID NO: 52766 - protein, 260 aa, Glycine max
  Clone ID: 700871802_FLI.pep
DGSKADIWSCGVVLYVLLAGFLPFQHENLMTMYYKVLRAEFEFPPWFSPESKRLISKILVADPAKRTTISAITRVPWFRKGFSSFSAPDLCQLEKQEAVTEEENNSKVPKFFNAFEFISSMSSGFDLSGLFETKRKTAAVFTSKCSAAAIVAKIAAAARGLRFRVAEVKDFKIRLQGAAEGRKGRLEVTAEVFEVAPEVAVVEFSKSAGDTLEYAKFCEEDVRPALKDIVWTWQGDATCAANFPACHGEECQKQVVVSTI

SEQ ID NO: 52767 - protein, 160 aa, Glycine max
  Clone ID: 700796106_FLI.pep
QIKRIVSHNDTGGGVFVAESSGVADLSGAGTCEMGIVRIIGVADITGGGFLVVDSGCVGVSNDVVGDVGPELCFLAGAVSDAGDHLRGLDVADHSDFVGLTLHIHLVHAFHPLHRLPHFPLASFAVHLHFHLHRLQLLALLVLGTATGAVKEFRYVIQST

SEQ ID NO: 52768 - protein, 659 aa, Glycine max
  Clone ID: 700843132_FLI.pep
KSVNTIRFLAIDAVEKANSGHPGLPMGCAPMGHVLYDETMKYNPKNPFWFNRDRFVLSAGHGCMLQYALLHLAGFDSVKEEDLREFRQWGSRTPGHPENFETPGIEVTTGPLGQGIANAVGLALAEKHLAARYNKPDNEIVDHYTYAILGDGCQMEGIANEACSLAGHWGLGKLIAFYDDNHISIDGNTEIAFTESVDSRFEGLGWHVIWVKNGNNGYDDIRAAIKEAKAVKDKPTLIKVTTTIGYGSPNKANSYSVHGSALGAKEVDATRQNLGWSHEPFHVPEDVKKHWSRHTPEGAALEAEWNAKFAEYEKKYKEEAAELKSIINGEFPAGWEKALPTYTPESPADATRNLSQTNLNALAKVLPGLLGGSADLASSNMTLLKMFGDFQKDTPAERNVRFGVREHGMGAICNGIALHSPGLIPYCATFFVFTDYMRGAIRLSALSEAGVIYVMTHDSIGLGEDGPTHQPIEHLASFRAMPNILMLRPADGNETAGAYKVAVLNRKRPSILALSRQKLPQLPGTSIEGVEKGGYTISDNSTGNKPDVILIGTGSELEIAAKAADDLRKEGKAVRVVSLVSWELFDEQSEAYKESVFPAAVSARVSIEAGSTFGWEKIVGAKGKAIGIDRFGASAPAGRIYKEFGITKEAVVAAAKELI

SEQ ID NO: 52769 - protein, 575 aa, Glycine max
  Clone ID: LIB3051-031-A9_FLI.pep
MAVSPILLLLAIFSLIYGNGILPIEATHHVYRNLQTLSSDSSDQPYRTAYHFQPPKNWINDPNGPMRYKGLYHLFYQYNPKGAVWGNIVWAHSVSKDLVNWTPLDHAIYPSQPSDINGCWSGSATILPGGKPAILYTGIDPNNHQVQNLALPKNMSDPLLREWVKSPKNPLMAPTSANMINSSSFRDPTTAWLGKDGYWRVLIGSKIHTRGMAILYKSKNFVNWVQAKQPLHSAEGTGMWECPDFYPVLNNKPSSTIGLDTSVNGDNVRHVLKVSLDDKKHDHYLIGTYDIAKDIFTPDNGFEDSQTVLRYDYGKYYASKTIFEDGKNRRVLLGWVNESSSVSDDIKKGWAGIHTIPRAIWLHKSGKQLVQWPVVELESLRVNPVHWPTKVVKGGEMLQVTGVTAAQADVEISFDVNEFGKGEVLDQWVDPQILCSRKGAAVKGGLGPFGLLVFASRGLQEYTAVFFRIFRYQNKNLVLMCSDQSRSSLNKDNDMTTYGTFVDMDPLHEKLSLRTLIDHSVVESFGGEGRACITARVYPTIAINEKAQLYAFNNGTAAVKITRLSAWSMEKAKIN

SEQ ID NO: 52770 - protein, 271 aa, Glycine max
  Clone ID: LIB3107-018-D7_FLI.pep
KVQEFVVSYKLVYREENMKLFVFFVAAVVLVAWPCHGAGYQRFPLRMKTGYGERSSEVKCASFRLAVEAHNIRAFKTIPEECVEPTKDYINGEQFRSDSKTVNQQAFFYASEREVHHNDIFIFGIDNTVLSNIPYYEKHGYGVEEFNETLYDEWVNKGDAPALPETLKNYNKLLSLGFKIVFLSGRYLDKMAVTEANLKKAGFHTWEQLILKDPHLITPNALSYKSAMRENLLRQGYRIVGIIGDQWSDLLGDHRGESRTFKLPNPMYYIE

SEQ ID NO: 52771 - protein, 264 aa, Glycine max
  Clone ID: LIB3109-006-H8_FLI.pep
SFAESKQERKRAMEALHLHRVLLMPVSQKTSIFLRASGTPLSTLARPPLRWSSQTCSARAGWFLGLGADSKKTNLPDTVKAGDPVLHEPAQDVDPNEIKSERVQKIIDDMIQVMRKAPGVGLAAPQIGIPLRIIVLEDTKEYISYVSKEEAKTQDRRPFDLLVILNPKLEKKGKRTALFFEGCLSVDGFRAVVERHLDVEVTGLDRYGAPIKIIASGWQARILQHECDHLDGTLYVDKMLPRTFRTVDNMDLPLAQGCPKLGPR

SEQ ID NO: 52772 - protein, 354 aa, Zea mays
  Clone ID: LIB143-046-B3_FLI.pep
KNFQPPFSLLPVFFSLAQQPSHTAAARQRRGSGSMAERPSQCSSRPPLPVLLIPHSSAQGAFPFSAASGSREPFSPTCRSFQAAQRPFFFMAGAPPMAADALLSSMAGSSRELDAPVQPPHLLPPTAGFPSPLGSFLQGRAPSLQQPSTPTTKAPFPSDAPLQLAPLCPWPPAGSPWPAPPSGEQPSSHERHPPCSFPLPAPRKCSSNNLLFSPHKTASPGSPPHRVLRSICAVPTHIVELVFGTAPCRVIALRSSTVYAPHFAGSAQPQHRRRSPSVRRRRSLLIPHRLCSPVINCVYVLFLFCLWRRETPCLGEGKSFNARRMFGAMHKSESPSSLQTPIGFVYGEPMTERG

SEQ ID NO: 52773 - protein, 138 aa, Zea mays
  Clone ID: LIB143-058-D12_FLI.pep
QPKGVLAAVGHVEEPVLVLVLLVDGRHQGSCWWEGVLHEDEDRLLGAELDALPHHVHKLSHCEVGGDKVLFLVDVWDVTPLGLLNNDRNSIGVLLPDAVSLSLPPFEGVLQLERAPRHRSCSSWSLDRWRNREQLPGK

SEQ ID NO: 52774 - protein, 727 aa, Zea mays
  Clone ID: LIB143-058-D8_FLI.pep
IAAVMAAKGRTELDVGADGVAVITIYNPPVNSLSIDVLHSLKESYEEALRRNDVKAIVVTGKGGKFSGGFDISSFGGVQGGQTMQPKVGYIAIDILTDTVEAATKPSVAAIDGLALGGGLEVAMACHARIATPTAQLGLPELQLGIIPGFGGTQRLPRLVGLTKSLEMMLLSKPIKGGEAHQLGLVDALVSPNDLVNTARQWALDIYECRRPWIKSLYKTDKLEPLGEAREILKFARAQAQKQAANLHHPLVCIDVIEEGIVAGPRAGLWKEATSFQELLFSDTCKSLVHVFFSQRATSKIPGATDLGLMPRKITKVAILGGGLMGSGIATAMVLSNYPVLLKEVNEKFLTAGINRIQANLQSRVRKGKMTDERYEKAMSLVTGVLDYERFKDVDLVIEAVIENVKLKQQIFSDLEKYCPSHCILATNTSTIDLNLIGEKTKAQDRIAGAHFFSPAHVMPLLEIVRTQHTSPQVVVDLLDVGKKIKKTPIVVGNCTGFAVNRMFFPYTQSALFYVDLGMDVYKIDRACTKFGMPMGPFRLADLVGFGVAVATGMQYLENFPERVYKSMLLPLMMEDNRAGEATQKGFYKYEGKRKATPDPEIMKYIEKSRSMAGVTPDPELMKLSEKDIVEMVFFPVINEACRVLDEGIAVKASDLDIASIFGMGFPPYRGGVMHWADSIGAKYIHGKLEEWTKRYGGFFKPCSYLAERAAKGIPLSAPTKKVQARL

SEQ ID NO: 52775 - protein, 354 aa, Zea mays
  Clone ID: LIB148-030-B7_FLI.pep
APAQRSPEPGPPHRSRRRSPIMATTPAEDPEPGLPPPKALCEQPRRRRPCVLLSFSAARDRFLRGRFLSAGLRPFSVRLPSPAGTSTVVHLWAPPRSARRPVLLLHGFGASATWQWAPYLRSLLAAGLDPIVPDLLFFGASSSTVPDRSDTFQARTVKAAMDGMGVRRFAVVGVSYGGFVAYRLAAMYPEAVERVVLVSSGVCLEEGDLAAGLFPVADVGEAAELLVPRRPAEVRRLVKLTFVRPPPIMPSCFLKDYINVMGSDHLEEKAELLHALINDRKLSDLPKINQPTLIIWGEQDQVFPMELAHRLERHLGESSRLVVVKNAGHAANLEKSKEVCKSIIDYFQEPGSSD

SEQ ID NO: 52776 - protein, 169 aa, Zea mays
  Clone ID: 700101858_FLI.pep
SRDEGAARGACLPRMRNIGPSGGGGTCRVGTAYVSHVSFFSVCLPTLGPPLPPRDLYLYLTTMRSTMTVMMMTMMEPNMASTILLIWGKEEGRAHQARLHRQEEGNHSRRLLQRPRQGGRGPHPVCRSRAEAQQRSSRGRHKHFVNLPLLSHGFPLCRLVSSFCQAFKV

SEQ ID NO: 52777 - protein, 562 aa, Zea mays
  Clone ID: 700236753_FLI.pep
VLEENQSLENALRTLLQELVSSAVQSDKKIMQYGNSLDSGESNCLITRLLDIVLYLCERGHVEGGMVFQLLEDLTEMSTIKDCKDIFGYIESQQDVLGKQELFGRGKLVMLRTCNQLLRRLSKANDVVFCGRIIMFLAHFFPLSERSALNIKGVFNTSNVTKYEKDAMDGISVDFNFYKTLWSLQEHFSNPALTSTNPAKWQKFSSNLAVVLNTFEAQPLSDDDGKLNNLNEEEDAAFNIKYLTSSKLMGLELKDPSFRRHILVQCLIFFDYLKAPGKNDKEGPTGSMIEEIKSCEEHVKKLLEIIPPKGKEFLKSIEHILEREKNWVWWKRDGCLAFEKPPFEKKPGQAGARKRKPRWRLGSKELSQLWKWAEQNPNVLTDPDRVRMPSITEYWKPLAEDMDPSAGIEEEYHHKSNRVYCWKGLRFSARQDLDGFARFSDYGIEGVVPSELLPPEVNAKFSSKPAEKVKRTRKEDSKSVSAHQPREHQVAATPETDGGVDPEEGEGAAPMDSDNGAVGDSQKRSPGEVSGPESGQCEPEADGDDNVRTETTSRDARAGEMK

SEQ ID NO: 52778 - protein, 388 aa, Zea mays
  Clone ID: 700237791_FLI.pep
IAKLRAKMSWRRNQLRAFLVLAVILLITAATYRANAQPAPPADPTPAADTCADPSVEGACRNVPKALRLKLIAIPTILVSSVIGVCLPLLSRSVPALRPDRNLFVIVKAFASGVILATGYMHVLPDSFSNLTSPCLPRKPWADFSFTTFVAMLAALFTLMVDSLMLSFYNRRKGGNTSGRRTSGAVADHESPAHEHHWHSHGHGHGHGHAGGIVVADKPEDDEASQVQLRRNRVVVQVLEMGIVVHSVVIGLGMGASQNVCTIRPLVTAMCFHQLFEGMGLGGCILQAEYGAKMKAGLVFFFSTTTPFGIALGLALTKVYRENSPTALIVVGLLNAASAGLLHYMALVELLAADFMGPKLQSSVRLQLLCFLAVLLGAGGMSIMAKWA

SEQ ID NO: 52779 - protein, 316 aa, Zea mays
  Clone ID: 700221225_FLI.pep
VTMATATTSAYHCNAVLHLPRPPQFRRLLPPLPSLVTRRAASVGLGVARLGSRARARASSVPPPPPFFETVEEEEEEEEERGWSDAEAGFSDEAEDEQEWSGGNGAARGEDLGADAGEDLSGWARQWPRPRELFVCNLPRRCDVQDLLELFTPHGTVLSVEISRDAESGISRGTASVTMRSLAEARAAIDALDGFDMDGREVFVKLASDVISNRKNVNLAHITPTKDHIFETPHKVYVGNLAWSVQPQDLRELFTQCGTVVSTRLLTDRKGGRNRVYGFLSFSSAQELEEALKLDRTVFFGRDIVVKEAHVERQTR

SEQ ID NO: 52780 - protein, 332 aa, Zea mays
  Clone ID: 700222155_FLI.pep
FDLAQTHLSHREIWRCATWLTLIVPTSMTAYLYLYSHGEVSLAASQPVLLYAILLMILLSPFDMFYLSSRFYFLRTVWRIILPLQAITFPDFFLADIFTSMSKVFSDLERSVCRMVNRQVATIAWFEADSICGSHSVAIPLVLVFPYLWRFFQCLRQYKDTKEKTCLFNALKYSTAIPVIFLSALKYHVYPDQWVGFYRPLWLISSVVNSLYSFYWDIKRDWDLSILTRIFMFKNPSIWTNLLYGQNWVFYWVLGSNLVLRCTWTYKLSAHLRHNYLTVFTIAALEILRRWQWVFFRVENEWNKMTAKQNLEMSSDMPSEGDRLLDSSNHTV

SEQ ID NO: 52781 - protein, 487 aa, Zea mays
  Clone ID: 700222965_FLI.pep
ASASSRPRFAGCLPAVHHNMGGGRKRRRRDGSETPSMHPRNRYAAAAPDFAALAELYPSFRPFVFISGSGRASVDFTDFSSTRELTRVLLLHDHGVNWWIPDGQLCPTVPNRSNYIHWIEDLLSSDLIPPISSSSERVKGFDIGTGANCIYPLLGASLLGWTFVGSDVTNVALEWAKKNVESNPHLAELIEIRNANAAPFESETVVREAASEKILEPAEDVAMPKPHILVGVVKESESFDFCMCNPPFFESTEEAGLNPKTSCGGTAEEMVCAGGELAFITQIIEDSVSLKNSFRWFTSMIGRKANLKLLISKVREAGASVVKTTEFVQGHTARWGLAWSFIAPKPRKIVLGSSAPAKKHHSFMLQGLRREHGAFQILKSTEAFFLASNLSCKTDSSVFSVDVTLSDEQIEAAILHGDDYAGSLEDSSAKLQCVVKGISFRITVFEQIPGTLLIKGSLLNKALSGTFSSLFSRLEDALRAECLSKAR

SEQ ID NO: 52782 - protein, 288 aa, Zea mays
  Clone ID: 700223476_FLI.pep
QLFGVLLSNATWDRPPCVPALVRLLRAFLRKIPNELNQEGRLPNILAISRSLLSRSSTEDSAFYMLNTIVENVGFDILNPYISEIWSALFTRLQTRQAVKYVNSLVVFMSLVLVKYGSSVLVSSVDSIQPNLFTQILQRFWIPNLKLIKGALEVKLTAVASTKLLCESAVLLDAAAAQLWGKLLDSIVTLLSRTNQDGTQEQNDGTDAVDIQKTSSYSVSFVRLQYAGKSEDDLLKEVNDPKQFVVTSLATLSAQFPGRFGLVIEQHVDPANKSVLLQLCAAYSANIV

SEQ ID NO: 52783 - protein, 316 aa, Zea mays
  Clone ID: 700212644_FLI.pep
TARRGSEWQLPRTPRRFTEPAPSDPSRSFQKVTAMAAPFFSTPFQPYVYQSQQGSVTAFQISGGDVQVLQVMLKSQEKLTAKPGTMCYMSGNMQMDNNYLPENDGGVWQWIFGKRVSSTIFFNSGSDDGYVGIAAPFPGRILPVDLTNFSGELLCQADAFLCSVNDVSVSSTVEPRPRNIEIGAEMILKQKLRGQGMAFLVGGGSVMQKILAPREVITVDAACIVAMSATINFQLKSPNQLRRAVFGGDNQLTASLTGPGVVFIQSLPFHRLSQRIASRSVAGPSLRDNPKFFIQIVMFFFLAYVMIVSSIILTDV

SEQ ID NO: 52784 - protein, 555 aa, Zea mays
  Clone ID: LIB143-001-H4_FLI.pep
VRFMAREIQILRRLDHPNVMKLEGLITSRLSCSLYLVFEYMEHDLAGLCSSPDIRFTEAQLKCYMNQLLSGLEHCHSRRVVHRDMKGANLLVNNEGVLKIADFGLANFFDPNKNHPLTSRVVTLWYRPPELLLGSTHYDAAVDLWSLGCVFAEMYRGKPILQGRTEVEQLHKIFKLCGSPADDYWKKSKLPHATVFKPHHPYPSTLRDVFKEVPENALSLLETLLSVEPYKRGTASSALSSEFFRTKPYACEPSSLPKYAPNKEMDAKLRDDALRRKASSRGHGAEASKKSSRISRAAREHTAVPKQINNAEEPKNNVNATRDGTTLQDRTKLSLNGDARLFADIQPVPAAQVKGSARDAKNESREEMPFSGPLSVPSSSGFAWAAAQRPQEDRALARSRTRSSSRGQFPAAEADRDCTRTQATTESAAGHRELPSSRDMPRVGSKVREPEPHDAAKRAVLRKWSQLERPDSFDSCDTYHSQNFSHAMLVGGGALSSKNSFEGGHGHGQEEKAEYSGPLLSQSHKVDELLQKNERHIRQAVRTSWFRRGGRKEDK

SEQ ID NO: 52785 - protein, 324 aa, Zea mays
  Clone ID: 700150655_FLI.pep
GFICRHGHLGQQRPGDLDAQARVPGGQVVVLGREHRLLGVLHHRAHGALPERRAGAQVRDLQRPQRVGGVQGRVQLRLAGPAQERDVVLLVGRHEQRVQLPLLRPPGPAARPGRPPGGCRCRGRRAGGIARRGPAPGARWRRQRRRPACCGTPPTSRPACVRASGRREMHAGLSASGPRAYQDGFVGQYWRPSARFDDDVGVESLLPRRHREEGGSPVGLLLPASHLLHLLPRVPHPLGCAMRLRRGPSGLEGRAMVVVATGVFLLPLTILVQKSDDCLGALVAWSTDGVPRKPVHGRRGAADAAVHDSSHHLLAFLLPPPLVH

SEQ ID NO: 52786 - protein, 256 aa, Zea mays
  Clone ID: 700155914_FLI.pep
GNHPRTVEDSEESMGRDGGDGELKLLGLWASPFVARAKLALQIKGLSYEYVEEDLGNKSELLLSSNPVHKTVPVLIHNGTPVCESTVIVQYIDDAFAGTGPSLLPADPYQRALARFWAAYLEDKIVTPWRRVFMVKADEEKAEAMRQAVAAMDALEGGLKECSSGGGGQSPFFGGDSVGYVDVLLGGMVSWVKASEPLSGAKIIDAARTPLLAAWMERFCELDAAKAVLQDVHAVVEYARTMQMQARVAAATASNQ

SEQ ID NO: 52787 - protein, 272 aa, Zea mays
  Clone ID: 700163975_FLI.pep
LTIEFPDLKLPPLSCHHGPSSLLVLERLDRIIRVDVAEERQVGGQRLQAEVGVLEREHHLLEQHPVPARRQVKPVPQERLLPAGEPLHPGPDVDGPEPALPRHLHARPRVPCRRRVRAFRQAGEVVRVRVPQTPVLVDRRRRDEDDDHRRPPLLEEREDGAEVVLVLGEGHVLERTGAVGQRGVVGAEEDGDGRDWAGDAGHGAAGDPRRPARVVAAVAAQHDVGGAGVVVGERRAPTALPERLLRDGVPEQHDGRPHLSRCSSSSARSWIG

SEQ ID NO: 52788 - protein, 352 aa, Zea mays
  Clone ID: 700381786_FLI.pep
ASAALRHCSVCTRRRRSSASSASRAASDALSCSPVRASRAAPSFRSRSAWAAFAAASSSTIFAASAASPDRFLSSAFSAARAAISASFSASFAFSSRTSQLSFSAPSVSAAALLSSSIIFFVSSSSSFSASAASSPQLTTSQSSAPVAVALWFSLSPDSARTTSNTSVAGAFTLLSSSAAGCGSFSSSGFFALSTPGEGGEGGEVVVVDEEAGLPLVPTRFLASSSATCASFLAASADASCSRSFLSSSCTFPSFASSSATRVPAARFFSGRGLRGECRSPTLGLLRSATGRWCAPFASEQAVVLRCSGARCDARSGGSLPLDLGMVLRELVLALALAALVSCSCSASPPHS

SEQ ID NO: 52789 - protein, 237 aa, Zea mays
  Clone ID: LIB3591-002-G1_FLI.pep
SNPPFLNGKEYKLKHRIHREQIQYNYQCSSVLRSTHSSQKVIQNQRGACHQMLVTLGHHDGIKVCSDELNTPSLELWATVLLCQRQSRRCCLHCGATAELVLAHRFELVESISVRSCKQMLRDDVAVLLPLKLGHHVGVHEAKHGPEYGRLHVHDLHPLRLRVRLLHGAKELGHENRGPRCKYGLVRCEGLTANHQHDIGSGSLAQELTEIMVQGMHARQSPNSGQDGVSLCCIRFR

SEQ ID NO: 52790 - protein, 204 aa, Zea mays
  Clone ID: LIB3060-072-E11_FLI.pep
YCSSAAAKLAPISSSPMAAGPVTATSSMAVPSARRNRALLPTVSVAREPARAWAAAGAEGRARRGKEAEVEDEKEAERRRKEEVNRKIASRKALSVILRREATKAVLDKRKPGKGTRRLLPGTVLEALHDRIAALRWDSALKVFELMRDQVWYKPHIGIYIKLITMLGKCKQPEKAHQLFQAMIDEGCAPNLQSYTALVSTYSR

SEQ ID NO: 52791 - protein, 406 aa, Zea mays
  Clone ID: LIB3354-043-E8_FLI.pep
LVVACVLVACSSSCGCPVAAAAAMTTVDGITAIYSFGDSITDTGNLVREGATGMLRYIGSRPYGIDLLRGGRTPTGRCSNGYLMIDFLAKYLGLPLLNPYLDKAADFTHGVNFAVAGATALGATALAERGVTMPHTNSSLDVQLQWFRDFMASATTNSSQEVRRKLASSLAMLEIGGNDFNYAFLQLQTRPTGVGYGSGNVTRIVEILEQVGALVPQVVQSITNAAKALLEMGAVRVVVAGNLPIGCSPAYLSGANVTELAAYDADGCLAVLNGFAELYNAALRAAVAGLKRAHPRAVVAYADYFAAYARVLREARARGFDPARTRTACCGAREAAAYGFRLGRFCGAPRTAVCADRARYVSWDGVHPTQHAYEAMAELLYRGGLACPPPINWPGQTMPGANAPLN

SEQ ID NO: 52792 - protein, 416 aa, Zea mays
  Clone ID: LIB3279-190-F12_FLI.pep
KGDEEGPRGRRLLVLLDDLAVRSSHSAFFGSLQARGFDLDFRLADDPKLSLHRYGQYLYDGLVLFAPSTPRFGGSVDQNAVLEFIDAGHDMILAADSSASDLIRGIATECGVDFDEDPEAMVIDHMNYAVTDVEGDHTLIAGDDLIHSDMILGSEKIEAPVLFRGIGHMANPSNSLVLKVLSASPSAYSANPKTKLASPPSLTGSAISLVSVMQARNNARVLLSGSLDLFSNRFLKSGVQKADSKTRYERAGNKQFVAEISKWVFHERGHLKAVNVRHHKVGETNEPGMYRINDDLEYSVEIYEWSGTSWKPYVADDVQLQFFMMSPYVLKTMSTDNKGLYSTTFKVPDVYGVFQFKVEYQRLGYTGLSFTKQIPVRPYRHNEYERFITSAYPYYTASFSTMGAFFVFSFVYLYHK

SEQ ID NO: 52793 - protein, 100 aa, Zea mays
  Clone ID: LIB3592-093-D2_FLI.pep
QRRLPAQRRVRRRRGAERRRRLQDLAGGVPQRARRDLLRHPHRAGHLRLLLRAAPRSRNGRQDHSQLKLAIHSMHLDLYVLRPSMDDASISTCFPHMYNN

SEQ ID NO: 52794 - protein, 302 aa, Zea mays
  Clone ID: LIB4073-015-C2_FLI.pep
LGSWPALFAMASKACAWDAVLVICLAAAVVAGSAAEAAFDENYVVQWGEDGYHLVIRGTEANITMDQSSGAGFRSKSMYGSGFFHMRMKLPSGYTAGVVTTFYLISQPEDGSRDEVDFEFLGDKAGVPITLQTNVFVNGRGDREQRLHLWFDPAADFHDYKILWNPYQLVMFVDDTPVRVLRNLTGTVPGYPFPAKKTMMIRASMWDGSDWATDGGRTKVDWSQGPFTAGYQGFDVSGCANGSATTAPCQSPDLWWNGGEYRNITAEQRAAYEDVKRNYFNYDYCADKARFNNTVPIECNYA

SEQ ID NO: 52795 - protein, 184 aa, Zea mays
  Clone ID: LIB4073-015-H8_FLI.pep
HIHALYFRKQQASPYSNPVCILRKMQKGNSEVRTEIIYWQSSFAGSGIGRRPRRSRISSSSSSSRTGAAALAEVDDPVLALVEAVADGLDARLAPRVAAARRRVQALAYRRLRPRANAALVAARPPPPPRVNPFGGGLLLLVRFAEWQSYEDDEDSQRDEQHHLGPHACFSSQEPVATAAWDFS

SEQ ID NO: 52796 - protein, 258 aa, Zea mays
  Clone ID: LIB4073-020-H1_FLI.pep
LYRAEGEEGRGQEGKPAATMDSDLWISRLMAAKRQFALQRAQRQHAAPASHHDRFGYDDIEPEDDVRSDFPCPYCYEDHDVTSLCAHLEDEHPFESKIVSCPVCLARISKNLLDHITLQHGYLFKLQRHHRVRRVTGNGNHNLSYAGRDLQLQETYLKVLLGNSSRSSSTNASSTVTDSLLSSLVLNLSSLEVEDTSKSSAPSVVENNWFKRSLPSKTWKLSAVDSSLSHEERERRRRRAVVRSAFVQHLLVTTLFED

SEQ ID NO: 52797 - protein, 248 aa, Zea mays
  Clone ID: LIB4073-021-E5_FLI.pep
ARRARTRMATTAGAGGAGKLKLLGAWPSPFVNRVRVALHLKGLEYENVEEDLTNKSDQLLASNPVHKKVPVLLHGDTPVSESLVIVEYLDDAFPGAGQALLPADPYERAVARFWAAYVDGKLHGMMVKAILGATEEERAAATADALAAMETLEGAFAECSGGKEFFAGDEPGYLDVVLGGFIGWLRAWDKVGGVKLLDGGRRTPRLAAWAERFAALDVARDVIPDPDHIAEFAKVLQARSAAAAAAGN

SEQ ID NO: 52798 - protein, 573 aa, Glycine max
  Clone ID: 700834905_FLI.pep
NKFSGHISAISSYSLESLSLSHNKLQGNIPESIFSLLNLTYLGLSSNNLSGSVKFHRFSKLQNLEELHLSQNDQLSLNFKSNVNYSFSNLKFLNLSSMVLTEFPKLSGKVPILESLSLSNNKLKGRVPNWLHEISLYELDLSHNLLTQSLHLFSWNQQLGYLDLSFNSITGGFSSSICNASAIEILNLSHNKLTGTIPQCLANSSSLQVLDLQLNKLHGPLPSTFTKNCQLITLDLYGNQLLEGLLPESLSNCINLEVLNLGNNQIKDVFPHWLQTLPELEVLVLRANKLYGPIEGSKTKHGFPSLVIFDVSSNNFSGPIPNAYIKKFQGMMKNIVLDVDRQYMEFISFHEANYADSVTITTKAITVTMGRIRNDFVSIDLSQNRFEGEIPNAIGELHSLRGLNLSHNRLIGPIPQSMGNLTNLESLDLSSNMLTGGIPTELSNLNFLEVLNLSNNHLVGEIPQGKQFNTFSNDSYEGNSGLCGLPLTIKCSKDPEQHSPTSTTLRREGGFGFGWKPVAIGYGCGMVFGVGMGCCVLLIGKPQWLVRMVGGKPNKKVKRKTRMRSNENGSRMN

SEQ ID NO: 52799 - protein, 456 aa, Zea mays
  Clone ID: 700343282_FLI.pep
ETEYMRLQRHKMGVEDFELLTIIGRGAFGEVRLCREKVSKNVYAMKKLKKSEMLRRGQVEHVKAERNLLAEVDSAYIVKLYYSFQDEEFLYLIMEYLPGGDMMTLLMRKDTLTEDEARFYIAETVLAIESIHKHNYVHRDIKPDNLLLDHSGHLKLSDFGLCKPLDSSNFPNLNEPDYMSGKVTTPLPDTTRLSNPSAPRRTQQEQLSHWQKNRRMLAYSTVGTPDYIAPEVLLKKGYGTECDWWSLGAIMYEMLVGYPPFYSEDPMSTCRKIVNWRSHLKFPEEAKLPPEAKALISKLLCNVEHRLGTKGAHEIKAHPWFGGVQWEKLYQMKAAFIPEVNGELDTQNFENFEEIGTQIQSSSKSGPWRKMLPSKDANFVGYTYKNFEIVNDDEVAGIAELKKKSSKPKRPTIKTMFERMDEEEPVQGSFLSMLPPEGQPSSHSSVPQEKYQPRRK

SEQ ID NO: 52800 - protein, 513 aa, Zea mays
  Clone ID: 700345757_FLI.pep
APLPPPQDLVSPETMYRAAGSHLRSLKHHGASRLASTSVAKQSSGGLFSWLLGGKSSELPPLDVPLPGISIPSPLPDFVEPSKTKVTTLPNGVKIASETSSSPAASVGLYIDCGSIYETPASSGVSHLLERMAFKSTVNRTHLRLVREVEAIGGNVSASASREQMSYTYDALKSYTPEMVEVLIDSVRNPAFLDWEVKEQLQNIKSEIADASANPQGLLLEALHSVGYSGALAKPLMASESAVNRLDVSSLEEFVAEHYTAPRMVLAASGVDHDALISVVEPLLSDLPCVKRPEEPKSVYVGGDYRCQADSPNTHIALAFEVPGGWNQEKTAMVVTVLQMLMGGGGSFSAGGPGKGMHSRLYLRVLTNFQQIESFSAFNSVYNNSGLFGIYAVTSPDFSSKAVDLAAGELLEIATPGKVTQEQLDRAKEATKSAVLMNLESRSIASEDIGRQVLTYGERKPIEYFLKTVEEITLNDILSTAKEMMSTPLTMASWGDVIHVPSYESVSRKFHSK

SEQ ID NO: 52801 - protein, 762 aa, Zea mays
  Clone ID: 700346464_FLI.pep
CFRTSAGTGNAAPHRAEPLSERGNSLHGEERMGRGGIGGAAAMAMAMETADPARAFVKDVKRIIIKVGTAVVTGMNGRLAMGRLGSLCEQVKQLNFQGYEVILVTSGAVGVGRQRLQYRKLIHSSFADLQNPQMNFDGKACAAVGQSVLMAIYDTLFSQLDVTSSQLLVTDRDFKDPSFGDQLRETVFSLLDLKVVPLFNENDAISTRRQPYEDSSGIFWDNDSLAALLAAELNADLLIMLSDVEGLYSGPPSDPQSKIIHTYVNEKHGKLISFGEKSSVGRGGMQAKVSAAANAASKGVPVVIASGFATDSIITVLKGEKIGTLFHNEANLWACSKEATAREMAVAARDCSRRLQKLSSEERKQILLDIADALEANEDAIRSENDADVEAAQVAGYEKSLVARMTLKPGKITNLARSIRKTADMEDPISHTLKRTEVAKDLVFEKAYCPLGVLLIIFESRPDALVQIASLAIRSGNGLLLKGGKEVMRSNAILHKVITGVIPDTVGKKLIGLVTSKEEIADLLALDDVIDLVIPRGSKSLVSQIKATTKIPVLGHADGICHVYIDKSADMDMAKRIVLDAKIDYPAACNAMETLLVHKDLNKSEGLDDLLVELEKEGVVIYGGPVAHDKLKVPKVDSFRHEYSSMACTVEFVDDVQSAIDHINRYGSAHTDCIITTDRSAAEAFLQQVDSAAVFHNASTRFCDGTRFGLGAEVGISTERIHARGPVGVDGLLTTRCILRGSGQVVNGDKGVVYTHKDLPLQ

SEQ ID NO: 52802 - protein, 115 aa, Zea mays
  Clone ID: 700346916_FLI.pep
EQQLIFSNCDSMSFVAFKSSTAVLNLIWSEYELLKATKDIESQLEKISSPLLILHGAADMVTDPQVSKFLYEKASTKDKTLKLYEGSYHSILEGEPDDRISTAINDIISWLDSHC

SEQ ID NO: 52803 - protein, 609 aa, Zea mays
  Clone ID: 700348422_FLI.pep
MAATMGSISANGSYQTNRPSALKQAPHMQFQQCCNGGLRFLSKHSQSTRSKIQVAKRRATDNGIHPKTTGHRAPIVCSAGMTIVFVATEVHPWCKTGGLGDVVGGLPPALAAMGHRVMTIAPRYDQYKDAWDTSVLVEVNIGDTVETVRFFHCYKRGVDRVFVDHPMFLEKVWGKTGAKLYGPTTGTDYRDNQLRFCLLCLAALEAPRVLNFNNSEYFSGPYGEDVVFVANDWHTAILPCYLKSMYKPNGIYKNAKVAFCIHNIAYQGRFARADFDLLNLPDSFLPSFDFIDGHVKPVLGRKLNWMKAGIIESDLVLTVSPHYVKELTSGPDKGVELDGVLRTKPLEIGIVNGMDVYEWDPSTDKYISVKYDATTVTEARALNKESLQAEVGLPVDSSIPVIVFVGRLEEQKGSDILIAAIPEFVGENVQIIVLGTGKKKMEEELTQLEVKYPNNARGIAKFNVPLAHMMFAGADFIIVPSRFEPCGLIQLQGMRYGVIPICSSTGGLVDTVEEGVTGFHMGSFNVECETVDPADVTAVASTVTRALKQYDTPAFHEMVQNCMAKDLSWKGPAKKWEEVLLGLGVEGSRAGIDDAEEIAPLAKENVATP

SEQ ID NO: 52804 - protein, 612 aa, Zea mays
  Clone ID: 700348567_FLI.pep
LHHYRLLRVTPLVASCGDRRRIVRGASATMGLFTVTKKATTPFEGQKPGTSGLRKKVTVFQQPHYLQNFVQSTFNALPADQVKGATIVVSGDGRYFSKDAVQIITKMAAANGVRRVWVGQNSLMSTPAVSAVIRERIGADGSKATGAFILTASHNPGGPTEDFGIKYNMGNGGPAPESVTDKIFSNTTTISEYLISEDLPDVDISVVGVTSFSGPEGPFDVDVFDSSVNYIKLMKTIFDFEAIKKLLTSPKFTFCYDALHGVAGAYAKHIFVEELGADESSLLNCVPKEDFGGGHPDPNLTYAKELVERMGLGKSSSNVEPPEFGAAADGDADRNMILGKRFFVTPSDSVAIIAANAVQSIPYFASGLKGVARSMPTSAALDVVAKNLNLKFFEVPTGWKFFGNLMDAGMCSICGEESFGTGSDHIREKDGIWAVLAWLSIIAFKNKDNLGGDKLVTVEDIVRQHWATYGRHYYTRYDYENVDAGAAKELMANLVSMQSSLSDVNKLIKEIRSDVSEVVAADEFEYKDPVDGSVSKHQGIRYLFGDGSRLVFRLSGTGSVGATIRVYIEQYEKDSSKTGRDSQEALAPLVDVALKLSKMQEYTGRSAPTVIT

SEQ ID NO: 52805 - protein, 480 aa, Zea mays
  Clone ID: 700348376_FLI.pep
GEVPASLQNLTQLTVLNLQDNSFSGSIPDLKLHSLKLLNLSNNELKGSIPRSLQKFPKGSFSGNHGLCGLPLAECSHPSLARSPESSPSPQSPPLTHHDKKLGTGFIVAVAVGGFALLMLVVVVCFSKRKGKDEIDVESKGKGTATRSEKPKQEFSSGGQIAEKNKLVFLEGCTYSFDLEDLLRASAEVLGKGSYGTAYKAILEDGTVVVVKRLKDVVAGKREFEQQMELIERLGKHANLLPLRAYYYSKDEKLIVYDYIDTGSVSAMLHGIRGVTAKTPLDWNSRMKVILGTAYGIAHIHSEGGAKLTHGNVKSTNVLVDQDHNPSVSDYGLSALTSVPVNASRVVVGYRAPEIVENRKITQKSDVYSFGVLLMEMLTGKAPLQTQGNDDVVDLPRWVHSVVREEWTAEVFDVELMKHQNIEEELVQMLQIAMVCTAKSPDRRPTMEEVIRMIEGLRQSTSESRASSDEKSKESNPPSV

SEQ ID NO: 52806 - protein, 358 aa, Zea mays
  Clone ID: 700348384_FLI.pep
RNRKTLFNVDDHQHIENGNLGNMKRFQFRELQAATENFSSKNILGKGGFGIVYRGQLPDGSLVAVKRLKDGNAAGGEAQFQTEVEMISLAVHRNLLRLYGFCMTASERLLVYPYMSNGSVALRLKGKPPLDWITRKRIALGAARGLLYLHEQCDPKIIHRDVKAANILLDDCCEAIVGDFGLAKLLDHRESHVTTAVRGTVGHIAPEYLSTGQSSEKTDVFGFGILLLELITGQTALEFGKSSNQKGAMLDWVKKMHQEKQLDILVDKGLGSKYDRIELEEMVQVALLCTQFLPGHRPKMSEVVRMLEGDGLAERWEALQHTESHKFKVPEFSFSRCHSDLTDDSSLLVQAVELSGPR

SEQ ID NO: 52807 - protein, 377 aa, Zea mays
  Clone ID: 700356094_FLI.pep
ERKHYSERAAAKLARTIVEVVQLCHENGVMHRDLKPENFLFVNKSEESPLKAIDFGLSVFFKPGDRFTEVVGSGCYMAPEVLKRSYGPEIDVWSAGVILHILLCGFPPFWGGSDEKIAQSILRGVINLQKDPWPKVSQSAKDLVTRMLDPDPCTRLTAKQVLEHPWLKNADKASNVSLGEVVRSRLKQLSSMNKLKKKALGVVAMNLPMEEIGKFKEMFHTMDKNKDGSLSLEELKEGFRINDHPVPEEEIKMLLQAGDIHGTDTLDCEEFVTVLLHIKKMSNDEYLPKAFEFFDKDGNGFIEMSELMETLSDGELKPDEQLVNDIIQEVDKDKDGRISYPEFELMMKSGSDWRNASRRYSTENFSSLSQKLCKDTL

SEQ ID NO: 52808 - protein, 293 aa, Zea mays
  Clone ID: 700380431_FLI.pep
EVGLEQVPDVIHSYHICVVKNKRIDSDIIAKATQMKIIMQYGVGLEGVDVNAATEHKIKVARIPGSTTGNAVSCAEMAIYLTLGILRKQKEMDTAVNRKDLGVPVGDTLFGKTILILGFGAIGIEVAKRLRPFGVKILATKRNWSSDTLPSYVDELVDKKGGPEDMYEFAGEANIVIACMTLTSETIGIVDHKFVSSMKKGSYLVNIARGRLLDYKAVFDHLESGHLAGLGIDVAWMEPFDPEDPVLKFPNVILTPHVAGVTEYSYRTMAKSVGDTALQLHLGEAFTEVEFVN

SEQ ID NO: 52809 - protein, 281 aa, Zea mays
  Clone ID: 700381593_FLI.pep
APGETMLNLGSKTDKRLTAFHPEIEELIYSDVENSEHKFVLKDKKKPIIFSMARLDRVKNMTGLVEMYGKNARLRELANLVIVAGDHGKESKDREEQAEFKKMYSLIDEYKLKGHIRWISAQMNRVRNGELYRYICDTKGAFVQPAFYEAFGLTVIESMTCGLPTIATCHGGPAEIIVDGVSGLHIDPYHSDKAADILVNFFDKCKADPSYWDKISQGGLQRIYEKYTWKLYSERLMTLTGVYGFWKYVSNLERRETRRYIEMFYALKYRSLASQVPLSFD

SEQ ID NO: 52810 - protein, 214 aa, Zea mays
  Clone ID: 700424546_FLI.pep
TCLLLCIYMLIAGTMKSAMVAAVVLALLLFYGTGNANCATLRPTSRNSTDDMLSLLDFRKEISSDPGGFLRSWNTSGSSAADYCSWNGVTCSRTHPRRVIELKLSSQSLQGRISPSLGNLTFLRTLNLSYNSFFGQLPLLSRLVRLQDLVLNNNQLQGLAPDALINCSSLHSIKLSSNMFTGPIPASIGSLSNLMYLYLDDNSFTGAIPSSLLN

SEQ ID NO: 52811 - protein, 428 aa, Zea mays
  Clone ID: 700468444_FLI.pep
AREQMEHRNYQIAIEVSELEASLASRSAEGESLSKSLSQREAEISELRDKITSLEGKLAAQRPVLAEQIGCTSKLYHEMREVVKLVDAEAVSALSDSVFVWKETDVEESLKVSLEGTKLAYELAAIALEKVGACIDDKESKLRRLENMVDGLIKEKEHISVLLRNALQATTSEVLKVAEDGLREAGIEIGLNERKEHMLGSVEKDEVYTLAGALENTMKESQVKIIELQHLVEALRAESGLLRTRLEGQEKEIGQLRKQIKNLEEKEKVANESVEGLMMDVTAAEEEIKRWKMAAEEEAEAGRSIEQEFQIQISSLRKELDEANRAMVELENKLKFKEETAAAAMAARDAAEKSLKLADTRSSRLRERLEELNKQLEESDTRTESVNRNGHRYMCWPWQWLGLNYVQLPLAETDQTSNEMELSEPLII

SEQ ID NO: 52812 - protein, 512 aa, Glycine max
  Clone ID: 700555065_FLI.pep
MTEYRMNLWTDDNSSVMEAFMSSSDLSSLWLPTPQSAASTTTPGLETTRAPPPQSHSLLNQETLQQRLQTLIEGARESWTYAIFWQSSYDYSSGTSLLGWGDGYYKGEEDKVKAKGKTPKTTSSAEQDHRKKVLRELNSLISGPSASVDDVDEEVTDTEWFFLVSMTQSFVNGSGLPGQAFFNSSPVWVAGPDRLSESVCERAHQGQMFGLQTLVCIPSANGVVELASTEVIFQNPDLMNKVRDLFNFNNNPETGSWALNCVATTDQGENDPSSLWLNPEIRDSSTVAPPNSTVNKTLQFETPGSSTLTDTPSAAAVHVPKSNGQGFFSRELNFSNSLKPESGEILSFGESKKSSYNGSFFPGVVAIEENNKKRSPVSRSSIDDGMLSFTSLPAANIKSGSGGAGAGGGDSDHSDLEASMVKQADSRVMEPEKRPRKRGRKPANGREEPLNHVEAERQRREKLNQRFYALRAVVPNVSKMDKASLLGDAISYINELKLKLNGLDSEKGELEK

SEQ ID NO: 52813 - protein, 181 aa, Glycine max
  Clone ID: 700558826_FLI.pep
QIDANVQREIVNHRSLRHPNIIRFKEVFLTPTHLAIVLEYAAGGELFERICNAGRLSEDEARFFFQQLISGVSYCHSMQICHRDLKLENTLLDGNPAPRLKICDFGFSKSALLHSQPKSTVGTPAYIAPEVLSRKEYDGKVADVWSCGVTLYVMLVGAYPFEDPEDPKNFRKSIGVNSYLT

SEQ ID NO: 52814 - protein, 287 aa, Glycine max
  Clone ID: 700560522_FLI.pep
LDMAFTQLIPSPSSSSLNPITLSLNPKSPTSPPQQHFNLDILRHRRRRPNSTLRCSASSFSEKHHTNSSNSDDVVELPLFPLPLVLFPGAILPLQIFEFRYRIMMHTLLHTDLRFGIIYTDAVSGTAEVGCVGEVIKHERLVDDRFFLICKGQERFRVNGVVRTKPYLVAQVTWLEDRPSPSTDLDLDGLATEVETYMKDVIRLSNRLGGKPEKEVGDLRRNLFPTPFSFFVGSTFEGAPREQQALLELEDTAARLKREKETLKNTLNYLTAASAVKDVFPSSSNSS

SEQ ID NO: 52815 - protein, 396 aa, Glycine max
  Clone ID: 700562679_FLI.pep
VFSVDDISDHFWQPPIPVSAAQTSSQMSRSASEWAFQRFLQEASASAPSPPSSSSAADVVFVEIEDQPKPAPPPPSNGAVLPNAPGPVPLDSDEYQAFLKSKLNLACAAVAMTRGSLAKSQDPSPFSEGSIPSENDPSKLQDKDTNVPVGIPSIPAMQKKPAVAIRPSTSGSSREQSDDEDIEGETSMNDNTDPADVKRVRRMLSNRESARRSRRRKQAHLTDLETQVSQLRGENSTLLKRLTDVSQKYSDSAVDNRVLKADVETLRTKVKMAEETVKRITGLNPLLHAMSDISSLGLPSFDGRSPSDTSADAAVPVQDDPHHHFYQPTSTNPIPSHDPIVNNGLGGISSIENVQQNAAVVLGGNKMGQTASLQRVASLEHLQERIRGGPPSNGEQ

SEQ ID NO: 52816 - protein, 519 aa, Glycine max
  Clone ID: 700563255_FLI.pep
LARETIGLQMPNLQKLYLYGNNLTGPVPESIGDLPRLQELALHENKISGSIPSTIGSLKKLKSLLLYSNQISGTIPFSLGNLTNLVELDVHDNAIMGQVPNSIGQMQALEKLDLSSNMLSGSIPSSLTNLTAISVLYMDTNYLEGTIPFPSRSGEMPSLGFLRLHNNHLSGNIPPSFGYLVSLKRVSLSNNKIEGALPSSLGNLHSLTELYLSDNSFSGQIPKSIGQLSQLIMLNISSNLIEWPLPQEISSLQNLQTLDLSFNPLNLSSIPPWLTSISSLSRISLAGCGIKGQIPDSLQTTQSPIQELDLSGNLLSGSIPSWIGSLSQLYLLNLSSNSLDSHIPESLTNLPDLGVLDLHSNKLTGSIAGVFDTEQGTLTYIDLSDNNFSSGVEAIGVGEQLNIQYLNLSHNLLKGTLPSSLGKLNSIHSLDLSFNELASNLPEMLAKLTLLERLKLQGNHFSGKIPSGFLKLKKLKELDLSDNVLEGEIPEGKPLTDFPGSTYSGNKGLCGKPLNPCKE

SEQ ID NO: 52817 - protein, 471 aa, Glycine max
  Clone ID: 700564072_FLI.pep
MEEEIEYEEVEEEEEVEEIEEEVEEVEEEEEVEVEEEEEEEEEEEEEEEVEVEEVEEDDAMQNHSSDEAKVEDEDEKRKHAELLSLPPHGSEVYIGGIPHASDEDLKSLCERIGEVAEVRIMKGKDSSENKGFGFVTFTSVELASKAIEELNNTEFMGKKIKCSKSQAKHRLFIGNVPRSWGVEDLKKIVTEIGPGVTGVELVKDMKNTNNNRGFAFIDYYNHACAEYSRQKMMSPTFKLGENAPTVSWADPKNAESSAASQVKAVYVKNLPKNVTQEQLKKLFERHGKITKVVLPPAKSGQEKNRIGFVHFAERSNAMKALKNTERYELEGQLLECSLAKPQADQKSGGSNTQKPGPGLLPSYPPHVGYGLVGGAYGALGAGYAAPGLAQPLLYGGGQTPAGMAMMPMLLADGRIGYVLQQPGMQPQAPPSHHRGGRGGGGSGSGNRNAGSSSKGRHNNDGGHGRRYRPY

SEQ ID NO: 52818 - protein, 418 aa, Glycine max
  Clone ID: 700564895_FLI.pep
ARPRIDFSSVFALVNPIVDHVRERGDAAVKEYTLRFDKAELDNIVELVSDLPDPQLDAHVKEAFDVAYNNIYAFHAAQKTPERNVENMKGVQCKRVARSINSVGLYVPGGTAVLPSTALMLSVPAQIAGCKTIVLATPPAQDGTICKEVVYCAKKGGVTHILRAGGAQAISAMAWGTETCPKVEKIFGPGNQYVTAAKMILQNSEAMVSIDMPAGPSEVLVIADKHAIPRHVAADLLSQAEHGPDSQVVLVISGEGVDLNVIEEELNKQCQSLPRGEFAAKALSHSFIVYAHDMLESIKFSNLYAPEHLIVNTNDAEKWEGFIENAGSVFLGPWTPESVGDYASGTNHVLPTYGYARMYGGVSLDSFLKFITVQSLTEEGLRKLGPYVVTMAEVEGLDAHKLAVTLRLEDIEVRQVST

SEQ ID NO: 52819 - protein, 199 aa, Glycine max
  Clone ID: 700565358_FLI.pep
FFFFCHCACVIQHIASAVGTFGRVLECWDRQTREYVAIKVVRSIRKYRDAAMLEIDVLQQLAKNNRGSSRCVQIRNWFDYRSHVCIGEALFQTHENLEHLAMMERVLGSIPELMIRRSNKGAEKYFKRGSRLRWPEGAVSRESISAVKKLGHLKDIVSRNVDSSRSSLTDLLHGLLTYDPTKRLTACQALDHIFFRNPT

SEQ ID NO: 52820 - protein, 138 aa, Glycine max
  Clone ID: 700903084_FLI.pep
QDGIDAIEDVIYHIETYDVTTIRASIPMFLMSRKIKSLGVKMVISGEGSDEIFGGYLYFHKAPNKEEFHQETCRKIKALHKYDCLRANKSTFAWGLEARVPFLDKEFIRVAMNIDPECKMVWIQNIAMHHHLKNVTFY

SEQ ID NO: 52821 - protein, 316 aa, Glycine max
  Clone ID: 700903662_FLI.pep
LAMEAIRKSRILIFGGTGYIGKYMVKASVTLGHPTFVYTRPLDAQTPSSKAQLCKEFNSMGVTLVHGELEHDQILAVIKQVDIVICSLPYPQVMEQLKIIDAIKVAGNIKRFLPSDFGVEEDRVNPLPPFQAFLDKKRKIRREIEAAGIPYTFVSANCFGAYFVNYLLRPYEITVYGNGDTKAVLNYEEDIAMYTIKVANDPRTYNRVVIYRPSKNIISQNELIALWEQKSGQNFRKDFVAEEEIVNLSQTLPPPHNIPVSILHSVFVRGDLVRFEIGEDDLEASQLYPDYNYTSIDELLDIFLVDPPAPASAAFE

SEQ ID NO: 52822 - protein, 347 aa, Glycine max
  Clone ID: 700905512_FLI.pep
YKGRTEDDRLVAVKRFNKSAWPDPRQFLEEARAVGQLRNERLANLVGCCCEGEERLLVAEFMPNETLSKHLFHWESQPMKWAMRLRVALYLAQALEYCSSKGRALYHDLNAYRVLFDQDGNPRLSCFGLMKNSRDGRSYSTNLAFTPPEYLRTGRITRESVIYSFGTLLLDLLSGKHIPPSHALDLIRGKNFLMLVDSCLEGHISNDDGTEIVRLASRCLQYEPRERPNAKSLVTALAPLQKETSVPSQVLLGIPDEITPSKEAVPLTPFGEACSRRDLTSIYEILETVGYKDDEDVANELSFQVWTDQIQETLNSKKQGDSAFHARDFSKAIECYTQVSQLEIRGA

SEQ ID NO: 52823 - protein, 244 aa, Glycine max
  Clone ID: 700906096_FLI.pep
KMGRGKVQLKRIENKINRQVTFSKRRSGLLKKAHEISVLCDAEVALIVFSHKGKLFEYATDSCMEKILERHERYAYAERQLVANDSETQGNWTIEYTRLKAKIDLLQRNHRHYMGEDLASMSLKELQSLEQQLDTAIKNIRTRRNDLMYASISELQKKEKMIQEQNNILAKKIKEKEQAVAQQAAQWEQPNYRVDTSFMPQQQPLRTSLNIGGNNYNQEAAPELGRNGLDLTLEPLYSCHLGCF

SEQ ID NO: 52824 - protein, 298 aa, Glycine max
  Clone ID: 700853988_FLI.pep
VEVDDRGVHNLYKQLVSSGHAFGAKRWVATLDRQCERLASAMATNIPTVDVGVITNQDGRKSMMKLAERMVISFCAGVSASTAHTWTTLSGTGADDVRVMTRKSVDDPGRPPGIVLSAATSFWLPVPPKRVFDFLRDENSRNEWDILSNGGVVQEMAHIANGRDTGNCVSLLRVNSANSSQSNMLILQESCTNSTGSFVIYAPVDIVAMNVVLNGGDPDYVALLPSGFAILPDGTTSHNGSGGIGETGPSGSLLTVAFQILVDSVPTAKLSLGSVATVNNLIACTVERIKASLSGEPA

SEQ ID NO: 52825 - protein, 118 aa, Zea mays
  Clone ID: LIB3078-009-H8_FLI.pep
LHPGHVLPGPGGAAARARGHHGLRRRRGAQAGRQEPAGGRGQRHHVPGLRARPERRHHREHAAADVQRRLRRQEQQDRVRRRRLQLRSDTYIHAHAQTDSVTKTKTSSACMHLPSGFV

SEQ ID NO: 52826 - protein, 165 aa, Zea mays; identical to SEQ ID NO: 44696
  Clone ID: LIB3069-014-C12_FLI.pep

SEQ ID NO: 52827 - protein, 317 aa, Zea mays
  Clone ID: 700550149_FLI.pep
PVLLFRLLDATRRRLLQLAPRSSPHHLPLPPTMSTSEVWSLSDFEISKYIGEGRFGKVYLAREKQSGYVVALKVIFKAKLQKYHFHAHLRREIEIQQSLDHPNVLRLFTWFHDEERVVLVLEYAARGELYKVLRAAGRFTERTSATYVASLAGALAYCHKKQVIHRDIKPENLLIDIEGRLKIADFGWAARSNAKRHTLCGTIDYLAPEMVEKKAHDHAVDNWTLGILCYEFLYGSPPFEADEQDDTLRRIVRVDLAFPSSPCVSSEAKDLISKLLVKDSSKRLCLEDIMKHPWIKKNADPSGSCIKQKDVTRSKLL

SEQ ID NO: 52828 - protein, 258 aa, Zea mays
  Clone ID: 700550537_FLI.pep
GTPDPPLPPPRLNPPPPRCVRGRGREAEAEAAMGSRLGRRVIHFANLPLKVMLPPAPLSSVQEFAVRTVPSASKVDIRRCLESMYGFSVAEVRTLNMEGKKLRRGPFLSAKPDYKKAYVTLRAPLAVSRDLFPIGAILAERERKASAAAARRKAVEGAEVEGESKGKHWMEDEREGFSRAGCGKVVYGNPGRLGRKRRGGDKVKEQAGDEAAKFPWSGMRLATEKPRRVRRSPSKKGIVLKQKSRKVSLQHRSKKLKA

SEQ ID NO: 52829 - protein, 272 aa, Glycine max
  Clone ID: 700678796_FLI.pep
TMEFPLIWLKRPCSNLRPFFDYSDEEKSKSSPSSDAPLPAGYSRQPLHSPDKNEYFLFFSPGSSFNVIPQIPPKFRDVLEEMFVQMSKMGVLLESIINECLGLPTNFLKEFNHDRSWDFLVALRYFPASNNENNGITEHEDGNIVTFVVQDGVGGLQVLKNGDWVPVVPAEGTIVVNVGDVIQVLSNNKFKSATHRVVRAEGRSRYSYVFFHNLRGDKWVEPLPQFTSDIGEPPKYRGFLYKEYQELRMRNKSHPPSRPEDEIHITHYAIDN

SEQ ID NO: 52830 - protein, 222 aa, Glycine max
  Clone ID: 700847609_FLI.pep
KSVLLLLLYKMSDENGEEPRENRPVPRLNERILSSLSRRSVAAHPWHDLEIGPGAPMIFNCVVEITKGSKVKYELDKKTGLIKVDRILYSSVVYPHNYGFIPRTLCEDNDPIDVLVLMQEPVLPGCFLRARAIGLMPMIDQGEKDDKIIAVCADDPEFKHYTDLTELPPHRLMEIRRFFEDYKKNENKEVAVNDFLPASTAVESIQYSMDLYAEYILHTLRR

SEQ ID NO: 52831 - protein, 364 aa, Glycine max
  Clone ID: 700847753_FLI.pep
EIVLSIEAMEVTAAPVPYVQEIAKEALTIVPERYVRPVHERPILSNSTPLPEIPVIDLSKLLSQDHKEHELDRLHYACKEWGFFQLINHGVDSSLVEKVKRGAQGLFDLPMEEKKKFGQREGEAEGYGQLFVVSEEQKLEWADLFFMFTLPPNKRKPHLFPNLPLPFRGDLDAYCEELRKLAIQILDQMANSLAIDPMEIRELFGEAEQSMRMNYYPPCPQPELVMGLNPHSDGGGLTILLQANEVEGLQIRKDGLWIPVKPLPNAFIINLGDMLEVMSNGIYQSIEHRATVNSEKERLSIATFYSTAIDAIICPAPSLVTPKTPAMFKPISAGDYFKGYLAQELRGKSFLDTIRIHAENENSS

SEQ ID NO: 52832 - protein, 311 aa, Glycine max
  Clone ID: 700895960_FLI.pep
FENELKWYWTEPQQGNFNYKDADNLLSLCQKHKIQTRGHCIFWEVDETVQQWIKSLNKNDLMTAVQNRLNGLLTRYKGKFSHYDVNNEMLHGSFYQDRLGKDIRANMFKTANQLDPSATLFVNDYHVEDGRDTRSSPDKYIHHILDLQEQGAPVGGIGIQGHIDSPIGPIVSSSLDKLGILGLPIWFTELDVSSVNEYVRADDLEVMLREAMAHPTVEGIMLWGFWELFMSRDNSHLVNAEGDINEAGKRFLSLKQEWLSHSRGHVDEQGQYNFRGFHGTYDVQVVTPSKKISKTFVLDKGDSPLVVSIDL

SEQ ID NO: 52833 - protein, 138 aa, Glycine max
  Clone ID: 700854132_FLI.pep
NNNGGWCNPPLQHFDMAEPAFLQIAEYRAGIVPVAFRRVPCVKKGGIRFTINGHSYFNLVLITNVAGAGDVNSVSIKGSKTGWQPMSRNWGQNWQSNSYLNGQSLSFQVTTSDGRTVTSFNVAPANWQFGQTFQGGQF

SEQ ID NO: 52834 - protein, 428 aa, Glycine max
  Clone ID: 700890591_FLI.pep
VNVDDTIAQQIVVHKNSPRGTHFRRAGPAQKVYFDSEEVHACIVTCGGLCPGLNTVIREIVCGLYHMYGVHKVLGIQGGYPGFYSRNTVPLTPKVVNDIHKRGGSILGTSYGGHDTSKIVDSIQDRGINQVYILGGYGTQYEAAMIFEEVRRRGLKVAVVGIPKTIDNDIPVIDKSIGFDTAVEEAQRAINSAHVEAESAENGIGVVKLMGRYSGFIAMYATLASRDVDCCLIPESPFYLEGPGGLLEFIEKRLKEQGHMVIVIAEGAGQELLSGNPSIVNKPDASADKLFPDVGLWLSQKIKDHFEKRQKMAINLKYIDPTYMIRAIPSNASDNVYCTLLAQSAVHGAMAGYTGFTVGPVNGRNCYIPFHLINEGEKRVVITDRMWARLLSSTHQPCFLNPKEITGEREERTENQTTDGQNHSEIAD

SEQ ID NO: 52835 - protein, 280 aa, Zea mays
  Clone ID: 700552479_FLI.pep
SNILLGEGFHPKLSDFGLAKLGPVGDKTHVSTRVMGTYGYCAPEYAMTGQLTVKSDVYSFGVVFLELITGRKAIDNTKTQGEQNLVAWARPLFKDRRKFPKMADPMLQGRFPMRGLYQALAVAAMCLQEQAATRPHIGDVVTALSYLASQAYDPNAPVQHVRSNSSTPRARNPAGWNGDQRSVRSPNHHSPDPRRRDAAGASKYGAEVSRTSSTSDSGRRSGLDDMDLTGSQVGSPAQTGRRREAPRGTDRQRAVAEARTWGENSRERTNGHGSFDSTHE

SEQ ID NO: 52836 - protein, 145 aa, Zea mays
  Clone ID: LIB3067-045-C3_FLI.pep
KKKQQGTMALSRSMRACLHSGRLALLAILVSGGIVLQILACALYNNWWPMLTVLMYLILPMPLIFFLGSDTSSMMSNGGDGWVNFTKFLTGASIVGSIAIPSILKHAGVIGWGALTMELSSFVVFGVAILWFLQMNGEDEYSGVF

SEQ ID NO: 52837 - protein, 300 aa, Glycine max
  Clone ID: 700789356_FLI.pep
GRSPCCEKEHTNKGAWTKEEDERLINYIKLHGEGCWRSLPKAAGLLRCGKSCRLRWINYLRPDLKRGNFTEEEDELIINLHSLLGNKWSLIAARLPGRTDNEIKNYWNTHIKRKLYSRGIDPQTHRPLNAASATPATTVTATAVPSSNSKKKIKNNNNNNNGFQLVNNSAYANTKIGTDMIAAEDSNSSSGVTTEESFPHHQLNLDLSIGLPSQPQVSSSLNPEKLKPEPQEHDDQKPQVLYQLYGKNITGQQGVCLCYNLGLQSNQACYCKTMGTSTTTVTTTTATDRNLYRFYRPMNI

SEQ ID NO: 52838 - protein, 152 aa, Glycine max
  Clone ID: 700890801_FLI.pep
KQVSLADWARHCCQNGTIGQIVDPTLKGRMAPECLRKFCEVAVSCLLDDGTLRPSMNDVVWMLEFALQLQESAEQRENTNIVDNEINERREEEASDDLFSTGTSVGQVSDFNKSSGVVSVSTDSEELSSSYKESDKLMSGTVFSEIVDPKPR

SEQ ID NO: 52839 - protein, 265 aa, Glycine max
  Clone ID: 700889301_FLI.pep
SALPEHLHDGLLHTACGTPAFTAPEILRRVGYDGSKADAWSCGVILYNLLAGHLPFDDSNIPAMCRRISRRDYQFPAWISKSARSLIYQLLDPNPITRISLEKVCDNNKWFKNNSMVEVKESVWESDLYNKCCDGGYKSGMNAFDIISMSSGLDLRGLFETTSEKGRRREKRFTSDKKVETVEAKVKEVGEKLGFRIEIGKNGAIGLGKGKVGVVVEVFEIVADLLLVAVKVVDGGLEFEELHWDDWRIGLQDLVLSWHDVGLEL

SEQ ID NO: 52840 - protein, 218 aa, Glycine max
  Clone ID: 700889733_FLI.pep
YGIFLVGYSIIFGIETAKSFRGFLNRLNISSGKEGSKIFINCKVDSYRCQLIVMAISVVALGILWGVSGALVKAEFKNGGNVAQLWFACMVGPIGVWIRWFLARLNGRGLGKAGLFKWIPFGTLIANVSAACIMAALSTVKNAVNTRDCDTAVAGIQFGLMGCLSTVSTFAAEFNAMRESSRPMRAYAYAIITVFLSFSLGILIYCIPVWTKGLDIDT

SEQ ID NO: 52841 - protein, 422 aa, Glycine max
  Clone ID: 700846510_FLI.pep
SEDDDLFDGGYESGDDARGIVPSNRPPEVNLKNVLSGIFAILSGRTKAPSVTANQQLPSSNVSFFDSGKNGDVFLDSSVYTPSAPPLCLPNGIDYSSYKEVLEAEPPEWLPDSSTTVCMQCSAPFTAITRGRHHCRFCGGIFCRTCTKGRCLMPVGFRERNPQRVCDACYDRLDPLQGVLINTISNAVQGAKHDVTDWTCARGWINLPIGLSMEHEIYKASNTLRNYCQVAKSNPEKSIPLTVLKSAKGLAILTVAKAGALVSYKLGTGLVVARRSDGSWSAPSAIFSLGLGWGAQIGGELMDFIVVLRDMKAVKTFCSRMHFSLGAGCSAAAGPVGRVLEADIRAGDRGSGMCYTYSCSKGAFVGVSLEGNIVATRMDANLCFYGDPYLTTSDILLGMVDRPKAAQPLYGSLQELYSCLRF

SEQ ID NO: 52842 - protein, 632 aa, Glycine max
  Clone ID: 700724966_FLI.pep
LFLSALFFGIKEVKSMDSDYGIPRELSDLQKIRSLYQPELPPCLQGTTVRVEFGDATTTADPTDALTISRAFPNTYGHPLAHFLRATAKVPDAQIITEFPPIRVGIVFCGRQSPGGHNVIWGLHNALKIHNPNSVLLGFLGGSEGLFAQKTLEITEDILSTYKNQGGYDLLGRTKDQIRTTEQVNAALAACNNLKLDGLVIIGGVTSNTDAAQLAETFAVAKCPTKVVGVPVTLNGDLKNQFVETNVGFDTICKVNSQLISNVCTDALSAEKYYYFIRLMGRKASHVALECTLQSHPNMVILGEEVAASKLTLSEIAKQITDAVQARAEQDKYHGVILLPEGLIESIPEVYALLKEIHGLLRQGVAVDKISSQLTPWASALFEFLPPFIRRQLLLYPESDDSAQLSQIETEKLLAYLVEVEINKRLKEGTYKGKKFNAICHFFGYQARGSLPSKFDCDYAYVLGHICYHILAAGLNGYMATVTNLKNPVNKWRCGAAPIASMMTVKRWSPNPGATSIGKPAIHPATVDLRGKAYELLRQKAQSFLMDDIYRNPGPLQFDGPGAGAKVITLSVEDQDYMGRIKKLQEYLEQVRTIVKPGCPQEVLKAALSVMASVTEVLAAMSTSSTNTLSAM

SEQ ID NO: 52843 - protein, 488 aa, Glycine max
  Clone ID: 700755416_FLI.pep
PNFRAYSIILILLFVNSGSAHNYQEALSKAILFFEGQRSGFLPQDQRQNWRANSGLGDGWTYNVDLTGGYYDAGDNIKFGFPMAFTTTMLSWSVIEFGDMMPPNEHRNALVAIRWATDYLLKTVSQPNRIFVQVGDPISDHNCWERPEDMDTSRTVYAVDAPNPASDVAGETAAALAAASMAFRSSDPGYSDTLLRNAAKAFQFADTYRGAYSDNADVRSGVCPYYCDFDGYQDELLWGAAWLRRATQDENFLNYIQSNGKTLGAEDNINEFGWDNKHAGLNVLVSKEVLDGNVMSLESYKTSAESFLCTLIPETSSSHIEYTPGGLIYRPGGSNLQHATSIAFLELVYANYLSRTSQTINCGNIYVNAQTLRQHAKKQVDYILGDNPMRMSYMVGYSNKYPQHIHHRGSSLPSIKDHPQFIACKEGSIYFNSSNPNPNVLVGAIVGGPGEDDVYEDDRADFRKSEPTTYINAPFVGILAYFVANPNP

SEQ ID NO: 52844 - protein, 182 aa, Glycine max
  Clone ID: 700846047_FLI.pep
LISSLSVIMGMQKHVLLGLHKESLQALRVNYYPPCSTPEQVLGLSPHSDASTITLLMQDDDVTGLEIQHQGGWVPVTPIPDALVVNVGDVIEIWSNGKYKSVEHRAVTSKKKRRISYALFLCPRDDVEIEPLDHMIDAQKPKLYQKVRYGDYLRQSMKRKMEGKTHMDVARIEDSHLTKKDD

SEQ ID NO: 52845 - protein, 561 aa, Zea mays
  Clone ID: LIB3067-032-C11_FLI.pep
SSLQRDLSPDQALNATALANLLSLRSMAAAVAAPAPSRKTETYTDTKRRDDVRGANIAAARAVADAVRTSLGPRGMDKMIASGDQAQEVIITNDGATILSRMALLQPAARMLAELSRSQDAAAGDGTTTVVVLAGSLLRRAQSLLSAGAHPTAAADALHRLATRAVEILHAMAIPIELSDRESLVKSASTALNSKVVSQYSTLLSPLAVDAALSVVDPAHPDLLDLRDIRIVKKLGGTVDDTELIPGLIFDKKASHAAGGPTRMENAKIAVIQFQISPPKTDIEQSVIVSDYAQMDRILREERNYILGMVKKIKAAGCNVLLIQKSILRDAVTDLSLHYLAKAKILVVKDVERDEMEFITKTLNCLPIANIEHFRTDKFGYANVVEEVSVGEGKVVKITGIKDMGRTATVLVRGSNQLVIDEAERSLHDALCVIRCLVSKRFLIAGGGAPEIEMSMQLAAWAKELRGMESYCIKEFAEALEVIPYTLAENAGLNPISIVTELRNRHARGEKNTGINVRKGQITNILEENVVQPLLVSTSAITLACECVRMILKIDDIVTVR

SEQ ID NO: 52846 - protein, 172 aa, Zea mays
  Clone ID: LIB143-044-H4_FLI.pep
AAPPPSSNMETANVVILSFFFIFAIHRLFNRLHSRSTKMKPLPPGPLAIPVLGHLYLLLEKNIHHMFTRLAARYGPVLYLRLGSRNAVIVSSVDCARECFTEHDVTFANRPTFPTLHLMTYGGTTVGTCAYGPYWRHIRRVITVHLLSALRVRSMVPAIEAEVRAMARSMYR

SEQ ID NO: 52847 - protein, 100 aa, Zea mays
  Clone ID: LIB148-036-F6_FLI.pep
ISNGVEIISCQGRNETAGHTRTHGDRSLRGDELHASDGERGERADGEGVDVGAGLGVGGVAALVHEAVVLVGPADDGAGELVWVGLVGRHPVPEAEAAVD

SEQ ID NO: 52848 - protein, 161 aa, Zea mays
  Clone ID: LIB148-043-D12_FLI.pep
ARPRAAAGRAVPPRGAGAAGGRRGAGGRRGPGRRERAAALRRHGARPGGGHCRRQGRRGPHGGLHVPAHGARPVPARQLAPLRRVRQAHDGAGRAGGVPGAGGAGGRGRRARHPAPRARGRRRAHQLTGPAGVPRRLCSIARRGGTLRRLPVWRVPILTHT

SEQ ID NO: 52849 - protein, 520 aa, Zea mays
  Clone ID: LIB148-053-C10_FLI.pep
KTTGGSKPRPKPTTTELLRGSGRPLGALGLHGERGGGARAVGVAAVDVGGHGQRADALAEAGLLHQLLGARRVAAADGVVAADAHGVAVAREHHLLDELLGRARQRGPGLEVGGGHRDLAVLALPRLDVRRVPLRDESADVVALHRQDHDRIRPPELLLEQHQHVVLLPQEGPWNMVQLLRWPAEGVLVGDPVAADALAVDEHQALAHCAHIQHDRVLSRRHVEVPLVPGERPVVHGWLPCDAAHALIGVDLLLLADEADDVAPAVIRQVQRARVEALDLHPVDAGQTVLQVSATVHHSHRRRQDGDVVHALFQVHGLLERERLVHLGPVPTSYEFGVHKRHAGVPVAVDLEHRLDVAADRHVVRLQLEAGGVPDVVGLVLGEVVEIAGLAQPDLGLLVLGHFLLVEHLPHVVLRRLVREVERPLVVLRVHVLGAEDDGLAVGEDADGVARHEVGLAPERQRHVVLGVVVGEERHAHLLLRDLEHPRLELLAQLLRRCLPPEQGLLAQLQRQVQVPQMAP

SEQ ID NO: 52850 - protein, 292 aa, Zea mays
  Clone ID: LIB148-059-H3_FLI.pep
PNICNSLYMVPGSSPLLLARQKNSVSGSSLRVELVRFRVHYDLPKPSDWRQNHQDHPENDADPVGEPREAEPLGLVDREPHDAGKEIGRRCKGESAEEAEQSAEEGEGDGDEHCERNIGGPRDETQCQTGREAQLLHQHRLYHVKHWHGVDLVAANDVDDDHHVGERDEPPGLAERDEDVVLDAVAERPVADERDGEVAERDDDVGDDDALPHGLLGRLLGSRRDGGLDLQHHVVPGVRERHVAQRAEEAEHLAGGRGRAQVVVHARHPALVHRRAPRDGGVAERHDGGGQR

SEQ ID NO: 52851 - protein, 222 aa, Zea mays
  Clone ID: LIB143-004-D12_FLI.pep
IHHKCHYIENQVASPGNMEPATAIVGQTVCDLASVMRSCQVADDIREDASMVEVRQLHLSVKANDASERFPIVGSNSHILAGTDLTEVGREIDAVPLMSSEAKRISILTSFEAQRNDSHPHQVASVDTLKALGNYSFNSQEHRTLSSPITRTAASILSTSEDYSSMALRFVSHGRIKNRKLLPSRNMNGLGSNFSVQKLVHDPNVCKRSPCHYFIITTTATI

SEQ ID NO: 52852 - protein, 327 aa, Glycine max
  Clone ID: LIB3028-021-F11_FLI.pep
NGLDTSINGAEVKHVMKVSLDDDRHDYYSIGTYDEKNVLFTPDDAKNDVGVGLRYDYGIFYASKTFYDQNKERRVLWGWIGESDSEYADVAKGWASVQSIPRTVELDRKTGSNLLQWPVAEIESLRLRSDEFKNLKAKPGSVVSVDIETATQLDIVAEFEIDKETLDKIPQSNEEYTCSTSGGSKQRGALGPFGLLVLADEGLSEYTPQYFYVIKGSNGNLKTSFCADQSRSSQANDVRKQIVGSAVPVLKGEKFSLRILVDHSIVESFAQGGRTVVTSRVYPTKAIYGAARLFLFNNATEATVTASLKVWQMNSAFIRPFHPDQKS

SEQ ID NO: 52853 - protein, 522 aa, Glycine max
  Clone ID: LIB3049-035-B2_FLI.pep
DDLNLDDPNPAQDSSSSTQKVDERSKEQVEDFDLPDFEVVDKGVEVQEKEEDGGEEAEEPVQEESTSSEVVKEVVLDHVHLTRLSELDSIAQQIKALESMMGEDDKFTNVEEETEPQRLDADEETVTREFLQMLEDQDNSDYLFNQPEIPPLKLEGHEDASSEDGDSKVYLPDLGKGLGCVIQTRDGGYLASMNPLDIAVARKDAPKLAMQMSRPFVLASHQSLTGFELFQKLAGIGFDELSSKVLSLMPIDEMIGKTAEQVAFEGIANAIIQGRNKEGASSSAARIVSYLKSMGSAMSSGRRERITTGLWNVEEEPLTAEKLLAFAMQKVESMTVEALKIQADMAEELEAPFDISAKKGEGGKDLLASVIPLEEWIRDHSYAKTVAGSDGEPEKVTLVLVVQLRDPLRRYEAVGGPVMVLIHATSADTKGKEEEKRFKVTSMHVGGFKLTSAIKKNAWDSGKQRLTAMQWLVAYGLGKAGNKKGKQSLAKGQQDQLWSISSRIIADMWLKTMRNPDINLGK

SEQ ID NO: 52854 - protein, 247 aa, Glycine max
  Clone ID: 700671753_FLI.pep
SDEHENLKHQNRRINLHPFAKPNMLEISRLIYMVNHGVIFRNVPLIVVVFLFSDIVKRYDEAMKKLVGKLMWLMLDSLGITKEDLKWAGSKGQFKKTCAALQLNSYPTCPDPDRAMGLAAHTDSTLLTILYQNNISGLQVHRKGGGWVTVAPVPEGLVINVGDLLHILSNGLYPSVLHRVLVNRIQQRLSVAYLCGPPPNVEICPHAKLVGPNKPPLYKAVTWNEYLGTKAKHFNKALSTVRLCAPS

SEQ ID NO: 52855 - protein, 143 aa, Glycine max
  Clone ID: 700790931_FLI.pep
VSFSVRKKDCRVSLEGCREGVKGPLTIAAEVFELTPSLVVVEVKKKGGDKAEYEKFCNSELRPALENLGMEESASSSSSCHQSTHTQSEFQQHRTLSDSALNRHSDNECLFERELGLADETSISQHGESKFECQQENMAMFTI

SEQ ID NO: 52856 - protein, 354 aa, Glycine max
  Clone ID: 701206553_FLI.pep
EMPVGYVQIPVGVAGPLLLDGFEYTVPMATTEGCLVASTNRGCKAIYASGGASSVVLRDCMSRAPVVRFSTAKRAAQLKFFLEDPLNFDTLSLVFNRSSRFARLQGIQCAMAGKNAYLRFTCSTGDAMGMNMVSKGVQNVLDFLLNDFPDMDVIGISGNYCSDKKPAAVNWIEGRGKSVVCEAIIKEEVVQKVLKTNVSALVELNMLKNLAGSAVAGALGGFNAHASNIVSAIFIATGQDPAQNVESSHCLTMMEAVNDGRDLHISVTMPSIEVGTVGGGTQLASQSACLNLLGVKGASKESPGSNSRLLATIVAGSVLAGELSLMSAIAAGQLVNSHMKYNRSSKDVTKISSS

SEQ ID NO: 52857 - protein, 240 aa, Glycine max
  Clone ID: 700789554_FLI.pep
GPFPTAVTSLLDLTRLDLHNNKLTGPIPPQIGRLKRLKILNLRWNKLQDAIPPEIGELKSLTHLYLSFNNFKGEIPKELANLQDLRYLYLHENRLTGRIPPELGTLQNLRHLDAGNNHLVGTIRELIRIEGCFPALRNLYLNNNYFTGGMPAQLANLTSLEILYLSYNKMSGVIPSSVARIPKLTYLYLDHNQFSGRIPEPFYKHPFLKEMYIEGNAFRPGVNPIGFHKVLEVSDGDFLV

SEQ ID NO: 52858 - protein, 504 aa, Glycine max
  Clone ID: 700669227_FLI.pep
VCVVAFIPENQIRLRKRKRKKMALKFLNKKGWHTGSLRNIENVWKAEQKHEAEQKKLEELRKQIQEERERTEFRLLQEKAGLVPHQERLEFLYDSGLSVGKSANSEGFKALEQLPKSDATDAAGAGSSASASKEGASVLGALFEEKPQSANDAWRKLHSDPLLMIRQREQEALAKIKNNPVQMAIIKKSIEGTENKEKVYKKEKRKKHWSSKSKHKKQSDSEDDTTERRKRKTGNEVSDKKHHKAQSDSEYQSSEGEMRRRKDRYEDKKYRERSPSHQQRQRNGKDYKEDAGDRNYNRSRSERSVQKGQLDSGYESSEGEKRRKNYYEGKKCRERSPNHQQRQRNGRDYKEDTGDRNYNTSKSERYASEGWSNIDAPKSGGGRISEASSNRYSASSPEHGSHYKCRNVAPKLSEEERAVKLKQMQLAAELHEEQRWKRIKKAEESDTKEAIQNDNVCGKNFLDTVQKSVYGAAEGGSTSIAESVRRRTYYSQGRSGGEGNAFRR

SEQ ID NO: 52859 - protein, 177 aa, Glycine max
  Clone ID: 700839380_FLI.pep
YGPQGDKTHVSTRVVGTYGYAAPEYVMTGHLTAKSDVYSFGVVLLEILTGRRSMDKKRPSGEQNLVTWARPYLADKRKLFQLVDPRLELNYSLKGVQKISQLAYNCLTRDPKSRPNVDEVVKALTPLQDLNDLAILSYHSRLSQQGRRKKKDGTPQFTYTQSKSMRASPLNTGKQRQ

SEQ ID NO: 52860 - protein, 303 aa, Glycine max
  Clone ID: 700838722_FLI.pep
LKEIFSNFGEVISVELAMDRTVNLPKGYGYVQFKTRGEAEKALLYMDGAQIDGNVIKARFTLPPRQKVSPPPKTSAVAPKREIPRTDNASADVDKDGPKRQRESSPRRKPPPSPRRRSPVPRRAGSPRRPDSPRRRADSPVRRRVDSPYRRGGDTPPRRRPVSPGRGRSPSPPRRLRSPARLSPRRMRGSPGRRRSPPPPPRRRSPPRRPRSPPRRSPIGRRRTRSPIRRSARSRSRSFSPRRGRPPVRRGRSSSYSDSPSPRKVSRRSKSRSPRRPLRGRGSSNSSSSSSPPPPPPPPPRKP

SEQ ID NO: 52861 - protein, 273 aa, Glycine max
  Clone ID: 700834955_FLI.pep
SGSLNDAITKWTNLRYLSLAQNKFSGNLPSWLFTFNAIEMMDFSHNKFTGFIPDINFKGSLIFNTRNVTVKEPLVAARKVQLRVSAVVSDSNQLSFTYDLSSMVGIDLSSNSLHGEIPRGLFGLAGLEYLNLSCNFLYGQLPGLQKMHSLKALDLSHNSLSGHIPGNISSLQDLSILNLSYNCFSGYVPQKQGYGRFPGAFAGNPDLCMETSSGVCDDGRTQSAQGSSFSEDRMDGPISVGIFFISAFVSFDFGVVVLFCSARARNYILQTKV

SEQ ID NO: 52862 - protein, 185 aa, Zea mays
  Clone ID: LIB143-048-H7_FLI.pep
PREVFEDYLRDIAPRYTAETYRLLTHNCNNFSHEVAQFLVGTGAGVPDYILNLPAEVMSSPMGPLIMPMIQNLESTLRSNVAPQTTQFVPTPASVSAPTEAPASERKAPAPAEKASKEAPAPAKKEAPTPAADPLGSARGKVQEEVMKEFAAIMASGTLRASEAAALAMRRVMERHGDGATMQQG

SEQ ID NO: 52863 - protein, 280 aa, Zea mays
  Clone ID: LIB148-021-B6_FLI.pep
LVVSMNRLDMIDNIDGRRVTKNKARIQVGDSSSSDESDREKEEDEEEAHEEVAKAPPLGWNHHNHHEAAGGIGNNSNRRRLLSKQLSMKETTREIKWEKRRRQILRRSSLVVSLNDDGGGGCCGSMKSAAEEPERHCHHHVTRSSSERVMRCLTDEDLDELRGSFELGFGFDEESGGAHLRDTLPALDFYFAVNRQLSDPAKLRTLSSAASLTSTPSAVSSSSTLPDVPSDPRSPKVGATAASGGGADAWKIFTPGDNPQLVKTRLRHWAQVVACSIKHG

SEQ ID NO: 52864 - protein, 225 aa, Zea mays
  Clone ID: LIB189-005-B9_FLI.pep
VDFFDLVIDELNKPDPIMNENIALDLLFLLLFASHETTSMGLTAILKFLTDNPKALQELTEEHEKIVETRVDPDSDITWEEYKSMRFTSHVIHESLRLANIAPVVFRQANQDVYIKGYTIPEGSKIMICPSAAHLNSKVYEDPTAFNPWRWKDTPEPVGGSKDFMAFGGGLRLCVGADFAKLQMAMFIHCLVTKYSWKPISKGTMVFYPGLRFPEGFHIQLLAKA

SEQ ID NO: 52865 - protein, 184 aa, Zea mays
  Clone ID: LIB189-013-D4_FLI.pep
TYPEKTVLLLLLVLEQARRDVDPGDAVPALGDLSDLHLPDDHLPGRLVVLVRRPSLLVVGVVGVDGGRRRVELVLDDAAGALPGVLAAAPGLGRRGADAHAPGRVRRVPLEAVEALLLQLALEVLGRVRAPRLRDRHLLRHLLAFLVAVRHAHVRRHRCCSAGSLAGDDDRCRYLARWVCLSVR

SEQ ID NO: 52866 - protein, 315 aa, Zea mays
  Clone ID: LIB189-013-H10_FLI.pep
SFSFSLSPSWTILSISFLSLHILRRAEAARDTIGKLLQQEIKLSPTQDQKKLCMEQEEVGLALGLSLGSGHHHQELKPQHPSHPCAALLEPSLSLSGPATKDDGPTAPVRRFAAVKRELQTMEGNDDEATGRVLVYSVASSAVVTADDDEGCNSSRKKLRLSKEQSALLEDHFKEHSTLNPKQKAALARQLNLSPRQVEVWFQNRRARTKLKQTEVDCEILKRCCETLTEENRRLHRELQQLRALSHPHPHPAAFFMPTAAAAALSICPSCQRLVATGASAAAATTAGADNKPKAGGPGGRAPHVFSPFTNSAAC

SEQ ID NO: 52867 - protein, 198 aa, Zea mays
  Clone ID: LIB3059-001-G10_FLI.pep
GRTRHHEGADRCPCSPGARCERRLQYKRRLWLPDTTVSSTASVLYAASVLSAAAAAAAAMAIPHSTTAAKPVPAVRILRRRQRRQPVPGPVRRVPEAPVQPGGDALRLATVPGAAAAVLPPDQAGGAAAPVPGDIRCGPAVLPAAAAAGRARGADGGPGSAAADGDVRSAAAAARSLPLQRSCRRCLLLRKLCTVVIM

SEQ ID NO: 52868 - protein, 116 aa, Zea mays
  Clone ID: LIB3059-002-G6_FLI.pep
VIDIECGTPVEVGGFDLSKSKNKMVCSSMDSIMDPGDGIHTDVIPVVQDGYSLAFSDFLSSDIPCYPSMQSDLHAGISANDSEGITVMDDPIYGSLADIGFMDMWGQPTQDYDKFF

SEQ ID NO: 52869 - protein, 217 aa, Zea mays
  Clone ID: LIB3059-015-C7_FLI.pep
CIGALHRPGPFLHQRAAASVHFLAPHRKTRPPPAMSWLGKLGLSGLGGSPRASEASAALAQGPDEDQPAPGNEFAQFGAGCFWGVELAFQRVPGVTRTEVGYSQGNIHDPTYEDVCTGTTNHNEVVRVQYDPAACKYDDLLDTFWARHDPTTPNRQGNDVGTQYRSGIYYYNPEQEKAARESLEKQQKLLNRKIVTEIVPAKRFYRAEEYHQQYLEK

SEQ ID NO: 52870 - protein, 224 aa, Zea mays
  Clone ID: LIB3059-040-H5_FLI.pep
EKQKGNNSNMKASSKVKKEVSSDDDFVMPTAQKKSAGAAGSNAKTSKVKKIKDEDLEDLKEDKKRKKRVGVKEEAKLALAIVKGEKVKKERKVYGLPGQKHDPPEERDPLRIFYESLYEQVPTSDMAATWLMEWGLLPVDVARKCFEKKQGQKVKSPVKAIVAKRIPSSPAKTLPSSAKKLVMPSNSAGKLKSQKKRKASDDTDDDDDDDDFVASKAKTKRHKA

SEQ ID NO: 52871 - protein, 223 aa, Zea mays
  Clone ID: LIB3059-060-E12_FLI.pep
ARMQAVFFIQKIPRSGDDDDVLLLLHACSPLRTTAVAAARRGLLLLGGRAGDEVLVDDAGEAGADHGPHPVHPLVSPATGAHDGGPERARRIHHGALQRAAGQHVGPRQKPHGERRRQRSGAGADPPRFVHHRRKVGVHEPERHGRLQHRRVPSAHAPRQRVLRQMHPSGGELEHERGGDGAEQLRGPVDEGADEADPAGDQRAEGDGRVDVAAGDVGGAPHA

SEQ ID NO: 52872 - protein, 137 aa, Zea mays
  Clone ID: LIB3060-015-B3_FLI.pep
EEGSSLLLARTIQYTVLWYRHSRSTSLAVVHVQVQPVRAAGGEGSEDAARGPRGRGRCCAAAAALHFTSFGSPEQQVHDLGRLAVAVAVILPLPPAPPRRLPPGPGRRVARQRAQGGQLWPPAAGALLAPVGHGRRC

SEQ ID NO: 52873 - protein, 131 aa, Zea mays
  Clone ID: LIB3060-015-E9_FLI.pep
TPFARQQQPKILPQPDDTTTARSATQSEGGSVPLGAHCLRCSCDCPAVPVGSVNGGHDQDAEDHVGDDRGHADLAGDLLHLALREQGLRLDLRHVAPRPPEGREQTKRGRSSTLGDKKPRTNEASDAYPPI

SEQ ID NO: 52874 - protein, 266 aa, Zea mays
  Clone ID: LIB3060-016-B5_FLI.pep
APQPRSDLSAAVCSYLQLECLPSLSSQFFFSVISPGRPSACGIFLAAQLAPARCQAAGKILPPSRRSVVFIPQPVAFFAVPMPQLHCGVAPAAPLFQFLWWRSVSSRAVISCSDCAQLCPAPRLPSSPWVAPPSSCCSSALRFLFLCARARRAVSHWPAVQLASTSYVPAPALLSRAARPCAGESPLVLVACSSPGSAATSPLFLSSAPAARSCCACQAPFNRSSSSSSIARVRFSARHGVSSFLVESRRASCFLLTSVLSRLARF

SEQ ID NO: 52875 - protein, 173 aa, Zea mays
  Clone ID: LIB3060-025-F11_FLI.pep
YLEFLDRVHTSELKLRAQSLWEVPHPWLNLLIPRSSIRRFATEVFGRILKDSNNGPILLYPVNKSKWDNKTSVVIPDEEIFYLVGFLSSAPSLSGHGSIAHAMSLNSQIVEFCEEADIGMKQYLAHYTTQEQWKTHFGARWETFERRKHRYDPLAILAPGQRIFPKASLPLSL

SEQ ID NO: 52876 - protein, 259 aa, Zea mays
  Clone ID: LIB3060-041-C4_FLI.pep
SACRGSNGGGDEEGPGAAGLLGEPVRAALPHRAGGEGHRLRVLGAGAAGRRQERHPPPLQPGAQEDPRAPPRRPPRLRVPRHPRVPRGGLPGGLPQAAPRRRLRARAGPLLGGLLRQGLRGRHAAVEAQGRRAGAGARRDRAGGPEPRRRARGQGLLRRRGVRVRGRGARALRAVAPQLRAVRGLQRGGDRAQAGGVGAPVRAAGERGQDPSPAGKGGRVHQPAQEDLRHRVVERTTTSRGDGTGRTYVAAMQFLFRFV

SEQ ID NO: 52877 - protein, 274 aa, Zea mays
  Clone ID: LIB3060-051-C11_FLI.pep
RLLFSSHRAGPAQNPFHRYDLRAPAMQRISLRLLRSSYTAASASLSTTSSSLRGLAVSHGGWTTRPSLQPPVRTAAPVELTRWPPRRGYSQFASGFTPLKPKPLGSILDIERAKGLSPDHLVAAWDDYHLGRGHIGASMKAKLYHLLEQRSASCRHFVIPLWKGSGYTTMFMQVQMPYMVFTGLEDYKARGTQASPYYTVTHYTEFAETKDTVLIRGDVVFTSKLTDSEAKTLLETAHSFYLNDVRYRLVERFNKETHDFEFGDVLKVLDMPTM

SEQ ID NO: 52878 - protein, 268 aa, Zea mays
  Clone ID: LIB3060-051-D3_FLI.pep
VPHRRGEHGKNRMALQHAGPASSTLTTGRHGRSAAAVLRRPPAGSRSRLRAHAQKPDAGSRGAGAETATSSSSSRSENAVLKAAWYGSELLGIAASLLRPAPSSPQEGDAGGGGDAEGEAAAVAGALDLDHAGVAEAIKADFARSYFVTGNLTLRAYEEDCEFADPAGSFRGLLRFKRNCTNFGSLLEKSNMKLTKWEDLEDKSIGHWRFSCVMSFPWRPILSATGYTEYYFDVESGKVCRHVENWNVPKMALLRQIFRPSRWVWEKR

SEQ ID NO: 52879 - protein, 371 aa, Zea mays
  Clone ID: LIB3060-051-G8_FLI.pep
ITRGLASCASISTPTRPATRPPVPGATEASLTDMWALNNAKAGGPCLTPRHPAPPSLASPSTASAGRRFWRRSPVWAPLVAVRASGGTRKDGSVGGEASGEEADSKASSAGHDDASTPTGDTSAGLNQPHDEPKTSKPINVSSSNYWRDVRANLVRREQELLVDPSTPTESKASSGDPLQLPQKWAHAITMPEAGCVLVATEALDDDSIFERTVIFLLRLGTRGTFDGPFGVIMNRPLYTKIKHVNPMFRDQATPFGDSPLFFGGPVDMSMFLVRTDDSARLKGFEEVVPGICYGFRTDLEKAAALMNSGAIRTQDLRFYVGHAAWDYEQLLGEIRAGYWAVASCSTELIGDALMGDPSRLWTEIQQLMGG

SEQ ID NO: 52880 - protein, 219 aa, Zea mays
  Clone ID: LIB3061-025-G3_FLI.pep
RLGKVKLADFGLAARVTNGQKMFGVAGSPAYVAPEVLSGSYSEKVDIWGAGVLLHVLLHGSLPFQGGSLDAVFESIKTLELDFSSTPWESISVLGRDLIGRMLNRDVSCRMTADEVLSHPWVVFYTECPLKVVAANLCLPNKVIAPKIPWGRHKSECDSLSDASQRSEDQDECGIVDALAAAITRVRISEPKRSRLCSPAITIQQECSSNLKNNLCTAF

SEQ ID NO: 52881 - protein, 338 aa, Zea mays
  Clone ID: LIB189-026-H9_FLI.pep
FKSILSAAAQRPHLPSPGLRSPLSFSLLAESPPAMNNLLTDSFELPRRDSSRDADIEMGMHQADASDYLKDFLKKVDAIESLIAKLTNLLNKLQTANEESKAVTKASSMKAIKQRMEKDIDEVGKIARQAKTKVDELEKDNLSNRQKPGCGKGSAVDRSREQTTGAVKKKLKERMDDFQTLREAIRQEYREVVERRVFTVTGNRPDEETIDDLIETGKSEQIFKDAIQHQGRGQILDTVAEIQERHDAVRDLERKLLELQQIFMDMAVLVEAQGDMINNIETHVSNATNHIQQGVSALQNAKKLQRNSRKWMCYAIIILLVIVVVIVVAVIQPWKKGT

SEQ ID NO: 52882 - protein, 199 aa, Zea mays
  Clone ID: LIB3059-020-G1_FLI.pep
SPKAQTYRPYETAPPLPSPPPSHHSLLAHSHLPAPSSTATKMNKERLMKMAGAVRTGGKGTMRRKKKAVHKTVTTDDKRLQGTLKRVGVNTIPAIEEVNIFKDDLVIQFLNPKVQASIAANTWVVSGSPQTKKLQDVLPGIINQLGPDNMEHLKRIAEEMQKQVAAAGAAAQVKEDNDDDVPELVPGETFEEVAQETKA

SEQ ID NO: 52883 - protein, 175 aa, Zea mays
  Clone ID: LIB3059-021-A6_FLI.pep
QLIDCISTHPCNAMHTFMRSGDHGDAADGQHHQRDHAEGGARRGGERPPGPQGLARPRLLPRRPPRRRRPRRPARLQPLEVEGEARRRGHERLHPVRRRPEAVPWARPGKARGLHLSAPSRHQFQVGGGGGHRRQLPHSAAQARDANRSDAQNLLNATQLARQNHTIHLYSTKEV

SEQ ID NO: 52884 - protein, 155 aa, Zea mays
  Clone ID: LIB3059-032-A8_FLI.pep
VMVDHMRKMKNNAIVCNIGHFDNEIDMLGLETYPGVKRITIKPQTDRWVFPETNTGIIVLAEGRLMNLGCATGHPSFVMSCSFTNQVIAQLELWKEKSSGKYEKKVYVLPKHLDEKVAALHLGKLGAKLTKLTKSQADYISVPIEGPYKPAHYRY

SEQ ID NO: 52885 - protein, 212 aa, Zea mays
  Clone ID: LIB3059-046-F3_FLI.pep
VLEHAEPLLKVTIVPRGTAALGFAQYVPNENLLMTKEQLFDMTCMTLGGRAAEEVLIGKISTGAQNDLEKVTKMTYAQVAVYGFSEKVGLLSFPQKDGGFELSKPYSNQTASIIDDEVREWVGKAYKKTVELITEHKEQVAQIAELLLEKEVLHQDDLTRVLGERPFKALEPTNYDLFKKGFEDGGDNSQAPAENAELPDDSSPPVGDVVPT

SEQ ID NO: 52886 - protein, 151 aa, Zea mays
  Clone ID: LIB3059-049-D5_FLI.pep
VERTRSVDSSKPVSRSLAAEFDQEADGEEEDNAGETSDPDDGSVQYLRRRLKEEMLLKEVALEELEKERHAAASAADEAMSKIACLRSEKALVEREARQFQEMMQQKQMYDRQVIESLQWVIMKSGMQGWEPEAITDRALSETSEDDRDKK

SEQ ID NO: 52887 - protein, 538 aa, Zea mays
  Clone ID: LIB3060-028-G9_FLI.pep
LISAHRTLITTASPQRTTMERFYYVAVATFVLVFLLHHLLTRKKQQRLPPGPRFAYPILGHLPLLKKPLQTSFADLVSRHGPIIHLRLGRRHAVVVGSAAVAKECFSGELDVAIANRPHFPSAREVTFDYSVLTAVNYGALWRTMRRVSTVHLLSAHRVNVMSDTVIARELRVMVRRLARASASAPGDAARVELKRRLFDLSHSVLMEIMAQTRNTYSDDPEEDMSREARDMKDIIEEIIPLVGAANLWNYVPLLRWLDLYGAKRKLADVVNRRDLIFDNMIGAERQKLRQLERKKGEAHASESDKMGMIGVMLSLQKTEPDVYTDTFINALVSNLLAAGTETTSTTLEWAMSLLLNHPDVLKRAQEEIESNVGRDRLLDKNDLPRLPYLHCIISETLRLYPPTPMLLPHEASTDCKIHGYDVPAGSMVLVNAYAIHRDPAMWEDPEEFRPERFELGRAEGKFMMPFGMGRRRCPGENLAMRTMGLVLGALLQCFDWTRVGDREVDMATATGTIMSKAVPLEAQCKPRANMSAVLQKI

SEQ ID NO: 52888 - protein, 183 aa, Zea mays
  Clone ID: LIB3060-028-H1_FLI.pep
LAGVANATPRRNPVARPPLLAGRSGCAITMDPEAVRKSLEPTATVEKITGSTPARLHFYDPFVLSGVSIEAAEHGRLLCSFVVTPRLASPAGYLRSGVTATLADQLGSAVFFCSGLPSSGVSLEISVSFVDAAAVGEEIEVEGKLLRAGKSVGVVSVDFRKKKTGKLMAQARHTKYLVASSRL

SEQ ID NO: 52889 - protein, 315 aa, Zea mays
  Clone ID: LIB3060-028-H9_FLI.pep
EEEMRAKKEELYCVACNKKFKSDKQWKNHEQSKKHRDKVSELRMAFREEESLKEAEEGEGDWNEVDVGFDFKPTQESDDESAFSDAAEELAEEFEEGLEVHDKENGDKDFDSAEQEVGSYDEASVLEAMLSSCKNRKGGYVAPPEEALSGTAEDDDHHRSSEVNNAKRKGRRRRAAKKEQDESNYAGNEHHGKCEVQPEGSVHGNDVDDIMEGPSSSNVNNGSVSKGDKQNGENTNPKKNKKGTKKKPTVSTDQKSMSKADQKSTSKGKKQKEVSKAPSNDCDTCGGTFESRNKLFSHLEETGHAMLKTRQKNRR

SEQ ID NO: 52890 - protein, 64 aa, Zea mays
  Clone ID: LIB3060-045-D10_FLI.pep
RKSFDQNMTQKQADLLKREKDVKSLEAKLSKSEQALNDKKKSMENLQNDLDAKSKALKSWDESL

SEQ ID NO: 52891 - protein, 189 aa, Zea mays
  Clone ID: LIB189-023-E4_FLI.pep
LTKLVLAIRLYLHVSLARYGQRKIEKDDAAVLQQAVVIYTKEFLKFTEFIGEVFVNAPFFISAEDAGAVDARKSDEYKETIIPAGKTHEVILSVEAVNSYIAWDFSLQQGALNMDIGFHVEYISPSGEKTLILPYRRYEADQGNFCTVSSGSYKLVWDNSYSSFFKKVLRYKVDAVPPVVEPALSATEL

SEQ ID NO: 52892 - protein, 166 aa, Zea mays
  Clone ID: LIB189-024-D10_FLI.pep
EAKAMAMRALPLTPSRSSSFGAHQTRPSGGGPRSVRAYAKGDEEGDKQSLFGSITEALDFSQVRSEKDAELLYEARESTRGGGRMTREQYGALRRKIGGTYQDFFKSYVEVDGQYVEEGWVDKTCKICKKDTRGEPRQVDKLGRYAHVACLENPKPTNFFAKIFAR

SEQ ID NO: 52893 - protein, 356 aa, Zea mays
  Clone ID: LIB189-030-G11_FLI.pep
QPGKRSEDQDPSVVVVAAIVVVAAIVVVATPVAAAAAAVRLLPLQVVLHPLRHALLELVLQVARPAGQRQPSEHARRRAHCQPRPHPHLVLLLPVGSNGAGSVRGGGGDRRSAVCSGRRSAVRCRWLRRRRGAVGGRVPRRGRCGVGLRGAVGAATVGATTGTVSASGAVVAAGSSSGRAVGVTGAAARVGVGRGGRVGVGVVVPGRLLDGDADVEAAVGAARGALEAEAARGLAPDPGVVEDVAEREARGADERLDALGGVGVDDVDVEDGVVEAGGGRERDEQLLVPRRALAVVEVDAGRALAAGVDPHHGVGLEVAVAPVDVLEVPGGADGDLHLVAGTHRWCPREDRGKAFL

SEQ ID NO: 52894 - protein, 276 aa, Zea mays
  Clone ID: LIB3059-010-F7_FLI.pep
CVHRILDHFLAMDQANGGESPCLDDVMASPSLTPITSVAKLIDGYLAEIAPDINLKPPKFQALASAIPEYARPLDDGLYRAIDIYLKAHSWLSEAEREQFCRLLDCQKLSLEACTHAAQNERLPLRVVVQVLFFEQLQLRTSIAGCLLVSDNLEGSRPLRSGIATSGEAGGWATAVRENQVLKVGMDNMRTRLAELEKECSSMRQEIEKLGGRAGKGGGGGWASRVVPRRLGLKVRSQMCSAQEGSVSEQHRSMSAKLDKLQAKVSKQKKQLAADA

SEQ ID NO: 52895 - protein, 187 aa, Zea mays
  Clone ID: LIB3059-011-E8_FLI.pep
LDGEVFIHANLVLENTERRALSWLGKLLISSIGEFSNPILLLQLKRQVDLGEVLEPEGTEGLYLSLLLGAQHRLQLLHPALILLHEVLLEQLFPHLDIVIGHGETALLRHSVLVQVARPDTEPLDVRRRQIGTVIRHVLGTTHVHRQDLEPVWIRIHQREHWQLQLNLEPPQEQPGGDIWLPLGRQN

SEQ ID NO: 52896 - protein, 192 aa, Zea mays
  Clone ID: LIB3059-022-C8_FLI.pep
QSGLLMETLIDITPKDPLPAPSVGPLDPDCTKEGLILCDKERMKGQQGVSLDALVGIFTRLGRDMEEIGVSKSYKLAEKVASIMEEAQPLLTRIEDLAEEMQPLLSEVRDSDLLKDVETIAKGLADASVDLRRLKSSMLTPENTDLIKQSIFTLIFTLKNIESISSDISGFTGDETTRQNIKLLIKSLSRLL

SEQ ID NO: 52897 - protein, 150 aa, Zea mays
  Clone ID: LIB3059-022-F4_FLI.pep
GTYLPVTIPKSIKESVTFSSAFPLFPTGDRRRSGIGTGVAETRSSSPRHQAQPLHSGHWSAGRVFCDPALIGHGAYTGGTMQLYIRQSETVEGSDDDGDIAMPVRKLCCRYSTCRPPEPTSSCTSRAGTSPVNRLLFRYSCPTPASSGES

SEQ ID NO: 52898 - protein, 271 aa, Zea mays
  Clone ID: LIB3059-036-B9_FLI.pep
SPTSHAAVRPNQLISRTRDEMRTCYTAIHTTLIHLRNRSRISSCEFLTFFTHVPCCYHVPQLNPELLPPERLVLVAVAALQPQLHQHQLRRHLRHLHRHGHEARQDAQRQALGPLLPHNEVAEPRAGLREPLHRPLRGRRRHEPLLAAAPALAEQARQVQPWGHGDDVEGVQRRRGLERQLALRLAVQEAAELGVHAERALEPGVAGELRDGEARRRVRVQQARHEAARRLRHPPRDRVLPAVRPAAHVGDVGVVEGEVAREEDEEDDPAG

SEQ ID NO: 52899 - protein, 155 aa, Zea mays
  Clone ID: LIB3059-036-F8_FLI.pep
GSQMGAIHGRTHHPGPFSSHPGDQKNPSQGFQGPFDGSRPMYTTNQARMHAPPPPHFHGAFPRNASPLEFPAGFRGAWPSVQAPPMPAPSHPSSFPPFQLRPPPPPQQDMSGAGGTRWPGGNQIYNPFAPTAAAAAQRAEADPEYEDLMASVGMK

SEQ ID NO: 52900 - protein, 135 aa, Zea mays
  Clone ID: LIB3059-037-B6_FLI.pep
VDQNGRVATCLSVEERQRLLLRGANALGSGGEDDSDVIALKNYMNAQYVGEIGVGSPQHKFTVIFDTGSSNLWVPSSKCYFLIACYFHSRYKSGQSSTYKKNGLTLPFLCCYCIVFPIFSLWTEICITFVIRLYF

SEQ ID NO: 52901 - protein, 138 aa, Zea mays
  Clone ID: LIB3059-053-F7_FLI.pep
DDEQAKEAKSPKRAPADGAARASTPVKKKLKDQKAAAANMGVCSFSMARVRQLMRAEDPTIRPSSEAVFLINKASEFFLGKFAEDAYHNAAKDRKKSIIYDNLSTAVSSQKTLKFLSDFVPQRVAAEDALKTMTSNNS

SEQ ID NO: 52902 - protein, 144 aa, Zea mays
  Clone ID: LIB3060-011-F11_FLI.pep
VLSIQHRPLGSWRPVSEHRWLVAENTFRPPYYHRNCMSEFMGLIYGMYEAKADGFLPGGASLHSCMTPHGPDTKTYEATISRAAANEPSRLSGTLAFMFESWLIPRVCPWALDSPCRDLDYYQCWIGLKSHFSPPAAAVDDENE

SEQ ID NO: 52903 - protein, 452 aa, Zea mays
  Clone ID: LIB3060-023-D2_FLI.pep
HFPSAMGKEKTHINIVVIGHVDSGKSTTTGHLIYKLGGIDKRVIERFEKEAAEMNKRSFKYAWVLDKLKAERERGITIDIALWKFETTKYYCTVIDAPGHRDFIKNMITGTSQADCAVLIIDSTTGGFEAGISKDGQTREHALLAFTLGVKQMICCCNKMDATTPKYSKARYDEIVKEVSSYLKKVGYNPDKIHFVPISGFEGDNMIERSTNLDWYKGPTLLEALDLINEPKRPSDKPLRLPLQDVYKIGGIGTVPVGRVETGIIKPGMVVTFGPSGLTTEVKSVEMHHEALQEALPGDNVGFNVKNVAVKDLKRGYVASNSKDDPAKEAASFTSQVIIMNHPGQIGNGYAPVLDCHTSHIAVKFAELITKIDRRSGKELEKEPKFLKNGDAGMVKMVPTKPMVVETFSEYPPLGRFAVRDMRQTVAVGVIKSVEKKDPTGAKVTKAAAKKK

SEQ ID NO: 52904 - protein, 378 aa, Zea mays
  Clone ID: LIB3060-047-D1_FLI.pep
PRAIRSAVFCINGGRRSNRTRPPPPYSHLPPSSLPATSTHYTRLTSYTMASLPCSQIKLSKVLVRRKFHESGQTNLPSPLHWKPLRPGCFENLVLRCTKNLSWETSLPYASAEDDASIIKGTGVVEPIDTEEAPQIPILQSDEDVVEVKNEPSWHLKAFKLPMWLVGPSILLVTGIVPTLWLPLSSVFHGPNIAGLLSLVGLDFIFNMGAMLFFLMADACGRQENSIFDLKRQIPISYRFWNLAATIVGFVVPFALFFASRRGTLQPQLPFVPFGVLLGPYLLLLSVQMLTEMLTWHWKSPVWLVAPVVYEGYRVLQLMRGLQLADEISAPDWMVQSLRGLVSWWVLVLGIQLMRVAWFTGLNFARNSSYGASGDMNQ

SEQ ID NO: 52905 - protein, 80 aa, Zea mays
  Clone ID: LIB3061-011-E9_FLI.pep
FCARTRRAKVHEFFICRQHRGKENESDSHIADLRRNYGQGTLRQGCHYIAINIFSLIIVLLMFWCLKWTLLEVQKNSNCE

SEQ ID NO: 52906 - protein, 298 aa, Zea mays
  Clone ID: LIB3061-013-A5_FLI.pep
RSNEHEPWQNEAEVVRCEPSMANAPRILALGLLLALLCAAAGPAAAQNCGCQPNFCCSKFGYCGTTDDYCGDGCQSGPCRSGGGGGGGGGGGSGGANVANVVSDAFFNGIKNQAGSGCEGKNFYTRSAFLSAVNKYPGFAHGGTEVEGKREIAAFFAHVTHETGHFCYISEINKSNAYCDASNRQWPCAAGQKYYGRGPLQISWNYNYGPAGRDIGFNGLADPNRVAQDAVIAFKTALWFWMNNVHRLMPQGFGATIRAINGALECNGNNPAQMNARVGYYKQYCQQLRVDPGPNLTC

SEQ ID NO: 52907 - protein, 294 aa, Zea mays
  Clone ID: LIB3061-015-E4_FLI.pep
PTHAPVSSSACRAGFSSSGVSFPNFRSAAASAPGWRRREPYPAVSVVSSSPQSVAGAITVDTEVDTLLDSVKWDSKGLAVAIAQNVDTGAILMQGFANKEALAKTISTRKATFFSRSRSSLWTKGETSMNFINVHDIFLDCDHDSIIYLGKPDGPTCHTGAETCYYTSVYDALQSSKPNEGRQVMTTLYSLEDTISRRHEEKVTDGGGKPSWTKKLLLDNQLLCSKIREEAGELIQTLLENEDQSRAASEMADLLYHAMVLLRVKDVKMEQVLEVLRKRFSQSGIEEKASRNKS

SEQ ID NO: 52908 - protein, 318 aa, Zea mays
  Clone ID: LIB3061-049-G1_FLI.pep
RASRSRKRWWFQGIMECLTSFPRNVGKEYICSSKLVSGNQWIPKRICCYVSCSTNSSRCHKFTDVACPMSPVIRKRLRWRCFAASLNLEDGPAPSDSTSSSSEQTTDADGTTNGDVSENLLSRKPSSDELKALLADSERSKLLRRLSEANQYNRFLKRQLQIKDDAVVKFKGELAVLELELQALVGLAEEVANFDVPLGSRKINGKYIQSHLLSRLEAVHDMIMEQVNSVDALKTQEIPVYWIGMAENVQIMGSFDGWSQGEAMSMEYSGDYGRFSATLKLRPGRYEIKFLVDGEWKLSPEYPTAGDGLTQNNILVVE

SEQ ID NO: 52909 - protein, 591 aa, Zea mays
  Clone ID: LIB189-025-C6_FLI.pep
LLFSTFTSIMGGVCSRKRSQLVDEGDALQTSPRFSKTSSLKWLLLTLPRSSSDVSGKGQGNEPGRCPSLMELCVARVCQDIDRYSTFAMLPRDLSQQIFNELVNSNRLTEASLQVFRDCALQDIGLGEYPGVKDAWMEVVASQKQSLLSVDISCSEVADSGIDLLRDCSSMQSLACNYCDQISESGLGVLSGLSNLSSLSFKRSNAVTAEGMRAFANLVNLLNLDLEGCLKIHGGLIHLKDLTKLESLNMRYCNYIADSDIKYLTDLTNLKDLQLSCCKITDLGVSYIRGLQKLTHLNLEGCPVTAACLEAISGLSSLVLLNLNRCGIYDDGCENFEGLKRLKVLNLGFNYITDACLVHLKELISLESLNLDSCKIGDDGLSHLKGLVLLQSLELSDTEVGNNGLQHLSGLRNLQSINLSFTLVTDIGVKKISVLNSLKSVNLDNRQITDVGLAALISLTRLTHLDLFGACITDNGTNCFRYFKNLVSLEVCGGFVTDAGVKNIKDLKALTLLNLSQNANLTDKTLELISGLTALINLNVSNSRVSNAGLKHLNDLHNLRSLSLDSTRVTANEMRKLRATVLHNLISMRPE

SEQ ID NO: 52910 - protein, 555 aa, Zea mays
  Clone ID: LIB189-032-E7_FLI.pep
SEELPVMPWATSVASGYTLLRDPHHNKGLAFTEEERDGHYLRGLLPPAVLSQELQIKKFMNTLRQYQTPLQRYIAMMNLQETDERLFYKLLIDNVVELLPFVYTPTVGEACQKYGSIFGRPQGLYVSLKDKGKVLEVLRNWPHRNIQVICVTDGERILGLGDLGCQGMGIPVGKLALYTALGGVDPSVCLPITIDVGTNNEKLLNDEFYIGLRQKRATGEEYDELIEEFMSAVKQFYGEKVLIQFEDFANHNAFDLLEKYSKSHLVFNDDIQGTASVVLAGLLAALKMVGGTLAEQTYLFLGAGEAGTGIAELIALEISKQTNAPIEECRKKVWLVDSKGLIVDSRKGSLQPFKKPWAHEHEPLKTLYDAVQSIKPTVLIGTSGVGRTFTKEIIEAMSSFNERPIIFSLSNPTSHSECTAEQAYTWSQGRSIFASGSPFAPVEYEGKTFVPGQSNNAYIFPGLGLGLVISGAVRVHEDMLLAASKALADQATQDNFEKGSIFPPFTSIRKISAHIAAAVAAKAYELGLATRLPPPSDLVKYAENCMYTPVYRNYR

SEQ ID NO: 52911 - protein, 145 aa, Zea mays
  Clone ID: LIB189-032-F11_FLI.pep
SYLKHIGLEPLVVELPVAVPPHVEGGARYVEVGLHQRHQTLQTSSGLVYSPARKVRAAEQVQDLQVLASFRDGAEGDGGQLREPQLEVSQLRHEPGYRNGFPVAVFGAFSQIVLRNYSGMLRWVDPVEDVALEDPEVLAALADHL

SEQ ID NO: 52912 - protein, 120 aa, Zea mays
  Clone ID: LIB189-034-E1_FLI.pep
KLATHWQPLILAQSTNCIPPYTLLANLTPTVNAKEAAGTRFATGEASTRRSNPLIIWYRVLEETARNAPHKAEVLRRGGTGTSSSDFLTLRLAVIIKLAIPCPTRPQKNPTEPYNIPLSH

SEQ ID NO: 52913 - protein, 480 aa, Zea mays
  Clone ID: LIB3060-001-E6_FLI.pep
FVASRKDLRRLPGVVGSSPSAVGFCLPRLDTSHSAKTRREVPTSSPPFPTGKGNFCRPSQYFFWKMDPEDSSEFEEDDDEEEDDDLMLFILPALYLASTGIGTLDQTSMVSDGTAIETPSQVSKFNDAERICKVLEDDRGQGYDKLRVEPHVLLELSRYLRSNDLLKNTRGVSVEEKIGMFIYMLSRNASFQKLSDRFKYSTETIHRHIKACFDAVTPMTGEFVRPPSIQAHRKISSDTRYGPYFENCIGAIDGIHVPMTISDSEAAPYRNRQESLSQNVMLACDFDLNFVHVSCSREGSASDAAVLYSAIEYGFEVPRGKFYLVDGGYANTPSFLAPFSEVAYHAEEQDESNFQPIDYRELFNLRHAQLYRHIKRAVGLLKMRFPILNVATSYRKDTQLKIPSAAVVMHNIIQRQGGSEELLCEQTIPFASRKTVNLPSGDDTYGYDVSAFNSECDMGNALRDGIALRMWADYESSMYV

SEQ ID NO: 52914 - protein, 360 aa, Zea mays
  Clone ID: LIB3060-002-A2_FLI.pep
NLLEMQSAAAFRPCPTRLLPASPDRDGKCRQRQVSCSAAGDAVAAPKAEEGGGLMKTLWLGSLFGLWYLFNIYFNIYNKQVLKVFPYPINITEVQFAVGTVAALFMWITGIIKRPKISGAQLVAILPLAIVHTMGNLFTNMSLGKVAVSFTHTIKAMEPFFSVILSAIFLGELPTIWVVSSLLPIVGGVALASLTEASFNWAGFWSAMASNVTFQSRNVLSKKLMVKKEESLDNLNLFSIITVMSFFLLAPVTFFTEGVKITPTFLQSAGLNVNQVLTRCLFAGLCFHAYQQVSYMILAMVSPVTHSVGNCVKRVVVIVTSVLFFRTPVSPINSLGTAIALAGVFLYSQLKRLKPKPKTA

SEQ ID NO: 52915 - protein, 237 aa, Zea mays
  Clone ID: LIB3061-002-A8_FLI.pep
MELALGAMASLAPKLGDLLMEEYVVQKGLKPDIESLSRELVMMKAALVDASRVPPDQLTEVEKLWARKVRDLSYDMEDAVDDFILRVAGGDDSAADSKFFKKTLAMVKDVMSMKKFKDRRQICDKVKDIKKLSNELAELRAKYMVRGVGADLAASTGIDPRLINLYKKETDLVGIEESRDKVIRMLSIGTKYDDALESHQALKIVSIVGVGGLGKTTLAKTVHDMLKKQFDCSAFIS

SEQ ID NO: 52916 - protein, 258 aa, Zea mays
  Clone ID: LIB3059-003-G3_FLI.pep
KLWLKVAKHVIEQEKGVKRENIKKAIEFLSETNNLLKIEDILPFFPDFVLIDDFKEEICKSLKDYNSQIEQLKQEMDDATRGADNIRSDIGALAQRYTVIDREQDCGVCRRKILTVGGLHQVGRSYTSVGHMAPFYVFPCGHAFHANCLIGHVTRCSNQVQAERILDLQKRLSLMDRKAAKDNGASVNGEPITSTTPVDKLRSQLDDAVASECPFCGDLMIKEISQPFILPQESDEKASWEIKPQPTPQKILPMTMSI

SEQ ID NO: 52917 - protein, 180 aa, Zea mays
  Clone ID: LIB3059-017-C12_FLI.pep
VLRLHCHKVRVRHRLVRLCEGGRGEEKMQIFVKTLTGKTITLEVESSDTVDNVKAKIQDKEGIPPDQQRLIFAGKQLEDGRTLADYNIQKESTLHLVLRLRGGTMIKVKTLTGKEIEIDIEPTDSIDRIKERVEEKEGIPPVQQRLIYAGKQLADDKTAKDYNIEGGSVLHLVLALRGGY

SEQ ID NO: 52918 - protein, 386 aa, Zea mays
  Clone ID: LIB3059-029-B3_FLI.pep
RWLGHETKHFNVGKYRRLKHGTNQTADFFRGDNREGVEARNEVAALAMEDMLSWMQEGGQVGIFDATNSTRIRRNMLMKMAEGKCKIIFLETLCNDQDVLERNIRLKVQQSPDYAEQTDFEAGVQDFKERLAYYEKVYEPVEEGSYIKMIDMVSGKGGQLKINDISGYLPGRIVFFLVNCHLTPRPILLTRHGESMDNVRGRIGGDSSLSEAGELYSRKLASFVEKRLKSERTASIWTSTLQRTILTAHPIIGFPKIQWRALDEINAGVCDGMTYDEIKKSKPEEYESRRKDKLRYRYPRGESYLDVIQRLEPVIIELERQRAPVVVIAHQAVLRALYAYFADKPLEEVPNIEIPLHTIIEIQMGVAGVQEKRYKLMDAIHPTAGL

SEQ ID NO: 52919 - protein, 127 aa, Zea mays
  Clone ID: LIB3059-029-B7_FLI.pep
EAKSRGDDAFRRKDYLVAVDAYTQATELDPTDATVLSNRSLCWLRAGQAERALEDAKACRALRPDWAKACYREGAAHRLLQRFEEAANAFYEGVQLEPENTELVNAFREAIEAGRKFHGVNTPNSTQ

SEQ ID NO: 52920 - protein, 201 aa, Zea mays
  Clone ID: LIB3059-030-E5_FLI.pep
PAGLGLHGEAVGFRASEGWTWRRRDPRVDPSHGHAGLRRTRVHHDRASNDQERRVQLRRRAPGAANGAEGVGQEPAAARAEPGGMGAAMPARRSPAGARHGPEAAAPHHAHPSSPKGRRDSPPVPQCQPQIPAPNVPRCTGPGVAACSRRCRRGAVCVHGAAGEQMTCVILCKKQAPVSQQSEGVLPTVVHYIYIFYCKKH

SEQ ID NO: 52921 - protein, 134 aa, Zea mays
  Clone ID: LIB3059-043-D12_FLI.pep
DNFVDYKDRKIILSSGSEKKLEEAAPGLILRKRKSADESVASEANSSSVESEASVADAVALLLKHKRGLQTSEEMENETEPYSSKTEGKKSKQKRVLGPARPDFLEARQDSETWVPPEGQTGDGRTALNDRLGY

SEQ ID NO: 52922 - protein, 167 aa, Zea mays
  Clone ID: LIB3059-044-F8_FLI.pep
GREKPRPPDLLLPLRSPDRSPSFPVPSPPPRRRDAMEPPHAEQAVAAVAAGGEGGTASPGTGLEGPVLRRGLDGGGEGEDGELGAGQEANARLPERPGEADCGYYLRTGACGFGERCRYNHPRDRGGTEVRAGGRFSPASASRSLAFSIFPDLIRVRVRHAAAGELR

SEQ ID NO: 52923 - protein, 118 aa, Zea mays
  Clone ID: LIB3059-045-B8_FLI.pep
TLKITDSALHRIETRSSQVASEMQGCCKQISANRSPLGLIFVCLEDESGRRFIFIHPVKWGCKLEVWRSRACRLPHGTSSPTRRRTFVVGSVSYHDQMTLFVRLDQGNNRDMTARLPL

SEQ ID NO: 52924 - protein, 172 aa, Zea mays
  Clone ID: LIB3060-017-E3_FLI.pep
IHQLQNLSVVTDAIACVHVLGDVFVSKKTDKQKKRKIKKVEDKMLGWGGHDDKKLMIPATVILRHMFTPAELRADEELLPELEADVREECIKFGPVDNVKVCENHPQGVILVRFKDRKDGAKCIEKMNGRWFAGRQIHASEDDGSVNHALIRDYDAEVSRLDRFGQELEEST

SEQ ID NO: 52925 - protein, 241 aa, Zea mays
  Clone ID: LIB3060-025-H5_FLI.pep
YTCTALLSQLVAGDEVRGVCPGVVGDGVGDVVEEVLDGALAGDDGLHEEAEHGEHGKAAVLELLHLELGGGVRVVGEAQRVEGAAGVHLVEPFPERAAADAVALDEAHEHHLARPDGQDALCVHQVGVPQVVQPALREDLRAGLEPHRLAELDAVLGQDLREHAAQRAQHRPPGVDHLQLPVARECLRVGREARGVPPVVAGELAGQVRRRLLGERAKILGAIRAVPYALGNALDGAAHGD

SEQ ID NO: 52926 - protein, 89 aa, Zea mays
  Clone ID: LIB3060-044-E11_FLI.pep
VRYLIESIHHRSDLRKKMAEKSRNSVPSGSQGQTAKPRPFPVPDGIPKTQEELTEEEEALMPESPYTRLLRRMGRYPEWYTPRPDHETD

SEQ ID NO: 52927 - protein, 372 aa, Zea mays
  Clone ID: LIB3060-052-D2_FLI.pep
LGFTNQSIPLYLSEMAPPQYRGAINNGFELCISLGILFANVLNYFVIKITAGWGWRISLSMAALPAAFLTIGAIFLPETPSFIIQRDGNNTDKARVLLQKLRGTASVQKELDDLVRASDLSRATRYPFRNILERKYRPQLVVALLVPFFNQVSGINVVNFYAPVMFRTIGLKESASLLSSVVTRLCATSANVVAMVVVDRVGRRKLFLAGGVQMILSQFTVGAILAAKFRDYEEMGDGYAYLVLTTLCVFVAGFAWSWGPLTFLVPAEVCPLEIRSAGQSIVVAVVFLMTFVISQTFLEVLCRIKSATFFVFGGWICLMTLFVYLFLPETKKLPMEQMEQVWKTHWFWKKVVGEEADRKETGAGKIALSGLS

SEQ ID NO: 52928 - protein, 85 aa, Zea mays
  Clone ID: LIB3060-053-F2_FLI.pep
EVFVLDCPKRTGKPRYLSLKVPCVKFRACMTAIFVSLLVFLVNRRLVFVDDLPRACFIKVQNTLKMCCIVPVCTNQDQKFGTRLL

SEQ ID NO: 52929 - protein, 242 aa, Zea mays
  Clone ID: LIB189-029-C3_FLI.pep
GVVKPTIAPIWARELIPNPPKMPPGPPPSFECFGFKHFVMDVAVNNIAHVKSEYFQTNGHYCSTFDVAIAKVWQARTRAIKYEPNFKVHVCFFANTRHLLTHVLPKVGGFYGNCFYPVTVTATAEVVASSRLLDVIRMIRDGKARFPLEFSRWSTGNVKVDPYQLTFKHNVLFVSDWTRLGFFEVDYGWGVPNHILPFTYADYMAVAVFGAPPSMKKGTRIMTQCVEEEHLVDFKAEMKAFF

SEQ ID NO: 52930 - protein, 298 aa, Zea mays
  Clone ID: LIB189-029-H10_FLI.pep
NLGFETPMASATATAPTFALASSFSRGGFLPLPRRAGRPMLQSLRLVASAVKRRRGAVVVAADAAAAAGSAEFGDEENPYELLGIRPLDSFDHMKMAYKKKRKDAEETGDDEFLAKLDRAYDTVMMQQLQYRKKGVTYGSVQVSKDIKYADNQPVVPWGPRFSRSTMKDMRINMAVSAAFVVWIAIMGNADWKPLQFLCFAFFYRILQKLRATEPPITPIYNEYGEVEGRGIRMAKRVVRALGLIFGCVFAASLGYTAAINLIELSMQYTPRLVYYYQELIVTAATSVLLCITASYYR

SEQ ID NO: 52931 - protein, 158 aa, Zea mays
  Clone ID: LIB3062-007-F4_FLI.pep
EKAVQCLNDIVTNALIHAEECLQYMSALKNHAIFRFCAIPQIMAIGTCALCYNNVHVFRGVVKMRRGLTARIIDETNSMSDVYTAFYEFSSLIESKIDDNDPNAALTRRHVNSIKQTCKSSGLVKRRGYHLDTSPYRPMLIMIVLLLVAILFGALYTK

SEQ ID NO: 52932 - protein, 275 aa, Zea mays
  Clone ID: LIB3062-019-A10_FLI.pep
CYSTEADVWSIGVIAYILLCGSRPFWARTESGIFRSVLKADPSYNEAPWPSLTPEAMDFVKRLLCKDPRRRITAAQALSHPWIRNYNDIKLPLDILIFRLIKAYIRSSSLRKAALRALSKTLTVDELFYLKSQFSLLEPDRNGCITLDNIRMALTREATDAMKESRVQDILVSLSALQYRRMEFQEFCAAAVSVHQLEALDRWEQHARSAYEHFEKEGNRAIVIDELASELGLSPSVPLHVVLQDWIRHTDGKLSFLGFVKLLHGMSSRSLSKMR

SEQ ID NO: 52933 - protein, 246 aa, Zea mays
  Clone ID: LIB3062-024-F6_FLI.pep
LEAPVVVVTGASRGIGKATALALGKAGCKVLVNYARSSKEAEEVSKEIEASGGEAITFGGDVSKEADVESMMKAALDKWGTIDVLVNNAGITRDTLLMRMKKSQWQDVIDLNLTGVFLCTQAATKVMMKKRKGKIINIASVVGLTGNVGQANYSAAKAGVIGFTKTVAREYASRNINVNAIAPGFIASDMTAELGEELEKKILSTIPLGRYGQPEEVAGLVEFLALNPAASYMTGQVLTIDGGMVM

SEQ ID NO: 52934 - protein, 224 aa, Zea mays
  Clone ID: LIB3062-025-A9_FLI.pep
SVFWGNFVKLHTTRHWIGPNGTSSGLMNVLWQKNHAESNYRLTKEGFLAKVPILNGHVYSINDNATVEDAATDYEFMIRQLVKVRTIGVSERNDCPKFDLILLTMGSDGHVASLFPNHPAMELKDDWVTYITDSPQPPPERITFTLPVINSASNIAIVSTGDDKAKAVHIAVSDMAEGLDAPTSLPARMVQPTDGKLVWFLDKAAASFLDSKNDDDDACYDRHE

SEQ ID NO: 52935 - protein, 218 aa, Zea mays
  Clone ID: LIB3062-025-F1_FLI.pep
HNNRHCPPRSQTAFRIRIFLARRRPYDSGPAKTFIRGRARRHPQSLTLTELLLQQLRRRRVAVRLSTGSAGGLTRRQLVVRRSLDRERGTDRLASSVSSVLQLGLQRLNRGCGPRAAAAAVRGLLAQHPVRRIEVGALVVLGYQGLLGCHPSVLLLRACLFLHGRRRLGSITARHLFFLSSSSSSCCLAPLQLACGALRRCRCGGGEERPEGRGGSRR

SEQ ID NO: 52936 - protein, 159 aa, Zea mays
  Clone ID: LIB3062-025-G7_FLI.pep
IEFWNNVYGFDMSCIKKQAMMEPLVDTVDANQIVTNCQLLKTMDISKMTPGDASFTVPFKLVAERNDYIHALVAYFDVSFTKCHKLMGFSTGPRSKATHWKQTVLYLEDVITICQGESLSGSMTVTPNKSNPRDIDIKLKYSINGHRCQVSRTQFYKMR

SEQ ID NO: 52937 - protein, 158 aa, Zea mays
  Clone ID: LIB3062-026-D6_FLI.pep
RSGLLGSSGFCGCPRSARQSASWFSSRRPMGKIHPTHHRLCLYHVQIVQDERELKKQKRKQSNRESARRSRLRKQAECEELGQRAEALRSENSSLRAELERIRKEYEQLLSQNASLKEKLGAASSDSLPDMNEQNDGDGDGGYRKQPDSDGHQPGSES

SEQ ID NO: 52938 - protein, 75 aa, Zea mays
  Clone ID: LIB3062-036-C2_FLI.pep
KASEDQKLSDSPPSLDDYPESMQPSPKKPRIDALSPDSERDTTQPEFESHLIGPWDHGIAFPVEEFKADPAMSKS

SEQ ID NO: 52939 - protein, 158 aa, Zea mays
  Clone ID: LIB3062-037-G12_FLI.pep
NNSFCTPWAKLVKPFVPSLPLVHYGTEQYYLAVNSAASTRHLHIAIRMAAPQRSDVFLQRKRGQTATAAMRGVRGEAASSVACRPCSWRRHSGIWWRTAATLRPARPCAGSPRPAGRPPAAAGRRRRRRPPRAAPTGGRCRGPRTPPSRTAPPGAAGT

SEQ ID NO: 52940 - protein, 121 aa, Zea mays
  Clone ID: LIB3062-050-C8_FLI.pep
RSSTAVTSPLTRPSPVAVAVAAVATAAVAAAAAMVAGAVTAVMAAVAATAVGARVVAAATEAVAATAVGARVVVAATAAAAAAGGTDVWAHPGFGRVILSIYSIVLPFASVTVLVSVLPLD

SEQ ID NO: 52941 - protein, 300 aa, Zea mays
  Clone ID: LIB3066-007-C4_FLI.pep
GRQAPTRPMSSMWRVSRRLLRAAASASTSAIGRGAEPRRWVPPPFALQRCGHASLPDAARRDGEEEVTAAEARRLMRLTNVDALKRRLGDGEVIPYADLLRACQDSGAARTRAEAAALAGALDEAGVVLLFRDRVYLQPDKIVDLVRKAMPLALTPENDPGKDELKQLQVQLENINKLAHKQVRRILWSGLGFLITQVGLFFRLTFWEFSWDVMEPITFFTTTTGLVVGYAYFLITSRDPTYRDFMERMFESRQRKLIQRQNFNLDKYLELQRRCKDPLEKACGTTNTDMAHLHELSIHK

SEQ ID NO: 52942 - protein, 143 aa, Zea mays
  Clone ID: LIB3066-008-D3_FLI.pep
TKTEQRNDIDRLYNPSWKIQLRQAAATWRTSHLVSVGKLLLLFVPHGVLVGADDGGEEERGGDPVLGDLVVDLGGDVLPQPRHHLLLEGRQRVHHRLHPHRRLPHFPPRRRPEFLLLGRDAPIASRTPMGGFWLWVVRSAEQL

SEQ ID NO: 52943 - protein, 117 aa, Zea mays
  Clone ID: LIB3066-016-E3_FLI.pep
LGRRTTPWQQRAGAGAGAAVRGGVPCWPCEAIEEDDEEDDDFDDDEAVKVFRRQKVDQAVKEAVSRVLSMVDSTEARMQYRRMLEEFRQATAELEGSNEVTSIFDSDLELLGINNFM

SEQ ID NO: 52944 - protein, 133 aa, Zea mays
  Clone ID: LIB3066-017-H10_FLI.pep
SPSPSPAPRRPPAAPRCSTGRPTPVTTRSAACRPTRRPTRAPKATHRRRCRHRRRRPDPFPLNTTRLVRVLVMFGLCVRFALLACVFLRLPCRLVVVDAAPWITDLRYSPVLAVPVPIYLAFLSFFFNMPEDI

SEQ ID NO: 52945 - protein, 132 aa, Zea mays; identical to SEQ ID NO: 49787
  Clone ID: LIB3066-026-C12_FLI.pep

SEQ ID NO: 52946 - protein, 188 aa, Zea mays
  Clone ID: LIB3066-027-B12_FLI.pep
NIAEILQPLHETKPVSAPQKEAKAPAATAAAAQTRAAALASATGALLAAAPPAVASAPGGAGTSSLGSVMVAPLGAPTGAASSSSSTASSSEAGLSPSKDPSGVCATGVRMVGLALASSADATAASAATSAAARSSSSSARCEAMAARTEITLGAFAWEWDGSQNKQVIYRTSLFLLGLYMYIERRRS

SEQ ID NO: 52947 - protein, 215 aa, Zea mays
  Clone ID: LIB3066-027-G9_FLI.pep
ETSIPRKHGPAIAGYETALKKFFEYVLQAFLKHIDFEVVQCTVIASPGFTKDQFRDYLFLEAARRDLRVIIENKQRLVLAHATSGYKHSLKEVLDTPGVMALIKDTKAAQEVRALQDFFNMLTNESARACYGPKHVEFALQQFAIQTLLITDTLFRNADIATRQRYVKLVEDVKKNSGTVHIFSSMHVSGEQLAQLTGIAAILRFPLPELEDMEL

SEQ ID NO: 52948 - protein, 92 aa, Zea mays
  Clone ID: LIB3066-034-E1_FLI.pep
LKLANIIIHLDQVIQSNLLQLGRLGEDVRGELLRRTDAPLDFNRPSDECNLWIRLAGGDSKEIVVRGSSTISKFPRRTCFSCSTHCISYIVI

SEQ ID NO: 52949 - protein, 94 aa, Zea mays
  Clone ID: LIB3066-034-F8_FLI.pep
IEAQLDDESIFPQKLGTPFPQNFKEVVKTIFKRLFRVYAHIYHSHFQKIVSLKEEAHLNTCFKHFTLFTWEFTLIDKAELAPLIDLIESIVSVC

SEQ ID NO: 52950 - protein, 141 aa, Zea mays
  Clone ID: LIB3066-034-G2_FLI.pep
KDVTDINVKDCTLKKTMFGVRIKAYEDAASVLTVSKIHYENIKMEDSANPIFIDMKYCPNKLCTANGASKVTVKDVTFKNITGTSSTPEAVSLLCTAKVPCTGVTMDDVNVEYSGTNNKTMAICTNAKGSTKGCLKELACF

SEQ ID NO: 52951 - protein, 176 aa, Zea mays
  Clone ID: LIB3067-006-A3_FLI.pep
FQPFRRATVRSETSQQAAMFATAVRWAAKKGKPKMAPIELTAPPEQAQSITRAIFDAVREHGPLTVSDVWDHVKDVGLRGLASKRQMKIMLRWMRERQKLKLICDHDGPHKQFLYTTWFTNPRNAPQRPNPKPNVKADKLPTFPFPFEATVTRTCFCALCTCFCCPRHNVQHGNKC

SEQ ID NO: 52952 - protein, 95 aa, Zea mays
  Clone ID: LIB3067-001-H10_FLI.pep
SLSTLKIEETKKQVSAQGSKSAQTSSKAPAITAPKPTAYRPPHAKGSAELQDKLFGGLAPAGGEMSKNALRNKKRREKQKEKKAAEASGSPADES

SEQ ID NO: 52953 - protein, 67 aa, Zea mays
  Clone ID: LIB3067-002-D10_FLI.pep
MLCGRRFPPLLVAICVLYMVAEVKIVSLLFLSTTTTQLRVRDGLGTPFNCNGLLVCCPPYEGCDDCA

SEQ ID NO: 52954 - protein, 227 aa, Zea mays
  Clone ID: LIB3062-010-H11_FLI.pep
YQKIFKADYQVPPWVSGDARRLIARLLVVDPAKRASIAEIMCTPWFRKGFVPPVLSPPVTPKKQQLDEGAALFDNDDDDNSNSNHSGATSPRSCNAFQLISSMSSGFDLSGLFESEQKTATVFTARAPAATVVEKLESVARALGFEVTRGKGWKVRMEAKAEGTNGRLAATAEVLEVAVDVTVVEFVHDAGDALDFNKFCAVDVRPGLTEIVWAWQGDSPAAAVGTA

SEQ ID NO: 52955 - protein, 239 aa, Zea mays
  Clone ID: LIB3062-011-B9_FLI.pep
GEAAKNGAAAADGHKPGPVPFFAAGISSVLHPKNPFAPTLHFNYRYFETDAPKDAPGAPRQWWFGGGTDLTPSYIIEEDVKHFHSVQKQACDKFDPSFHPRFKKWCDDYFYIKHRNERRGLGGIFFDDLNDYDQEMLLNFATECADSVLPAYIPIIERRKNTPFNEEHRAWQQLRRGRYVEFNLVYDRGTTFGLKTGGRIESILVSLPLTARWQYDHKPEEGTEEWKLLEACINPKDWI

SEQ ID NO: 52956 - protein, 164 aa, Zea mays
  Clone ID: LIB3062-011-G7_FLI.pep
AEHVFYHLRTQIQNCHGNLCSCHVTKSTAKHLEKNVHQKRKLHSASNCSQQLTLVPLSTDRHQQILGIHRRKATRFCTFDGTDRLLKKNKDDDDTLIARARNAGEPSPSSSSSEPGLASDPLQLPLEVPDDLRNGDDASALVPVVPVPGAEPGDGDEVAELAGA

SEQ ID NO: 52957 - protein, 121 aa, Zea mays
  Clone ID: LIB3062-012-G8_FLI.pep
RDKDGEVGDDVFDEELEAEETDNPELAVKPVYVKDDFFDSLSSGTFGRGGPNGRGRPSERRRVDTETFGEFPRHRQPYRGGGRGYRGGGRSRGSYYGGRGYGNTGRGGPGNSYPHWGNGRD

SEQ ID NO: 52958 - protein, 79 aa, Zea mays; identical to SEQ ID NO: 48904
  Clone ID: LIB3062-020-H3_FLI.pep

SEQ ID NO: 52959 - protein, 138 aa, Zea mays
  Clone ID: LIB3062-021-F1_FLI.pep
VNYSYLRNNAPARAVGAQRKLELDYQLPETNNHNKVTKAEAMNQSWSRPAAVRSNAGNHLANDLNPRVPDLAEKLSQLSMGPNRVSGLGSERFVRTHENAAKRPLPVGSRAWHGPADPFRRPYEMPGDRTLLPRNLVR

SEQ ID NO: 52960 - protein, 206 aa, Zea mays
  Clone ID: LIB3062-030-H7_FLI.pep
EKVKPHPLVITLLTQVEDVIPRWKIVPTKQDVIDAAFKDPVKREKIRRNQLIYQDKPRLKTALEMLRTSMYIEDSLSQVTLPFFVLHGEADTVTDPEVSRALYERSASADKTIKLYPGMWHGLTAGEPDENVEAIFSDIVSWLNHRSRSWAVEERHMTRKLAPAPAKSIEGHGTVVGKVHTQQGRPRRRQGFLCGLAGRTHHHAEM

SEQ ID NO: 52961 - protein, 406 aa, Zea mays
  Clone ID: LIB3062-031-D11_FLI.pep
RKQPTSSGPANSTGTGNTVGPANSPPSTPSTHTPGDGLGMGGNMRHVPKNLMIYGADGTGLASSSNQMDDLEQFGDVGSLDDNVESFLSNDDGDPRDIFAALKRSPAEPSPAVSKGFTFSEVNCWRTSNSKIVCCHFSSDGKILASAGHEKKAVLWNMENFQTQYTPEEHALIITDVRFRPNSSQLATSSFDRTIKLWNAADPGFSLHTFTGHNGQVTSLDFHPKKTDLLCSCDGSGEIRYWNVTQFACLRAIKGGSAQVRFQPHVGQFLAAAAENVVSIFDIETHGKKYTLQGHNTDVQSVCWDNNGEYIASVSQDLVKVWSMSTGDCIYELSSNGNKFHSCVFHPSYSNLLVIGGYQSLEVWNMVKNQSLTVQAHEGLIAALAQSPVTGMIASASHDNSVKVWK

SEQ ID NO: 52962 - protein, 343 aa, Zea mays
  Clone ID: LIB3062-041-A2_FLI.pep
RKKMLRAQAEREILEMLDHPFLPTLYAHFTTDNLSCLVMEYCPGGDLHVLRQRQPGKSFPEPAARFYVAEVLLALEYLHMLGVIYRDLKPENILVREDGHIMLSDFDLSLRCSVNPVLLRSSSVTANHQPRKHTGPCAENYCINSSCLQQPSCAQTSCFTPRLPSIPKPRKPKSSQKRLPQLVVEPTDARSNSFVGTHEYLAPEIIKGDGHGSAVDWWTFGVFLYELLYGKTPFRGPGNDETLANVVSQNLRFPDHPAVSSNTKDLIRGLLVKEPENRFGSLRGAAEIKQHPFFEGLNWALIRSAAPPETQPCNIVTLAKERKKEGKCLEFRSNSEDLEFEVF

SEQ ID NO: 52963 - protein, 261 aa, Zea mays
  Clone ID: LIB3062-042-C2_FLI.pep
KNAPPPMVRLSGKSLVSAIWKGDSSIVAELLQSMEPHVEEEVLSDLKAKICAHDPSDSEDIEGGIRNSLLWLRDELRTLPCTYKCRHDAAADLIHLYAYTKCFFRVRDYKTVKSPPVHISPLDLGPKYADKLGPGFQEYCKTYPENYCLAQLIYWYSQNSEPESRLTRARKGCMSLPDVSSFYVKSLKPLQERVYGNRTVRFMLSRMEKQAQRPWPKDRIWVFKSDPRYFGSPMMDAVLNNSPLDKEMVHWLKTRPNVFLG

SEQ ID NO: 52964 - protein, 417 aa, Zea mays
  Clone ID: LIB3062-042-E2_FLI.pep
AYRFSISWSRILPKGTLEGGINQAGIKYYKKLINLLIENGIEPFVTIFHWDVPQALEDKYGGFLGDRIVKDYTDFAKVCFENFGDKVKNWLTFNEPQTFTTFSYGTGVFAPGRCSPGEKCAQPIANSLTEPYIAGHNILRAHAMTVDLYNKNYKGTDGRIGLAFDVMGRVPYGNTFLDEQAQERSLDQNLGWFLEPVVRGDYPFSMRSLARKRLPFFTDNEQAMLAGSYDILGINYYTSRFSKHVDFSEDYSPKLNADDAYATAEIFGPDGNSIGPPMGNPWIYMYPKGLKDLLMIMKNKYGNPPIYITENGIGDVDTKDNPLSMQDALDDYKRLDYLQRHISVIKESIDLGADVRGHFTWSLLDNFEWSSGYTERYGIIYVDRDDGYRRYLKRSAKWLREFNGAAKKAEKKVLTPA

SEQ ID NO: 52965 - protein, 148 aa, Zea mays
  Clone ID: LIB3062-043-D10_FLI.pep
EPLEQDLPGRAPAYRGEVHLEALLGEADDPHRRVRVLEVRVQPGEARDPAVPGDAVRAQVPHHGEHRAAGRGGRALQQVMRDGGHRPDRSMSEREHSECRVFSLAISFFFSLPGGEKKSLLLLGGGRSLLLFASRVKFTYLVKVLFHH

SEQ ID NO: 52966 - protein, 142 aa, Zea mays
  Clone ID: LIB3062-043-G11_FLI.pep
EFFRDAQEKVLPYADYIFGNETEAKIFAKVRGWETENIEEIALKISQLPLASGKQKRIAVITQGADPVVVAEDGKVKTFPVILLPKEKLVDTNGAGDAFVGGFLSQLVLGKGIEDCVRAGCYAANVIIQRPGCTYPEKPDFN

SEQ ID NO: 52967 - protein, 236 aa, Zea mays
  Clone ID: LIB3066-022-E11_FLI.pep
TAHQLGNRSSERPWPVLSPSPSSSSSSPPLSCRSLRMRHRLPRQSIRPPHRQRHPARRPTSLRRPPRRRLRMVRLPPLRPQLPRPPTQRRHLPRHLPPGLSSVPPHLTRALRQKRPLQVPPRTHHRPALPRPRRRLRLQYRPIVAAVVVPPRKSLPPARLVPQRSRRRPRPAAHRPTARLSRPTLLRTRQRSLLARPLTTRAAARACWVALALPWSCWSRPSRPPPCFVSKRPRSL

SEQ ID NO: 52968 - protein, 91 aa, Zea mays
  Clone ID: LIB3066-042-G3_FLI.pep
KQRCNVLKKLDVGYNILVSVQTKCSGKCSIPEKGLAVNYMAFLSTNHCKNCVCQDSLAWDLPQSQSETVPSEACISPFSDSPDDNLINSFI

SEQ ID NO: 52969 - protein, 383 aa, Zea mays
  Clone ID: LIB3066-051-D9_FLI.pep
RTFRSGGINVDHIAFDPKETNRFVATDCLDGKVMIWSLDSPEPEYHLPKTDFKGIMFLEFFTRYGRQCLIIAHEDHKAHVWDFRLRKFVSEKRKLLSREASVFLRPNVSLLLTPSSKGTCRFWDAKKFSFYGVIDNSAGGDVLGIACLMGSKTRFVIGQYYALTILHLDNALYQKDPRQSIEPQLCAHTRQGDTSSEEKYGEEMVWHHGPNFDWQHEPFDAAIMRASGGENAHEQYTLFDIMIDSTEVRAQRMSSSFCSMSLSSHQPKEQELEVARLREELRQRDEHHKVQQDYMFSFIQQQHAIIQELSQQHGLDVVLPEFRPPLPPMLPQLSPFLSTISQATTDASGTEPTGMAFVESFAYPPPATDSNHNSNNPCSDFGA

SEQ ID NO: 52970 - protein, 68 aa, Zea mays
  Clone ID: LIB3066-051-F6_FLI.pep
TGCTGIVYAPTSHHQQLDKQNFYRYILSAKNPPAITVSFCSQRQLYTCTHQKSSFKMTCKYIGTEAEP

SEQ ID NO: 52971 - protein, 337 aa, Zea mays
  Clone ID: LIB3061-056-B6_FLI.pep
GGLMGHFAVYKTYEVLAAHFFWPQMRRDVERLVARCTTCQKAKSRLSNHGLYMPLPIPTFPWLDISMDFVLGLPRTKKGRDSIFVVVDRFSKMAHFIPCHKTDDASKVAELFFREIIRLHGIPNTIVSDRDAKFLSHFWRSLWNKLGTKLLFSTTCHPQTDRQTDVVNRTLSTMLRAVLDKNLRRGEDCLLHIEFAYNRATHSSTKMCPFQIVYGYIPRTPIDLFSIDAEDAPHIEAVAHVEQMSDLHEQTHQNIAAANAKYQVAGSKGRKHVTLCWSEGRNATLRSKSPLLSRCSDRDKAGRDTLRLIGTRRRPATKASHSAASSSSEAHVRSGPL

SEQ ID NO: 52972 - protein, 290 aa, Zea mays
  Clone ID: LIB3062-022-A8_FLI.pep
ERERRGEERRGTEMERAAPVRSSHTSTAGLLAWPHPDGAGSLPARRPNQPTEEFRNVVFGGQLTEGADGLNKTKRKTGSSPKGKETTGTGISKAESAAAAVATASRDRQASQITFSQDGTVPTRKATSVAGVARQRELSHTVESEGDSKMKRQVSSTKSKELSGHDIFADHEDPKPNRSRRSDYGSSAAQSPVKNANVSSFSFGEADIDSTVKTAKKKGSSNLSTDLNGKTMPKKDSASAEKQPPNRARPKGMSGSSNFADGKASTSTTGDHEGRRTRQPPGGDSSILLG

SEQ ID NO: 52973 - protein, 166 aa, Zea mays
  Clone ID: LIB3062-022-C3_FLI.pep
RGRRSRRSTRRRRSPRRSTRRRRTGAAARPGWRTGWGRTRAGMRSWRARSAAPRRPTSSPCRSTTRRATPSSPSSRRSSSTCTPPPPLLLLPPPPPPPPLPRPPPPSPSPASAAASRSKLAGLVGSPACMGHNSLRFQSHPPTRSIINQTAALRPGGCRSRPAVYC

SEQ ID NO: 52974 - protein, 227 aa, Zea mays
  Clone ID: LIB3062-023-E10_FLI.pep
LASAACKNKSSIRPIQIQAGGQEASWNSTTTTAFSSLPPASAPRSSRRTAAMSRSAVAGVRRPPSAWQKAACPAIAASSSSTEPPPAATSSPTASPQSPHSQRPPYRARTPAAYAGVHSSLSPQQAHTSHSSASATATATTAGATSCSAATDIGEKSRERFRRRSTAEGKGIRTSLPRIIRIRQGKGGGEEVLLGGGEGMGEGRWMERRLVHGGGLEEVESRAAELR

SEQ ID NO: 52975 - protein, 395 aa, Zea mays
  Clone ID: LIB3062-024-B9_FLI.pep
QKKKKPLERLPLKRHSSPLAHSSAPSRIQIVRQQSPKPYSTTRSPTDASPTSNSTPHRARESRIPTMATIQHQAKPAVAAAPSTTTGGGQRAMDLYEKLEKVGEGTYGKVYRAREKATGRIVALKKTRLPEDDEGVPPTAMREVSLLRMLSQDPHVVRLLDLKQGVNKEGQTILYLVFEYMDTDLKKFIRGHRSNNEKIPAATVKILMYQLCKGVAFVHGRGVLHRDLKPHNLLMDRKTMALKIADLGLSRAITVPVKKYTHEILTLWYRAPEILLGATHYSTPVDIWSVGCIFAELVTNQPLFPGDSELQQLLHIFKLLGTPNEQVWPGVGKLPNWHEYPQWKPTKLSALVPGLDADGYDLLEKLLEYEPAKRIPAKKALEHPYFKDVRKGDAH

SEQ ID NO: 52976 - protein, 184 aa, Zea mays
  Clone ID: LIB3062-034-E10_FLI.pep
QNRCIEGYCYARMPSSPIRRHRFCREQIFHSREHRVVRWIIWMVLGWDLQNSRDGLVVAIHQKPYHVGNILTDEHNSNILPRSKFFERILDLFNCRLVVDEEVVGFLAQINIANAGHQEASDGVLVGDDCDEGGVVSGDVGPPRHGLWLWMLLPCLLVIEVLRPCCEPGGDQASAQAEIGSISI

SEQ ID NO: 52977 - protein, 205 aa, Zea mays
  Clone ID: LIB3062-035-B5_FLI.pep
AYLFTTTFTSHHMIAASALIFLLSQNNLTLWFFELINTSLLNPDSKTSIAYDLSSSVSPSIVSNSSRHFLIEKSSSCFFFSSRASSVLAAVLLLNSTKLSIAAPVSLCSSERNESIAGRRRKKNSSSSSSSSNKSCLAWPSQEPISGRRPEGIGRLDGGAGPGRGSPWRPAASRSRRSAEELLGTTLAKPRRSRGDEPVREGRKR

SEQ ID NO: 52978 - protein, 237 aa, Zea mays
  Clone ID: LIB3062-035-G6_FLI.pep
SFIKLAQSPHIVMCHQSFYHNGVIYLVLEYMDRGSLADIVKQVKTILEPYLAVLCKQVLEGLLYLHHQRHVIHRDIKPSNLLVNRKGEVKITDFGVSAVLASSIGQRDTFVGTYNYMAPERISGSTYDYKSDIWSLGLVILECAIGRFPYIPSEGEGWLSFYELLEAIVDQPPPSAPADQFSPEFCSFISSCIQKDPAQRMSASELLNHPFLKKFEDKDLNLGILVENLEPPMNIPE

SEQ ID NO: 52979 - protein, 65 aa, Zea mays
  Clone ID: LIB3066-004-A11_FLI.pep
EGLKPDHTLTIKVKPWNRIIQDGHRTNTNVLLLLCTTQAGGLERLQLFMPICCATCLRCIMRMED

SEQ ID NO: 52980 - protein, 149 aa, Zea mays
  Clone ID: LIB3066-013-H9_FLI.pep
GDRMPRSGISGTLRSPQIDVVIDTGNPFLNRTVDGFLKIGAVGACKVAAEETFDCLHRGDVSKRKVEHALKKMCKEGAYWGTVAGVYVGVVYGVERVRGRSDWKNAMVGGALSGALVSAASSNHGDKIVKDAITAGAVATAVEFANYLT

SEQ ID NO: 52981 - protein, 93 aa, Zea mays
  Clone ID: LIB3066-014-A3_FLI.pep
ANAPNVCSDKSVAVLYMGAQMITDFKCSDVALDFVSYLNHRTEIVLVLATFLLVSSQLPFGGKLGLSYLFIYLFVVEWSPVVLVTTAQEDTFI

SEQ ID NO: 52982 - protein, 413 aa, Zea mays
  Clone ID: LIB3066-025-C4_FLI.pep
HDKMACTNNAMRALFLLVLFCIVHGEKEESKGIDAKASGPGGSFDITKLGASGNGKTDSTKAVQEAWASACGGTGKQTILIPKGDFLVGQLNFTGPCKGDVTIQVDGNLLATTDLSQYKDHGNWIEILRVDNLVITGKGNLDGQGPAVWSKNSCTKKYDCKILPNSLVMDFVNNGEVSGVTLLNSKFFHMNMYRCKDMLIKDVTVTAPGDSPNTDGIHMGDSSGITITNTVIGVGDDCISIGPGTSKVNITGVTCGPGHGISIGSLGRYKDEKDVTDINVKDCTLKKTMFGVRIKAYEDAASVLTVSKIHYENIKMEDSANPIFIDMKYCPNKLCTANGASKVTVKDVTFKNITGTSSTPEAVSLLCTAKVPCTGVTMDDVNVEYSGTNNKTMAICTNAKGSTKGCLKELACF

SEQ ID NO: 52983 - protein, 146 aa, Zea mays
  Clone ID: LIB3066-025-C5_FLI.pep
NKDASPHLLRPVKITNWHRESDPLTGYRPRPTPCILLHARMVHGSARARARQLSVADDDELVVVGHVGVVVVAAVVVADVVGRGGGRVDGDAGALLLLAVRVVHGADAARVVVPGAGHALGLGGARRHRRRRRLRGGLRRGVGRPR

SEQ ID NO: 52984 - protein, 98 aa, Zea mays
  Clone ID: LIB3066-033-A3_FLI.pep
TQARTRRGGLSRSSSAIQASSVRSWMVTSTRNSARKKTVIEEIRGSSEHQGPVSQALSVLSGLETCCDKFKLARFIAWNKLVRICPIPPGLGKSELVL

SEQ ID NO: 52985 - protein, 77 aa, Zea mays
  Clone ID: LIB3066-054-A7_FLI.pep
RSTNLACYRIIYIGCPTRVPLNEPFHPTVSRHVPRRMRQHRKEGHALGPHEVGMRPVYRLTDTPDQHQITYVLGRRT

SEQ ID NO: 52986 - protein, 328 aa, Zea mays
  Clone ID: LIB3066-054-F10_FLI.pep
SRPRTDGSSSEGSPSPGTSEGSPSPGTSAPNEESNPATASKRPYLERNYSVLEPSEGSQLADDVEGESSLENVKKQLEINKKAMAALYKELEEERSASAVAASQTMAMINRLQEEKAAMQMEALQYLRMMEQQADHDHLAIQDLHDLLTEREKELLDLDAELAHCRRLLQNDPFNGDGRNGADTVNTTIDGRNPAAIECLDGADLVGSAMSLFEDDKAFILESLSRLEENLGIFTNRLASGDARGSQEDVLFEEHTTADGSPSNGDKLSGVANLKTGISLLNIRLRALEDDQEFLKQVLSSLQCRSDGLQCIQEISGHLAELRRVVTR

SEQ ID NO: 52987 - protein, 87 aa, Zea mays
  Clone ID: LIB3066-054-G7_FLI.pep
RFVAAASSSSSSCPLARLISRRGLAGAADGHGPAKVPLWKDPLSPSKWKEEHFVLASLSMWGALFYGGFKFFGGKKEDKIEVASGQT

SEQ ID NO: 52988 - protein, 189 aa, Zea mays
  Clone ID: LIB3062-007-F6_FLI.pep
PTEISSVHSHAPVYHLQQAGGDGYTRRNGSTSQSQEGWTTTVHTSSENQRTRERERSQNEAESLVPRTAATALEASAETEPAAPRPRLRPEPAGPPRRRRRGAAQHLPHHVHVLVLARAHLLPQPPQPCNKQQPATGSVSGAQRRREIVREPPMNAEPRPRAVPVWRTPKRDATPSQARRTGSTTRSHQ

SEQ ID NO: 52989 - protein, 305 aa, Zea mays
  Clone ID: LIB3062-008-G10_FLI.pep
GEARRWTWDEVTSPFMASNSKVKSLLLHHSVSILKIPVPSPSADLSDGGKLPLEAIFVSCSCKGSSRSPTVVVLHGGPHSVSVSSYSKSSAFLASLGFNLLVVNYRGTPGYGEEALQSLPGKVGSQDVQDCLAALDFAVEEELVDASRVAVVGISHGGFLTTHLIGQAPDRFAVAAARNPVCNLSLMAGTTDIPDWCYVVACGTQAKRYASEAPSPDHLRLFYQRSPIAHVSKVKAPLLMLLGGADLRVPASNGLQYARSLIERGGDVKIMMFPEDIHEINLPRSDFESFLNIGVWFKKHLNAVA

SEQ ID NO: 52990 - protein, 76 aa, Zea mays
  Clone ID: LIB3062-009-G12_FLI.pep
KKAEPNRPSSADVRVTLLERAMQGSQLQQAQKTVSMHGAQNELLPLKVFMQMLFYEKACVVTLYSPSQQAAARFGT

SEQ ID NO: 52991 - protein, 289 aa, Zea mays
  Clone ID: LIB3062-010-B5_FLI.pep
GFGGCGRRVGGRVLPWRRRAASSGSRRSTTPSARSRLRRSLLARCPTTYWSGTMYWKEVKERPLKVKIIHNIPHYLLPPIFVLLLIISNDVFHASISLPAGGYYYGKLKFPPDYPFKPPSISMTTPSGRFAPHKRICLSMSDFHPESWNPMWSVASILTGLLSFMMDDALTTGSIKTSDAEKRRLAKASLAYNCESKNCPHFRKLFPEYVEKYNQQQQLENTAAEPVPQENPAPVPSLAVQQAPVVANRAQPLAEVRRDKNQKKAVPFWMVLVMFSVFGAVMALPLMQL

SEQ ID NO: 52992 - protein, 241 aa, Zea mays
  Clone ID: LIB3062-026-F5_FLI.pep
RQDRGLRHQAAEGPRGQEDVERLLLPRRRAAGEGGPRRLAPEPRRVQGGQRGVLPPHAAPDARAVRAPLAGAGAPRGRHGGGVRRRRPGVPAEDQLLPAVPAAGAHARRRAAHRHEHAHRPRAQRGAGAPGLQRWSMVRGQVRARRTHRPYRRSDRDFQQRGIQGGAAPYDGEQGEDADVMADVRGAAGGARRRAAPQAGHGGEPGQVQGQEVQGLPALQDQQAPHVIMYLGFYCRVHPLL

SEQ ID NO: 52993 - protein, 107 aa, Zea mays
  Clone ID: LIB3062-027-C6_FLI.pep
SYPWSSIDVISSCRGRTCSCHRSCSRGRPRRTPPRPRRTRARPSSPGPRRGRRWPARRCSSPPGQGTSCRTCSLSRSRSLIRSCKTSSTLWCKRSSISSRINETSRL

SEQ ID NO: 52994 - protein, 374 aa, Zea mays
  Clone ID: LIB3062-028-C7_FLI.pep
ILRRAVNPQSLIPHQLGGGFAPVLALRLQAMEQRRWLAVAVLMCLLVLCSGRELKTKHVPIYDPVLARTLAEYTSAVYTADLTQLFTWTCERCCDLTEGFEVIELIVDVKNCLQAYVGFARDMNAVIVVFRGTQENSIQNWIEDLFWKQLDLDYPGMPEAKVHSGFYSAYHNTTMRDRVMRGIKNTRKLYGDIPIMVTGHSMGGAMASFCALDLIVNVGFKDVSLMTFGQPRIGNAIFASNFKRYLPNAIRLINAHDIVPHLPPYYHYFPQKTYHHFPREVWIHNVGLGSLVYSIEEICDDSGEDPTCSRSVSGNSVHDHVHYLGISMHAESWGHCRIVTDNSTLPQQYKMDPDGNIILSKQPGLSVNELHSAQ

SEQ ID NO: 52995 - protein, 163 aa, Zea mays
  Clone ID: LIB3062-028-F11_FLI.pep
RFVVESRIEMPMEGWGEIRVINEHVPQSVLPSLYKAANAFVLPTRGEGWGRPVVEAMAMELPVIVTNWSGPTEYLTEENGYPLDVDRLTEVTEGPFKGHLCAEPSVARLRDLMRHVVDDRDEARNKGKKAREDMIKRFSPEVVARIVAEKIQQVLIHTQLTNE

SEQ ID NO: 52996 - protein, 340 aa, Zea mays
  Clone ID: LIB3062-028-H3_FLI.pep
GRKTVLLLSTLLTSGLGLLSALSINYLCLLVLRFFVGIGVGSGHVFSSWFLEFVPAGNRGTWMVIFSFFWTIGTVLEASLAWAVLSALSWRWLLALSSLPCFLLLLFFRITPESPRYLCAQNRMTDARFVLERMAIANQAALPMGVLTYHQETKTECITHVSEDEHLIPVREKEHTDRNAISSKSGAVAVLHKLLSHNLLKSTLLLWFVYYASSFAYYGITLLTSQLSDVNRSCKSDLVFEVHQNNGNLYKDTFITSLAEIPGLILSALLVDRFGRKATMSCLMFACCAFLGPLVLHQNELLTTTLLFGARACGTGATTTLCLYAPEVRFNFLMATCILI

SEQ ID NO: 52997 - protein, 312 aa, Zea mays
  Clone ID: LIB3062-030-C9_FLI.pep
KAKKISEEEYVTAIKEEINKVVKLQEELDIDVLVHGEPERNDMVEYFGEQLSGFAFTANGWVQSYGSRCVKPPIIYGDVSRPNPMTVFWSKTAQSMTSRPMKGMLTGPVTILNWSFVRNDQPRFETCYQIALAIKKEVEDLEAGGIQVIQIDEAALREGLPLRKAEHAFYLDWAVHSFRITNCEIQDTTQIHTHMCYSNFNDIIHSIIDMDADVITIENSRSDEKLLSVFREGVKYGAGIGPGVYDIHSPRIPSAEEIADRIDKMLAVLDTNILWVNPDCGLKTRKYTEVKPALTNMVSAAKLIRTQLASAK

SEQ ID NO: 52998 - protein, 414 aa, Zea mays
  Clone ID: LIB3062-039-C1_FLI.pep
PSSSTTTTQPSLARTLSHISLAGSSHRPVRLAVGAKAPLLPFHPISTGRVNGRDCMHAGSASGRCCRVVAAAGHFLDSTNLLLIDIVDSLCYYTLTNLRLHGNGHVGLDRQLLRRRHGSMDAAVGHAGRICPCSRSCLGGAGAGDRLHVHVDDHDHLRLVHLLHRRRRSFDVDVDGVHLGTAARPGLGHHHHLLGVLRQLRLLHRHLHRDRRGLLVPVRHVQRHLRDAEDEAQHVGERHEHVPLQRAVREPDHGAQHQEEGERDGHELHALGPDHLPHDAERRGEYAERDADADPSEHAHAEAGAGDHHGGERGESKDADVEPQQHLGRERPGGLGRVHQVRGQVRRLDHAPDAVDGHQQLGAGLEQRVEDPQHAAEQRHHVRGRLEPLRRLLAVHAVERRQRRKEHHQRDYVT

SEQ ID NO: 52999 - protein, 292 aa, Zea mays
  Clone ID: LIB3062-039-D7_FLI.pep
RLYLGRPQGDPPQLVPVVVAFAGRSELAGGSDPCACCVCVGGDGHSLRSHGEPGDEEQPRRALEAEGPVRRCCAHEAAPVHRQGHPAREGNVPGGAAHQRRPLHRQPGDAGHLEPARGVVPLQPPGLPHRREPAAAGRRGRPRARLPPRGALRAHGPAPQHARARPGRRARRRRPRRHPQRLPHHVRRRLLQRGGPVHGALAHAHRQEEGGRQAADRRRLGQVHRGVLLRRHLRRALGLLSPLRARPPLLLQVEIIKDAYIYSSGRSSSLAAWYVGGVVLVSFHSSGDQRRV

SEQ ID NO: 53000 - protein, 171 aa, Zea mays
  Clone ID: LIB3062-053-A12_FLI.pep
SDDAPRATDEQIKKASNIFKRIDLINFSACQFANPALQRHYGILEALALGEDEMPDIKDETLPDEEGLSKPGVANAIEEFKTSVYGENYDQEEAEAAAGKASRGNASKKRKEVTDAAAQISAAYDWAELADNGKLKEMTTVELRSYLTAHDLPVSGKKEVLISRILTHLGK

SEQ ID NO: 53001 - protein, 98 aa, Zea mays
  Clone ID: LIB3066-011-C2_FLI.pep
QEVRESQRKNEEAIQLKERYRATVGKELEDIERRHCDMTSILHALGISVEGGEVKAFKQALLKFHPDRVSRNDIYQQVKAEETFKFISRLKEKLPRLS

SEQ ID NO: 53002 - protein, 161 aa, Zea mays
  Clone ID: LIB3066-018-G10_FLI.pep
EGEESAMEARIAGVPEDEESGLLPRPSAAGRRPSSRGPRFPPPPAAWATVDGPLGLPLEDAEGHARRFFMWGFACLPFLWAINCCYFWPVLRSSVASSPAAFAPIRPYVVRSAIGFTIFSVVLVTWATTFVVGGERLFGPVWNDLVMYNVADKLGISGFMG

SEQ ID NO: 53003 - protein, 363 aa, Zea mays
  Clone ID: LIB3066-036-E1_FLI.pep
VNDAPALKKADIGIAVADSTDAARSASDIVLTEPGLSVIISAVLTSRAIFQRMKNYTIYAVSITIRIVLGFMLLALIWKFDFPPFMVLIIAILNDGTIMTISKDRVKPSPQPDSWKLAEIFATGVVLGGYLAMMTVIFFWAAYKTDFFPRLFHVESLEKTAQDDFQKLASAVYLQVSTISQALIFVTRSRSWSFVERPGFLLVFAFLVAQLIATLIAVYANWAFAAIKGIGWGWAGVIWLYNIVFYFPLDIIKFLIRYALSGRAWNLVLEQRIAFTSKKNFGTEERERKWAHAQRTLHGLQPPEASIFENKTTFNELNQLAEEARRRAEMARLREVSTLKGRMESVVKQKGLDIETIQQSYTV

SEQ ID NO: 53004 - protein, 331 aa, Zea mays
  Clone ID: LIB3066-036-H1_FLI.pep
LADGTTTMARSGGGMEGNKWARISKHLSGRTDNEIKNYWNTRFKRRQRAGLPPYPPDVERQIKLLRAQNVNPFADADADAAHANASAGLPAPPLLYDVGNPFALLSSIPSLSQTASHSHSPLINQNYPLLNQMQVFHHLGGSQQPSFHQDGSAAAFGDIVSSRLPPLPTARTQAELHSNQFDTSISGGLVDQSMLIGDEHLLRPNPSMVKVSSMPALSYREPDGSRMLPAHGAGSDGDVSSLGQCPPGQDLHRGATWDFTFAAVKPAKRRTASEVGFSDMFAVAPPGDWFGGGSTAPSPGPSSAVTDEEFNLEMQQFMSMLPLSDEHGWNA

SEQ ID NO: 53005 - protein, 100 aa, Zea mays
  Clone ID: LIB3066-038-A8_FLI.pep
LDAECGLIGGAGLEIGGDDVVGDAVATGLDSKADAKGVLERGLGVERPGAGRALLERKGEVIAPVLFDLHVRYGCNIGGEDQVARLGSLANLEGERAPRP

SEQ ID NO: 53006 - protein, 164 aa, Zea mays
  Clone ID: LIB3066-049-D8_FLI.pep
LVGLLKVRVVRGINLAYRDARGSDPYVVLRLGKKKLKTSVKKRSVNPIWHEELTLTVTDPSLALKLEVFDKDTFSRDDPMGDAEIDVAPLVEAANASPEASLRNGAIILSVRPSATNCLADESHVCWRNGKFAQDMILRLRNVESGEIQLQLQWVSIPPAAASR

SEQ ID NO: 53007 - protein, 109 aa, Zea mays
  Clone ID: LIB3067-006-F12_FLI.pep
RKGRDLVCVPFIHFPILFLKALRDFQMNSNVCILVRSLMNLFLGFLSYNIMVSKPVVLVFLLVVLIITSQFEWKQQLVNELESTARNQKHVSSREELVKDQVRRLTLCI

SEQ ID NO: 53008 - protein, 178 aa, Zea mays; identical to SEQ ID NO: 41250
  Clone ID: LIB3067-007-C7_FLI.pep

SEQ ID NO: 53009 - protein, 305 aa, Zea mays; identical to SEQ ID NO: 40578
  Clone ID: LIB3067-009-F10_FLI.pep

SEQ ID NO: 53010 - protein, 181 aa, Zea mays
  Clone ID: LIB3079-012-B6_FLI.pep
EVLQRLVNCLDHCASRTGSLPVQTVGLLPLHCSRFSLSCLQMMFSLCSCIGNATLCAAASETSKVSISILMKRCEVILGQFLADENDLGEHPLPSVRVEETICVLQELARLIIDIDAANTLNIPPYLKQALGENKSHGRAHLLSLLPTFSELVVSREARVRELVQVLLRLISSELGLHQLT

SEQ ID NO: 53011 - protein, 75 aa, Zea mays
  Clone ID: LIB3079-023-G1_FLI.pep
ANDITTSADHHSSESREREEKNSSFLLLVLPRQNHLSSSRANTTIHLLRPYKHCNKRQQRASIAPQENIPILFLS

SEQ ID NO: 53012 - protein, 240 aa, Zea mays
  Clone ID: LIB3079-035-B9_FLI.pep
PKPKAERTRCLRAADGDFVVVLWPRRVPGPRVSGRRRRRRRRRWRGVVPPPPVAVRRHDADQGVRWRAGVGDAVRGAAPALRRLRRDTRGGRHHRSRDRPLQGLRFRDFPGPGRGGAGGAEPEPGDRRPARQLQHCGVRPAAGRAAERERRRRRRPRAARARSAAPGVAVALQGAIADDPASSGRHVVLQPPVRVSAFVVYTFSAVPPQNLWIQDQAVEIRAADPCTAQLSRAEITMMRR

SEQ ID NO: 53013 - protein, 206 aa, Zea mays
  Clone ID: LIB3079-059-D1_FLI.pep
GEAACASVHGANRLGANSLLDIVVFGRACANRVADISKPGEKQKPLEKDAGEKTIAWLDKLRNANGSLPTSKIRLNMQRVMQNNAAVFRTQETLEEGCELISKTWESFHDVKLSDQSLIWNSDLIETLELENLLINACITMYSAEARKESRGAHAREDFTTRDDEKWMKHSLGYWENEKVRLAYRPVHMNTLDDEVESFPPKARVY

SEQ ID NO: 53014 - protein, 93 aa, Zea mays
  Clone ID: LIB3088-024-E4_FLI.pep
TGWNKSILLRDFTNFARSWRHGHHLRLRGQILKGSLGGVCAILVLGRQLRIEELFSDIFLEMQVLYNVSGQLYSAPATKPCELSCYSEFCRTI

SEQ ID NO: 53015 - protein, 102 aa, Zea mays
  Clone ID: LIB3088-043-G5_FLI.pep
YTLLATPRALVHIINQVNINFSQIYSLDCTPPATTMVSAVMYDASSDARKAAAAAMSSTVPNLLSLVLSLSSFLMVSFSVRKLANRVGTKPGAIQLTRVSGP

SEQ ID NO: 53016 - protein, 120 aa, Zea mays
  Clone ID: LIB3115-001-G1_FLI.pep
PIEGPSERQRRRRSEKMVRKAKVEFDEQPPDNFDPKNPYADPVAMLEYREHLVREKWIHIETAKIIRERLRWCYRIEGINHHQKCRHLVDQYLEATRGVGWGKDARPPELHEPKKTVKAE

SEQ ID NO: 53017 - protein, 208 aa, Zea mays
  Clone ID: LIB3116-007-D2_FLI.pep
KLGSQPDLILIHNPFVPPKGKLVEFWKILEEMKDSGELTASLGVSNFRPQDFKELLSADIKYKPVCNQLEYHPYVLEALEPVFKIQQEHGILTEAYGPLSPLLRHKTGGPIKPILERIAQRLSKETGKDVDAAAALLLWTRAKGVVAVTASGNEGRIAKLAQTQELPDLSKEEVEEIEQAGRKVYFRAYDEHMCVDYENNPKGLPEDL

SEQ ID NO: 53018 - protein, 173 aa, Zea mays
  Clone ID: LIB3079-017-C12_FLI.pep
HRHTMHGTMERDANRRIKYGHSYQERAHRTCPGCKLCGQNYNYPNGEEFSAISGCQEAYYQTDHDLIPSTSQVASHCEGSCCKGQQLKPKSYSVMRDYDYINQESTPSSSDHARTRSNLPAPPHHWHVKHSNEHRRHVTDAHSAFEVRESRSWYLSSKDAPSTHSRKHHRPAR

SEQ ID NO: 53019 - protein, 117 aa, Zea mays
  Clone ID: LIB3079-029-F12_FLI.pep
LVYILLPANNGSAAWAGCRWRRASPRWGCGCSSRSWGCARTRTGTPAAPAAARSTPAAPRRRTAPAPRTASAAPGCTGSRPPSPSWPAGAAAGPRRAPSAALSSSSSSLFQPELLLV

SEQ ID NO: 53020 - protein, 89 aa, Zea mays
  Clone ID: LIB3117-007-C11_FLI.pep
VSTQKKNIYAQSKQQVLPSHIKPSWVRSSSGISRAPERSMSCNESSRPSVNHELMSLPCPSSPPGTSNMSSNPGNAGSPASTVSRGATF

SEQ ID NO: 53021 - protein, 106 aa, Zea mays
  Clone ID: LIB3088-050-E9_FLI.pep
NERIVFHRTSKKVSCGSTSDPRLGSGSGSRGHEEAGLLEGEGALHLLVLVPHLAGLGAAPEGELRHGREVEVERAGGGASVPGAPHLGRRGASVVVLPLVAAERLA

SEQ ID NO: 53022 - protein, 124 aa, Zea mays
  Clone ID: LIB3118-011-C4_FLI.pep
LTKEVRSFQVGGQLPHVALAKARDGGEGASVSRSHETDGHTDRPPELPVLLLETTDVPHGLCRKIIVDDDGNLRHRVGGASVVSGDEDAGRPRPELLDGRVPGALVHAVMACRDGVTLADVFCA

SEQ ID NO: 53023 - protein, 176 aa, Zea mays
  Clone ID: LIB3115-023-E10_FLI.pep
RAHHPAHGPAGGRPAGAQGRPLDRREPAARRARRQHRGPAAGAEQRQVQERVAPRRRQRRQAEDVGGVVPLPLQRRAHRPRRQAPHRRHARRLQGLHLRRVLRQVLEQEPGPGALPRALQDPDLLGVFWMLLFHFSFSVLVCLLLEWNLPTASETVCLYPSSAPPPNNLSAHVGLF

SEQ ID NO: 53024 - protein, 255 aa, Zea mays
  Clone ID: LIB3116-028-G9_FLI.pep
QTCGSAESIVADEVQKASYRDRGVLASLIRLHFHDCFVNGCDGSVLLEASDRQAEKNAKPNLSLRGFDVIERIKQRLEAACALTVSCADIVAFAARDSVKLSGGLWYAVPGGRQDGMVSRASMTGDLPPPNQRNVDLLAQYFYRKGLTLDEMVLLSAAHTVGIAHCSSFDYRLTSDQDKGMDPAFRNSLRSQCQYNPSNYVPLDAGSQYAFDTGYFSNVLANRTVLDSDAALASPRTADKVKQWKNNPDWFKNSF

SEQ ID NO: 53025 - protein, 356 aa, Zea mays
  Clone ID: LIB3079-021-H12_FLI.pep
EGLEKKAKASGACQLVVKDLKEEFVSEYIYPCLRAGAVYERKYLLGTSMARPVIAKAMVDVAKEVGADAVAHGCTGKGNDQVRFELTFYALNPELKVVAPWREWDITGREDAIEYAKKHNVPVPVSKKSIYSRDRNLWHLSHEGDILEDPANEPKEDMYMMSIAPENAPSKPEYLEIGIIAGVPVSINGRDLSPASLLAELNEIGGKHGIGRIDMVENRLVGMKSRGVYETPGGTIMAAAVRELESLTLDRETMQWKDIIALKYAELVYAGRWFDPLRQSFDAFMEKVTATTTGSVTLKLYKGSVNVASRKSPYSLYREDISSFENGEIYNQADAEGFIRLYGLPTRVRAMLEKGI

SEQ ID NO: 53026 - protein, 130 aa, Zea mays
  Clone ID: LIB3079-043-F6_FLI.pep
IDLVLATIILHSNASAFWNHLAAATPQSTTRRSEASNGRSRIEGPRRCRRSGGRLLLGGRRGRGARAQPRLRRRRGVVALRRGSRRLRRRLPLRRRPPLSRWGLVPAGYLAVLPPPPPPPPRSIYWSAIQ

SEQ ID NO: 53027 - protein, 157 aa, Zea mays
  Clone ID: LIB3116-006-C3_FLI.pep
VGDLLPNQLADKIDDLDPGVDLAHVEEPAGGAHGDGVVRQRERAASARCVARDGRDRWHGEREQVGDEAAERGAHRGEAVLRRRGRPRARPREVVAVAEELALAGQDERTGGGAAGGCDRGAEGGEQGRAEAVLPRAGEGDDVHPPALLHGAQAFLH

SEQ ID NO: 53028 - protein, 147 aa, Zea mays
  Clone ID: LIB3115-009-F10_FLI.pep
ELQGPHLQRHQHQPGLRELAQGQLPPAHRLRRRQPGAARHHHAVQLRQRLLQQPAEPEGAPALGPGALQRRQHRQHRQELRVQLGRLQQRLRRGHGEDGQPQPAHRISGPDQAYLLHSELRLIIITIRKKEWYIHMRIIRLSHHVTS

SEQ ID NO: 53029 - protein, 209 aa, Zea mays
  Clone ID: LIB3079-027-E5_FLI.pep
FYDHVATPTAGVPSPDGIRGPPPFFFKFDRLGVRVPTIMVSPWIKKGTVVGRALGPTDTSEFEHSSIPATIKKIFNLSSDFLTKRDAWAGTFDHIFTELDQPRTDCPETLPEVPFERPTPPKEHGWLSDFQRELVELASFLNGDYMLTSLAQENRKKKMTVKQADAYVRRAITSFLQASKQAVRLAANESAIVTMRSSLTSKSTRSSSP

SEQ ID NO: 53030 - protein, 89 aa, Zea mays
  Clone ID: LIB3079-038-C7_FLI.pep
RNFNQLILSKQIRPSWPHAQTPPHLETVKLFHLNRVARRALRRSLTCAGSRGRAPPSPAPCRSAGSCSRRRGPRPWTRAAPPRQGSRWP

SEQ ID NO: 53031 - protein, 153 aa, Zea mays
  Clone ID: LIB3088-047-E3_FLI.pep
MELAPYIFTPLQIAHSSWGIQSVNGSLHSETSGAFVQEHTDQSALAVGDEAKIDGVELILQAPQRLQQEVPRRPARREAQRVVTPQRRRAREARRSPERRAALVGSADDLRGGVRVHRCGGRRHEPPRPGGKLQGHGARRAVQPRHGVEERVA

SEQ ID NO: 53032 - protein, 172 aa, Zea mays
  Clone ID: LIB3115-020-A3_FLI.pep
ISIDACICYGKSRNMEQRQTYVQQHAAAQHTTRIQFGITTQTAHTLVIHAWSHGLVATRSTATPAGRWASESVAVRGAEAAAAEAAAPAAGEPLGPADVGAVGPAEAGAPEPVALRLARPRLRHRHRPDLCGQQQQHDEEDGREELARELHFFLGSQRRRATLCDRVGIQAE

SEQ ID NO: 53033 - protein, 165 aa, Zea mays
  Clone ID: LIB3116-022-A4_FLI.pep
NQLSHDSRHKPYKYFERQHHPWAMAETLDNPDTAAASTTDGLITTAKTEHQVEGALLLDIVVCKGATILQLLAGEDQTLLVWGNPLLVLDLSLHVVDGVRALNLQGYGLASQGLHKDLHTAPQAEHQMEGALLLDVVVSQGATILQLLAGEDQPLLVRGDTLLVL

SEQ ID NO: 53034 - protein, 384 aa, Zea mays
  Clone ID: LIB148-045-F10_FLI.pep
EGSTHQPRAIHTHSDAPARDTSHHAPVVPPPRRGRPLGARRGAAGAAGGRQRSEAGLLQPVVPARGEDHRGGDADEADGEPDDGRGHAARLLPRLLRHRVRRVGADRVHPVPEVGARRGDQPLAPRGRLRRRGARQAGPGAGVPRGGVLRRHPRAGVGGAGHHDRRPPVPDPAGAQGLAVVVAHSARRRAATRQLHRGPPHPDVRRQGVHGAGAGGAVRRPHAGLLPLQGVRRPPLQLPQPGREAGAVRPQHEPVLRQGAAGRVQGLPQGPHHRRVQRHHDSRQVRQHVLRQPGARPRTAQHRRGAVDGPPHQAPGAALRVQPHCLLHRLRPRHGEAQLVRRQDRRRRRGQAALRRVQQRPRRWRRHAYAHAQDVTLCALQVQR

SEQ ID NO: 53035 - protein, 199 aa, Zea mays
  Clone ID: LIB189-024-A12_FLI.pep
AHPVHLQGHQGAAGPELLLLAVQLQRLVARPARGPRGGQLAGPAAEAVGVRRRCQGAGGGGGGAGDGAGAPPPPLPRRAGGGGGRLARVAPPPPGRAAQGPQRQDLLLHRRRVMCGCTGRVACIVPQGLDGGGFVWTRRARARRACAQGVVCSCFFFFASIRGGQRRSSNSAVDVNPANVIQQKVYIFMWICEHANYIC

SEQ ID NO: 53036 - protein, 210 aa, Zea mays
  Clone ID: LIB3059-021-B9_FLI.pep
LTHLSHDTCTSSITTEISSRLTVHRRPTAAAARPEGGGLIDYRSGRRMGLKPKGIAPHAGGRANQAQQAYFLRLPRTPGLGLEVVASAAAAAAAAAAAAAGAEECRLRSFSGSKGSLGWRASWWICMDLMSGAGVRQSGHASFACPPLSCPSRSACPALPPPRFVVAASIFAAISFAVCFFGFAFPVMADPSSCSSSRALAAGRRLPNPT

SEQ ID NO: 53037 - protein, 211 aa, Zea mays
  Clone ID: LIB3060-035-F12_FLI.pep
TATGRSSTSPRDLRPHTFTVSRCLNVMSLLASPTPFGVTAIRRRVAPLPLLPAGGRAALHVALARRGGVSSRTQRRLEERGGKKRRGGVVAPDVDEDAAEAGVAEWEGEPLGFEVSTEPMPRLPDPETPDFWEGPQWEALGFFVQYMWAFGVVFGLIACGVAVATYNDGATDFKDTPAYKESQSQEFPEESESSSADVFEGNPTEVAPALE

SEQ ID NO: 53038 - protein, 238 aa, Zea mays
  Clone ID: LIB3060-006-F11_FLI.pep
QPQPKKSAWETFMFNLRWKNILVLISVWSLFLVLQVLKNNSKSCSSFYWVINVLQVPVAVSVFLWEAMQLCRESHARRMNGNLECVCEASIEWSPAQLIFCAFCGLLGGTVGGLLGSGGGFILGPLLLELGCIPQVASATATFVMMFSSSLSVVEFYFLHRFPLPFAGYLIFISILAGFWGQCLVRKIVHVLKRASLIVFILSSVIFVSALTMGVVGTQKSISMINNHEYMGFLNFCE

SEQ ID NO: 53039 - protein, 390 aa, Zea mays
  Clone ID: LIB3060-009-A6_FLI.pep
RREPKPSNPIQTRQARNPPMAHRVLLLLSLASAAAVAAAVDAEDPLIRQVVPGGDDNDLELNAESHFLSFVQRFGKSYKDADEHAYRLSVFKANLRRARRHQLLDPSAEHGVTKFSDLTPAEFRRTYLGLRKSRRALLRELGESAHEAPVLPTDGLPDDFDWRDHGAVGPVKNQGSCGSCWSFSASGALEGAHYLATGKLEVLSEQQFVDCDHECDSSEPDSCDSGCNGGLMTTAFSYLQKAGGLESEKDYPYTGSDGKCKFDKSKIVASVQNFSVVSVDEAQISANLIKHGPLAIGINAAYMQTYIGGVSCPYICGRHLDHGVLLVGYGASGFAPIRLKDKPYWIIKNSWGENWGENGYYKICRGSNVRNKCGVDSMVSTVSAVHASKE

SEQ ID NO: 53040 - protein, 299 aa, Glycine max
  Clone ID: 700842983_FLI.pep
PNVPALHLPGSNLQSSRLRSSLSARDIPPEDLNMMSDLDGQQQHHLNDLSCYIQPRPGASSVSRSGRSKTLTPSNLEELFSAEISLSPRYSDPAAGSVFSPTHKSAVLNQFQQLQSMLSPINTNLLSPKNVEHPLFQASFGVSPSGRMSPRSVEPISPMSARLSAFAQREKQQQQLRSVSSRDLGANSPASLVGSPANPWSKWGSPIGKADWSVNGDSLGRQMRRSSSFERKNNGEEPDLSWVQSLVKESPPEMIKEKFASPMPTASADGPNSNSQIESIDHSVLGAWLEQMQLDQLVV

SEQ ID NO: 53041 - protein, 223 aa, Zea mays
  Clone ID: LIB3136-027-H8_FLI.pep
HFSVEISRKLTWNIRVRIALGTARALEYLHEVCMPSLVHRNLKSSNILLDEEHNPHLSDCGLAALTPNTERQVSTEVFGSFGYSAPEFAMSGIYTVKSDVYSFGVVMLELLTGRKPLDSSRERSEQSLVRWATPQLHDIDALARMVDPALNGMYPAKSLSRFADVIALCVQPEPEFRPPMSEVVQQLVRLMQRASIVRRQSGEELGFSYRVPEREGDLRDISF

SEQ ID NO: 53042 - protein, 166 aa, Zea mays
  Clone ID: LIB3136-033-A1_FLI.pep
QLGRAMEESEAYNEEPYKFYSSVEPIGPVVLLRRAWVVSGGGARHVESRAKPELRRAGDVAHLAHEWRVVADEELLLLLLLLLHHGWCLLLLLLHHAIDVVEDSVALSEEALVHLDPLGHRVRPLHDGDAVTTAHGLARHEVGVVHVHQLGDGPLPVHRQAEVQIV

SEQ ID NO: 53043 - protein, 76 aa, Zea mays
  Clone ID: LIB3136-045-G6_FLI.pep
GRCTVLQTKLLLPRTARCKTISFVAIFHEVIKELVGTKADGIPYFFFSRLKRLLANKTPSMIVDHVFTVSLSTWLS

SEQ ID NO: 53044 - protein, 411 aa, Zea mays
  Clone ID: LIB3137-005-G1_FLI.pep
ILGSQMATPPTALLLLLAAAAAFHGATAKTTIEPCSGADACPALLGYKLYADMKVSEVAALFGADPAAVLAANALDFASPGAANRILPAGTPLRVPTRCACADGVRKSVAIRYAARPSDTLGSISEVVFAGLPSADQIRTANGLAAEDPDAPLNPGQELVIPLPCVCFNSTDNNLPAVYLSYVVQVGDTVESIAASHTTTVTDISNVNAMGSPIVAPGDILAIPLSACASAFPNSASDYGLLVANGTYALTAGNCVECSCGPANLNLYCMPSSLSASCSSMQCSNSSLILGNVTAQPTTGGCSVSSCNYGGYVNGTIATSLSSGLQPMCPGPHQFPPLTAVPTAANHGSYSPSPAPGPGDAGGATPGGSSLSPSNEPAGNSSQAAAINQPCRFLLIFILSVTLSLRVWIPV

SEQ ID NO: 53045 - protein, 132 aa, Zea mays
  Clone ID: LIB3137-018-G11_FLI.pep
LGYRSPTPGAESLADFFAGEECPPDPPLMDNVESAPDSPAQAPPSSASSLPKEQSQVELELRLLQALEFYPPSKLKGIHRHFVLYGLMEYLRKSLDRQFSSDEVLQLLDRFFNLEMLLGHNSQVLLMMMIDK

SEQ ID NO: 53046 - protein, 259 aa, Zea mays
  Clone ID: LIB3137-018-G5_FLI.pep
LYLSVRYSAIQLARRFGRMEWRSLGILEDSIEGVEIDGSEGGEACGVDAEVAELLLGALPPLRPVGGHDEDVVLQQRPRPGAAVRLLRHHRLAGHELAAVRQSGVAVPQDGRALVVGPRRQNPLHENGITGGDGLEHISANMPHSGDGRRCGDDVGEVEVDALGDCGDPAHDHLEAGAGASPDVYERGDAAKPAGGAVAVEEGTHEGLGYPRHGAEHDPVGVLVLAVVGVGGDPGVGARERLGPRGVKHGLVQAGPRRP

SEQ ID NO: 53047 - protein, 110 aa, Zea mays
  Clone ID: LIB3137-057-A4_FLI.pep
PNQLLLTFHWDFACSSVQVESRAGRSRCSAAKPTPPCRHTLCGRQDRRTILRGCARRYIPVVDQVRQFFIHSGRRATGNCTRSWAAAVWRSMSAELAWRTTGGHGWYRAS

SEQ ID NO: 53048 - protein, 300 aa, Zea mays
  Clone ID: LIB3136-014-B3_FLI.pep
IMAEHLASIFGTEKDRVNCPFYFKIGACRHGDRCSRLHNRPTISPTLVLANMYQRPDMITPGVDAQGQPIDPEKMQEHFEDFYEDIYEELGKFGEIENLNVCDNLADHMIGNVYVQFREEEQAAAAYNALQGRFYSGRPIIVEYSPVTDFREATCRQFEENSCNRGGYCNFMHVKQIGRDLRRKLYGRSASRRYHGRSRSRSPPPQRRGHRDRDDYRGGGGGGRGRGSRYDRYDDGAGRGGRHDRYDDGAGRGGRHDRFDDGGRRRHGSPSRRARSPVRESSEERRAKIEQWNREREGKQ

SEQ ID NO: 53049 - protein, 151 aa, Zea mays
  Clone ID: LIB3136-037-C2_FLI.pep
RRRPTAQIFVVIFSGNEHPKMVVLQPDRFLSELTSMYERSTEKGSVWVTMKRSTLKGKAQLRKMENKGQEVEHRCLVRASNGKKNISTSVSLKEYTKFQASYATVLKAHMHALKKRERKDKKKTADAEKAIETAPKKQKKASSKKSSGSKS

SEQ ID NO: 53050 - protein, 106 aa, Zea mays
  Clone ID: LIB3136-037-D8_FLI.pep
SYPWSSIDVISSCRGRTCSCYRSRRRGRPRRTPPRPRRTRARPSSPGPRRGRRWPARRCSSPPGQGTSCRTCSLSRSRSLIRSCKTSSTLWCKRSSISSRINETSR

SEQ ID NO: 53051 - protein, 256 aa, Zea mays
  Clone ID: LIB3136-040-D5_FLI.pep
LYPSSPSGRRNPTRARCQALAADAYSDSDAAVVMYADRTSGRKRSVMDRLGSGGGSRSRSDDAKRFCQDDGTWRRELYKDSRGTQTSSEPTSRNLESNKKSQVQQKVVKKLPVSDLRGKLSGVASQRPQLSSTVQVPKPVKEVIKSNKPVQKRDPAPTTAPPDIKKPSAPVPAPSALPKQSQNKIDASLDSLLKSLDLEKYLINFQAEEVDMKALVYMNEEDMKSLGIPMGPRKKILSALAHRKNKSSKSLPTSTS

SEQ ID NO: 53052 - protein, 318 aa, Zea mays
  Clone ID: LIB3136-056-D11_FLI.pep
GKPGGTTVGVGKGGVGVNVNPGKPAGGAGTTVGVGKGGVGVGVNPGHGKPGGTTVGVGKGGVGVHVNPGKKPVHVNVSPFIYTYAASETQLHDDPSVALFFQETDLRPGKKMTVQFASTGTTGTKFLPRSEAEAIPFSSQKVPEILARLSVDPDSVEAAEMAQTLRDCEAPAAKGEKKACATSLESMVDFATASLGTRHVRAVSTVVAKEGSPKQEYTVTGVERAAGGTDDDGRVVACHAEPYAYAVFACHLTPQTRAYSVSMLGRDGTAVDAVAVCHADTSGWNPKHVAFQVLNVKPGTVPVCHFLPQDHVVWTRSG

SEQ ID NO: 53053 - protein, 211 aa, Zea mays
  Clone ID: LIB3150-069-A10_FLI.pep
YIFLPTFSFASLYIHLSSAANNFQEDKTVLLLQPAREFLPVIDKAYKALVEKTKDTTGARVENNKFCLSVHFRCVDEKSWSSLAEKVKAVLRDFPELELTEGRKVVEVRPSIMWDKGKAVEFLLRSLGFDDDRTNVLPVYIGDDRTDEDAFKVLRERGQGIGILVSKCPKETDATYSLQDPTEVMEFLVRLGQWNPLRSPSPAARPRGRKQ

SEQ ID NO: 53054 - protein, 256 aa, Zea mays
  Clone ID: LIB3136-025-E5_FLI.pep
TTTKEGENAPLPLQAPGPSPRLLIRRCSPSLGSENRREARAAMASSASRFIKCVTVGDGAVGKTCMLICYTSNKFPTDYIPTVFDNFSANVVVDGTTVNLGLWDTAGQEDYNRLRPLSYRGADVFVLAFSLVSRASYENIMKKWIPELQHYAPGVPVVLAGTKLDLREDKHYLMDHPGLVPVTTAQGEELRRQIGAMYYIECSSKTQQNVKAVFDAAIKVVIQPPTKIREKKKKKSRKGCSMMNIFGGRKMICFKS

SEQ ID NO: 53055 - protein, 66 aa, Zea mays
  Clone ID: LIB3156-001-A9_FLI.pep
KHQSPQVPLPGKCTLLSETAAEFRYDAMPSINPNPNPSPTLPPTNKPKLNYSLHAIRQVHARAHGL

SEQ ID NO: 53056 - protein, 76 aa, Zea mays
  Clone ID: LIB3156-001-H9_FLI.pep
QGDPPPQGVPQLRVRRGRLHGQPLRPPLLRQVRPHLCLQPEGVIACPDLLYPPTLSSIQLLVTRTVSHVDLSEVET

SEQ ID NO: 53057 - protein, 120 aa, Zea mays
  Clone ID: LIB3156-007-H3_FLI.pep
EFMAPPTSDYYDGVRRRAGDVLTEAQIKECQELGVLVDRDDQGVLLQIFTKPVGDRPTLFLEIIQRIGCMEKDEKGQEYQKGGCGGFGKGNFSQLFKSIEDYEKSLEAKQAAAAAAAQGS

SEQ ID NO: 53058 - protein, 219 aa, Zea mays
  Clone ID: LIB3158-012-H11_FLI.pep
RLSENSLEGPIPPELGQLSELQVILDLCRNRLSGKIPASLGGLVKLERLNLSSNRLDGQIPSSLLQLTSLHRLNLSDNHLSGAVPAGLSGFPAASFVGNELCAAPLQPCGPRSPATARRLSGTEVVMIVAGIALVSAVVCVALLYTMLRVWSNWRAVSVSNSDGEESAHGGGGGKWVDGKYRKVGSSVSWSSEQKHNSGSETTSVLHGKSTEAAGAGKS

SEQ ID NO: 53059 - protein, 84 aa, Zea mays
  Clone ID: LIB3180-037-D2_FLI.pep
HTVHIRDDTSSATMLLFHSHMHMVLRNGKSIDRPQHLWVCDYLLAIDLRCHLIFFQIHLRVCPVDVACAKSWNGTAMLEPEATD

SEQ ID NO: 53060 - protein, 106 aa, Zea mays
  Clone ID: LIB3150-094-B3_FLI.pep
AQNYASLYFTEISELLRRLPRVILLMLKTNDCLRAVSHALVGGSSLESFMIIGRVSSEAVLDAKRMNRRSFLDGLKIWLEEALLEARFFTLKLMLCVMQLRKLLPG

SEQ ID NO: 53061 - protein, 85 aa, Zea mays
  Clone ID: LIB3156-017-G1_FLI.pep
EYLGIMFHHMEESRSEEAETRNFQRFVGRIMLNCSHRYVKLIQKSSSTAVPQLKSWQYQGMDSPGIGSCSRMHRKVCSRVSFPFS

SEQ ID NO: 53062 - protein, 93 aa, Zea mays
  Clone ID: LIB3158-015-A4_FLI.pep
GLQTLTNNLCYTYARCTRSVSIVPPAYYAHLAAFRARFYMEPDTSDSGSVASGATTSRGPPPGARNTRAGAANVAVRPLPALKENVKRVMFYC

SEQ ID NO: 53063 - protein, 147 aa, Zea mays
  Clone ID: LIB3180-011-F7_FLI.pep
GISNTGAGRSVPTTNSAYTTNLSGPRYGESANQLAQQESTYTGVTTPVSAARNVQQTCVSCGSSGHNVQNCPAGTYRQQAAASAASSYGSSQPRNGLCFKCNQPGHFANSCPLLASAPQQQQQQYRSGGAPSGGYGRQQPYVGATNY

SEQ ID NO: 53064 - protein, 272 aa, Zea mays
  Clone ID: LIB3158-004-D4_FLI.pep
RLQAMEASTARHWLKTSKRAGRRPSLNCARLATQLGRVTPCRAQIEWYKALFDAEMGYYDAFKQRRSPRKYTKVNLNRIKLGQFWDRVLSMLDAGQLPHDFHRRAKWVNASRFYQLLVEPLDIADYHRHGHHLTSGSYMTHGRERRYELFDRWWQEKGCTGAGGGITSSMSAASASSRRRSKYAGLTQDPCFWARVEEAREQTESARRERDAAELAMKLEELQEFERYARELVATKEVSVDVLAPQSSYTLWVEDWNQLKLRDDVRTMLLRF

SEQ ID NO: 53065 - protein, 80 aa, Zea mays
  Clone ID: LIB3158-010-A9_FLI.pep
DLQSWPYLQINFYRSDVPQMKIHRFIYTIYLQCAMPLMDGHLICSHHKGEDTSWNLMQGPLYFLPISDYYKLPSNKYGVV

SEQ ID NO: 53066 - protein, 69 aa, Zea mays
  Clone ID: LIB3151-050-H6_FLI.pep
QRRMVFFGTSVPTIFKGLRTEEIQQCFWRGFVCVRGFDMETRAPRPLCPHLHIIARPKARKTAATEQVL

SEQ ID NO: 53067 - protein, 224 aa, Zea mays
  Clone ID: LIB3180-034-F1_FLI.pep
RTGSPFRVVEVVVSPPYVFLPVVKSQLRQEFHVAAQNCWVKKGGAFTGEVSAEMLVNLGVPWVILGHSERRALLGESNEFVGDKVAYALSQGLKVIACVGETLEQREAGSTMEVVAAQTKAIAEKIKDWSNVVVAYEPVWAIGTGKVATPAQAQEVHASLRDWLKTNVSPEVAESTRIIYGGSVTAANCKELAAQPDVDGFLVGGASLKPEFIDIINAATVKSA

SEQ ID NO: 53068 - protein, 76 aa, Zea mays
  Clone ID: LIB3150-092-C7_FLI.pep
ILAEKGVVVLPDTYANSGGVVVSYFEWVQNIQGFMWAEEKVNDELEKYMSSAFQHMKAMCKSLVLPKCAMTLELRV

SEQ ID NO: 53069 - protein, 215 aa, Zea mays
  Clone ID: LIB3150-118-D8_FLI.pep
SRFGRSGQPENRESFSILVLNVSFRTTADDLFPLFDRYGKVLDIYIPRDHRTGDPRGFAFVRYNYEDEARDAIDGLDGMRFDGRALMVQFAKYGPNAEKIHRGRITEENPKPRGRCRSRSPRQRYREDYRDRDYRRRSQSRSRERYEQAGYRDGDHRRHRTHSISPDYDRKRNRHSGSPVLKRPSHSRSRSPRRAPHEGIPSKPRDGRAACSGSP

SEQ ID NO: 53070 - protein, 134 aa, Zea mays
  Clone ID: LIB3159-016-F1_FLI.pep
TIQLAHPQANPMDPITRPAAPSFHRPAVATAKHLHQAAATLARRNGVSRRCLLTLLMSTAAIPGGSESRKALLQEYLKKSKENKEKNDKERLDDYNKRNYRDYFGLIEGQVREKTEEERTESEKRILEWLDKNR

SEQ ID NO: 53071 - protein, 156 aa, Zea mays
  Clone ID: LIB3156-014-A4_FLI.pep
STSAIDVEELDQQQYYDPQRLRRVGRCGGYDYAAGLEWWRNAAEQSKVVMRAKNPSATASDIPATARSSASCAPWNNTPSAIVLGSAPLSPLPATLACGGVQRGPLAQACASFIATREEGEWGRGGMEEKRRVTRGAARGGSGGGDTTTWPWTCTS

SEQ ID NO: 53072 - protein, 103 aa, Zea mays
  Clone ID: LIB3151-040-G1_FLI.pep
LSTVHEYCCARHVPGLVADKVQHRRRQVLLRIQPSPQGHHLRRCLLRLLLAHGHGELVLQMQAAAGGVNPYLVFPKLHRTQLKHKKNLLAIKRRNANERYRDS

SEQ ID NO: 53073 - protein, 220 aa, Zea mays
  Clone ID: LIB3152-027-B7_FLI.pep
IVPDERSEKCIHLLAVLIIQTYELATSSFLMHYALRSYLEGIVPPPRIQGHSATPLMVARLHSASVTRVAANPLCTSRGQPGRSSRRPSSCASGPGGIAPSMRMLSAVHRQYAGMSASSRQHLLFSSGHGRRGPMPQVRLVTYQRQLGSGLCGMAHPGTQEVPALALAAASTESRTAAARMRGRWLLLDDDAINSPVDGLSMDFLVQFALVSMSCLMESS

SEQ ID NO: 53074 - protein, 71 aa, Zea mays
  Clone ID: LIB3180-022-F6_FLI.pep
QKQPKYNYHLTFSSFNLPWISLRSCSSVAYNLFRDFLSFDSQRSANSFIEKTFPGGLRYNVLFNVLGSSMV

SEQ ID NO: 53075 - protein, 193 aa, Zea mays
  Clone ID: LIB143-019-H10_FLI.pep
DRAADCLFARSKERKSRYITELERKVQTLQTEATTLSAQLTLFQRDTTGLSAENAELKIRLQAMEQQAQLRDALNDALKQEVERLKIATGEMPKSNEQFNMGMQHVSYSGPSFFHLPEQHVDIQLPHHFQQPPRNVQMLSHPNSLSDMAQQDSLGRLRGLDIGKGSMAMKPEAEVVVKSEGSSVSAGESNTTF

SEQ ID NO: 53076 - protein, 206 aa, Zea mays
  Clone ID: LIB148-021-F2_FLI.pep
NQRTYLLCCLHITMRRTARPTAEIETMVPMQYLMTSYFAASNWAFSEWISLSSFVVSSVVSSFCLASSSRMRPLSRFRSNRCPAVTLSISYFSSLLILSISPRSFSVSRCSKEKWFSCELCTWDLNLEILDSCSISLFCISALETKDSEMLSRLSLRTSVMAEVIASACLVGTPCDSSFLTRARVSTRKARRPLVLTSCEMERGQG

SEQ ID NO: 53077 - protein, 305 aa, Zea mays
  Clone ID: LIB148-041-F4_FLI.pep
LSSVPLRCFCSPAQNRLIDHAPFQAPVSMGLLSNRIGRESLKAGDHIYSWRAAWVYAHHGIYVGDDKVIHFTRGRGQEVGTGTVVDIILVSSTPKRSNTPCPVCTDETSDSSTETNGVVSSCLSCFLAGGALYRFEYAVNPALFLAKARGGTCTLAPSDPDDTVARRARYLLSNGFRCYNLFKSNCEDFAIYCKTGLLVAEQGVVGQSGQAISIIGGPLAAVVSTPFRLVTTNIYGMAVMAVGVYCASRYAADIGNRRDVVKMEVEDLTAGLASGRICAVENIAQLVAPEAEGPADATATATLAA

SEQ ID NO: 53078 - protein, 208 aa, Zea mays
  Clone ID: LIB189-008-G2_FLI.pep
TREGKREMVEASPESGAAATGGASSTAAVRKGKSCKGCLYYSSVLKSRGYNPICVGIPRSIPQVPNYVVDEPKEEATAQGHDLRRFRYGCAGYSMFVDNRDGQGGESEGKTLLPYCRGLELLVDSRLVERKPSATEQAPAHVAKDAATIRSHQQGQQRPQNLSRQEFLDRFKRSAGLVASGVAKNLNKTANYIKENIQDMYTDRRPPK

SEQ ID NO: 53079 - protein, 161 aa, Zea mays
  Clone ID: LIB189-016-H8_FLI.pep
SGQPRRRSRCYLPSVYVAKQALLPTAEEVVGELPPVGHHLPKSVGVELPHKAGEVIVLEILGEEVARKLRRPPHHERRAVLVPRDHVVHRRVVHQLVRLGQERRRQGPLPGRVRSKRWGWRRGSRRRRRRGVAASGLPGCAALLGHPASAAARLDLSRRLP

SEQ ID NO: 53080 - protein, 178 aa, Zea mays
  Clone ID: LIB148-044-C8_FLI.pep
AVPEGSYAGSTPMGSDCYGGAPWAEDEEVRRLSVRMQALEADRESMRQAIMSMGAEKAQVMLLKEIAQKLCKDTTPPVPAAAVAQHSFYKGGNTQPAMTITVRPPRHPALLMQRKLVKKKPSLLAAVVKWVTSIMWWRRKSSRVKFPIGQCGNNVGLLLLLDKAPRAGHGHQRPPKRI

SEQ ID NO: 53081 - protein, 89 aa, Zea mays
  Clone ID: LIB148-065-F1_FLI.pep
ALDFYFAVNRQVSEPRMSFPTSTSSGPSLSATKSSPNLCGTPSPGSPGAHSSNALESWKICNPGDNPLLVKTRLRHWAQVVACSVKHSS

SEQ ID NO: 53082 - protein, 88 aa, Zea mays
  Clone ID: LIB189-007-H2_FLI.pep
IDIALVPSIQILEAAKSTAAGAHRPDESDPQHHCTWMLTTLAPADSLGMVRYSTPSFTSAAILSTSTFSGSSTRVLYRPKLAGGHASP

SEQ ID NO: 53083 - protein, 149 aa, Zea mays
  Clone ID: LIB3116-006-B2_FLI.pep
CGEAQDDGDVAQHVAHGAPGSLTQQCLGMAARISASPNGGGAPGSNSPPAAAPSSCPGAALGLSSSTAAEARRVGAETRSAQSRWMDADAGRRRGAAESAGGDGAAMAPRPARRRRSGARPQHSESTSRAIAAVSGAGGWMDAWIDGNW

SEQ ID NO: 53084 - protein, 184 aa, Zea mays
  Clone ID: LIB3062-035-G7_FLI.pep
MDPTGVDGDSAAARGSGGGGGTGAGRWAVGAVCGGLVYYHCAVRRASAVSLAADVLLVLLCSLSILGLLFRHLHISVPVDPLEWQISQEMANSIVASLANTVGAAESVLRVAATGHDKKLFFKVVSTLYFLAALGRVVSGAAVAYAALCIFCLYMFAQSTDLFDQLPSWVPVGRDSLGGTQDTA

SEQ ID NO: 53085 - protein, 285 aa, Zea mays
  Clone ID: LIB3062-032-E11_FLI.pep
CQASYVRPLLVLSFFLSTCLQSCEGTTYSQSYRTLGDYLAGVDHRGLRRQQRQGAGDGEMRSGGCSPARQAEAKGPRGRPALGLGLAVLVLAHEAADPVERDLHGVVVHVGVADAEPAGLVAVERRAGRHVELHPVYDDPPQLELRVVRLLPEHAPQVHPREEARVARQARDADLAEARDEAVVARRQPPRALREEAGHELRVGEHPRQEVLRLRRDEAEAGHLARAGHHVVVVGVDDADAEAREAEVLGEAVRDVDEVRVAARGVALDDLGDAHEARPGEDGAR

SEQ ID NO: 53086 - protein, 107 aa, Zea mays
  Clone ID: LIB3066-002-F4_FLI.pep
RLACYHIPKHKRIQKLIRAIRTSSTGIYSRRPRLQHESWVQRLMILSLRLGCLQQLDTLVDLDRQHLRRAKQRDHFRVVELQEHPSDFAREFGLMPLNKRIEPVPKQ

SEQ ID NO: 53087 - protein, 118 aa, Zea mays
  Clone ID: LIB3066-013-C9_FLI.pep
LGPGGRSNEAAAATGRPGMTMTRTMCLGLLLLLLAAASTATAHFTVGDVDEYVSKRTQESRHRNNGGAGIDDLISSAARFHANVDARAYGRRSDLQEEATATVITKAEAQEASAEGGD

SEQ ID NO: 53088 - protein, 164 aa, Zea mays
  Clone ID: LIB3066-020-F12_FLI.pep
LPPPFSLFSLYHPRPPDLLLPLRSPDRSPSFPVPSPPPRRRDAMEPPHAEQVVASVEAGGEGGTASPGTGLEGPVLSAGAGRRWVRGGRGAGGGAGGGRTTTGAAWRGRLWLLPPHGYRTGLARRLRLSLVASWGTVTARCSAKMSSEIQSAVRDVVSARQGRS

SEQ ID NO: 53089 - protein, 123 aa, Zea mays
  Clone ID: LIB3067-013-E5_FLI.pep
LQTTQRNLLGEDLGPLSVKELEQLENQIEISLKQIRSSKNQQMLDQLFDLKRKEQQLQDANKDLRMKIEETSEENVLRLSSQDIGCSGSSGHGDEANQEHLQLALDPSLHIGYQAYMDHLNND

SEQ ID NO: 53090 - protein, 296 aa, Zea mays
  Clone ID: LIB3067-019-F11_FLI.pep
ALFPSSLAVSHPAATMSGLYNQGFSPARTLSPQIRSNPDADSQYLAELLAEHQKLGPFMQVLPICSRLLNQEIMRVSSMVHDHGFSDLDRRRFRSPSPMSSPIVRPNLHGNGFGPWNGMHQERLGFPPPGTSMDWQGAPPSPGSYIVKKIMRLEVPVDSYPNFNFVGRILGPRGNSLKRVESSTGCRVFIRGKGSVKDTEKEDKLKGKPGYEHLNEPLHILIEAELPANIVDTRLRQAQEVMEELLKPVDESQDLYKRQQLRELAMLNSTLREDSPHPGSVSPFSNGGMKRAKPSQ

SEQ ID NO: 53091 - protein, 114 aa, Zea mays
  Clone ID: LIB3088-001-A6_FLI.pep
IGNETFEKLGTLGTSANLLVYLTQVFHMRSVDAATLLNGLNGTTSLAPIIGAFLSDAYLGRYLALAIASVASLIVSAAIHLQSTPLARYLLNLRDTGVGISSGVDGMEFGMLLL

SEQ ID NO: 53092 - protein, 222 aa, Zea mays
  Clone ID: LIB3116-006-G5_FLI.pep
LFFPSRSPSASLSSHRAPLPQLPHLPLPPRTQPPPPSRIVMAAGLAFPVASFQLACVSSHPHPGHRICCAIPSSSSRRIVKSSPLRATTVLSRERRGTGRGASVVCAVQGQDTTIQVPDVTKSTWQSLVIESELPVLVEFSAAWCGPCKMIEPVVGKLSKDYEGKLKCYKLNTDESPDIASQYGVRSIPTTMIFKDGEKKDSVIGAVPESTLVTCIEKFVES

SEQ ID NO: 53093 - protein, 103 aa, Zea mays
  Clone ID: LIB3062-020-A3_FLI.pep
RRSKPWTKTYLSRRERSRYCRTTSTSRSISSAAQVRCRSSAWGEDGCYFVSELVDENSSYCRRQHISLHITSCYDVLNYDGFNGCHFSLRAIVDMEEMVAAPA

SEQ ID NO: 53094 - protein, 218 aa, Zea mays
  Clone ID: LIB3062-052-C4_FLI.pep
TAQTILSLYCLGWGLKHKTLGGLRQQVRVLLERSHGELGLTPEFRRKEAVGLHEAVEGCLDEVAKGLSGATGRGEDILDASELQHLLGHARGDDARTPGRRHHAHGDGPALAGDLAGHGVRLPDLVPPVASPDGNNGELGEDDGAADGGGHLLGALDSQADVAVAVAHDDKGLEAGALSGAGLLLNGRDLHHLVLEPRHEGLDDLVLLDGERVEVDLL

SEQ ID NO: 53095 - protein, 140 aa, Zea mays
  Clone ID: LIB3066-019-H7_FLI.pep
LLESATNLQVLCLHYCLGSLTSFSFQTKAPALRVLRLHWVTSWLTNDDLTILTENCNLAELSLSGCKLLDSSSQDIISSGWPNLALLHLEECGKVTVEGVSSFFNCKALEDVLLRHTSICACHFQDFYRCNFSPLKKLNC

SEQ ID NO: 53096 - protein, 66 aa, Zea mays
  Clone ID: LIB3150-094-D6_FLI.pep
GARFRCPSTATRRTSPPSLPLMPLVDLSSSPPPSTDLLVVSSKHGSGALKFYLNRFCRLGNLNSKG

SEQ ID NO: 53097 - protein, 182 aa, Zea mays
  Clone ID: LIB3136-023-A2_FLI.pep
FPSQLTTRAPQTRSSRSSPDLAPPPIKEKEDELLRPAAPRRRPAAARLPGEGRLPASGVPAGRLPPAGAGLPAAGLPAAGLPAAVRAAASTAAAEQRAFLHGRMLGCPLLLLPPGRLLLTDPSVPGSTRLQVKQQAYGRAGTGPCYSSFVLRYRPLFFSFLFFFSLSLSVIRLLVLCRCRLD

SEQ ID NO: 53098 - protein, 133 aa, Zea mays
  Clone ID: LIB3137-012-B3_FLI.pep
GDSLSSRDLTESTSCAESPRLPQIQPCTDSRTKVSEIDVNREPAVTETGPTRDQPAEEPPHVAAGVNDGFWQQFLTEQPGPDVHQEAQSERRDGDDDKGDQTRIGDRENFWWGKKNVEQMREKLGRLTSVEKT

SEQ ID NO: 53099 - protein, 146 aa, Zea mays
  Clone ID: LIB3150-065-D2_FLI.pep
KRRLNISFKRKITKPTTPQEFPDRRYVRWSVDEPSSVIRSHPNGDKILWHGAWTQQYKEWARGATEGAALSSGSKTAWSRHAIKRLQSCIYACQRHCLAISSSRIWVACRLEKSSGLMLLTSRLRRASSSLRLARWNRPLSACRGP

SEQ ID NO: 53100 - protein, 113 aa, Zea mays
  Clone ID: 700045148_FLI.pep
RVASMAFRLNSRPQMRVKSASMRSRIGHARRTAIASFMVTHHGLAYYCGFVRHYRLGAAKDCFGDLWVCCCVKRSSWLPEDHEGLDLSCNSLLSANYVWTMDMCCAVQLTTNK

SEQ ID NO: 53101 - protein, 153 aa, Zea mays
  Clone ID: 700045759_FLI.pep
VEKYMVPFQESRPLPADLILRKVVMRLLKERAVPLVDDWGGCIGIVHRDDCTKLDAPLISMSRGPPLCVPTSTTVEHVIDLLLRNKSEMVIVVKSGNMYEGSYTSSSRPLGVFSLAILWSFTGDYSSGSDDVPDAGISRAAKPKPDAEACNHS

SEQ ID NO: 53102 - protein, 137 aa, Zea mays
  Clone ID: 700052149_FLI.pep
EQKLSISPTPRKKRSMASEQGVVIACHSKAEFDAHMTKAQEAGKLVVIDFTAAWCGPCRAIAPLFVEHAKKFTQVVFLKVDVDEVKEVTAAYEVEAMPTFHFVKNGKTVATIVGARKDELLAQIEKHAAPAPASASA

SEQ ID NO: 53103 - protein, 193 aa, Zea mays
  Clone ID: 700072230_FLI.pep
CSPHLRSFCGAKQHSNCSKRGSNSASNISWFLPVITYSDTNQHKSSKIPWNGSKEEPNYKQKPPHAKATTWKRTDSNRPSFNNRNITLSDLVALGVVRRGGRVGLLRGWVDGIRRRRRLRVVLHPRRRRRLGEPDRRLRKLPGGSGWGTKGAVLVLRRRRRRVPVRGRGVRRAGLPVGVRHLATHGGSRGGKG

SEQ ID NO: 53104 - protein, 265 aa, Zea mays
  Clone ID: 700084239_FLI.pep
LKLKLKRSACAAMDVKCRRLEGKVAIVTASTMGIGLAIAERLGLEGAAVVISSRKQKNVNEAVEGLRAKGITAVGAVCHVSDAQQRKSLIETAVKSFGHIDILVSNAAANPSVDSILEMKESVLDKLWDINVKASILLIQDAAPHLRKGSSVIIISSIAGYNPEQGLTMYGVTKTALFGLTKALAGEMGPDTRVNCIAPGFVPTRFASFLTENETIRKELNERTKLKRLGTVEDMAAAAAFLASDDASYITAKTIVVAGGVQSRL

SEQ ID NO: 53105 - protein, 105 aa, Zea mays
  Clone ID: 700094662_FLI.pep
SSASHALLHARKLTNFLWSNRNLSDTAIEVFIHLFNFLHKLMLAIYLDFDFVVVQLNLQICEFWKCIFLYLEFHNFQIRKYQLCKACKSTSLEGKLILIILVGFY

SEQ ID NO: 53106 - protein, 163 aa, Zea mays
  Clone ID: 700094675_FLI.pep
SIFHTRDIELTEKLDYSSAVALLGYSLILSLLRAFNVKDEASRVMFAAPILAFVTTHILYLNFYELDYGWNMKVCVVMAAVQLLTWAVWAGVSRHPSRLKLWTVVFGGALVMLLELYDFPPYMGFADAHSLWHASTIPLTYLWWSFIKDDAKFRTSTLSKKAK

SEQ ID NO: 53107 - protein, 133 aa, Zea mays; identical to SEQ ID NO: 52061
  Clone ID: 700090056_FLI.pep

SEQ ID NO: 53108 - protein, 204 aa, Zea mays
  Clone ID: 700051846_FLI.pep
SYPHKGKEETSTRSGLNDRERGDLKYNQAGFNSKTHSLQESINSQEEVKVTKVSPPRRKANRDEKSERQVNYMKKESGPEISRTGVKQQQQLKQLQRPSSTSSSQVLSKQSEKEDMEINTILEEEALIAAHRKEIESTMEIVREEMNLLAEVDQPGSLIDNYVAQLSFLLSRKASGLVSLQARLARFQQRLKEQEILSRQKPLR

SEQ ID NO: 53109 - protein, 231 aa, Zea mays
  Clone ID: 700072937_FLI.pep
PFPPIPLSPIPISECFRLRPRPLPPSEPIPAILLPFVSLFRCFGSESRDPPLSCCSRSRQGYQNTMVQVRRSLSMSRLRSCHDADDRGWNPLHVAARKGDLKEVRRLLDEGGMDVNAPAWGPKCPGATPLHLAAQGGHVKIMDELLERGANIDARTKGACGWTPLHIAAKERNKKAVRFLIENGAFLPPEMNDHRFNPPLHYCSGLEWAYEMKRMQDESDSPGETSLSSDN

SEQ ID NO: 53110 - protein, 249 aa, Zea mays
  Clone ID: LIB3079-026-G3_FLI.pep
AWAWPPLLQTANWVMAPGEEVAVVVAVAVEAVVTEDQAMGPDQGMVRAVAAEVLLEGMDMVVAAAAVVVRVRELVALGMGPGKDLATELAAVLPVDMGVAEVVEVAVARVVVPDMAMEVVKDTALGLALVVVLPAAAVDMVAVVVVAKVGLAMALVQDMDQVKDTDKVVLMEEAMEAVVAVVAAVVKVVVALAMDLDPAPVMEAATTTDIIRLFLRARYMLYKYVTRHESVLLHGMLAVSIVCVTPQGL

SEQ ID NO: 53111 - protein, 284 aa, Zea mays
  Clone ID: LIB3059-056-F11_FLI.pep
HSSMQSHSTATNPSGASLHMKFFTETVKRAMYNGIKPKILMRRAEGSPLVLGLDKDVLVELSRVVPAEVLRHAARLETLPALPVLPVRVEAVPERLDQLVGLGAVKSPPEPGVAERVERRHGVPEPAHGVHHRDGAVRHRVELVQPAGLEAGRHHQHVGARRDAMRHRHREPDPPAHLVGMLPLQVLQHSFQVGAPGAQHHQLHVLPRDPRHRVPDDVHALLSIQTPDEAEQRHVVAHFQAQLPLQGRLALPLSSVECLEGVVGVAVRPQVHVHLGVPLLVVDA

SEQ ID NO: 53112 - protein, 67 aa, Zea mays
  Clone ID: 700150128_FLI.pep
SARDFVDKVRETWTDEHIASKHSALDAVSLQEVRTCIEIGLKCVDIDQNKRPSIVEIVDKLNGRHAH

SEQ ID NO: 53113 - protein, 222 aa, Zea mays
  Clone ID: 700151903_FLI.pep
EAVMLDLLRIVGHHKARLATQIRTVQKSYGNADFDNIPFGEDMYSRVRGRPLLIDTSARISDDKPRPRPVSSREEQKVKTNGSVDIKSSSPENASSSNSEKQEPKKMVPEDTRVKNIKGDNVMPVTPSLDPATSTSKAGKGKTREPEPTERQGDGPVSVANPKKESRPVFEDNIVLGVALEGSRRTLPIEEGNPHLSLSETEVDTEEAASSPKDKIGQSPKL

SEQ ID NO: 53114 - protein, 144 aa, Zea mays
  Clone ID: 700164475_FLI.pep
GSRCTSSSAACPAAAPSGSASRRSASRAWSSPSPPPPAPSPTSSRRSRFTTRSAVNSCCCGCAGAWTGLGLDVCACSIHCGAFNCGQQGRETDADVCMEAPIEQVKGLGALVHMLVAFLARIPGVGPEWHELGVCCDDESTVGV

SEQ ID NO: 53115 - protein, 72 aa, Zea mays
  Clone ID: 700097784_FLI.pep
ISVVRCCCKSERLWKRISCNFVLGSHFCCVLHGGMDYILSEFALLSMSRPATTTICNLCPHSSLSDVTAFSC

SEQ ID NO: 53116 - protein, 60 aa, Zea mays
  Clone ID: 700156764_FLI.pep
HGRGRGVISSSLDLEDAIEVHLDGSTSTCTCVFCYASLSLYGDLECKDKYKVECQFSCVA

SEQ ID NO: 53117 - protein, 49 aa, Zea mays
  Clone ID: 700160135_FLI.pep
SWCYGISSVLSRTKMLHTTRFSVKRHPLALGTEFHPLALGSEFHGQLLT

SEQ ID NO: 53118 - protein, 144 aa, Zea mays
  Clone ID: 700162177_FLI.pep
SSSPTPPPTWTSSRPRCSTTGTTSASPTTSASSRPTRLCSPTPRSRSPSTPSSRAKARGRPSSPSPWSRWAISTCSRAPRGRSGSTAGSSTAAAAALDYSSFTRQPPLTRNSPTLQLTSSYYISIRRGSSDLLLLSDHVLRCYN

SEQ ID NO: 53119 - protein, 66 aa, Zea mays
  Clone ID: 700162283_FLI.pep
GQLEHWVVAACRGCKVVIWVATVVLVGMGVLLQEALEDITWVIRMIITILLWPECQMILHVPAWHL

SEQ ID NO: 53120 - protein, 84 aa, Zea mays
  Clone ID: 700166236_FLI.pep
IKPVISVNLQPEQSVVQQDIVDMYMKSMQQFTESLAKMKLPLDVENSSPSNEDSYSSTVEKTSPSPSSSAAKGSRVFYGSRAFF

SEQ ID NO: 53121 - protein, 127 aa, Zea mays
  Clone ID: 700098357_FLI.pep
GAPHDNNIMLWNAVIFGPDDTPWDGGTFKLTLQFTEDYPNKPPTVRFVSRMFHPNIYADGSICLDILQNQWSPIYDVAAILTSIQSLLCDPNPNSPANSEAARLFSENKREYNRKVREIVEQSWTAD

SEQ ID NO: 53122 - protein, 91 aa, Zea mays
  Clone ID: 700102746_FLI.pep
GILEFVSVSLVQIWAFLILSNLSERFTGPQFFMGFTVCPNSTVLACPVLVIILLENQSRRCKRVLEFCGAKNPICTIWVNCAFVHDYMSPR

SEQ ID NO: 53123 - protein, 313 aa, Zea mays
  Clone ID: 700102822_FLI.pep
IAGPVFCLCFCFEAMANASKHLQPSSQAGNDKKYQGTLVASPAKAISPKCVNRIVPSKQLILGGGSIGHVASFLIKVVALEAVRRVSKTRCPFIWNSVQALQILVYPPFSWIQRWAPLRFLVQGIQKLSMPLLFLSVTTTVSELSSKHDDEPDNNTEHSETPSETNELASTSGTSDAADGTKEIMQENWLVLLFRELEKQGITLPERFTEDELRRFYVAANGDFQSLLSSVKKTIHWRETFHILTLQELDRWSHLVFWHGFDTMLRPCLVVRLGLACSSIPPHDRPRFGQAVGNFSNCCVCNFVYVRDDYYSL

SEQ ID NO: 53124 - protein, 164 aa, Zea mays
  Clone ID: 700157842_FLI.pep
SFSTVSAAPPCVHLPWRLGVPARPPSCSRLWLPLLQLAGHARQLPNTISSSFHASARNPKCWVKTEPAAWCSPSARQKARTSRRASYSSTPSPPSREDTLVLATCHLLDKKEFHEYLVKSRNCVHRSSDVCDRRHQPKTGIMCNTPGVYIPLDNEYEFKHVISG

SEQ ID NO: 53125 - protein, 163 aa, Zea mays
  Clone ID: 700157911_FLI.pep
TQPHVLWSNHTTTAARTWNCKGNPFHPAIPAARSCLAWKTTPVPFRLFSSTLGTAKAGGERGRNCRGRPRGAVAHGRGSRGGGWGSSRGELADEGCQCLGVGAAVAERHEQRQGVAVEAGVEDLGHLESQLQRLLRPPRRCRLRLRLHLRQRRRFQPLSGRWW

SEQ ID NO: 53126 - protein, 85 aa, Zea mays
  Clone ID: 700160362_FLI.pep
GVRRPPRRQHSWQQHSRVQHARQRQQPTRVQLARQRQHAPLRRRLPGLQRLRRHARVAHRRLRPRARQQALNANKRGSRVVLLLL

SEQ ID NO: 53127 - protein, 146 aa, Zea mays
  Clone ID: 700163335_FLI.pep
RARGPVCVGVTRALPQVSERKVGKLELEAIQEGRYLADFRYACIGYSMYLNGKETPTGVRDKPRAHLPVCAGVELLIDRKVPTNVKKEAPKPRQYKPGHAGDDFLTKFQRNAGLVASGVAKNLNRVGTYIKDTVSDMMQPHRKRPK

SEQ ID NO: 53128 - protein, 268 aa, Zea mays
  Clone ID: 700163438_FLI.pep
VNGGIMAFYFVLWGKGLLACGPLVALLAEYAGAVLGVLSAALYGRKVNIWKKIGGLAAMLVAYYLLSIGWSTRTHSPLYSFGSEPIEKARQTFGVKEMVVPITAGILSALRRVLARRVSLKNQLKRRLHAITIASATCFLFPFAMWDTILGSASDSIVKFQLPNWAYLSTVLFGMVLIFYVDNVTEEKLHLVFSSPRHLMVSTGCIIVLEIVYQMDFSLFGFLVCSVILGLGIFETTSLERSKKSPLETHELSNGVFHNQLPITELPS

SEQ ID NO: 53129 - protein, 202 aa, Zea mays
  Clone ID: 700163822_FLI.pep
KYRRHEMRVRLSGGEPEKPLVIHVGRFGREKNLDFLKRVMERLPGARIAFVGDGPYRAELEKMFMGMPAVFTGMLQGEELSQAYASADVFAMPSESETLGQVVLESMASGVPVVAARAGGIPDIIPKDKEGKTSFLFTPGDLDECVRKIEQVLSSKDLRETVGKAAREEMEKCDWRAASKKIRNEHYSTAISYWRKKMDKSN

SEQ ID NO: 53130 - protein, 256 aa, Zea mays
  Clone ID: 700166517_FLI.pep
RTGAISIHPWRRQEHEHELLSLSVQATAHLGADERPRPAVEGGGGEHGAGGAALAVLERRGGDVEPGSRRRPRGGVVAGQRRRALQVHPGGGPGRRPLLPAAGQPLQRVGALAGRALGPRLGAGRLRVGHVARAAGLRRLPRAALRRVGHREVVEVGAVRPRAQQLRRRQRRRRGGPAAGVELPVLPRRAPPHGLAHVHLHDLGVVLARPVHLVGAAVPRVLRRLAWSGRRRVVVVVELEGQHALCPQLGLRRQER

SEQ ID NO: 53131 - protein, 156 aa, Zea mays
  Clone ID: 700158922_FLI.pep
LPDPLMFSFKLVTNGTVVNVDSPKDSGNVLRCKDPISAHEMTHMEVQIRNNTKEIIRMNLSISCKDVAGENCFDENSATVLWAGVLSDIHLEVPPLQEVVHPFSMYFLVPGDYSLQAASVIIDATDVLRARAKAESPDEPILCRGSPFHIRVVGTA

SEQ ID NO: 53132 - protein, 132 aa, Glycine max
  Clone ID: 700680937_FLI.pep
KLLITYQKRPSFKKTMAVNKVTLVASVMACMLITCSYAESTLSCDQITIWLTPCIPYGVLGGNVSSLCCQGVYSLNAAYKSAEDRRGACQCIKDRAACIPGIDYTRVNQVGPRCGSKCPFKVYPSTNCSAVP

SEQ ID NO: 53133 - protein, 201 aa, Zea mays
  Clone ID: LIB4150-001-G8_FLI.pep
LQLYEFEACPFCRRVREAMTELDLSAEVYPCPKGSLRHRDIVKKIGGKEQFPLLVDASTGISMYESGDIVKYLFRNYGQGRSPSPGLLESTIFTGWVPTLLRAGRGMTLWDKAGAVPAEKLELFSYENNPCARIVREALCELELPYVLQNVGEGSSRTDLLLRKSGSKQVPYLIDPNTGFQSGDHKKILPYLFQQYPVSSI

SEQ ID NO: 53134 - protein, 174 aa, Zea mays
  Clone ID: LIB3608-007-D1_FLI.pep
NNTTWPFALLQGCDGSVLIDSTANNKAEKDSIPNSPSLRFFDVVDRAKASLEARCPGVVSCADILAFAARDSVVLTGGLGYKVPSGRRDGRISNATQALNELPPPFFNATQLVDNFASKNLSLEDMVVLSGAHTIGVSHCSSFAGINNTGDRLYNFSGSSDGVNFPSDHLPFPR

SEQ ID NO: 53135 - protein, 408 aa, Zea mays
  Clone ID: LIB3608-049-B1_FLI.pep
ENLSGPPQPPPMDGGDAPAAGGGKVACAAWIRRREDKSAAAPARVFAAYGRAGAAGSPAALEVLGFDAKECSLSPSPLARAVIGDGGAGDAPRGIAVHPAGDELVCATAKGCRLFKLIFDEFTVRIIPRDAPLLESVGPQKCLAFSTDGAKFAIGGEDGHLRIFHWPSIKVLLDEPKAHKSFRDMDISLDSEFLVSTSIDGSARIWKIDEGAPLVNLTRSSDEKIECCRFSRDGMKPFLFCTVAKGPKVVTVVWNISDWERIGYKRLLGKPISTLSVSLDGKYLALGSHDGDFCAVDVKKMEVSHWSKKVHLGSPVTSIEFCPSERVVISTSHQWGAELTKLNVPADWKEWQVWLVLLALFLASAVLFYVFFERSDTFWNFPMGRHQPAKPWNVLKESPPVPEDQTPW

SEQ ID NO: 53136 - protein, 401 aa, Zea mays
  Clone ID: LIB3689-232-B1_FLI.pep
NPKRHQDQAASSVLSPPRAAAAMLLSGPPPVPTPPLLLPESSGEDGGHDSSSRAAAAVGSAPKRRAETWVREETLCLIALRREMDAHFNTSKSNKHLWEAISARMRDQGFDRSPTMCTDKWRNLLKEFKKARSHSRNSGGGSGSGGNGNAKMAYYKEIDDLLKRRGKATGSGTAGCVGSSAGKSPKSNCKIDSYLQFTTDNGFEDANIPFGPVEANGRTILSIDDRLEDDRHQLPLTAADAVATNGVNPWNWRDTSTDGGDNRGNFGGRVILVKWGDYTKRIGIDGTPEAIKEAIKSAFGLRTRRAFWLEDEDEVVRTLDRDMPVGTYTLNLDDGMTIKLCDASRMQTPEDKTFYTEEDFRDFLSRRGWTFLREYGGYRNVDSLDDLRPGVMYQGLRSLGD

SEQ ID NO: 53137 - protein, 325 aa, Zea mays
  Clone ID: LIB3689-244-E11_FLI.pep
GDRTDWVMYEYRMEDEDLVSAGFSKDAYVLCKIFKKSGLGPRIGEQYGAPFNEDEWDNAEVETSLFPLTCSEVNPTEGQRAQPTVLAGALLEPEPPLHNSSSTCAGEESSFGHATAEDLTFSYTVASSAIEDTPARMSGDGVVSVNNISNVANDMRSPRDCDEFLSELSRFMNDSPLHNTPLGECSGLPPMSEAEAHAFEVNSFGLYNELSELVELGGADNNLNTSNVETTDYLMLPPDRELSANDYMELNDLLAPDPSFPSEFSAQDNQYMQHSLAQYNGHYDLSGPSEPTMPSIFDVFPPNNGVLLTDDPANYLDPAMQFPFS

SEQ ID NO: 53138 - protein, 534 aa, Zea mays
  Clone ID: LIB3959-003-F6_FLI.pep
PQPVSSLDRSASSMPPAQAPSSGGAAWRQLLLLLTVLPLTLAALAFVLQWRGGGGVDDPTTRWPSHAFPGMAEPTPPSLPSSDCADVLVGSSAPSFPYIRGWSFPSDSGAAMGSVEEHLQPKVCVQTSTSAGLEQILPWLFYHKVVGVAQFLLFVEGKAAKPNVAGVLESIPGVKVVYRTKDLEERQARSRIWNETWLSGFFYKPCNYELFVKQSLNMEMAIVMARDGGMDWIIHLDTDELLYPGGAAEYSVRRLLAEVPRDVDMVIFPNYESSVEHDNIKDPFSEVSMFKRNYDHLPKDTYFGMYKEATRGNPNYFLTYGNGKSAARIQDHLRPNGAHRWHNYAKSPNEIKLEEAAVLHYTYTKFSDLTSRRDRCGCKPTKEDVKRCFMLDFDRAAFIIASTASEEEMLRWYNERVVWTDKQLNLKLLRKGVLTRIYTPMTIVQSLRESGVFTSAIAAGQPAVNAKLSPKETNAQSQNVTASGNMTRVVRSTDSKASGRKILQAVDLAFSDTNVTAVPPLSPPSLDEHRHHSE

SEQ ID NO: 53139 - protein, 280 aa, Zea mays
  Clone ID: LIB3959-008-A12_FLI.pep
LIPEPLPQVYQTTSHIRMASRVTRLLLHRRLTTAAEASARRAPQAPCARAAVSKDVVKAEASSLKNSRWYITRSNTSGPLTTRYECRKVFPCSVRPSASYSTQASDQKGKQEGKDLSNVEHPFDDITYNIPEKPVTFTEGASYSLVILAGLGIAGLAGYAVFKELIFEPKEYKIFGKALARIQSDSQVTSRIGHPITGYGQETRNRAARQRIPNKIWTDEDGVEHVEVNFLIRGPHGAGKVYSEMFKDTDRTWKFTYLVVDIVSPPHAKTQLMLESYLPA

SEQ ID NO: 53140 - protein, 184 aa, Zea mays
  Clone ID: LIB3732-037-C9_FLI.pep
SRRPTVPMATMASTATAAASLRLAFPLLSAPASSSSYSNTLRFPLRRRSSCRPLAVAAFKKLSEASPVPIPQEPTQPLLVDEDALPPKAGVYGVYDAAGELQFVGISRNVRASVEGHRRKVPANLCASVKVAVSDEEAPDRSALNNAWKSWMEEHIAATARRHQGTLQETTPGLVPPSGPRTCV

SEQ ID NO: 53141 - protein, 345 aa, Zea mays
  Clone ID: LIB3597-021-F10_FLI.pep
RQQHLAYLGGLLRGTSPCRRSLQGLEPVGLHACLLRLSELNLRRLGDVAVLGFLRQRVGFFWSRLLRRLLAGSLTSRDISCVFVDFVKQILFHGIHHVVALHRWICVFLHHGASAMVVRQRSIGAENWVFSTMFTSAWQWHVFVDWRFVQKRRITASGDPIPEFGNTSPDAVAGTQFLEFAHELFEGVVGDQAGVPVRVELDEVSEVVHLVAWAGAGLERLGEVAEHEADAAVGEEQVRRELGARGPLLLLLPLAVLAIHRRRGGPGLGVEAGGGAGEVARVGGRVGGGRRVGGGGGGAVAGPVAGAATLEAARGRRRGHGCLGLGNRGWMDGSCSWSWARGKKG

SEQ ID NO: 53142 - protein, 213 aa, Zea mays
  Clone ID: LIB3597-025-D3_FLI.pep
ARIQTLVCYGGGGGGATADTRAGPVARSSRQRCRGHRASRAEDLSEARIAGAVPARRAKAAELRADLQDVQRRRGGGHRVCHVHLQHIPLRHHHQARREGELQAAGPRRGAAGGRSGAVPAAEGPAALPPRRPHEDGCRGAVPQGRVPGRHHRRGLLRASQGRLPDVLGSVVEPSRTRKPAHVFRQLLPACSWSGLVIQYLVSRIQPTAEQGG

SEQ ID NO: 53143 - protein, 454 aa, Zea mays
  Clone ID: LIB3597-026-A5_FLI.pep
RFFSGDRSHRPSLAMDSLLATYASSDDDADSDEAPSTAPAASSGGRAGGLFSLPQPKSAPALLFSSLPAPKSTPEPLFSSLSAPKSANAPTFSSIPAPKTSGGNPKRVVQYRPQPILQSAGDSSDDDEDDAKKRRASNNEASLPHVSAGLGPVSSFLPPPKHSLGLGSGSGAGARRSAIDTAAPEKPNLSNAVPSSSVTNTGAPERPSTGASDDDDSEDSGSEGDMPAPELEEEHQEQPSFNAAAAEQQQGHDAGAGSTSGYGTYAWDPNYYAQYGANYGWDPSASASYEDGTQYAAYEEGQSGGYAHSHGGEHGSGYEHVAAVPYGVDYTGGYGHEVAATALPPVQEPVLPPEMGRIGGKRGRNDMPAQILEVNQAELMKNRPKQDKSKLTGLAFGPSYQPAPSAKGKPSKLHKRKHQIGSLYFDMKSKEMELAERRSKGILTKAETQAKYGW

SEQ ID NO: 53144 - protein, 439 aa, Zea mays
  Clone ID: LIB3632-041-H1_FLI.pep
RARVPPPAALGMAGPKAAEDGSAAPLLPAQAGERSSGGVGGGATSAQTLGNVVVSIVGTGVLGLPYAFRAAGWVAGSIGVAAAGSATLYCMLLLVDCRDKLKEEETEECCHGHYTYGDLGDRCFGTIGRCLTETLVLVSQAGGSVAYLIFIGQNLHSTFSQLMSPAGFIFAILLPLQIALSFIRSLSSLSPFSIFADVCNVLAMAIVIKEDLQLFDHPFSNRSAFNGLWAVPFTFGVAVFCFEGFSMTLALEASMADRRKFRSVLSQAVAAIIAVYVCFGVCGYLAYGEATKDIITLNLPNNWSSAAVKVGLCIALAFTFPVMMHPIHEIVETRFRSNRCFRKLSHNDGGAEWIGLHASRVLVVAVLTVVASFIPFFGSFISFVGSTMCALLSFVLPALFHLSIVGSSIPLWRRVLDYGILLFGLAFAGYGLVTALSSH

SEQ ID NO: 53145 - protein, 253 aa, Zea mays
  Clone ID: LIB3597-002-A8_FLI.pep
AGGRRVSRAGGGRLGDGPALGRLPGGGRRGRRGLDAEQVVGQQHLVDGVDGEGLLRAQGLADAGGDEARGHVGLAAAVGGDVERVGPVGARRLRTHGVAGGLEGVERVELRQDVVLHQRHLLLLRQLVQRAGLEAGEGAVGGREHRVPAAERVVQLAVQLRVLLRRLHQPHERRVLPALLQDRRNVRRALVGRRRRRGAWRLAEHRRHRRQRQERRREQAPCPCRRHYWCRVVTANAKVVAAAVLTAQFPLNL

SEQ ID NO: 53146 - protein, 85 aa, Zea mays
  Clone ID: 700349232_FLI.pep
FQHFLANKTILRFCIKMFQVVEYVGEIVGQRVADRREIEYQSGKRQQYKSACYFFKIDREHIIDATRKGGIARFVNHSCQVITCA

SEQ ID NO: 53147 - protein, 151 aa, Zea mays
  Clone ID: 700074508_FLI.pep
LVERSITNGEAARCACSAFRDRRCGAWRGGVRESLRRQGGAKDGAMHLGCRRPAVHADQQLLLRCAHHRAEPQLPVRRHAVRHRQGCRDQAGGRHYHPQALQHGRPPRRLQVRRLHAALADEDVVNETVRVNQCMNECHYAMQLCCVALLE

SEQ ID NO: 53148 - protein, 138 aa, Zea mays
  Clone ID: 700163486_FLI.pep
LHQWNFLSPWQFFFFFNAMPGSGFAIDGTFQHSVLLPLQLLPLHPKRQFLVLLRFPRTLLVFGFPHSNRLVTNTKESSQTGSSAEISVRDLPQAVAASERGVGFGCRQSASGNSDDCFRVWALAIGIGPSRVQTDEPK

SEQ ID NO: 53149 - protein, 264 aa, Zea mays
  Clone ID: LIB3150-103-A11_FLI.pep
SAPQSNRHLAEMGRKFFVGGNWKCNGTTDQVEKIVKTLNEGQVPPSDVVEVVVSPPYVFLPVVKSQLRQEFHVAAQNCWVKKGGAFTGEVSAEMLVNLGVPWVILGHSERRALLGESNEFVGDKVAYALSQGLKVIACVGETLEQREAGSTMEVVAAQTKAIAEKIKDWSNVVVAYEPVWAIGTGKVATPAQAQEVHASLRDWLKTNVSPEVAESTRIIYGGSVTAANCKELAAQPDVDGFLVGGASLKPEFIDIINAATVKSA

SEQ ID NO: 53150 - protein, 124 aa, Zea mays
  Clone ID: LIB3156-004-E9_FLI.pep
RQSPKGTQFGPPLAKLHKKSPAGHSLASPKSSKHDMCDTQAAIKQSTHTSTSTVIVQAHYTLYSTVWLPRMRSRLVAALIFLRHPSRPVKNDTTCGDRPASGLFTTSCLINHHRHMDCTALAMA

SEQ ID NO: 53151 - protein, 102 aa, Zea mays
  Clone ID: LIB3154-010-E1_FLI.pep
DLTSWQERHAVLVLSKAKELAKIRYDLCPRHLKDKQFWRIYFLLAKSYISPYELRAIQKEKLRRMETENCKPKQVISVEVEMQESKRTSLSQASEVDLESQV

SEQ ID NO: 53152 - protein, 160 aa, Zea mays
  Clone ID: LIB3067-046-E12_FLI.pep
ISPSSSSETKEKSKGGRRGRGLPAYLARRGPMEIQHHRGLGNSKVVKVQSEEAWDLFTDQASNEGRPVVAHFGASWCVTSLSMNYKFEELAQTHPEVLFLYVDVDDVQSVSSRYGVKAMPTFFLIKSKEVVGKIVGANPDEVKKLVDASAEPLETQIVVE

SEQ ID NO: 53153 - protein, 132 aa, Zea mays; identical to SEQ ID NO: 52238
  Clone ID: LIB3088-030-F11_FLI.pep

SEQ ID NO: 53154 - protein, 88 aa, Glycine max
  Clone ID: 700655035_FLI.pep
YLERRECEYDRKTLVNFFKEGDSLHPTLTDVIVFTSTPDKVNNKYYLGPAPLEDMARQIATAYGPCGNNRDYIFLLEKAMYDIGKLSP

SEQ ID NO: 53155 - protein, 254 aa, Glycine max
  Clone ID: 700655090_FLI.pep
MNCQYAITPSGDVFLLEANPRASRTVPFVSKAIGHPLAKYASLVMSGKTLYDLQFTKEVIPKYVSVKEAVLPFSKFPGCDVFLSPEMRSTGEVMGIDPSYNIAFAKAQIAAGQKLPLSGTVFLSLNDLTKPHLEKIAKAFVENGFKIAATSGTAHVLNLAKIPAERVLKLHEGRPHAGDMIANGDIQLMVVTSSDDALDRIDGLALRRMALDYKVPIVTTVNGALATAEAINSLKANSIKMIALQDFIDGEFNE

SEQ ID NO: 53156 - protein, 208 aa, Glycine max
  Clone ID: 700797187_FLI.pep
KKPNSAIAFSKLSCEVPRPPHNPSTKGLCLSSSSTPMSEPDTQAPPPPPFLLQRPPLLQSASPLFKQRSWSPDAFRDEAWLRRKGNWKNRRSKSVTDEDVDELKACIELGFGFDSSPEVELDQRLSDTLPALGLYYAVNKRYNDSLVTKTTPSSSSSSAASDCDSTPCPHGSPHSAIFTTGDNPQTVKTRLRQWAQVVACAVRQSSDV

SEQ ID NO: 53157 - protein, 142 aa, Zea mays
  Clone ID: LIB3070-006-D3_FLI.pep
GEERRKARLERHQRTMERAAKALAEKNERDLQAQQEQEERHRIGESLDFEIKRWAAGKEGNLRALLTTLQYILWPECGWRPVSLTDLITAASVKKEYRKATLCIHPDKVQQKGANLQQKYIAEKVFDLLKEAWKKFNSEELF

SEQ ID NO: 53158 - protein, 418 aa, Zea mays
  Clone ID: LIB3078-024-B9_FLI.pep
QPSEEPPKRLIEQHRWPAMIAGQAPKNLMSRSIDLSDKANIPVPPSNTSRGLSPRKTPSVRPVASSNTSRGLSPRKTPSVGPVPSSNTSRCPSPMKTPSVEASVKLSNQSLDEVARSLAIQSSRRDDKVDSQTIERSKSLSRPNRTVTFPVPILQRSSSPSRTLPATSSTSRAFQSPSRTRPSTPCQSQSAGATQSSVPSSLINYMVDARKGKKNASQIENIHQMRLLHNRHLQWLFINAYAEDALSFQKATVENTMYNVWRNTVNLRDSVNMKRIMVQHFQQELRLYNILKEQIAYLEQWPTLERENSISLLGATEALKASTLRLPVTLGAKANTIALKNAVSSAVDVMQVLGSSVCCIHSKITDSTSLVSELSVIAGQEKIMLDECRELLATAAKLQVQESSLRTHLVQQRQRLQD

SEQ ID NO: 53159 - protein, 154 aa, Zea mays
  Clone ID: LIB3076-029-E10_FLI.pep
DEGSFGDMSSGDVDEDNERIESVKAAAVSSVVGVLASLPISFYEVEDLPQLFLRSSIVFISCALFGVTFRYAVRRDLDNIQLKTGAPAAFAFVRGLALLESGRTFELSTDTLISVTLDAAVSVVENIFIFLPAAVALDYCFKMRFLSPFPRRKQ

SEQ ID NO: 53160 - protein, 364 aa, Zea mays
  Clone ID: LIB3076-041-G8_FLI.pep
SFLLELVYQFTTLQDESKTTRWRNAKLTLSNTLYTSLPSIGVVLVAGAVVGVGSGALAVGEAHKPAAAVEVAADTDEVLEPALVGAEPAGRAARGEPRGGHAPDARAAVGASRAGLQRGAVAHQPRPRPGPHEAAEHAAVDADVVGARHGVLAGVRHVQQVPRAAARQEAPPGRLGEAGDRGEVARHARARARGAAAEEQQLRQRRPPAADAPGRRRRGRGASRQRRHHPRRPRDAELPPQHPLRHGAQAPAHPRHRAQRLWVPVERQEHELQHLLVHEPHVDAPDARRIAAAAAASSSPGADRARASSRIAAAAVRRPAQPPYGQGALAHPSAPINLTSRTGTASEALSAGGRDRQLASCSLA

SEQ ID NO: 53161 - protein, 448 aa, Zea mays
  Clone ID: LIB3075-019-B7_FLI.pep
QQRKAGLPTLSLSPVSTGSANSNSHGLHRRRRGRGGGRGGVHVRDAAGVVVHPAHDAEERHRAGPAGGAAEGGRRRQGGAGARGGGGADARGARRPRRRGGHGGPHAPPARLLRRRPVPDGGPGRPVRAPLLRRARLQVAHPQRGRRVHGRPRAHEPGQGPHGELVLPQGRGAGRRHPVQQGVRDDGVRVPRHGRALQPRVQRGHEEPLGDHHQEAAGLLHGLRGRVDAGGRGRRRGRHAARHHVPPPAHLRGQLRPAARHLRGAAVPRRAPRGRGHVRVRARRRRHPHEVDPPRLERRALRHAAQELLRRAAGKWQGHRRRVRAAGQHGGHPQGAGRLPRRHDHARAQPRRQGAVRARVPRARKGRRLLRVQGHLHLRQRLGHRVHQVNHRRRDEMAWLPHALLAWSSYRTSPSSSSSGYCAATSLLSRMHVLLLNFLSSYHALWLA

SEQ ID NO: 53162 - protein, 170 aa, Zea mays
  Clone ID: LIB3075-020-C8_FLI.pep
EALARKPCDPLIVATFALAFYLGGDMSLAVDIGKSINRQHDTGFRELLEPKVWTDKHLAGEVQSFAALMKQALTEMTDEYHVANAMAKIPQAPSSDLVFIPLQAYLKVLKFIECVQYGKKERGHEPKRDGMINYHNLSNGTHAEIRNLFTLVVFDTLYPTDTEDENDCSS

SEQ ID NO: 53163 - protein, 271 aa, Zea mays
  Clone ID: LIB3078-016-H1_FLI.pep
GMPLIRHFQFAMWKVYEQQLHEWESKVCRMQGSSNGYQGKKMPPKPALFAFCLRPRGLDVPYKGPKQRSHKKLMSTGCHSFSRQHDGFYRQVSGRRYNECTVDGRICELYDIGSLYSLTGYSPRFSTRTGSLRAFESSESSTPRFFRTNIVKRSATVAFSDDHQPSPSFRPQRVKRSASDHWNTVIHDWQNSKHLFPGSPPVDIEELKLRDAASAAQHAAAMAKLKREKAHCLMQKADLALHKATVALMIADAIKSSSRNKSRDCRRGFDE

SEQ ID NO: 53164 - protein, 262 aa, Zea mays
  Clone ID: LIB3079-005-F5_FLI.pep
REQGTGRLLASTSSEKLRPNDNDARRHGGRPPRAAAGRGRRAAVGRRRGAGPAAAHRQRRPHHEANPAAQRQDLQGGQGDDAGVRVRVHRLRHRRGLRQVPQGEAQDRQRRRPLLGLRRPGLRRLRRPHARLPPQVPGGRGGPRCRSRVLLPRRRRPPPRVRVHVHLAPRRSPTRRSFHVRRRSHRPPRQQHLIRQALLIQLLLRQLLFNLLVIRQINNKSYALILLFFTTAHFLRGESSYQIQITSYLYLSIYVPQFHTHK

SEQ ID NO: 53165 - protein, 99 aa, Zea mays
  Clone ID: LIB3075-015-F9_FLI.pep
TSSIMVEPVIVMQMLAKKSATVGWSRVIGDFAHTDPQLLLPQVAQQCAAGWAPRNPSGCILFARTSICAVEVVNVFLSCFVIMYIRRLESLLAPHFLEI

SEQ ID NO: 53166 - protein, 82 aa, Zea mays
  Clone ID: LIB3078-003-C7_FLI.pep
DPWRLHLYILSWVDRWWVYGVILASNWNGKGNSVIVLGILSLFFLSRGLEFSCCKLFLSCHRDLPGGLEVMLFCIIVLSASL

SEQ ID NO: 53167 - protein, 315 aa, Zea mays
  Clone ID: LIB3075-023-C3_FLI.pep
REVRRLHRLVGNAVVDGYHVIVGTGSTQLFQAVLYAISPASDGTPIDVVSPAPYYSCYPVASSFLNSGLYRWGGDANTFAGDDTSCVEVVCSPNNPDGGIRHAVVKSKSSKAIYDFAYYWPQYTPITEAAAHDVMLFTFSKCSGHAGTRLGWALVKDTEVAKKMTKFMELTTIGVSKDSQLRAAKILGAICNGYEQLPSPAGQTRSHLFHFAREKMAARWTRLRAALAASDIFTLPDELSEYCGFFKKTVTANPAFAWLRCKKDGIEDLESFLRENKIVTRGGAKFGVDGRVVRVSMVDTDQAFNVFLDRLATMK

SEQ ID NO: 53168 - protein, 67 aa, Zea mays
  Clone ID: LIB3075-046-F4_FLI.pep
ATVVASPRDVIRSRQKGRASVESSIARGAGIHVDHQVFVYCSNAIVDSLYSSICAVVRSRNMLKNNF

SEQ ID NO: 53169 - protein, 405 aa, Zea mays
  Clone ID: LIB3075-048-B4_FLI.pep
GRQSRVVLDVGCGVASFGGYLFDRDTLTMSLAPKDEHEAQVQFALERGIPAISAVMGTQRLPFPANVFDVVHCARCRVPWHIDGGMLLLELNRLLRPGGFFVWSATPVYQKLPEDVEIWDEMVKLTKAMCWELVAKTRDTVDLVGLVIFQKPIDNVCYDRRPEKEPALCEPSDDPNAAWNIKFRACMHRVPEDQSVRGARWPVLWPARLRKAPYWLDRSQVGVYGKPAPDDFAADLQHWKKVVRSSYLAGMGIDWKTIRNVMDMRAVYGGFAAALRDMKVWVMNVVTIDSPDTLPVIYERGLFGIYHDWCESFSTYPRSYDLLHADHLFSKLKPRCKVLPVIVEVDRILRPNGKLIVRDDKETVDEIQGVVRSLQWEVRMTVSKNKQAMLCARKTTWRPTEIETR

SEQ ID NO: 53170 - protein, 196 aa, Zea mays
  Clone ID: LIB3078-001-C2_FLI.pep
RQAASAVLVAPAATRSAVLRSAAVQRPLRAAPAAAPAAFPAAAARRHQAAAIADPSAAAAALVVAAARTARAPAPAPRAAAAPAASPVRGARLAASALSTGVSAACRRAAVGCDLPAASVSRRAARGVRPAATPARERAAAVRASVPRRRRARSAPAAACAPAPGAKEDAAARPVVVIPAVLVDACARSEYYITTS

SEQ ID NO: 53171 - protein, 225 aa, Zea mays
  Clone ID: LIB3078-002-A2_FLI.pep
SHLSVLSYTPLESRKSLLFLKSRLKWRRPCDGLSLLQVTPPRLIMVSVGLESGQVPDVNCKPTGQLDLTRIETLYHADKDKTEAYILELVIRLHHLISQTKTANGERSPIKSPVQSPTQRGASITLSPNIKNSNSSPLLTQEDQDMLSDVKYRTFIPGISKSQEFYTKEIHHNQSRLSKSNSHSPSSGNRKEALSIRRLLPVIDFEIDRTKALDVIDRVDDLRVQ

SEQ ID NO: 53172 - protein, 241 aa, Zea mays
  Clone ID: LIB3078-022-B10_FLI.pep
AIQDVVSLLRCTRQSLGVMASSRGALIGRLVLHEPDGEQIDCSILGASGHAITGDLNLLSKLNLSSGSRYIIVVEKDAVFQRLAEDRLYNQLPCILITAKGYPDIATRFILHRLSQTFPNMPIFALVDWNPAGLAILCTYKYGSISMGLESYRYACNVKWLGVRGGDLHLIPEGAFQELKPRDLQIAKGLMSSKFLQESHRAELALMVERGKRADIEALYSHGFGFLGKYIARKIVQGDYI

SEQ ID NO: 53173 - protein, 279 aa, Zea mays
  Clone ID: LIB3078-037-F6_FLI.pep
SGDNGSDFQGGYGGGGYGDGAVTGGSEGERERDTRPPYRGGGRRGGYRNVEFADDSERPPRRNYERHSGTGHGYEMKRDGAGRGNWGTATDELIAQDAEDSPKMEEAAPVAEKQGEQNDAPAADENKDNKDATANEEEEKEEDKEMTLEEFEKIREEKRKALLALKAEERKVEVDKDLQSLQPLSNKKENDEVFIKLGSDKDKKKENAERDERAKKSVSINEFLKPAEGERYYGGRGRGRGRGDRGGFRGGYGGGYSRGPAAAAPSIEDQAQFPSLGGK

SEQ ID NO: 53174 - protein, 231 aa, Zea mays
  Clone ID: LIB3075-042-B10_FLI.pep
DERRKTWDSWSTKRKLMHILARRFPSLLPFFYRQTFLSGKQGHPESWLSLSLGKKDKTLLEGPAFNAFWERNVAESVRQGDARPFVEEAVLQVSDWGFSLSDIQMQKKEARGFFELIKSLFNQAEREWVGFLGPIHIWQGMDDRVISPSVAEFVRRLVPGATVHKLLDEGHFSYFCFCDECHRQIFSTLFGIPQGPMNPAPQPSEVVSELNEEITVPDNVTDQEQGKSGLP

SEQ ID NO: 53175 - protein, 158 aa, Glycine max
  Clone ID: 700742994_FLI.pep
KVANYPPCPNPELVKGLRPHTDAGGIILLFQDDKVSGLQLLKDGQWVDVPPMRHSIVVNIGDQLEVITNGKYKSVEHRVIAQTDGTRMSIASFYNPGSDAVIYPAPELLEKEAEEKNQLYPKFVFEDYMKLYAKLKFQAKEPRFEAFKASNFGPIATV

SEQ ID NO: 53176 - protein, 84 aa, Glycine max
  Clone ID: 700669955_FLI.pep
TSQIWSIYSDGTFETLACWVVELHSSSKRMEDAAHQNFFCFSLSFHAEHQNFFLLLVSLSSLLNFLFLFFIALSNLIKDCLQLT

SEQ ID NO: 53177 - protein, 46 aa, Glycine max
  Clone ID: 700892877_FLI.pep
AKKPPNTYYYFNINVHKQTLNEFFFFWWLLLLQTPSKFEKWYTIMK

SEQ ID NO: 53178 - protein, 377 aa, Glycine max
  Clone ID: 700840947_FLI.pep
RKSVIAVVVLFPVRFISMDRAALTVGPGMDMPIMHDSDRYDLVRDIGSGNFGVARLMQDKQTKELVAVKYIERGDKIDENVKREIINHRSLRHPNIVRFKEVILTPTHLAIVMEYASGGELFEKICNAGRFTEDEARFFFQQLISGVSYCHAMQVCHRDLKLENTLLDGSPAPRLKICDFGYSKSSVLHSQPKSTVGTPAYIAPEVLLKQEYDGKLADVWSCGVTLYVMLVGAYPFEDPNEPKDFRKTIQRVLSVQYSIPDGVQISPECRHLISRIFVFDPAERITMSEIWNHEWFLKNLPADLMDEKIMGNQFEEPDQPMQSIDTIMQIISEATVPAVGTYSFDQFMEEQIYDLESESDAESDLDIDSSGEIVYAI

SEQ ID NO: 53179 - protein, 258 aa, Zea mays
  Clone ID: LIB3068-001-F4_FLI.pep
FYENGLTGTDDEAFEQSFTDIYTAKSLQKPWYLVLGNHDYRGDALAQLSPVLRKIDSRFICMKSFVVNAEIVEFFFVDTTTFQLKYWTHPKDDHYDWRGVAPREKYINNLLKDLDGAIKRSTAAWKVAVGHHTMRSVSDHGDTKELLQLLLPVLQANGVDFYINGHDHCLEHISSKDSPIQYFTSGGGSKAWRGVQNPTEDDLKFFYDGQGFMSLQLDRSQAKFTFYDVDGKALYSYTRSSLMETGHHLQASGYVNEE

SEQ ID NO: 53180 - protein, 163 aa, Zea mays
  Clone ID: LIB3069-001-D4_FLI.pep
RGNAMGVAWLAWADSDKAPRAVPRASPSKTRASAASRRRRRRRRRPRRRGRRGTVRCPRARAARRPSGSGGRSAGAPARRPRGTRPGTPRTPPAPPRPTAAGSTASAAASRPSSSTPPAARRPSPARSSRRARPRRRSGAARPALCSPCCGACCKVRSLGTTT

SEQ ID NO: 53181 - protein, 183 aa, Zea mays
  Clone ID: LIB3067-043-B12_FLI.pep
RAVPVCIGEKTAAGAESELRRRQICAGRSAPPSGHGPRRPPGVATVAGLRLPQLQLRDGRLPLLGRPLRRRLRPRRVRRPRPPLPLPPPSGAPPGPAPQARRLGPLHAPHTHVLVQDRRRDAALGPAARLGHGDPHRRCGILRLLRRPPGGALTLRSSPCRPPRHQHGYLMSITHRIGLSYLV

SEQ ID NO: 53182 - protein, 529 aa, Zea mays
  Clone ID: LIB3068-035-C8_FLI.pep
YTLIRTMDATQLNRSMDATPTRLFLGALLLLVPAALLLLLRARGRRRLPPGPPSLPLLGSVVWLTNSPAEIEPLLRRLFERYGPVVALRVGARLSVFVADRRIAHEALVDRGATLADRPALASVKFLDESDNTITRASYGPVWRLLRRNLVAETLHPSRVKLFAPARAWVRRVLVEKLGEAGPDAAPPRVVETFQYAMFCLLVLMCFGERLDEPAVRAIASAQREALIYRSKNMQVFAFLPVVTKHLFRARLDKARALRRRVKELFVPLINARREYKKRGGEPRRETTFEHSYVDTLLDIKLHEDGDRPLTNDEIILLCSEFLDAGTDTTSTGLQWIMAELVKNPAIQEKLYSEIKAATDDNKEGVSEEDVHSMPYLKAVILEGLRKHPPAHFVLPHKAAEEMEIGGYLIPKGTVVNFMVAEMGRDEQEWKNPMQFSPERFLPGGDGEGVDVTGTKAIRMMPFGVGRRICAGLGIAMLHLEYFVANMVREYEWKEVPGDEVDFAEKNEFTVVMKKPLRPRLVPRRSHLN

SEQ ID NO: 53183 - protein, 517 aa, Zea mays
  Clone ID: LIB3068-035-E3_FLI.pep
AVQQLGRIINSTSSTEADLKYPNYDQNFLISVSTVTSLLVTHTWDSVAALALHDSSMLLRNHAMALLTEYVPFVDRKHLQSFLSSSNGILTGLGQLSGVIEEGYFTRMSLLLFSKACLYSNPEDIALIPECVWQKLENMQTSTGGFGYMEKDLCLALCQLKSESDATTVAKVLSGCNSQPVSPDFKSIRESILQVMSSLSSIEAYFEFFAARSAQEHEELEEAEIELELIEKEKSVPNFVEHTNDTMVLAMPSYDRDGSEVNKRLQQIRENIRSLERSRLKEEITARRQKKLLLRHAREKYLEETCSRETELMQELDRERALEMEREVERQRQLDIERAKSRELQFNIDLEKEKQTQRELQRELEQVELGRSSRREFSANPNSRSRERYRERDGGGRAQQEAGSLRSSSSRGQEGGSAQAPAPAGPGPTVMLAGSRTFSGANLPTILQPRERAADEDSAWAEDASSNGDPELDGVRPHGPRGSRSSSSRQVAERRERDGTAAGTGRREGKWERKQHP

SEQ ID NO: 53184 - protein, 136 aa, Zea mays
  Clone ID: 700219264_FLI.pep
NNVDPFDEPECEARDIFVNELLCIGTGCPYSCVKRAPHVFSFSDDTGTARAISQGNGEDDLVQLAVGQCPRKCIYYVTPCQHTILEDVLASVLMVPYDLAEAAVLDSLLSKAKFENNRYKKPQRGAKSSSDYVDWM

SEQ ID NO: 53185 - protein, 90 aa, Zea mays
  Clone ID: 700171946_FLI.pep
KFLHNVGLQPASKTSSISAKVHELQSQLETKRQEKDGLRQEMESLKATSQEFMTTIANQTIEIENLKKSLAENNSLLRQILSTNRGMSPP

SEQ ID NO: 53186 - protein, 83 aa, Zea mays
  Clone ID: 700195696_FLI.pep
LSDRDASYMTKSKAAGSFAGIVLRIFSRLQSCFPCGLLGLRLLQSFLFIWIAPATDCSSYGCRAAEQISWLMAVVIYSTILLS

SEQ ID NO: 53187 - protein, 164 aa, Zea mays
  Clone ID: 700208320_FLI.pep
LDDHSKAVTSLASSRDGLLLVSGSEDGNVRVWDTRCQQVTRKFKHSQGPVTNVLIVTPQRVNLPPLQPLRKVRSANGEAERQAVLFHRPENDVPIPGNKTFIFMERYLDELQKHGGSSRLFDFGPNAQNGTPNQQGTEWRDRYLELQDLFVHEVLHQMPSSRNP

SEQ ID NO: 53188 - protein, 241 aa, Zea mays
  Clone ID: 700209683_FLI.pep
KLRIKKQISFPLRQQTTITEAGMQDKQSGYPATEQLSIPKILRTSTMVPRCHCHQKGNQEKHKSYKQARSNNDAACGERSQPRSGPLAPDTARELDVLGHDGDALGVDGTEVSVLKEPHKVGLGGLLQRGDGGGLEAEIGLEVLRDLTDEALEGQLADEQLRALLVLADLPERDGAGAEAVGLLHAAGGRRRLARRLGRQLLAGRLAARRLARRLFSAGHRSFGAWRGGRRVGGSVDLGRS

SEQ ID NO: 53189 - protein, 307 aa, Zea mays
  Clone ID: 700209724_FLI.pep
FRLPQPLDSASLKAYQRDQAILLANRTVKPTMTLGSAAHKIPLEVAHTLVEIAEVARYAYHHRPGRPATHEGDPTAPPAGADSSGGTNEDAARLLEENAMLRARLADDLALLRELHGAPCVSKECPPDLYNRLMAAVNNVSFLAHLEKLQDESARQLNELTSGDMTEVEAADIPDKAGNGKKGLWVLVPCDTAGANLEEISGIDDENYVIVNEDDIVDGIAAFVARCILEDPKSKSLSPMQLQKAVAKALDSMKARWRWSTFWEAGQIIYILATWGITLAGLYKSRHVLKVAAKGAAVSARFVMKAI

SEQ ID NO: 53190 - protein, 357 aa, Zea mays
  Clone ID: 700212087_FLI.pep
FSASGRRGLSSMVTSGEQSAGGGSAARASKLRYPLRSASKGKAAVVSPAADAPPTISAPRRAKPSSDVSKSMCLDLSVKDNSAKPPRRHSIQTKPGASPRPTPSGTVTPVSGVRSKRSESQGRFDTPTSEVSMSISRRKFSTLSSISYWMTQIRLAEAASKHSVSLGFFKLALESECEPLDRMREELKSYVARHGLATELEDPVKDILQVYDILDDFEKLKISAEPSQQPKKSDKAARTATNASPNGNLKPRSLNSDATESKEAVKKESIQKVNPGARIRGSCNRNPVKNTTAKEAVAKNTGKETKKGAKGQQEVSEAPSALPNQESADVVKEITHEDKENMGDIEMAVDVAVAQDI

SEQ ID NO: 53191 - protein, 109 aa, Glycine max
  Clone ID: 700876181_FLI.pep
VLIKTLTLLSLSLKMKTSYATLCIMLTLLLLGQSELLCMAAVTCNALQLSACASAITSSTPPSALCCSKLKEQRPCLCQYLKDPNLKKLVNSPNARMVANACGSPFPTC

SEQ ID NO: 53192 - protein, 99 aa, Zea mays
  Clone ID: 700241044_FLI.pep
TACSTPWCGTWWWSRRARASGWDAPSWSASSTSCGATAWPTSCSTPRRAWWGSTACWTSPWTPTASGGWHTTASPLLPPLDSSRLSCTHSSMKEVDRIP

SEQ ID NO: 53193 - protein, 235 aa, Glycine max
  Clone ID: 700753078_FLI.pep
FSPCAAIPPHDEPAHLSLSRARRFSLSQPCSSFSPPTMGKAKKGPKFAVMKKIVTSKAIKSYKEEVLNPEKKNLMKEKLPRNVPTHSSALFFQYNTALGPPYRVLVDTNFINFSIQNKLDLEKGMMDCLYAKCTPCITDCVMAELEKLGQKYRVALRIAKDPRFERILCTHKGTYADDCLVERVTQHKCYIVATCDRDLKRRIRKIPGVPIMYITKRKYSIERLPEATIGGAPRI

SEQ ID NO: 53194 - protein, 162 aa, Zea mays
  Clone ID: 701162975_FLI.pep
GNEHIDLALGCPKHPSSTECKYKVPEYEFHQFLGMNSEEQVESHSKEITHKIVPQIRCFNFGAINNSHTSYSSKHEILQCFCSGRTTVKQAYAGLLQCSLALITPYPELAIVLGLGLGNHGGGGGHGCGSEGRRPAGRCVLCSRCGLSPGPGVLGVRIASPL

SEQ ID NO: 53195 - protein, 590 aa, Zea mays
  Clone ID: 700074722_FLI.pep
LEYLRIYNSFLIDGRLKDCVDLLESMEQNGLLDMRKIHHASFFSMCKKQRAVLEALRFCRFIGNPKISTFNMLLSVCASSLDFDGALQVMELLKEAGLKPDCKLYTTLISTCAKCGKVDAMFEVFYEMVSAGIEPNVNTYSALIDGCARAGQVAKAFGVYGIMSSKKVKPDRVVFNSLISACGESGALARAFDVLSEMTAESSESKGWKPIVPDHVTVGALMKTCILAGQADRAREVYKMLQEYNIKGTPEVYTIALRSCSLTGDLGFALKIYEDMNRIGVKPDEMFLSALVDVAGHARRADAAFEIMKDARAKGLLVGTIAYSSLMGACCNADDWKKALQLYEEIKSIKLTPSVSMMNALITSLCDGDQVLKAVDILNEMNILGVHPNEITYSVLFVACERNGEAQLGLDLFEQLKMDGIDINPTIIGSLTGLCLQMFNIDFSLGNIIVNFSSGKPQIDNKWTSSAVMVYREAVSAGLLPSSDVLSQVLGCLRLPHGSSLKSTFIENMGVSCDIPQYPNINSLFEGFGEYDIRAFSILEEAASLGAVASISIKETRIVIDARKLKIFTAEVSLLRTLRSLKHRLAAGEC

SEQ ID NO: 53196 - protein, 249 aa, Zea mays
  Clone ID: 700264117_FLI.pep
VAACALNKCGLPLEALECLSTNSSIDGKDSIIAHGDGDHKIFYGILSPVSASKNWLSSSVISGIESNLKLTMASKYLSSLLRKHSLCSQLNAPLSEEKVLNEYNNHQIEKLTCDITTVISIFDKRFSLKFADIAEKILIFCSHDGLLFLAYVLLWGTRSPDVATDNYILECHPLCPIDYLLLFSFKESCKFFSRYVVLSSMCSVLNMEDTNSTAWALKERHKYIVISLSNYLNVSRLLLKHDKSGNYIL

SEQ ID NO: 53197 - protein, 159 aa, Zea mays
  Clone ID: 700049953_FLI.pep
LPRSGASSSPNWVRRVHGAPGHHPHHRHRHQPGEEPGSRGHLQQGQGLGRPMDLLGGPTDWRRHRRRLPPVRAEGQRHQARVLPEQRLSSGRPRQELGTVPILFLPMTPCSVSVWPGLRSLAAVFYFGPKCDISLLSVYVCRNASCKENLEYNCVSFYP

SEQ ID NO: 53198 - protein, 224 aa, Zea mays
  Clone ID: 700050514_FLI.pep
LSLADHHPLRRRRVHGGGGGGLLRVDVPAEVGVESAGLELPVLLGERAGLAAEVDAAVAAAGFGEAELRAHPGAVRAGVDPVAAREAGQQRVDGPRHAARRRAAVHDLRDAAERDARAPARQAAEAAVVGAGAEAGGPLADDRPDRDRAGAADGDADHRLRHLGRWLAGGGGGLGRIHFVPSLVAQSLLVAWRTNAEALNRSSVPMQVVAAGCVCLGRRSLNLP

SEQ ID NO: 53199 - protein, 441 aa, Zea mays
  Clone ID: 700150477_FLI.pep
GSFASVDCTALHLLPAAEFSWSRAMAMSSSRALLRRIGGALRRRSFSDAAAGPDSAAVGYHVAGGPSYMRGAVFWEPGRPLTLEEFHMPRPKAGELLIKTKACGVCHSDLHVLKGELPFSSPCVVGHEITGEVVDHGTHTPAEIISRFPVGSHVVGAFIMPCGNCFYCVKGQEDLCESFFAYNRAKGTLYDGETRLFLRGNGKPVYMYSMGGLAEYCVVPANALAVLPASLPYTESAILGCAVFTAYGALRHAAEMRAGDSVAVIGVGGVGSSCLQIAKAFGASEVIAVDVLDEKLRNATTLGATHTVNAAKEDAVERIKEITGGRGVDVAVEALGKALTFSQCARSVRDGGKAVMIGLAATNVVGEVDITRLVRRQVKIIGSYGARARQDLPQIVKLAESGAFSLRNTVSRKCRFEEANGAYEDLDQGKIVGRAVVEIME

SEQ ID NO: 53200 - protein, 440 aa, Zea mays
  Clone ID: 700101765_FLI.pep
FRSQRFPPRINQTLNPALAPPPARPPAMSLPHPVPRETVASAVASLTMWMKKRTAQTRPNLLADERDDLVVLQLSLRRIPASSSARPRLLPLPHPVIGHDGASVCVISDDRPKSRSASASDLLHASKSLHRLPVSDVIPLSTLRTDYRPYESRRRLAASHDLFIADRAILPLLPRVLGKAFYATKKAPIGVDFSRVGWPEQVRKVLGSAFLYLRSGTCSGIKVGRLDMEEEVIVDNVMVAVEEAVEKVPKKWANVRALHLKAVDSVALPIYQVVPELGMKIEVPEIIGSGEVIDAAEAETCGKKIDKKGDAGARGREVFANVSAKRKRNKKGQVEDDVAMQEEVQVEIEKKKRKSIVISANDSQMAGKKGEKKGKRGLENKVNEASFDNKKVKMGKTEQRKKKSMNGDGEVGTEEMQGDKKIKVEKSDVKIKKLRTRIRV

SEQ ID NO: 53201 - protein, 241 aa, Zea mays; identical to SEQ ID NO: 46467
  Clone ID: 700244044_FLI.pep

SEQ ID NO: 53202 - protein, 338 aa, Zea mays
  Clone ID: 700220579_FLI.pep
ARVSLRSRSFPGEAMDEAAIDDLIRRLLEARGGRTPRNAQVTDAEIRRLCATAKDVFLSQPNLLELEAPIKICGDVHGQYSDLLRLFEYGGYPPDANYLFLGDYVDRGKQSIETICLLLAYKIKYPENFFLLRGNHECASINRIYGFFDECKRRFNVRIWKIFTECFNCLPVAALIDDKIFCMHGGLSPELKNMDQIRNISRPVDVPDVGLLCDLLWSDPDKEIVGWGDNDRGVSYTFGADIVAEFLQKHDLDLICRAHQVVEDGYEFFANRQLVTIFSAPNYCGEFDNAGALMSIDDSLVCSFQILKPSEKKRKAGAENMPKPGTPPRKIKISVTRI

SEQ ID NO: 53203 - protein, 483 aa, Zea mays
  Clone ID: 700224151_FLI.pep
DGGAASGAALCLKALVESSNWRFASGELVNEVCLKVAGAMHDSATRSNAHMGLAMALVKHNGLIAEAYARSIVRSGLQILDGDTADSSSQKRLSAIQMINFFMKFVDPRCLSSELGRVIDVMERCQNDRMPFVRGAAFEASQSARNIAAQKGSRHEVGTSPMVGSNFHKRREKSPCRSLWGAKRSPAASTMAAASPVQFRSPESQVVDSSIMNGSTLHDSPVSVGQSSCNFDQSRRTNRRLWSNDAVDVSLKDGLFIQLCSNSNSYEDDLGEVCDSEVTDANFECTNTFAGFVSPSHNGSISRDKTPSPRASDRPINIDDVKIYSTPRKLLRLLQSSYDSDSASNIGQSTAKLRGLSSPDQEHKGLVISSEQMQSLHSDNKGDEMKDENETIYMQNSKGRTQTLSNADASVLSTTEAENTSIKTSPEIELNGDDVCITSSIGKTRKYRAKFTLFLSVIVIFLAIITMLIRIENDDDSAYLVPT

SEQ ID NO: 53204 - protein, 269 aa, Glycine max
  Clone ID: 700563722_FLI.pep
YVENNSLAQTLLGSGHSNIVFDWKTRSRICIGIARGLAYLHEEVIPHIVHRDIKASNILLDQNLTPKISDFGLAKLIPSYMTHVSTRVAGTIGYLAPEYAIRGQLTRKADIYSFGVLLVEIVSGRCHTNSRLPIGEQYLLEMTWELYQKRELVGLVDISLDGHFDAEEACKFLKIGLLCTQDTSKLRPTMSSVVKMLTREMDIDESKITKPGLIPDFNDLKIKEKGSDIDTKASSSFYNASSASDSQSNTMSYAASTTTTFTAKYDQSL

SEQ ID NO: 53205 - protein, 280 aa, Glycine max
  Clone ID: 700839356_FLI.pep
FVMEYAKGGELFKKVAKGKLKEEVAHKYFRQLVSAVDFCHSRGVYHRDIKPENILLDENENLKVSDFGLSALAESKRQDGLLHTTCGTPAYVAPEVIKRKGYDGAKADIWSCGVVLFVLLAGYFPFHDPNMMEMYRKISKAEFKFPSWFPQGVQRLLRKMLDPNPETRISIDKVKQCSWFRKGPNGRQKTQEGENLCVSPSVTNHSEQCGDESDDLAAEAREEQVVPVSINAFDIISLSPGFNLCGFFEDSIQKREARFTSRQPASVIISRLEEIAKQMR

SEQ ID NO: 53206 - protein, 459 aa, Glycine max
  Clone ID: 700839369_FLI.pep
LDSVTAGNAVNRKKAMNAAMAALKSAGVEGVMMDVWWGLVEREKPGEYNWGGYVELMEMAKKHGLKVQAVMSFHQCGGNVGDSCTIPLPKWVVEEIDNDHDLAYTDQWGRRNYEYISLGCDTLPVLKGRSPVQCYADFMRAFRDTFKHLLGDTIVEIQVGMGPAGELRYPSYPEQNGTWKFPGIGAFQCYDKYMLSSLKAAAEAHGKPEWGSTGPTDAGHYNNWPEDTQFFRKEGGGWDGPYGEFFLTWYSQMLLEHGDRILSSATSIFDNTGVKISVKVAGIHWHYGTRSHAPELTAGYYNTRFRDGYLPIAQMLARHGAIFNFTCIEMRDHEQPQEALCAPEKLVKQVALATQKAQVPLAGENALPRYDEYAHEQIIRASQLDVDGESGDREMCAFTYLRMNPHLFEPNNWRKFVGFVKKMKEGKSAHKCWEEVEREAEHFVHVTQPLVQEAAVLMH

SEQ ID NO: 53207 - protein, 278 aa, Zea mays
  Clone ID: 700213356_FLI.pep
LREDLMSSNLFLDWSREWGIGAIAVSTENPDKARATHAPAASFLPSQRRRSLSPPSLLSRLHRAQLSSLPPLRASAASLPIVFAWPGSTGTMDQEKKLEVSNTSHTYKHHCSVGVDVHEIFVKRSRLRVVLSYIGIIFLLVNACQPLLTKESLSLGSVWNITFAVLVAKCLQYKPVKRESVVIMPAFGIQLEIHFWSGRVDHRFVPVGKILKPMINECVTPVTCYWSLALLLRDEEELLLVFQRSRPPVKMLVPIWKALCTLTNSQHPSPSQIPNHDP

SEQ ID NO: 53208 - protein, 411 aa, Zea mays; identical to SEQ ID NO: 38883
  Clone ID: 700263164_FLI.pep

SEQ ID NO: 53209 - protein, 481 aa, Zea mays
  Clone ID: 700333763_FLI.pep
EMALTRIGLAGLAVMGQNLALNIAEKGFPISVYNRTTSKVDETVQRAKVEGNLPVFGFHDPASFVSSIQKPRVVIMLVKAGAPVDQTIATLAAHLDQGDCIVDGGNEWYENTERREKAMEERGLLYLGMGVSGGEEGARNGPSLMPGGSFEAYKYIEDILLKVAAQVPDSGPCVTYIGKGGSGNFVKMVHNGIEYGDMQLIAEAYDVLKSVGKLTNSELHQVFSEWNKGELLSFLIEITADIFGIKDDKGEGYLVDKVLDKTGMKGTGKWTVQQAAELSVAAPTIEASLDSRFLSGLKDERVEASKIFQGDYSTGLPVDKAQLIEDVRQALYASKICSYAQGMNIIKAKSSEKGWGLNLGELARIWKGGCIIRAIFLDRIKKAYDRNPNLANLLVDPEFAQEIIDRQAAWRRVVCLAINNGVSTPGMSASLAYFDSYRRDRLPANLVQAQRDYFGAHTYERVDMPGSFHTEWFKIARNSKI

SEQ ID NO: 53210 - protein, 263 aa, Zea mays
  Clone ID: 700382138_FLI.pep
SRPPPAMASNGIAPRDVCVVGVARTPLGGFLGALSSLPATKLGSIAIEAALKRANVDPALVQEVFFGNVLSANLGQAPARQAALGAGIPNTVVCTTVNKVCASGMKATMFAAQSIQLGINDIVVAGGMESMSNAPKYIAEARKGSRFGHDTLVDAMLKDGLWDVYNDCAMGMCAELCADNHALTREDQDAFAIQSNQRGIAARDSGAFAWEIVPIEVPVGRGKPPVLIEKDESLDKFDPAKLKKLRPSFKGMVVPLQLEMLLV

SEQ ID NO: 53211 - protein, 322 aa, Zea mays
  Clone ID: 700383072_FLI.pep
RRLPLQASAKPEMAGSLHLPVVDLALPDLRAAAESIRQACVEHGFFYVTNHGVDRGLLEAVFAESKRFFDLPMEDKMALLRGANHRGYTPPYAEKLDASSQFVGDLKESFYIGPLDDGDMHNDVNQWPSEERLPSWKETMKLYFAAVLDTGTRILSLVALGLDLDADFFHKIGALKCPSTFLRLLHYPGEVHESDSGNYGASAHSDYGMITLLVTDGTPGLQICREKDRNPQLWEDVHHIDGALIINIGDLLERWTNCAFRSTLHRVVAIGKERYSVAFFLDPNPDTLVQCLESCCSEACPPRFPPIKSWDYIAGRLNSTYK

SEQ ID NO: 53212 - protein, 300 aa, Zea mays
  Clone ID: 700445930_FLI.pep
RSVRPPACPLLSPPLPPPNPRDRRQLQDRRRSGFNSSPRRAPRTRPRCLSRGFQLVLRQRQRSPSAAQRNTAHTYIQMGSEGPSPVTTTVHVTGFKKFHGVADNPTEKIVRNLASFMDTRGLPKGLVLGSCTVLEAAGQGALGPLYQLLESTVVSGRGRGMPAQERVILLHFGANSGSHRFALENRAVNEATFRCPDELGWKPQRTPIISSDGNILHARQTTLPLKEISKSLQQMGYDVMPSDDAGRFVCNYVYYHSLKFAEKHGMTSLFVHFPLFLAIDEEVQMQFVASLLEVLASLNF

SEQ ID NO: 53213 - protein, 255 aa, Zea mays
  Clone ID: 700621758_FLI.pep
KRGGRAPVPAKKKTDKVTNPLFEKRPKQFGIGGALPPKKDLHRFVKWPKVVRIQRQRRILKQRLKVPPALNQFTRTLDKNLATNLFKMLLKYRPEDKAAKKERLLKRAQAENEGKTVESKKPIVVKYGLNHVTYLIEQNKAQLVVIAHDVDPIELVVWLPALCRKMEVPYCIVKGKARLGSIVHKKTASVLCLTTVKNEDKLEFSKILEAIKANFNDKFDEVRKKWGGGIMGSKSQAKTKAREKLLAKEAAQRMT

SEQ ID NO: 53214 - protein, 261 aa, Zea mays
  Clone ID: 700624226_FLI.pep
QKQEFHICHINLQQPLFMTPVGPCREQQHPVGQSKHYLLLRLPLTCCSIPQHPVSLLLHLVRNLDYLRVMQTVHDILLFLRLYFLYGTRVWIRRWLPPFAAGDFFQLLVRFLLCLLLCPVLVICYSHRNIFIDSLLFQLQDTPSKHSSWRWIKSTYLDCIMVKRIWMYSVELPDIHILRKHQILDLPLWARKCHWRSPFQGLEPPGLGPGEALHQLPHPRQQVTPHVRHLPPLRCRDFLLVGEIWKSQRPRPRRCRRRRTS

SEQ ID NO: 53215 - protein, 425 aa, Zea mays
  Clone ID: 701165359_FLI.pep
TPGARRLSYGHKDVAFAPYTDYWRQMRKLFVVELLSARRVRAADHAREAEVDKLIARLSSAGGKPVQLEDHMFALMDGVIGTVAFGNIYGAEQFAHRNHFHDVLDEALSAKAGFSAEDYYPNAAGRLVDRLTGAAARRERVFRDLDAFFDTIIDQHLVVVDPSSSPPSSATTTPDLIDVFVDLMEESRHQPQVHGSLRFTRDHIKGLLSNVFTAGVDTSSVTMVWAMAELTRRPAMLRKAQEEVRSVVGGDRERVHPDDMPKLRYLKAVVKETLRLHPAAPLLLPRETMRHVSVCGYDVPAKTRVLVNAWAIGRDPRSWGPRAEEFDPGRFEDGGDVGFNGTHFELIPFGAGRRMCPGIAMGVATMEFTLANLLYCFDWELPEGVGVEDVSMEEAGSLTVHKKTPLLLVPTRYKANCQSRHSFQF

SEQ ID NO: 53216 - protein, 364 aa, Zea mays
  Clone ID: 700356819_FLI.pep
RTYGGTGIGLSISKCLVELMGGQINFVSRPHVGSTFTFTAVLKRCDRSAIGDSKPVMLHPLPSSFKGLSALLVDRRPVRATVTKYHLQRLGIACDVVATIELALGVLSGRNGSSLTSMKQPCMLLIESDSWGFNIDVSLRSRLLEMKQNGHTHVLPKIILLAAAESGKLKEHYAVDSVITKPLKASALAACLFQTLGIKQSSNERSDNSGSLYGLLLGKNILVVDDNKVNLRVAAGTLKKFGAKVECVESGKDALALLQVPYKFHLCLMDIQMPEMDGFEATKQIRAMEAKANEQAVACDDSEIDGATRAARWRLPVLAMTADVIQATHEECTKCGMDGYVTKPFEEKQLFQALQKFLDPGMSC

SEQ ID NO: 53217 - protein, 345 aa, Zea mays
  Clone ID: 700106819_FLI.pep
LHCSGMASPPPPRVCVTGGGGYVASWLVKLLLSRGYAVHATVRDPSDPKNAHLQQLDGARERLRLFKADVLDRDALATAVVACEGVFHVASPVPADKVLDPESEVLSPAVKGTLNVLQACSANNVQKVVVVSSTAAVYFNPSWPQGRTKDESCWSDRDLCIKNENWYCAAKTIAEETAVEYGEKNGLIVVTVCPCIVLGPLLQPLINASSELLVYIIKGGPRVLKNLPWNIVDVRDVADALLLVYEKVESSGRYICAPNRISTNNMVNLFKKSYPNYNYVNCDNKDYESEISPVTSEKLKSLGWNPRTMEKTLLDNIEYFEKAGFLRDGEGYPCRLPHIFHFASD

SEQ ID NO: 53218 - protein, 473 aa, Glycine max
  Clone ID: 700833080_FLI.pep
RRLNNNSLTGSCPQSLSNIEGLTLVDLSYNNLSGSLPRISARTLKIVGNSLICGPKANNCSTILPEPLSFPPDALRGQSDSGKKSHHVALAFGASFGAAFVLVIIVGFLVWWRYRRNQQIFFDVNEHYDPEVRLGHLKRFSFKELRAATDHFNSKNILGRGGFGIVYKACLNDGSVVAVKRLKDYNAAGGEIQFQTEVETISLAVHRNLLRLSGFCSTQHERLLVYPYMSNGSVASRLKDHIHGRPALDWTRRKRIALGTARGLVYLHEQCDPKIIHRDVKAANILLDEDFEAVVGDFGLAKLLDHRDSHVTTAVRGTVGHIAPEYLSTGQSSEKTDVFGFGILLLELITGHKALDFGRAANQKGVMLDWVKKLHQDGRLSQMVDKDLKGNFDLIELEEMVQVALLCTQFNPSHRPKMSEVLKMLEGDGLAERWEASQRIETPRFRSCEPQRYSDLIEESSLVVEAMELSGPR

SEQ ID NO: 53219 - protein, 276 aa, Zea mays
  Clone ID: 700242574_FLI.pep
HPNLGCTAQRAKVQPVLIQQYMSVGGETSCSRITSHLRGEELLTAGLVGGEEPVPVGQGRLHHVKGEEPTEPGLHQRQLLVGDDAGAGHLLDDGEPVREPPDDDVEVAHGVAAEELLPLQGRLQGLEALLGLVHRLALRLAGRGEDRVQSSVALVFREPGPEPRLGALVGVARHDGVAALPDLVDVLHDDGGLRDRLAVVDEHGHLLGHRVVAEQVGALVGEVLVDVLVLDALQPQRPLHPDHHRARPHPQHLHALLGHYCWSSGAALLLLVLQLQ

SEQ ID NO: 53220 - protein, 160 aa, Zea mays
  Clone ID: 700262525_FLI.pep
ALADVRAGRLVAGRIRPPAAANVDLLLTHRKGAFSCSEMDILYQCKEVLKIQKFRRMVSYAGFYCFTSLITYAYTSNTTRAGISRADQYYSSYPAGTELLTDTAKLYKAALGNCFEVDEWGPIEFSIMAKHFDRQGKPPYAYHAQYLAHLLSHGQLDGSG

SEQ ID NO: 53221 - protein, 219 aa, Zea mays
  Clone ID: 700238151_FLI.pep
VLWLLLSSAFHIPRFQTYPNGVFGLWSHHMLHEDRANEIYKKVEDLKSIRGRNQDAILAACLYIACRQEDRPRTVKEICSVANGATKKEIGRAKEFIVKQLEVEMGQSMEMGTIHAGNFLRRFCSTLGMNNQAVRAAQDAVKHSEELDIRRSPISIAAAVIYMITQLSEDKKPLKDISLATGVAEGTIRNSYKDLYPYASRLIPNTYAKEEDLKNLCTP

SEQ ID NO: 53222 - protein, 342 aa, Zea mays
  Clone ID: 700242843_FLI.pep
FLPKQPAAARGLRFASMALVAGSYERFIWGFSLKTLTTPSATGASLSETLTLAPLFSYPAHTGPVRCVAAAPRAGLVASGGADDSVRLYDLPSAADLGPLLDPSAAVSALAFYSRGPVPRNLLAACDDGSLHIYDADGFALLSTLRAFPRHEAAEALAVHPSGRVALAVGRAGAFAMLNLVRGRRSFASRLEHPASAIAYAEDRDGGDRFVMAAENKVSVHDSVDARVIHDMDCGKKVLAMAPAKSGVLYTGGEDRCITAWDLSSGKVSSRIEGAHATRVKGVVVFGNSNDGSQLSNLISSASSDGVIRIWDIRTIGNGKPTPLAEANTKARLTCLAGTSLK

SEQ ID NO: 53223 - protein, 120 aa, Zea mays
  Clone ID: 700423145_FLI.pep
QKNFLKEQENWAQGRTTCSYRLSLSECNIQLHTLMLSFFLIALSIKSSAKTFLTVLASSPVKQPIPAPSSRIDVPSSEGSKNRTLGQPPCPERQGGPLSRLTARESSIMASTMRFLGCSS

SEQ ID NO: 53224 - protein, 91 aa, Zea mays
  Clone ID: 700343862_FLI.pep
KGMGQPFHNIDNVIKASAIMVHEQGHFSPRKVTVSTSGFVPQLGTQLLAAASLNARTDEVRNWIMTINRKENLNLLLGTLRGELNLRKKNK

SEQ ID NO: 53225 - protein, 381 aa, Zea mays
  Clone ID: 700348213_FLI.pep
KPSLLPQPGRHTESDAIQKKPRPLQILPPPSARFPDRAIAGARLGDLVGSRPVLPLRRRCVAVTRQSGLRIPKMASSNGEAEQQWIENIKSGGTVPCLPPENCPNGWATPPGDSFMVRGPEYLTNKVKIPGGEYLLKPLGFDWIKGPAKICEILKDSNHRVRKAIDEEVSRGNRPFVWAFNLQLPKDNFSAIFYFVSLEAIPEGSLMDQFLKGDDAFRNSRLKLIANIVKGPWIVRTAVGEQAICILGRALSCKYVQGSNFIEVDVDIGSSIVANAIVHLAFGYITTLTVDLAFLIESQTESELPERLLGAVRFSELNPGSAGLFERRSEEHQESTQSRPVGFWQGFSQLLNNQGNTREPSPNLQNTNGTLRKEEANEDAK

SEQ ID NO: 53226 - protein, 389 aa, Zea mays
  Clone ID: 700349147_FLI.pep
HFSLHLSSQFHKPRAWRRRETKKKGRMALEPVARAVAEEVARWGAMRQTGVSLRYMMEFGVRPTERTLLLAAQFLHKELPIRIARRALDLDSLPFGLSTKPAILKVRDWYVESFRDIRSFPEVKNQEDELAFTQMIKMIKVRHTNVVPAVALGVQQLKKDLGGPKAFPPGIHEIHQFLDRFYMSRIGIRMLIGQHVALHDPDPEPGVIGLINTKMSPMTVARIASEDARAICMREYGSSPNVDIYGDPGFTFPYVTPHLHLMIFELVKNSLRAVQERYMDSDKLAPPVRIIVADGAEDVTIKITDEGGGIPRSGLSRIFTYLYSTAENPPDLDVHNEGVTMAGYGYGIPISRLYARYFGGDLQIISMEGYGTDAYLHLSRLGDSEEPLT

SEQ ID NO: 53227 - protein, 364 aa, Zea mays
  Clone ID: 700349334_FLI.pep
ILDHPAVLPSPSAPSRRPQSEGIAEFSWRERRGERERKTKMFIQKAWRTAAFGLYGFNHFTKSGFLEHAKKFREEDMQIRLDGKNCLVTGANSGIGFATAEGLASHGATVYMVCRNKERGEAALNQIRSKTGNANVHLEICDLSSINQVKSFATKFTSMDKPLHVLVNNAGLLEHKHETTAEGLELNFAVNVAATYTLTELVMPSLEKAAPDARVITVASGGMYTEPLNKDLQFTEGTFDGTQQYARNKRVQVALTEWWAEKSGDRGVGFYAMHPGWADTPGVAKSLPGLSERLSGNLRTNDEGADTVVWLALQPKEKLASGAFYFDRAEAPKHLKFAGTADSHAQINPIVDSIRSICGLSVNG

SEQ ID NO: 53228 - protein, 81 aa, Zea mays
  Clone ID: 700422196_FLI.pep
VALPCSPLSLSLSLIISRSSVPRCSSLRLSTNATSRNRTRKRAACTTSAGSSPSHSQPPSPPVHVGVGMMGAIRKARQPRL

SEQ ID NO: 53229 - protein, 197 aa, Zea mays
  Clone ID: 700422826_FLI.pep
KTPAWSLGLGLILGFLWLDARERHAKLLLGDDDGPLLPAVAEHLLRIDEPAPCDDLVPDALRCSSLSKDNGLFSSGEVGHEDPRRRESRLRLEVRGRSWGGEAAELDRAGRVGVLGLAAVALREELHCRRLPRVQRAVLHHHLGQELQHALPLATGPDAFVVAAHSPEPPLRSLEIWWRREVSCLLYAEGWASPKLV

SEQ ID NO: 53230 - protein, 258 aa, Zea mays
  Clone ID: 700428023_FLI.pep
EMLTLHTIQSCPSLRRSSLFRRALLGRKRSFISASSSEDAESGTPPPLGGDKHQQEVLAQIAMLQTQKVRITDFLDERSAYLTKFAKDADSEFDLIGQNAMKELDAVGDQILERLDSKMQAFEETAEVQRQEIEMNDKVLEDFEDWIEKEKNEGMFFKSLGKVKPRNKMEIKVKAKVEAQKVKEIAEESAGSKTRMNIYLGLMGILGITIANAIFATPEVEWRKVAALGLIFIGLVAQVIYEQDISPPEAEKTEKIEE

SEQ ID NO: 53231 - protein, 512 aa, Zea mays; identical to SEQ ID NO: 39621
  Clone ID: 700470105_FLI.pep

SEQ ID NO: 53232 - protein, 312 aa, Zea mays
  Clone ID: 700470447_FLI.pep
AEHSMELEAIGKRLRISSGSSSLARDRLTSLPDCVIHHIMSFLRARQVVQTCVLSTRWRHLWRSVPCLDIDQDEFKAAGSNRITEKEREHFEDFTDHLLIPNNISIALLDTLRLHVSDDEYYHRGASVRWIRHGIKYSAQNPGIMHKESNLAFWRLKKLHLSGVYLDGSFMKHVSSGCPYLEVLELKDCPCTFEEVTSHTLKNLILENCGCNGLYGITITSPTLKSLTIIGSEYYNTITLVLKAPAVAYLLLDVIAYFVKFGVSFDEMSSLAKASIYLRDCVGSGLSKHQFKLLCSVFNVTTLVLSGFQTMV

SEQ ID NO: 53233 - protein, 264 aa, Zea mays
  Clone ID: 700472552_FLI.pep
RVAAAAAAAMKILVAVKRVVDYAVKVRVRPDRTGVETANVKMSMNPFCEIAVEEALRLREAGAAAEVVAATVGPAQSAETLRTALANGADRAIHVLHDPDPARPLLPLTVAKILRAVALQEKPGLVILGKQAIDDDCNQTGQMLAGLLQWPQGTFASKVILDTEKQKATVEREVDGGIETICLDLPAVITTDLRLNQPRYATLPNIMKAKSKVIKKVVPKDLGVDIRSDMEVIEVNEPPKRKAGVILSSVDELIDRLKNEARVL

SEQ ID NO: 53234 - protein, 450 aa, Zea mays
  Clone ID: 700444481_FLI.pep
HTMTLLATPYYFCYTGAAVYAAGFRHCDKTLSLLKPTTSHPGAHARRRSRRGAAITRAAEQSKQPAAMDPALHERGRGRGRGRAASRLTVAVPSQRQERFLVSVRHISIAPRCSSSSSRLTIGCQLPDSRGRAQRAATVDAAVLDQSAVTRTQTDPAPREPVARRPAGPEARALLAPHAAFPSAMSLAEVGAPLRALGAALGPAPPAAAVADAVLRPPSRAPGTARDQAPLPAAVRDAVPRPAVDALGARAAAALVGAALPSAVRLAEPGAAFGSPGAARERAALPAAVRLAQPRAPLGALGALRELAPPPAAVRDAEARVPLRAPPAALPLAPLAAAVLDAQAGPPARGARAAVLAAAPPAAVGYAVVGAAFGALRASQVLAPPAATVGFAVDGPPLGSLLAARFLAPPAAAMGDTVTRGSSRSLLTPWELAAFRANIAPFRSRAFHAH

SEQ ID NO: 53235 - protein, 262 aa, Zea mays
  Clone ID: 700448386_FLI.pep
LPSRSVHARVCRCRFSAAAAGGEPDLAVLDVVDDAERLLLRVPDDGGAPGGREGQARGGAVHVHQQVPGGQLERRAAGEGHGDLGHAQPRRLALEARVQDGERRRAGRPLHGARHRLAERRVHARRQARDHRAGVDDRRQAGVGRRRHGQRLARDLDPGHLDEVERVVQRARRHGRVRVLPRVVGADGQVPRGRRRRRREAVGEGVAHARRQLVQQRQLVTRQADEPRRLPEEALVVLSAAVVEVGHAGGAERHGVLAQIPD

SEQ ID NO: 53236 - protein, 671 aa, Zea mays
  Clone ID: 700356052_FLI.pep
EMEANPKNTFTIKVEDGKPGKDGRLAVGPVFRSVLAKDGFPQLEPDMKTSWDVFRVAAVKYADNRMLGWRPFKDGVPGPYLWKSYKEIYDEVLQAGSALQKLGVQPGSRVGIYGANCPQWIVAMQACNGYSLVCVPLYDTLGAGAVDYIIDHAEIDVVFIQDKKIKEILSPNCKSAKRLKALVAFTSATTEQNKEADQIGIKMYAWDDFLKVGKDNPRQPCPPQASDICTVMYTSGTSGQPKGVMLTHESHAMYVKGVDLFMDQFDDKMTTDDVFLSFLPLAHILDRMIEEYFFHKGASIGYYHGDLNALRDDIVELKPTLLVGVPRVYERIYEGILKAIAELRPLRRVIFNALYNRKLASMKAGYSHKTASPFADMLAFRKVKARLGGRLRLLISGGAPLSNEIEEFMRVTTCAYFIQGYGLTETLGPSTVCYIDDMALVGSAGVPATYTEIRLEEVPEMGYNPLGVPSRGEICIRGKSLFAGYYKSPELTNEAIVDGWFHTGDIGEMTPDGILKVIDRKKNIFKLSQGEYVAVEYLEKVYGFPPLVEDIWVYGDSFRSSLVAVVNPHQENTMKWAESNGYKGSFDEICKLEGLKEYILKELAAVAQKNKLRGFEYIKGVVLDPVPFDIERDLVTATMKKKRKNMLNYYQSEIDTIYKKLEAQKSAARAK

SEQ ID NO: 53237 - protein, 172 aa, Zea mays
  Clone ID: 700448092_FLI.pep
PVLAAVANQLGEGEMARRNIGVAVDFSSCSKAALRWASTNLARNGDRLILIHVNSSCQNERGAVHLWEQSGSPLIPLAEFSDVARTYGVSPDKETIEILTQAANHRGIEVFAKVFYGDPAKKLYEAADMVPLSCMVVGSRGLSTLKRALMGSVSTYVVNHAACPVTVVKEMV

SEQ ID NO: 53238 - protein, 292 aa, Zea mays
  Clone ID: 700619188_FLI.pep
YCPQGPPNLCSSLATASASRRRAMERRSSVRFVPSEIARMEKLAADRKDQVFDNKFCQKLAEEFNRSVGRAGSKALQATQVQGWFLNKFPASATKPTCVPTASQEKTSASEINVSVSEKRSAASEEKLFPLDTGVSNNEDEVSPVFPLETKDMIPELEDLEFEAKSTKDFAWYDIALFLAHRRNRAGEVEVRVRFEGFGADEDEWVNVKKFIRQRSIPLESSQCKSVVEGDLVLCFREGNEEALHFDAHVLEVQRKQHDIRGCRCVFLVEYDHDQSQERVSLRRLSRRPKYF

SEQ ID NO: 53239 - protein, 283 aa, Zea mays
  Clone ID: 700552241_FLI.pep
GTSAGTLNRPAGGVDGRFPAASRRLHPVSNRGICRAGRILRQMPLFDKKPFSLLEPPKDLDSKEKVFQIRFTKEIFRDYEEYLKRLNLYRQRVWTCNISGKSNLTFEEALVSEHKAMEKAQNLPTELMAQVLRMTQYSPLGLYELVDKIYASLLEEVFEGIELHANKDGNVAPCKILKILDSGGTKMCEVGWIRKGKAITNTSVIKAADLFYRRAPVSRNTLKFFIRDATSQSNPWVIHENLAKKFGITIEPPDSVMGEKDKRMKLLKMEGKSSRQMKNMLMC

SEQ ID NO: 53240 - protein, 257 aa, Zea mays
  Clone ID: 700474511_FLI.pep
LISSSSSNRTPSRHPLPWRSSLRQPPLGHSSPYPSHGVKAPSQVPSPLMAAPLCSLVSPHASSGKQPWRPVPARLAPLCLWRAPVSHGVGPQPLGTGRPYSLLLFLPWCPSRVCPSPLPLGSLLVTLLSMGAQVSSPWWQIPCQARPMSELRRLSSLLLSPWRLRLHCFYFFPSSIPPCLYASSSTPEQSNVHDARHVFDGRIDQSSSSFFIRDTASFCTTMRLCSYLGVLFLGVAYKKLIMCIFMCGCVERIPDVG

SEQ ID NO: 53241 - protein, 388 aa, Glycine max
  Clone ID: 700833411_FLI.pep
GISKTTPSSLSIPSYSEKSNASSLPTPRSEGEILSSPNLKPFTFNELKNATRNFRPDSLLGEGGFGYVYKGWIDEHTFTASKPGSGMVVAVKRLKPEGFQGHKEWLTEVNYLGQLYHPNLVKLIGYCLEGENRLLVYEFMPKGSLENHLFRRGPQPLSWSVRMKVAIGAARGLSFLHNAKSQVIYRDFKASNILLDAEFNSKLSDFGLAKAGPTGDRTHVSTQVMGTQGYAAPEYVATGRLTAKSDVYSFGVVLLELLSGRRAVDKTITGMEQNLVDWAKPYLSDKRRLFRIMDTKLEGQYPQKGAFTAATLALQCLNSEAKARPPMTEVLATLEQIEAPKTAGRNSHSEHHRVQTPVRKSPARNRSPLNLTPTASPLPAHRQSPRVH

SEQ ID NO: 53242 - protein, 579 aa, Zea mays
  Clone ID: UC-ZMFLB73029B06_FLI.pep
GLNNHHHLHPRSLRAMAAVLAVLVSAVAATSITAAALNTDGLALLALKFAVSDDPGGALSTWRDADADPCAWFGVTCSTAAGRVSAVELANASLAGYLPSELSLLSELQALSLPYNRLSGQIPAAVAALQRLATLDLAHNLLSGPVPPGVARLVSLQRLDLSSNQLNGTIPAALAALPRLAGVLNLSYNHFTGAVPPELGAIPVAVSLDLRGNDLEGEIPQVGSLVNQGPTAFDGNPRLCGFPLKVQCAGAAGADDDPRIPNSNGPTDPGAAAEVGRRGGPRQPRRRRSSPAVPVLAAVIVVALVAGVVLQWQCRRRCAAAAGDEGKESGKEKGGGAVTLAGSEDRRSGGEEGEVFVAVDDGFGMELEELLRASAYVVGKSRGGIVYRVVPGRGPAVAVRRLSEPDDGDSDGSGSGSGWRRRRAFEAEAAAIGRARHPNVARLRAYYYAPDEKLLIYDYLPSGSLHSALHGGPTASPTPLPWSVRLSIVQGAARGLAYLHECSPRRYVHGCIKSSKILLDDELRAHVSGFGLARLVAGAHKAAGGGHSKKLGSAACALRGGGAASYVAPELRAPGGAPA

SEQ ID NO: 53243 - protein, 491 aa, Zea mays
  Clone ID: 700096588_FLI.pep
KAMPPSSPGGGSQRNQANPSMASAAAVVSLNVGGEIFQITTATLSRAGASSPLASLGPSSPSAPHFLDGDPRLFAQLLSFLRHGRLLAPSYPSATLLAEARHFALDGALLASLSPASAFAPLSLRPSALLPLTGRVAPSAVALCPSPPHPVSLVAAHGGVVTCFDAALASRTSVLTPLPAVDSLAAVSPVLALAGARDFHGVHLCRFSDDASAGCTDPNVLSWPGSPSATVLSMATTTASEAPSPPWLFSSFESARRNSSAVVVFDLNSLSPVVEIGRKEVFGADIEAAIPASKLAWLGGHSLLLAAGSHSGPAGVVGDIRLWDVRASATVPVWEVREKEDCFADVAASDALSAVFKVGAASSEVFMADLRRLGNGGGVGLEPWVCIGDGQKAAAAASSGRKERNGCRIECYCSWVFVARGADVEVWSQVGLAPEAGGKKVMRRNWVGSELSTKPKIVSWAFGGSRMALARADQLSVEIWDSATAAIGANP

SEQ ID NO: 53244 - protein, 123 aa, Zea mays
  Clone ID: 700257516_FLI.pep
SSSSSRELPSQMVFLAENLASELVSGSLRDLDRMMANRALETGMSTECRLPSIILLLRTPATSTDESFTTSGARKSRARSRWRCLVLHSSSRAVSRLVAVPAPAPRRARLDSTRLDSLSPPPH

SEQ ID NO: 53245 - protein, 274 aa, Zea mays
  Clone ID: 700239372_FLI.pep
VKKRSKHRKAVKFYATCFGFREPYKVLIDGTFVHHLLTQRLLPADEALRDLLSASRTPALFTSKCILAELRRLGKSHAESFDAAQLLTTTKCEHDKVVGAVNCVQSLIGDKNPEHFFVATQDPGLRENLREIPGVPVIYGLKNSLCIERPSMQQRKFAQLDEEKRLNMDISEYKKLLKAASEGKTIASENGSGEEQHEMPISSLVKNALHVTDKTKFKRNKAKGPNPLSCKKKKPKLPTAIQKQAGTADGEAKRKRVRKRKRGQKDNKQLEAAN

SEQ ID NO: 53246 - protein, 545 aa, Zea mays
  Clone ID: 700258317_FLI.pep
LTKINRQVPAGNLITDWSSQHRACHPLSSSSVVGDVARNLEPLGVERARHVDPLVGVSPEVVPLGLHQVGRQPVPAVGVEVGQASGHSRGADAVVDGEAHHPAPRRLPVHDLLRELGVYEQAGEARVPVVGLLDAVQEDGADDAPALPDPGQLAEVEPPAFLRALGLDDVHALRVAADLGRVQGLPHVLHQLRLVHRRAGGVVVTLEDLGGLHPLVLQPAQEPRVQGRLDRRSGHRQLGGLLHRPLPCPFHPGLVKDLVHQVAIAMLVLDAKDVGRDLDQEAQELALVPLGEHLVQLTVGELTDRLENVVCLGNQLHIAILDSVVNHLDKVARSTFANVRDTRATVRDLSSHLEDNVFDVLVSLERASGHQGRAVAGTLLSSRDTHAKIQEAALLHGLLPPLRVLVPLVPPIDDAVALLQVSCERRDGLVNWRAGLDEHDHHPWLLNGLHKGRGVMEAVDGKVSFCLGTLHGLVHLGGCPVVHRDGEPFLCNVEGKVLPHDRKASKTDSCERHLLLWSWRAAECRFRCGVELAMPPPSGHLPLFH

SEQ ID NO: 53247 - protein, 153 aa, Zea mays
  Clone ID: 700379791_FLI.pep
EVNPFDGQEAKPYKNDPEILAMTNLIAAYQKNDIMEFEKILKSNRRTIMDDPFIRNYIEDLLKNIRTQVLLKLIKPYTRIRIPFISQELNFPEKDVEQLLVSLILDNRIQGHIDQVNKLLERGERSKGMRKYNAIDKWNTQLKSIYQTLSNRV

SEQ ID NO: 53248 - protein, 470 aa, Zea mays
  Clone ID: 700349329_FLI.pep
FRFDLPAVPAAERMASSFSFPLMNPADIAEALHSYCIAPSPGLRAEHIVTPQPGLVAEVLALFLANFVGDDEPDEQLEFQALQAIDNPEHHMRAIALSRLYRRANAFLHSILFRDLTLRDLLRADGRRVVYILSAIINFLHYRQDKLSFLEPIVQEYSPLQERHTELRAKIAELRNAKEDHLLKEQMEAPVVQQLEKEVNALKQRLREYNKEQLSLRVATKAIDEKKQELLGKMNQADFELVKVMQEKERLSAKIVHSPEKLLRTLEEKKAVRDELRNSEKVAMQKVQEKTNTLETYTKVSEKLVKHLSKISAVHEKGTVAKASEKDVKAHKEKIGDQNLEIKALRNKAAEWQLKVLENEGILNAKEKERDQRVAENNLKMNALKSEVESEHKCLEEKEIKIKEKLEKVAELCSQADSVAEAGNKKIQEICGKYNQVCEAANMYMDGIDRSFEEIDEAAVSLKAIGQSGA

SEQ ID NO: 53249 - protein, 837 aa, Zea mays
  Clone ID: 700350705_FLI.pep
QNCGGDVSNPAAEDLIVAILTALDCLPISNEQSVSCGVMPTVGHLLAHRIAVINQKARALCHKWGGVPKHGTNGEHFHTEESSHTDQLKSPDAGHKTETKRKCVVDEGEPDEESKPEVTTHSDAPLSDPSLTNDNADATEQPAGLTSPNPSNGNATLGDVNNLVRSPTSAGHVGLEDGQSTPNEISSNDAELPINGILRSNSTNAKSGTGQDAPVESTPVAMSVDHNKPGKLFPGSKMGLEDSIISVSSSIKESQPFAAGRSHLEKDTTETLNHLAVVTRDLQDLSEESTSKEDEPTSSSSTDDMDMSGDYILQRCMSSFGGSSKAADTKSTALEGEKSTRMADFDDTDALEVARLVAIEVEREVIDYREPFCSSPDTNSRNADSPDLEGPRQPVAIASELNDNKSSSTEAKSGSSSSHKEDGSGITDGSGPLSRKHTHSVDLGNLDLNENQCAEETDFNPKSILSNSVNLSMPIAVAASRGSSVFPARLHFEGGLGWKGSAATSAFRPAPPRRTPDAEKSLSASSHKTSNILFDLNVADNGSATSGEPLSTAILPASSELPSEVASKAVDVSGGLKLDLNFSCGDEEDAITASNVPSLWNHQQFNGNWSQPSFSSSKQPAARNFDLNDNMSIADVSVRGMDGSSVKTPSRPRDMSDHSAVTIMGKRIVVGQRDDGQQYQHNFLGPSAESRVFARPTQSFAHTPDYSVLSYPSQPAMPFTPAFFAPGGSPYLVDAKGAPVIPPLSGLSLGISHPSFNTRATQPSSNELSYFHPSVDFSYGVSSEGARREAGSYWPMSYQGQTMFVDERMRNVSQDGTSGLVLKRKEPESGWDLYPRR

SEQ ID NO: 53250 - protein, 580 aa, Zea mays
  Clone ID: 700350287_FLI.pep
SRRGTFCVKCGGKVRCTCKQRCALLTEFELSRGGEAEPQSRPRPAGDIHTVRAPEAGSTGDEAFRVITHQDLRVLFRFAGVGNPSMARKMLIDGEVAAVADGGHYDYDLFVIGAGSGGVRGSRTAASFGAKVAICELPFHPISSEWLGGHGGTCVIRGCVPKKILVYGASFRGEFEDSKNFGWEINGDINFNWKTLLENKTKEIVRLNGVYQRILTSAGVTMIEGAGSLVDAHTVEVSQPDGSKQRYTAKHILIATGSRAQRVNIPGKDLAITSDEALSLEELPKRAVILGGGYIAVEFASIWRGMGAEVDLFYRRDLPLRGFDDEMRAIVASNLEGRGIKLHPGTNLSELSKTADGIKVVTDKGEELIADVVLFATGRTPNSQRLNLQAAGVEIDRVGAIKVDEYSRTSAPSVWAVGDVTNRINLTPVALMEATCFAKTVFGGQQVKPDHRDVPCAVFSIPPLSVVGLSEEQALEEANGDILVFISSFNPMKNSISKRQEKTIMKLVVDAETDKVLGASMCGPDAPEIIQGIAIAVKCGATKADFDSTVGIHPSAAEEFVTMRTVTRRLSPTSKPKTNL

SEQ ID NO: 53251 - protein, 538 aa, Glycine max
  Clone ID: 700791194_FLI.pep
IQSVLSLSLLVPMSSLSSCSSSPSFAASYGTITHPRAAPLSRISCGGPRPPKSKKSNLNSEAQELVRLLTSKIRSNDKEVLLKTLNKYVKQVRTQHCFLLFEELGKHDNWLQCLEVFRWMQKQRWYIADNGIYSKLISVMGKKGQTRMAMWLFSEMRNTGCRPDTSVYNALITAHLRSRDKIKALAKAIGYFQKMKGMERCKPNIVTYNILLRAFAQARNVEQVNSLFKDLDESIVSPDIYTFNGVMDAYGKNGMIREMEAVLARMKSNQCKPDLITFNLLIDSYGKKQAFGKMEQVFKSLLHSKERPSLPTFNSMILNYGKARLKDKAEDVFKKMTDMGYTLSFVTHESMIYMYGFCDCVSRAAQLFDELVESKVHIKVSTLNAMLDVYCLNGLPQEADSLFERAISIKIHPDSSTFKLLYKAYTKANQKELLDKLLKHMDKDGIIPNKRFFLDALGAVASLPANSESANAATDSNTANSESANAATDSNASNSESANAATDSNASNSESAYAATDSNNPQDFAKLATGVKNILAHR

SEQ ID NO: 53252 - protein, 225 aa, Zea mays
  Clone ID: 700803992_FLI.pep
RQGRNMGTPETSREPCPDRILDDVGGAFGMGAVGGSAFHFIKGIYNSPNGMRMSGGAQAVRMNAPRVGGSFAVWGGLFSTFDCAMVYARQKEDPWNSIIAGAATGGFLSMRQGMGAAGRSALMGGVLLALIEGAGLMLNRVLANPPLPAEDPNLTAAMGDNPFPGLPQAPPVVAPPEVASSSGAGGWFGGLIGRKDEEKKSSAGKSEILESFDTPSSPIPSFEYK

SEQ ID NO: 53253 - protein, 440 aa, Zea mays
  Clone ID: 700802849_FLI.pep
TMAATMAVTTMVTRSKESWSSLQVPAVAFPWKPRGGGKTGGLEFPRRAMFASVGLNVCPGVPAGRDPREPDPKVVRAADNCDIARQLGAAVPGQQAAWEAEEEAAKRRKQKGGGSKKQQQLGDLSLRKVRVKIANPHLRRLVSGAIAGAVSRTFVAPLETIRTHLMVGSIGVDSMAGVFQWIMQNEGWTGLFRGNAVNVLRVAPSKAIEHFTYDTAKKFLTPKGDEPPKIPIPTPLVAGALAGFASTLCTYPMELIKTRVTIEKDVYDNVAHAFVKILRDEGPSELYRGLTPSLIGVVPYAACNFYAYETLKRLYRRATGRRPGADVGPVATLLIGSAAGAIASSATFPLEVARKQMQVGAVGGRQVYQNVLHAIYCILKKEGAGGLYRGLGPSCIKLMPAAGIAFMCYEACKKILVDKEEDEEEEDGAGGGEDDKKKVE

SEQ ID NO: 53254 - protein, 261 aa, Glycine max; identical to SEQ ID NO: 44210
  Clone ID: 700565847_FLI.pep

SEQ ID NO: 53255 - protein, 158 aa, Glycine max
  Clone ID: 700836372_FLI.pep
LMANLYVKAVPPADLNRNTEWFTYPGVWTTYILILFFSWILVLSVFGCSPGIAWTIVNLAHFAVTYHFFHWKKGTPFAEDQGIYNRLTWWEQVDNGKQLTRNRKFLTVVPLVLYLIASHTTDYQNPMFLFNTVAVIVLVVAKFPHMHKVRIFGINADK

SEQ ID NO: 53256 - protein, 321 aa, Glycine max
  Clone ID: 700836404_FLI.pep
MAQVVKPHEPKTQSFKLLSGHTIPAVGLGTWKSGSQAANSVITAIVEAGYRHIDTASQYGVQEEVGHALQSAMQAGVERKDLFVTSKLWCTDLTPERVRPAINNTLQELQLDYLDLYLIHWPFRLKDGASRPPKEGEVLELDMEGVWREMEKLVKENLVRDIGICNFTLTKLDKLMSIAQIMPSVCQMEMHPGWRNDKMLQACKKNAIHVTAYSPLGSSDGGRDLINDQKVDRIANKMNKNPGQVLVKWAIQRGTSVIPKSTKPDRIMENVSVFNWELPERDFKTLSNMPDQRRVLDGEDLFVNKSAGPFRSVEDIWDHED

SEQ ID NO: 53257 - protein, 200 aa, Zea mays
  Clone ID: 701165304_FLI.pep
LLAAVNHPWSRGREESIAGPGDGAPRRNKRRRRRGGDGEPSGRVAVIQPAQLQPVGPCRPLRAALECHTSHLCCDPQDRSATQSSDNHGGQEHPAEALVPEIRGEAEAKESCAEQPRSGEQQQEEAAQGTCGRRRGPVERKKLKTHSWWPSSPASHLSVSCSLHLSLTAELVAGGGCPPLPCASSSPLTSRMYVWYDSES

SEQ ID NO: 53258 - protein, 91 aa, Glycine max
  Clone ID: 700830504_FLI.pep
NVTYEDILLKEELDGLASNYPDRFKIYYVLNQPPEVWDGGEGFVSKEMIQTHCPAPAQDIKILRCGPPPMNKAMAAHLEALGYASEMQFQF

SEQ ID NO: 53259 - protein, 539 aa, Glycine max
  Clone ID: 700736931_FLI.pep
TAAVAVAIVCISAFSITVVAEDPYRFFNWNVTYGDIYPLGVRQQGILINGQFPGPDIHSVTNDNLIINVFNSLDQPFLLSWNGVQQRRNSFEDGVLGTTCPIPPGGNFTYILQVKDQIGSFYYFPSLAFHKAAGGFGGIRILSRPRIPVPFDDPAGDYTVLIGDWYKLNHTDLMSLLDSGRKLPFPNGILINGRGSNGAYFNVEQGKTYRLRISNVGLENSLNFRIQNHKLKLVEVEGTHTLQTTYSSLDVHVGQSYSVLVTADQPAQDYYIVVSTRFTSTVLTSTGVLRYSNSAGPVSGPPPGGPTIQIDWSLNQARSIRTNLTASGPRPNPQGSYHYGLINTTRTIILSSSPGIVNGKQRYAINSVSYVAPDTPLKLADYFKIPGVFRVGSFSDRPTGGGIYLDTSVLQTDYRTFVEFVFQNDEDIIQSYHLDGYSFFVVGMDGGQWTPASRNTYNLRDAVSRCTTQVYPKSWTAIYIALDNVGMWNLRSEFWARQYLGQQFYMRVYTTSTSIRDEYPVPKNALLCGRASGRHTRPL

SEQ ID NO: 53260 - protein, 107 aa, Glycine max
  Clone ID: 700868519_FLI.pep
LLDIILMEMAGKRKNLNPHAERSSQLFFPFWIYNHIRDGEDIEMEDVTEEEKKMVKKMIIVALWCIQLKPNDRPSMNEVVEMLEGDIENLEIPPKPTLYPSETITKN

SEQ ID NO: 53261 - protein, 155 aa, Zea mays; identical to SEQ ID NO: 40483
  Clone ID: 700615955_FLI.pep

SEQ ID NO: 53262 - protein, 342 aa, Zea mays
  Clone ID: 700210827_FLI.pep
NLREAPGEERAATALSGNFLERERERDGPAAAEAEMGASDLDRQIEQLKRCEPLTEAEVKALCLKAMEILIEESNVQRVDAPVTICGDIHGQFYDMKELFKVGGDCPKTNYLFLGDFVDRGFYSVETFLLLLALKVRYPDRITLIRGNHESRQITQVYGFYDECLRKYGSVNVWRYCTDIFDYLSLSALIENKIFSVHGGLSPAITTLDQIRVIDRKQEVPHDGAMCDLLWSDPEDTVDGWGLSPRGAGFLFGGNVVSSFNHSNNIDYICRAHQLVMEGYKWMFNSKIVTVWSAPNYCYRCGNIAAILELDENLNKQFRVFEAAPHESRGVPAKRPAPDYFL

SEQ ID NO: 53263 - protein, 476 aa, Zea mays
  Clone ID: 700211004_FLI.pep
TRQGFRLPRISPPPSIPLGAAASSPRFGPRLVNHPGSVKMSDSHETDRNIEIWKIKKLIKALESARGNGTSMISLIMPPRDQVARVAKMLGDEYGTASNIKSRVNRQSVLAAITSAQQRLKLYNKVPPNGLVLYTGTIVTEDGKEKKVTIDFEPFKPINVSLYLCDNKFHTEALNELLESDDKFGFIVMDGNGTLFGTLSGNTREVLHKFTVDLPKKHGRGGQSALRFARLRMEKRHNYVRKTAELATQFFINPATSQPNVAGLILAGSADFKTELSQSDMFDQRLQAKILNVVDVSYGGENGFNQAIELSAEILANVKFIQEKKLIGKYFEEISQDTGKYVFGVDDTLKALEMGAVETLIVWENLDINRYVIKNSTTGEIIIKHLNKEQEADQSNFRDPSTNTDLEVQEKMSLLEWFANEYKKFGCSLEFVTNKSQEGSQFCRGFGGIGGMLRYQLDIRSFDELSDDDDVYEDSD

SEQ ID NO: 53264 - protein, 227 aa, Zea mays
  Clone ID: 700211923_FLI.pep
GSNPNKLPGDGLRMSEEDKAAASAEQPKRAPKLNERILSSLSRRSVAAHPWHDLEIGPGAPAVFNVVVEITKGSKVKYELDKKTGLIKVDRVLYSSVVYPHNYGFIPRTLCEDNDPMDVLVLMQEPVVPGSFLRARAIGLMPMIDQGEKDDKIIAVCADDPEYRHYNDISELSPHRLQEIKRFFEDYKKNENKEVAVDAFLPATTAQEAIQYSMDLYAQYILQSLRQ

SEQ ID NO: 53265 - protein, 177 aa, Zea mays; identical to SEQ ID NO: 44953
  Clone ID: 700212045_FLI.pep

SEQ ID NO: 53266 - protein, 141 aa, Zea mays
  Clone ID: 700195039_FLI.pep
VLLIFMCWVLYTSTLKVLIVWTNFKQIPCRTAMRGSFPLNGTYFQVNEVFADHCSSQNPIDVPRSWIWDLPRRTVYFGTSVPTIFRGLTTEEIQRCFWRGFVCVRGFDRTVRAPRPLYARLHFPVSKVVRGKKPGAARAEE

SEQ ID NO: 53267 - protein, 241 aa, Glycine max
  Clone ID: 700837183_FLI.pep
SAQELAGEKKKRMIDRGKTSVAVVYSDGNREINVGTVVVDPTLNFKSLVTLLSQQIGISPHQLSVYLASVGTDRKIPVTSKLNLAAVRRDGAAHYFFVKRSKRNKKANGSGNGKDAMKKNYPRPPPEKVMLLRRADAGAPPFMPPVLNRAQYERRLMNLHIERQSYLMNMSLGVNGGRESPNNSAAVTAAFPAVCDECLKAKVSGNNRDFHPCVNDAVIVGFRSREGPITRPVKNADKAGT

SEQ ID NO: 53268 - protein, 336 aa, Zea mays
  Clone ID: 700045605_FLI.pep
RVASSSRPPLPECSALAGGRGSFTFMEAAAIPTSAPETRIAVVTGGNKGIGLEVCRQLAGAGATVVVLTARDETRGAAAAQELRESGLSDVIFHQLDITDAASVSRLAEFLKARFGKLDILVNNAAVGAVEYVQDPADSSTSEEELSGMDMVQRLQCMFKRVRETYDAATQGIKTNYYGIKHVIEALLPLLQASSDGRIVNVSSDFGLLRLINNEELRQELNDVEKLTEERLDEVLAAYLRDFDAGEVGARGWPMDFSAYKVAKVAMNAYTRILARSHPGLRVNCAHPGYVSTDMTVHTGPLTPEQGAANVVKVALLPEGGPTGAYFALGEEASFV

SEQ ID NO: 53269 - protein, 133 aa, Zea mays
  Clone ID: 700449368_FLI.pep
SRCDSRIYQYTKLYNSKTVQALQNLTRAYKRKCSTGLESYSFISILHFFAFFGAPVAGAVDETGGVISRGPWANLSSLLAIFLSRLALLLARLASNWSESVFSLAFSALDLWILSISTLLFLKALPLTFMYMS

SEQ ID NO: 53270 - protein, 820 aa, Glycine max
  Clone ID: 700843342_FLI.pep
QNGKKLPDGLWEEVLEGLQFVENEMGAILGNPLKPLLLSVRSGAAISMPGMMDTVLNLGLNDEVVAGLAAKSGERFAYDSYRRFLDMFGDVVMDIPHSLFEEKLEKLKHTKGVKLDTDLTTYDLKDLVEQYKNVYLEARGEKFPSDPKKQLELAVKAVFNSWDSPRAIKYRSINQITGLKGTAVNIQSMVFGNMGNTSGTGVLFTRNPSTGENKLYGEFLINAQGEDVVAGIRTPEDLEVMKSCMPDAYKELEGNCEILEKHYKDMMDIEFTVQENRLWMLQCRSGKRTGKGAFKIAVDMVNEGLVDIRSAIKMVEPQHLDQLLHPQFEDPSTYKDKVIAVGLPASPGAAVGQVVFTADDAEEWHAQGKSVILVRNETSPEDVGGMHAATGILTARGGMTSHAAVVARGWGKCCVSGCSDILVNDAEKVFVVGDKVIGEGEWISLNGSTGEVILGKQPLSPPALSDDLEIFMSWADEIRHLKVMANADTPEDAVTARQNGAQGIGLCRTEHMFFASDERIKAVRMMIMAVTPEQRKAALDLLLPYQRSDFEGIFRAMDGLPVTIRLLDPPLHEFLPEGDLEHIVRELTSDTGMKEEEIFSRIEKLSEVNPMLGFRGCRLGISYPELTEMQARAIFQAAVSVSNHGITVHPEIMVPLIGTPQELRHQVNLIRNVADKVLSEMGSSLSYKVGTMIEVPRAALVADEIAKEAEFFSFGTNDLTQMTFGYSRDDVGKFLPIYLSGGILQHDPFEVLDQKGVGQLIKICTEKGRAARPNLKVGICGEHGGEPSSVAFFAEIGLDYVSCSPFRVPIARLAAAQVAV

SEQ ID NO: 53271 - protein, 548 aa, Zea mays
  Clone ID: 700799256_FLI.pep
EGLQSLEVMEVEPARRDAAALDPELLQLAELAPGALRENSIADALYSQWLVLPETTKLVKSLIDDAKTGAVLNVAGSSASTNAASSSSLPSMFPAGSAPPLSPRSTSGSPRVMRRGSGAGPSSLGSPLKLVSEPVREVIPQFYFKNGRPPTKDLKEQCLSRTDHLFFGGGGLQVQEFRSVTKDICKLPSFLSSVLFKKIDVECTRTVSRDAFVEYWINDNKVTMDMASQIFEILRKPGYTYLTQDDFKPVLKELLATHPGLEFLQGTPEFQERYAETVIYRIFYSINRSGNGHLTLRELKRGNLIAALQQLDEEEDINKVLRYFSYEHFYVIYCKFWELDADHDFLIDKENLIKYGNHSLTYRIVDRIFAQIPRKFTSMTEGKMGYEDFVYFILSEEDKSSEPSLEYWFKCIDLDGNGILTFNEMQFFYEEQLHRMECMAQEPVLFLDILCQMIDMIGPENESYLTLRDLKRCKLSGNIFNILFNLNKFMAFETRDPFLIRQERENPTLTEWDRFAHREYIRLSMEEDGEDASNGSGDVWDESLEAPF

SEQ ID NO: 53272 - protein, 592 aa, Glycine max
  Clone ID: 700555329_FLI.pep
RMLGLEHESKRGYIGLEYFGRTIFIKILPPGIHMGRLQSTLDHPSSSNKVREIHQQYKGKKLIVGVDDMDLFKGIGLKFLAMEQLLQQYPEQQGELILIQILNPPSSSDKDVEDAKEEAYISAKRINERFGLEGYEPIIIIDRHVPFYEKAAYYALAECCIVNAVRDGLNLVPYKYTVCRQGSSKLDEALEIASDSPRVSALVVSEFIGCSPSLSGAIRVNPWDIDAVAEALNLAITMPDGEKQLRHEKHYRYVSSHDVAYWARSFEQDLVFSCKDHYNNRCWGFGFGLNFRILSLSPSFRRLSIDHIVPAYERSSCRAIFLDYDGTVVPQASIVKPPSPEVISVLNNICSDVRNTVFIVSGRGKTSLSEWFDQCENLGIAAEHGYFIRWGKHTSWQMSHADTDFAWKKIAEPVMRSYMEATDGSSVETKESALVWHYRDADPDFGSWQAMELLDHLENVLANEPVVVKKGQHIIEVKPQGITKGSVAQEVLSSLTKKGKSPDFVLCIGDDRSDEDMFESILAKPYSTTSSSAPQIFACTVGQKPSKARYYLDDTVDVMALLEGLGATSGPKSRYSTETPFEKREVCFENDV

SEQ ID NO: 53273 - protein, 160 aa, Glycine max
  Clone ID: 700559803_FLI.pep
SHSKSRTASESISIFCLLLLKTKMPRGGGGSSGGGRSAHSARSHASRPVNHAPPPAPAQSDNRGSLFGTVAEGLAFGSGSAVAHRAVDSVFGPRTIQHEVAATGPPPASAANKLGGDACNVHAKAFQDCLNSYESDISKCQFYINMLAECRRNSGATLSA

SEQ ID NO: 53274 - protein, 127 aa, Glycine max
  Clone ID: 700749504_FLI.pep
TCSDFAFIMAWISSSNNTSLREVTVEIMAPIGLVVGIHGISGKSLNVVGCKAISSWLNWPTINSLAAHIVYVCLQSLVASICLWHTPFLTSYCRCRFCRSCRSCRCRSCRCNCLHLFIQKCLNNNIT

SEQ ID NO: 53275 - protein, 120 aa, Glycine max
  Clone ID: 700756762_FLI.pep
ELLFISFRAIGEPLNLVIGQIDTNHGFTQSAANLRQNLRVAVVSHGLNNRPGALRGIAALENAGADEDAVAAELHHERGVGGGGDSAGGEVDNGEAAKLLGLHDEVIRRSDVLGEGEDLV

SEQ ID NO: 53276 - protein, 645 aa, Glycine max
  Clone ID: 700835853_FLI.pep
QIAGPLFFLPPLVFCMYITGNLESVFPEEHRKEILRYTYYHQNEDGGWGLHIEGHSTMFCTALNYICMRMLGEGPNGGHDNACARARKWIRDHGGVTHIPSWGKTWLSILGVFDWCGSNPMPPEFWILPSFLPMHPAKMWCYCRLVYMPMSYLYGKRFVGPITPLILQLREELFTQPYEKVNWKKARHQCAKEDLYYPHPLIQDLIWDSLYIFTEPLLTRWPFNKLIREKALQVTMKHIHYEDETSRYITIGCVEKVLCMLACWVEDPNGDAFKKHLARVPDYLWVSEDGMTMQSFGSQEWDAGFAVQALLATNIIEEIGPTFAKGHDFIKKSQVKDNPFGDFKSMHRHISKGSWTFSDQDHGWQVSDCTAEGLKCCLLLSMLPPEIVGEKMEPERLYDSVNVLLSLQSKKGGLAAWEPAGAQEWLELLNPTEFFADIVVEHEYVECTGSAIQALVLFKKLYPGHRKKEIENFITNAVRFLEDTQTADGSWYGNWGVCFTYGSWFALGGLAAAGKTYTNCAAIRKAVKFLLTTQREDGGWGESYLSSPKKIYVPLEGSRSNVVHTAWALMGLIHAGQADRDPMPLHRAAKLLINSQLEEGDWPQQEITGVFMKNCMLHYPMYRDIYPMWALAEYRRRVPLPSTEV

SEQ ID NO: 53277 - protein, 284 aa, Glycine max
  Clone ID: 700830845_FLI.pep
GEEEEERNVQFEINTYDFKIDSGPVSLVVNACASRDLQDNIVGVCFVAQGITAQKTMMEKFPRIEGDYKAIVQNPNPLIPPLFNTDEFGWCCEWNSAMAKLTGWKREEVMDKMLLGEIFGTQIAGCRLRNHEAVVNFSIVLNTAMAGLETEKVPIGFFTRDGKHVECLLSVTKKLDAEGAVTGVFCFLQLASPELQQALHIQLLSEQTALKRLKDLNYLKRQIRNPLYGIMFSRKLLEGTELGAEQKQFLQTSTQCQRQLSKILDNSDLDSIIDGNIAEPDVWT

SEQ ID NO: 53278 - protein, 405 aa, Zea mays
  Clone ID: 700222622_FLI.pep
SGIVAGRCRILRPPSPTPDRIHPGTLAAQPATMARRSTPLLRRLLAPSPSLSTPLADAVSRRTVTYMPRPGDGAPRGVTLIPGDGIGPLVTGAVRQVMEAMHAPVYFETYEVHGDMPTVPAEVIESIRRNKVCLKGGLATPVGGGVSSLNVQLRKELDLYAALVNCFNLPGLPTRHDNVDIVVIRENSEGEYSGLEHEVVPGVVESLKVITKFCSERIAKYAFEYAYLNNRKKVTAVHKANIMKLADGLFLESCREVAKKYPGIKYNEIIVDNCCMQLVAKPEQFDVMVTPNLYGNLVANVAAGIAGGTGVMPGGNVGQDHAIFEQGASAGNVGNEKIVEKKRANPVALLLSSAMMLRHLQFPSFADRLETAVKRVIAEGKYRTKDLGGTSTTQEVIDAVIAKLG

SEQ ID NO: 53279 - protein, 379 aa, Zea mays
  Clone ID: 701185673_FLI.pep
VDFECSSGILLHIETRLEVQAPELEKDIMKTDIRGNPNGDASSDFLDSIEQYGNQFGPSEVSDFAAEVNDEADTLRKSKSAGWASTYMSRWRSILNSIADQVSQVPLSLAIKISSVRGTMRIHLKPPPGDRVWYGFTSMPEIEWELESSVGDRKISSSYIASLIGNRIKASVRQILVMPNCESFPISWMIADTDDWVPRRIAPFIWLNREPADRRAADTTREMMPGEASTSKAIAKNKSSPLPSTKRITNGSWNKTKIRVDGQEQEQAEASTSSQSWLVSANGDATREQLRMPLLSSSGDERAGPVEEQQASPSAAEEEGDAKKRKRRARVMDLGRRMGDKLEEKGKRFVGKMRENARNNRLLLPDLEQATTPPAPAPS

SEQ ID NO: 53280 - protein, 262 aa, Zea mays
  Clone ID: 700427308_FLI.pep
PYRSPNVASRAAAPRAPTRHGHCSGSSADQGRRASCSVVVVPAGAGDDAAVAGPVPRGGGHEPERARRRAAADRPVLRLAARARPEHRPRPAVRRAALELERGVEQRHRLPVRLRVLPHIPVRRGPPAARLEGPRRRLPGARPRRRLRLPRLVQLRLRPLLRGRRHRTPRQLELQWAAAACAELRGGGSAAGLLQVAGAGLLLHQHQWQQCQRRRFVFLRSRRWASGVRCPGSTCSWTLHVIWQSALILMVDSGEAFTISQY

SEQ ID NO: 53281 - protein, 57 aa, Zea mays
  Clone ID: 700445150_FLI.pep
EAFGGLLCLIMLLYGFYMLWFFLDLHRAYRLCCTALISGAYEDCFWFCCLCCNALKQ

SEQ ID NO: 53282 - protein, 153 aa, Zea mays
  Clone ID: 700421638_FLI.pep
GRYSGTEVRRTTTTTQAPHMASQLSAAVPRFHGLRGNAAPRSAVAALPSVRVGRKRSSSQGIRCDYIGSATNLIMVTTTTLMLFAGRFGLAPSANRKATAGLKLEARDSGLQTGDPAGFTLADTLACGAVGHILGVGIVLGLKNTGALDQIIG

SEQ ID NO: 53283 - protein, 106 aa, Zea mays
  Clone ID: 700580362_FLI.pep
ATSTSTTRRLTAAVATTTTPPTGRRRTSRTTTALRSRRRIATSTSTSRLLRPRITTTARRRRGAPSRRRGRATATCSTTRTPILAPSCEGRMHANMEVASLLTVPY

SEQ ID NO: 53284 - protein, 574 aa, Zea mays
  Clone ID: 700571722_FLI.pep
GFRDEGYREDPGGGGGWPDGVLVRVLPSFCDITWGAGGSTADLTLEIANRMQNMVCVETMMHLTCTNMPVEKIDHALETIKSNGIQNVLALRGDPPHGQDKFVQVEGGFACALDLVQHIRAKYGDYFGITVAGYPEAHPDAIQGEGGATLEAYSNDLAYLKRKVDAGADLIVTQLFYDTDIFLKFVNDCRQIGITCPIVPGIMPINNYKGFLRMTGFCKTKIPSEITAALDPIKDNEEAVRQYGIHLGTEMCKKILATGIKTLHLYTLNMDKSAIGILMNLGLIEESKVSRPLPWRPATNVFRVKEDVRPIFWANRPKSYLKRTLGWDQYPHGRWGDSRNPSYGALTDHQFTRPRGRGKKLQEEWAVPLKSVEDISERFTNFCQGKLTSSPWSELDGLQPETKIIDDQLVNINQKGFLTINSQPAVNGEKSDSPTVGWGGPGGYVYQKAYLEFFCAKEKLDQLIEKIKAFPSLTYIAVNKDGETFSNISPNAVNAVTWGVFPGKEIIQPTVVDHASFMVWKDEAFEIWTRGWGCMFPEGDSSRELLEKVQKTYYLVSLVDNDYVQGDLFAAFKI

SEQ ID NO: 53285 - protein, 200 aa, Zea mays
  Clone ID: 700578238_FLI.pep
GNPEYRGLPSFLFGQSMGGAVALKVHFKQPNEWNGAILVAPMCKIADDVVPPWPIQQVLIFMAKLLPKEKLVPQKDLAELAFKEKKKQEQCSFNVIAYKDKPRLRTALEMLRTTQEIERRLEEVSLPLIILHGEADMVTDPAVSKALYEKAKSQDKKLCLYKGAYHAILEGEPDQTIFQVLDDIISWLDQHSTKEEGISL

SEQ ID NO: 53286 - protein, 159 aa, Glycine max
  Clone ID: 700835986_FLI.pep
YEREDQNYIVSTRHYRAPEVILGLGWSYPCDIWSVGCILVELCTGEALFQTHENLEHLAMMERVLGSLPQTMMKRVDRHAEKYVRRGRLDWPEGATSRESIKAVMKLPRLQNLVMQHVDHSAGDLIHLLQGLLRYDPSERLTAKEALRHSFFMREHFRR

SEQ ID NO: 53287 - protein, 346 aa, Glycine max
  Clone ID: 700837706_FLI.pep
LPLPLLLSPMVSESELIGRLREFLRSSDLNTTTTATVRRQLEADFGIDLSDRKAFIREQVDLFLQTEHNQPQQEERQNDDVEEQEEDAPNNPEQSQPSDSKEETDEEEEGEEEEDKPEQAKNAKKNKGRSNKLGDEVVKKRGGGFCKLCSLSPQLQEFMEAPEMARTEVVKQLWVYIREKNLQDPNNRRNIICDERLRSLFNVNSINMFQMNKALSKHIWPLESDDVVQVKSTPKEKQKKQERDDDSDEAKKKEKRQKGGGKSGFLAPLQLSDALVNFLGTGESELARTDVIKRMWDYIKGNNLQDPSDKRKIICDEKLKELFDVDSFTGFTVTKLLAPHFIKTEQ

SEQ ID NO: 53288 - protein, 422 aa, Zea mays
  Clone ID: 700551173_FLI.pep
GECTKSKLWLIDLAGSERVAKTDAQGERLKEAQNINKSLSALGDVISALATKTSHIPFRNSKLTHLLQDSLSGDSKTLMFVQISPNENDVGETLCSLNFASRVRGIELGQAKKQVDIGELSRYKLMVGRAKQDSKNKDAQIKSMEERIQILEAKNKAKDLLTMNLQEKIKELESQLLVERKIARQHVDNKIAQDHLQKQHGMKEENSYPRSPMAERNLNSTAEKAAAPKDLGGISKQMFSDSNTDTYSFKQLMSLGDEKENDPEAAVQLPPTTKARRVSLCNGGAHQRPLNPASRRTSLIPLPRRNSLLPMPVAKPAAAVLPLDKITENLSSPPLCSPPAVSNDRGSRSRRINSILRRSLQKKVVIRPSLAAQAGKKAAGAAAAARGTDSARRAARRVPVSDGAGGHKVQQNRDKERGWSNF

SEQ ID NO: 53289 - protein, 122 aa, Glycine max
  Clone ID: 700832864_FLI.pep
KNSSFYQTDGAEDLLSYAWQLWKDGTPLELMDPILRESYNQNEVIRSIHIGLLCVQEDPADRPTMATIVLMLDSNTVTLPTPTQPAFFVHSGTDPNMPKELPFDQSIPMSVNDMSISEMDPR

SEQ ID NO: 53290 - protein, 584 aa, Zea mays
  Clone ID: 700473036_FLI.pep
GFVEDMASTFGATSTVGLMAAPTGKNVRLQRRANFRVKAAKELYFNKDGSAIKKLQTGVNKLADLVGVTLGPKGRNVVLESKYGSPKIVNDGVTVAREVELEDPVENIGAKLVRQAAAKTNDLAGDGTTTSVVLAQGLIAEGVKVVAAGANPVQITRGIEKTAKALVEELRKLSKEVEDSELADVAAVSAGNNYEIGNMIAEAMSKVGRKGVVTLEEGKSSENFLYVVEGMQFDRGYISPYFVTDSEKMTAEYENCKLLLVDKKITNARDLINVLEEAIRGAYPILIIAEDIEQEALATLVVNKLRGSLKIAAIKAPGFGERKTQYLDDIAILTGATVIRDEVGLSLDKADKSVLGTAAKVVLTKESTTIVGDGSTQEEVTKRVAQIKNLIEAAEQEYEKEKLNERIAKLAGGVAVIQVGAQTETELKEKKLRVEDALNATKAAVEEGIVVGGGCTLLRLAAKVDAIKDTLENDEQKVGAEIVRRALSYPLNLIAKNAGVNGSVVTEKVLSNDNFKYGYNAATGQYEDLMAAGIIDPTKVVRCCLEHAASVAKTFLTSDVVVVDIKEPEATPVANPMDNSGYGY

SEQ ID NO: 53291 - protein, 363 aa, Zea mays; identical to SEQ ID NO: 42242
  Clone ID: 700572857_FLI.pep

SEQ ID NO: 53292 - protein, 570 aa, Glycine max
  Clone ID: 700829816_FLI.pep
FQMASSTLICDTQQWKELKAHAEDVEKTHLRDLLSDDERSQSMVVEFDGILLDYSRQQATLETREKLFKLAEVTSLKQKINQMYNGEYINSTENRSVLHVALRAPRDAVIQSDGNNVVPDVWNVLDKIQEFSERVRSGSWVGATGKELKDVVAVGIGGSFLGPLFVHTALQTDPEAIESARGRQLRFLANVDPIDVARNITGLNPETTLVVIVSKTFTTAETMLNARTLREWISNALGPLAVAKHMVAVSTNLTLVEEFGIDPNNVFAFWDWVGGRYSVCSAVGVLPLSLQYGFSVIEKFLKGASSIDQHMYSEPFERNLPVLLGMLSVWNVSFLGYPARAILPYSQALEKFAPHIQQVSMESNGKGVSIDGVPLPFEAGEIDFGEPGTNGQHSFYQLIHQGRVIPCDFIGVVKSQQPVYLSGEVVSNHDELMSNFFAQPDALAYGKTAEQLQKENVPPHLVPHKTFSGNRPSLSLLLPSLNAYNIGQLLAIYEHRVAVEGFIWGINSFDQWGVELGKSLASQVRKQLNASRTKGEPVQGFNFSTTAMLTRYLQASADVPADLPTRLPQI

SEQ ID NO: 53293 - protein, 259 aa, Zea mays
  Clone ID: 700548345_FLI.pep
AVKEPAFVALPGSDLLRRNEMAHQGPGVPKFGSWEDEGDHPYTQYFENARKGKSPGRSATQNEHRTGDPEALFKEDTTPSAKASPLRTGSEDPVAPKPKDAAFARGKPYAEPATHKHGANTSYERKTGMERSPLHPHHQARLVNRGGVSSPSWERRGSSEGNRGAAPTTPGRSSKMRPGGRGDETPERGSAVPKFGEWDEKDPSTGEGFTDIFNKVREEKQSGDAPVITSGNAGGGYSRSNQGRKYESSACSCFSWFRN

SEQ ID NO: 53294 - protein, 361 aa, Zea mays
  Clone ID: 700552771_FLI.pep
EGVRQVEIETDSASAFPPLGFISSSQGKERAAAMWVEILCGLVVYKIIQRVFFAGGDDASYLADLDSSHSDLCFAVASRLEKLYAGRCFVGLRIPDPDAGERQHIDVVLVTKREVMVVAIKNLSGFVEADKDGNWSCPTDKKHKHEIFPNPVLEVNRLAANLQSYLEQRGAKLPDGHIIGRVVLPNPNCRPSYTISTQPEVMLYDQWKDLKTDSKTGLSAWIKGAFTGSRSDMQDSVLQNLHFILSSSPMWDRLELKGDKNVLGEFIEFKGRHEDVQLLKILKRSKVSRFIIQKSTLFGGFGRSRVQILYSPRDYRAEGTSSSELKEISVKQYTEIVFQPLRSKKARKFKLSNVVSVTLSA

SEQ ID NO: 53295 - protein, 774 aa, Zea mays
  Clone ID: 700342321_FLI.pep
ACQAGPASNSGGNCQGSPALLVVLKKKMMVGSSRHQLLQRKGKSVADKGAAAATTVAAEKVVVAVRAATREISKTAIIWALTHVVQPGGSIILLVVIPAHSSGRKFWGFPLFAGDCASGHKSMLDQKCDLSELCSQMLKKIDVYDIDKINVRYKLVSGSPSGVVAAECKQAQASWVVLDKDLKHEEKRCVEELQCNIVVMKRSQPKVLRLNLVGSPDKESKATCVVPPVLDGSTSKIATDVKEARSSIRGPVVTPNSSPDLETPFGSTEAGTSSVSSSDPGTSPFSASETNGSLKKEVQQTKDKIQHSDANISDSDSETLSPPANFSLQPWMSDILQGSASSRSLGKVPRKTRTADVLLEKFSKLDLLNEINAMRSRSDLNFRGDVRDVVLLARNAPPGPPPLCSICQHKAPVFGKPPRWFSYAELELATGGFSQANFLAEGGFGSVHRGVLPDGQAIAVKQHKLASSQGDVEFCSEVEVLSCAQHRNVVMLIGFCVEDRRRLLVYEYICNRSLDSHLYGHNRETLEWTARQKIAVGAARGLRYLHEECRVGCIIHRDMRPNNILVTHDFEPLVGDFGLARWQPDGDMGVETRVIGTFGYLAPEYAQSGQITEKADVYSFGVVLVELVTGRKAVDINRPKGQQLLTEWARPFLEEYAIDELIDPRLGERYSENEVYCMLHAANLCIRRDPHSRPRMSHVLRILEGDMVVESGGSVTGSSDSGSRSWRMLNEQQHCQEYSSPAQQESQRAGEGKRSYSALRASWDRDKQSISNRY

SEQ ID NO: 53296 - protein, 823 aa, Zea mays
  Clone ID: 700451030_FLI.pep
GSRKRTAMGEGAGDRVLSRLHSVRERIGDSLSAHPNELVAVFTRLKNLGKGMLQPHQIIAEYNNAIPEAEREKLKDGAFEDVLRAAQEAIVIPPWVALAIRPRPGVWEYVRVNVSELAVEELRVPEYLQFKEQLVEEGPNNNFVLELDFEPFNASFPRPSLSKSIGNGVQFLNRHLSSKLFHDKESMYPLLNFLRAHNYKGMTMMLNDRIRSLSALQGALRKAEEHLSTLQADTPYSEFHHRFQELGLEKGWGDCAKRAQETIHLLLDLLEAPDPSTLEKFLGTIPMVFNVVILSPHGYFAQANVLGYPDTGGQVVYILDQVRAMENEMLLRIKQCGLDITPKILIVTRLLPDATGTTCGQRLEKVLGTEHCHILRVPFRTENGIVRKWISRFEVWPYLETYTDDVAHEIAGELQANPDLIIGNYSDGNLVACLLAHKMGVTHCTIAHALEKTKYPNSDLYWKKFEDHYHFSCQFTTDLIAMNHADFIITSTFQEIAGNKDTVGQYESHMAFTMPGLYRVVHGIDVFDPKFNIVSPGADLSIYFPYTESHKRLTSLHPEIEELLYSQTENTEHKFVLNDRNKPIIFSMARLDRVKNLTGLVELYGRNKRLQELVNLVVVCGDHGNPSKDKEEQAEFKKMFDLIEQYNLNGHIRWISAQMNRVRNGELYRYICDTKGAFVQPAFYEAFGLTVVEAMTCGLPTFATAYGGPAEIIVHGVSGYHIDPYQGDKASALLVDFFDKCQADPSHWSKISQGGLQRIEEKYTWKLYSERLMTLTGVYGFWKYVSNLERRETRRYLEMLYALKYRTMASTVPLAVEGEPSSK

SEQ ID NO: 53297 - protein, 374 aa, Zea mays
  Clone ID: 700203055_FLI.pep
SSRTTSRRQSGNSQSVGSTGTDSSSAQNTMSQMELVSPASSAPRQEVMMVTTDDYSYKPGLAAAPAAAAPPSFQQHHPLPLQLHGGEGGGDHDKTERRLAQNREAARKSRLRKKAYVQQLETSRIRLQQVEHELQRARSQGLFVGGCSAAGDMSSGAAMFDMEYARWLDDDTKRLAELRGGLQAHLLDGNLGLIVEECMQHYDELFQLKAALARSDVFHLLTGSWATPAERCFFWMGGFRPSELLKILIPQLDPLTEQQLLGICNLQQSSEQAEEALAQGLHQLHQSLADTVAAGTLNDGAAAPNYMNIMAVALEKLASLENFYQQADNLRHQTLHQMRRILTTRQAARCFLSIGEYYSRLRALSNLWASRPRE

SEQ ID NO: 53298 - protein, 226 aa, Zea mays
  Clone ID: 700105321_FLI.pep
GLSQDITNIARQKNRWNTLLEKGTSTACRTTTLQQHQWKSPWMSSLQADGISTSPSSISCCRSLGSLPSTVHPTLTQVPRISLTVPANSLAMDLFLMVLAISTTSSRPMLPLCLMFLTFFLSLSGSLSALMTSAAAEGTTETLAWRFWTVSLTVTRRPFQSLAVSLAMSSPIFFGERPSGPILGARDDAAPTSPPVTRTKTSTTCDGSSLGGMAAAAGVWVGFGKW

SEQ ID NO: 53299 - protein, 329 aa, Zea mays
  Clone ID: 700240195_FLI.pep
RAHPPTIAMAGGSSLKNMVVAFLVPLPSILFYLSFVRAGGDTGASPLASWCAAHPLVLANVLFFLNVDVLFWLVGLLLSNHWLIDLYWTVIPVMLLHYYRGHPASVADAARSAVAVALTWAWSARLTHNYLRREGWELGKREDWRFNEMRAQYGNTWWWMSFFAVYLSQQVFLIGICLPMYAIHSSNQPWGVWDLVAAATCVAGILIAHFADTQLHRFVTRNEKLKRLGEPTVPTLEDGLWRYSRHPNYFGEQLWWWGLYLFAWNLGQRWMFLGPLVNSLCLGYVTVLVERRMLKQEHRAEAYKLYQKRTSVWIPWFRKAVPESKLKET

SEQ ID NO: 53300 - protein, 221 aa, Zea mays
  Clone ID: 700240224_FLI.pep
PPKHQTSVHDDVVQRGHGVLAPVHGERLHPHKGHRRRQVHRVAGVRRGRPPLVRRVLPGRRRPGREGPHLYLRQAHRQRRRRRRHGALRLQPRRPEWRRAGVGGLQGPQGRHVQTFGGRRLQRYRPLHGAPEVRGVSVPAGRLLHHQVYHRRRREARPAAAAGGGLGTAPRFRPTCSRRRPFGGRHVRRRLRKPCCCALCYAPLPLCNERSCAGVSSAQGR

SEQ ID NO: 53301 - protein, 135 aa, Zea mays
  Clone ID: 700096384_FLI.pep
NTFEVALRQLEAKLHGSEASHKHCKLCLAKLLNMVWWTETYETRFGKPQYEFISSSPLNYRADTAVDNLGHPLRSLLGEQLFPGLGLGLRLGSHDATSPLLPDLIELVVEVCLNSLQNLAELKLILVLDSGKTQD

SEQ ID NO: 53302 - protein, 349 aa, Zea mays
  Clone ID: 700154889_FLI.pep
RRQVGDSGERSAGAAMADKPSRALVVYAAGHAAALIPPPGSAAAGSHLDAFASRACCGLLTLRSPPTSHPTTGTEDNSSTILELAQLLDVYDHLYPGKNAESGQEVAQVDPQELVVPKLSERFMGLRAALVTSCPHVSSLAANLGFHVFKTNDFAPQSGSSSITKEDGLIKRAFDLLGFSDGDVQETSEFDLVFMHVAMENTSSKLGKLGMKTDINRLDKLVGAVLESAPVGSAIASRIHVSVILSYGSASGNKDEFSLLTSSTETDSDLKLLRPRQSYTMKTGRTLDDVRLHHPILLAQWQDGVTRVDLAKGFSFEEFMKRGGNLAMLAERFLHEVAFKLWKAPKYGA

SEQ ID NO: 53303 - protein, 330 aa, Zea mays
  Clone ID: 700155571_FLI.pep
SLEAARGLLEALRSLRARGSRTIPTFLGRLRARALVGIVVSSGTVAMRSSVARLIRSSSASPSRLSGNAFFGNATPSDQRHIEKPFKVKEAEPVNVTKPSPHKLLVLGGSGFVGSHVCKEALDKGLVVSSLNRSGKPSLNEPWADKVIWNQGNLLEPASLKDAMDNVSAVVSCVGGFGSNSFMYKINGTANINAIRAAAEKGVKRFVYVSAADFGLVNYLLQGYYEGKRASEAELLSKFTYGGVILRPGFIHGTRRVGSVKIPLGLVGSPMQMVLQNIKPLTRLPLIGPLLTPPVSAASVGKVAVRAATDPVFPPGIVDVYGIMRYSEQN

SEQ ID NO: 53304 - protein, 139 aa, Zea mays
  Clone ID: LIB4071-009-G8_FLI.pep
DLFNRLTQTCTPSPSPPSKTLAWRVGVEARLLVTTSSFSAAREIPGFRSLPLRAAAMAGKGGSTNLEKEQMFGMAEKEMEYRVDLFNRLTQTCFNKCIEKRYKEAELNMGENSCIDRCVSKYWQVTNLVGQMLGNRPQM

SEQ ID NO: 53305 - protein, 260 aa, Glycine max
  Clone ID: 700732741_FLI.pep
FNEVFKSIGLNGVYLFLLVDDLANFLRTYSSTDFVGFSVTIPHKETALKCCDEVDPVAKSIGAVNCIVRRPTDGKLIGYNTDYVGAITAIENGLRGKHNGSSTTISPLAGKLFVVIGAGGAGKALAYGAKAKGARVVIANRTYDHARKLAYAIGGDALALADLDNYHPEDGMILANTTSIGMQPKVDETPVSKHALKYYSLVFDAVYTPKITRLLKEAEESGATIVTGLEMFMGQAYGQYENFTGLPAPKELFRKIMENY

SEQ ID NO: 53306 - protein, 205 aa, Glycine max
  Clone ID: 700835534_FLI.pep
QGEGRVGTRRDFILKDYATDEVIGRATSKWVMMNQDTRRLQKVSDDVKEEYLVFCPREPRLAIPEADSNSLKKIPKLEDPAQYSRLGLVPRRADLDMNQHVNNVTYIGWVLESMPQEIIDSHELQSITLDYRRECGQHDIVDSLTSVEAIQGGAEAVPELKGTNGSATAREDKHEHQQFLHLLRLSTEGLEINRGRTEWRKKAPR

SEQ ID NO: 53307 - protein, 134 aa, Zea mays
  Clone ID: 700165260_FLI.pep
TPVTRRLDFWLRQHNSSGGGDSNQRLQHHASSRARCRTPDVRRHSIKRSCCPGRLADVGMYGCTRARPNPQFHVSVQRPSRNSESPILQQYRHTRYICTRLQANRHTTSSLLQRIPQKIIIYLFLSFCKLSCEN

SEQ ID NO: 53308 - protein, 497 aa, Zea mays
  Clone ID: 700166013_FLI.pep
LSTHHSTQAILRTSVGEMEAAAAAETGLAQKPVVLYPSPGMGHLVSMIELGKILGARGLSVIIVVVEPPFNTGATAPFLAGVSAANPSISFHRLPKVERLPPVKTKHQEALTFEVTRVSNPHLREFLAAASPAVLVVDFFCSIALDVAEELRVPAYFFFTSGAEVLAFFLHLPAIHERTAASFQDMGKELVHVPGIPSFPATHCILPTMERDDVAYDGFLKGCTDLCRSQGIMVNTFRSLEQRAVETVAAGHCTPPGLPTPPIYCIGPLIKSEEVLGKGGEECLAWLDAQPRASVVFLCFGSIGRFSVEQIREVAAGLEASGQRFLWVVRAPPSDDPAKKFERPPEPDLDALLPEGFLARTKDRGLVVRSWAPQRDVLAHASVGGFVTHCGWNSVLEAVMAGVPMVAWPLYAEQRLNRVFLEKEMQLAVAVEGYDSDEGIVAAEEVAAKVRWLLESDGGRMLRKRTLAAMRQAKDALREGGESEATLTGLVDEWKRI

SEQ ID NO: 53309 - protein, 176 aa, Zea mays
  Clone ID: 700172340_FLI.pep
ERELCLGGGKMNRKPGDWDCRACQHLNFSRRDACQRCSEPRGVGDRSGGGGDLGGRGGSSFGGGFGAGSDVRPGDWYCSCGAHNFASRSNCFRCSAYKEEAAGAFDSDMSRSRGYAGFGSGAAARTNRPGWKSGDWICTRSGCNEHNFASRMECFRCNTPRDSGSAATTTYENYLH

SEQ ID NO: 53310 - protein, 273 aa, Zea mays
  Clone ID: 700221993_FLI.pep
VGRLRLLVVGGGELLVGVGDEEQLVDDAGEAAADEGPDPVHPLVAPLPADEGGAEGHGGVHGRAVEGAAHQDVGPHDEADGNGGDGAQAALLRVHRRGVHRVHQPEGHHDLQHQRLPHRHARQPEGARGLPARREAEQEARHGGPQQLRHPVQEPPEQGDVAAHEGAEGHGRVHVPAGDVRAHRHRHEQRERVRHRRRDQARRGRRAAAGQLAEGHAGALAGEDEDEGGDELSERRLEGARVVHLLVAPQGDPIDRHFHGPLASSRALVTTVI

SEQ ID NO: 53311 - protein, 287 aa, Zea mays
  Clone ID: 700102039_FLI.pep
APTKLSGEARAAQLGRCSTRGMDGSAGSFVAVRRLSGSDRAAAFHHSSSAEVVTGSTAWIGRGLSCVCAQRRDSDARLSFDLTPVQEECLQRLQNRIEVQYDSANREHQEALQSLWCASFPGTELRGLISEQWKEMGWQGKDPSTDFRGGGFISLENLLYFARNYPKSFQELLRKQNGDRAIWEYPFAVAGVNITFMLIQMLDLQSVKPRSLFGAVFLKLLSENDQAFDILYCITFKLMDQQWLDMHATYMDFNTVMKSTRRQLERELLIEDIQRIEDMPSYRLLAR

SEQ ID NO: 53312 - protein, 580 aa, Zea mays
  Clone ID: 700240631_FLI.pep
GRGSVRTQLLRLQRCSRRGSDEPPTPPINPNRVLCFCSHPSVECNMQCPVDTAASGTSPVMQFHSNADESIAHSSPLATLIQRSQRHCYGDGTPGEFPLAVSPSIVLHVLSSCDLGPKDLANLEATCVFFGKPASFAPDFALSLPELAAFDMCQKRTMFKQMKQEDQECLKQRCGGSWKHVLGYILVREKNGSRVIAGPGHSIIITSNGDVYSFGANCSGQLGLGDSEDRFKPCVIRSLQGIRITQAAVGSRCTMLVSDTGSVYSFGKEDFRVAELVDGAHFQITTPRIEESLKGVFVVQAAIGGYFSAVLSREGRVYTFSWGKAERLGHSSDPSDVEPRLLPGLEDVPVAYISAGNCYLLMLAYQPNGMSVYSVGCGLGGKLGHGCKTNNGMPKLVEQFQSMSFKPVSIAAGTWHAVALGADGRVCTWGWGHTGCLGHGDEECRAVPTVVEGLRDVKAVHVSTGEYTTFVVAENGDVYSFGSGESLAFQLDDEAEEEPDSSTPSIVSSLKDLNKKVVQISHTNASYWMNSEMGHPHTFAVMDSGDVCAFGGGVRGQLGVKLHEGVEKVRVPMNVPIGLN

SEQ ID NO: 53313 - protein, 367 aa, Zea mays
  Clone ID: 700241180_FLI.pep
TPAAAANQRGEREMKGVGGGAASPGDYVYFKSVVPLHKISIGSKLWRYYDFGPKVVPPLVCIPGIAGTADVYYKQIMSLCMKGYRVISIDVPQVWNHHEWIHSFEKFLDSMNIHHVHIYGTSLGGFLAQIFAEHRPRRVKSLVLSNTFLETHKFAAAMPWSPVVNWTPSFLLKRYLLTGIRDGPHEPFIADSVDFVVGQVETLSRDDLSSRLMLNVNVASVGSLMLPDSLITIMDTNDYSAVPQQLKEQLNERYPGARRAVLKTGGDFPFLSRPDEVNLYLQLHLRRVGVEPRSDLVQGFTRNGSAGSSKDQKDGGDSFDNSGGDNGHHGSGGSDHDRRHCASESHHSDEPIPTSTMLANTVLELVM

SEQ ID NO: 53314 - protein, 157 aa, Zea mays; identical to SEQ ID NO: 47761
  Clone ID: 700076636_FLI.pep

SEQ ID NO: 53315 - protein, 327 aa, Zea mays
  Clone ID: 700333522_FLI.pep
SQIHKEEQESYTRRKKKNTQQNKELTGGRISVAGALGGESLREPPPILAVVVAHEVALRPPDGAPLGAVKLPVHPPAAAGGPARAAADAGAGVVAAVGDDEGRVGPVDADPALLGGPVAAVPQRGVQRHGPGARVRQVGVALEGADEEVVDLEQDVGRVPDDGVGVVVGGGVEPEVELVLLLAVAAGPHVGVQHHRLPARVAHELHVDLVAPVAVAGREVEARDGAGGVPPDELHLDAELAVKVLLLGVEAGSAGVLVEAEHHHLLARIVVSRADGAVRGEPPVKPRRLGRGGVQEREGGDGEHCQQRTRCHGVCVCVAALELFSET

SEQ ID NO: 53316 - protein, 276 aa, Zea mays
  Clone ID: 700334279_FLI.pep
SNTLQLQASIISISVMTKKLVSISTMAGKQGCKEQSNDRRIQASIQGDAKSVVVGFGGRLVSREQEDAIIVAALRHVVSGYSTPPPEVVVTVAGGEACGTCGIDGCLGCDFFGAPELAQEAVSCGTGQVATTASVGGGAAAAALRPRRRRNRNMYRGVRQRPWGKWAAEIRDPRRAARVWLGTFDTAEEAARAYDCAAVEFRGPRAKLNFPGHEALFQGHGDTAAAADTETLTPSPGEWQLGGGAGDELWEGLQDLMKQDEVDRWLAPVFGAASSF

SEQ ID NO: 53317 - protein, 228 aa, Zea mays
  Clone ID: 700334343_FLI.pep
HGLRGRVDAGGRGRRRGRHAARHHVPPPAHLRGQLRPAARHLRGAAVPRRAPRGRGHVRVRARRRRHPHEVDPPRLERRALRHAAQELLRRAAGKWQGHRRRVRAAGQHGGHPQGAGRLPRRHDHARAQPRRQGAVRARVPRARKGRRLLRVQGHLHLRQRLGHRVHQVNHRRRDEMAWLPHALLAWSSYRTSPSSSSSGYCAATSLLSRMHVLLLNFLSSYHALWLA

SEQ ID NO: 53318 - protein, 458 aa, Zea mays
  Clone ID: LIB3912-027-D12_FLI.pep
GGRRRARACGAGGLAMGEVAALRQLVGQVQELWDLYGANGNPVPRWYLPDFEHGSIKDDYCGGSSGYNSELLKIMETNQSPPCKRPRRDRNREKAPSSNKIEVMEQEIWRDFPEDLFETVIARLPVAAIFRFRTVCRRWSSLLGSDSFSRQYSEAPHGLPWFYTITHENSNNNVAMYDPLLKKWHHQSVPLNHTKIVIPVASVGGLVCLLDLSHRNFYICNPLTQSLKEIPPRSVHGWSRVVVGMVLNGRSSSDGYKVMWLDIDGTCEVYDSTKNVWSCPGTFPPSIKLPLALNLRSQPVAVGSMIYFMCAEPDGVLSYDVSTGIWRQFAIPLPLHLTDHTLAEFQGRVMLVGLLCKNAATCICIWELQKMTLLWKEVDRMPNLWCLEFYGKHMKMKCLGNSGLLMLSLKAKHMNRLVTYNLLKREWQKVPDCMLPWSRKRQWITCGTAFDPVPCALV

SEQ ID NO: 53319 - protein, 249 aa, Zea mays
  Clone ID: LIB3607-032-H2_FLI.pep
SIHPSIHHHPAAAMCGGAILSGFIPPSGVAAAAAAAKKQQQQQQRCRVTADLLWPGPGSKGAPPKDVQGDRAVKKRGRKNQYRGIRQRPWGKWAAEIRDPNKGVRVWLGTYNTAEEAARAYDAEARKIRGKKAKVNFPDDATGTRHRPTTDEIFNNLKNDDNNNNDDLFAMFAFGDNKKKVPAAKPAAAEGGSGSGSFLVPAPAVAVVPGNKRRSSATNTMLSVSDDQRSNSYGSGSSDLVGSWSWDDD

SEQ ID NO: 53320 - protein, 210 aa, Zea mays
  Clone ID: LIB3595-028-D11_FLI.pep
SDTIDNVKAKIQDKEGIPPDQQRLIFAGKQLEDGRTLADYNIQKESTLHLVLRLRGGMQIFVKTLTGKTITLEVESSDTIDNVKAKIQDKEGIPPDQQRLIFAGKQLEDGRTLADYNIQKESTLHLVLRLRGGMQIFVKTLTGKTITLEVESSDTIDNVKAKIQDKEGIPPDQQRLIFAGKQLEDGRTLADYNIQKESTLHLVLRLRGGQ

SEQ ID NO: 53321 - protein, 526 aa, Zea mays
  Clone ID: 700355830_FLI.pep
GSKEDANRRLEWATLNLERGVVVSETTKGDGNGNAGRKAPISIVRLFLACMVSGGIQYGWALQLSLLSPYSQTLGISHSYVSLTWICGPIAGFVVQPIVGYYSDRCTSKMGRRRPFILAGCIIICLSVLVIGFSADIGRRLGDTKEHCSTFTGSRWSAAAVYIVGFWFLDFANNTVQGPARAMMADLAAGQHGPNVGQAIFSLWMALGSVLGYLSGANAKWHDWLPWLKTAACCDACANLKGAFLTAVVLIIISMSVTLWLAGEERLDKESVDTSGGACSAFMDLFKTLKKLPPAMFSVLAVTAVTWLSWFPFFQYNTDWMGREIFHGEPQGAGGKADLYEAGVREGAIGLLFCSVALGVTSFFIPRLCRKLTSRVVWSVSSLMVFVLMTAMVVLGMVSMKGYRPSLAASLSGPDHSFKGGALAIFALIGIPQAVLYSVPWAVASEVATEDGGGQGLTIGVLNIAIVLPQLVIALGAGPIDGAFNKGNTPAFGIGAAFALICAVLALILLPKTRGVSNATVMAGGH

SEQ ID NO: 53322 - protein, 234 aa, Zea mays
  Clone ID: 700152587_FLI.pep
TATPLPWGTRMSIALGAAKGLACLHNAQRPVIYRDFKTSNILLDSDYTAKLSDFGLAKDGPEGDQTHVSTRVMGTYGYAAPEYVMTGHLTARSDVYSFGVVLLELLTGRKSIDKSRPSREQSLVDWALPKLNDKRRLLQIIDPRLEGQYSARAAHKSCSLAFYCLSQNPKARPLMSDVVETLAPLQQGGGGGSDASSGLPDCRGRRRLTGNSVVHFRAIPNPKCTPVVPACRVR

SEQ ID NO: 53323 - protein, 338 aa, Zea mays
  Clone ID: 700154910_FLI.pep
GYAIAMGSVASAAAPPSPHSALPQEGAPPYGPGLAGILPQTSVGEEKKEEKVDYLNLLCPVPFEEIQREALMSLKPELFEGLRFDFTKGLNQKFSLSHSVFMGSLEVPAQGSETIKVPTAHYEFGANFLDPKLMLIGRVMTDGRLNARVKCDLTDNLMLKVNAQLTQEAHYSQGMFNFDYKGSDYRAQFQIGNNAFYGANYIQSVTPNLSMGTEMFWLGHQRKSGIGFACRYNTDKMVGTLQVASTGIVALSYVQKISEKVSLASDFMYNHMSRDVTSSFGYDYLLRQCRLRGKIDSNGVVAAYLEERLNMGVNFLLSAEIDHCKKNYKFGFGMTVGE

SEQ ID NO: 53324 - protein, 232 aa, Glycine max
  Clone ID: 700854533_FLI.pep
SYDITAACSGFVLGLISAACHIRGGGFNNVLVIGADALSRYVDWTDRGTCILFGDAAGAVLVQACNSEEDGLFGFDLHSDGSGQRHLNASIKENESNNALDSNGSVFGFPPKQSSYSCIQMNGKEVFRFAVRCVPQSIESALEKAGLPASSIDWLLLHQANQRIIDAVATRLELPSERVISNLANYGNTSAASIPLALDEAVRSGKVKAGQTIATAGFGAGLTWGSAIIRWG

SEQ ID NO: 53325 - protein, 177 aa, Zea mays; identical to SEQ ID NO: 48026
  Clone ID: 700217987_FLI.pep

SEQ ID NO: 53326 - protein, 414 aa, Glycine max
  Clone ID: 700763807_FLI.pep
VEATQVKYGKNMPVAAAAAAAAAVVASSMVVAVTKSNADSNLEIPVAAAATATAAAVVATTAAVSKQYEQGSWSGGDTEGAGCEPKCSGDGEHNALGENTEGERKSDRSVSNDSTKSDSALDDVAEYDIPWDEIAVGERIGLGSYGEVYRGEWHGTEVAVKKLLYQDISGELLEEFKSEVQIMKRLRHPNVVLFMGAVTRPPNLSIVSEFLPRGSLYRLIHRPNNQLDERRRLQMALDAARGMNYLHNCTPVIVHRDLKSPNLLVDKNWVVKVCDFGLSRMKHSTFLSSRSTAGTAEWMAPEVLRNELSDEKCDVFSYGVILWELSTLQQPWGGMNPMQVVGAVGFQHRRLDIPDNVDPAIADIIRQCWQTDPKLRPTFTEIMAALKPLQKPITASQVHRLSVQSSRVAEDPAG

SEQ ID NO: 53327 - protein, 321 aa, Glycine max
  Clone ID: 700834874_FLI.pep
TNDFDEALLIGTGGFGSVYKGSFDGGATSVAIKRANPMSHQGVSEFETEILWLSQLRHANLVSLLGYCNEDGEMILVYDFMDNGTLYEHLHLRQRDQPPLSWIQRLEICIGVARGLHYLHTGTKHRIIHRDIKTTNILLDHNWVPKISDFGLSKAGYPSILITNVKGSIGYLDPECFQSHKLTEKSDLYSLGVVLLEILSTRPAVIVGEDDEHVNLAEWAMLCFENGNLEQIVDPNLKGNIVEECFELYLGFAMKCLAERGVERPSIGEVLQNLVLAMHLQKKGGVVPDGNVQRNDNSGLQGYSDLTPGVEFSEIMMPVGR

SEQ ID NO: 53328 - protein, 269 aa, Glycine max
  Clone ID: 700906513_FLI.pep
ERLTRVFTQKIHDLIGTHTDVPAPDMGTGPQDLGGSLGRDAATGRGVLFATEALLNEYGKSVSGQRFVIQGFGNVGSWAAQLISNKGGKVVAVSDITGAIKNSNGLDIPSLLEHSKVHRGVKGFNGSDPIDPNSILVEDCDVLVPAALGGVINRENANEIKAKFIVEAANHPTDPEADEILKKKGVVILPDIFANSGGVTVSYFEWVQNIQGFMWDEEKVNNELKTYMTKGFIDVKEMCKTHECDLRMGAFTLAVNRVARATVLRGWEA

SEQ ID NO: 53329 - protein, 176 aa, Zea mays
  Clone ID: 700210945_FLI.pep
LGRFRLGVDPYSNSQAQYCQGDQKLEDLDDELRGLILVVVRLLGGRVLHLTGYRGRINLTDEVLVHHCTGGGAVPHIFEIIGSILGSGRQQDIITSRVVLQKLGHIVHLAADDEPAVVLGVVLGHLLKGVHLRSRHPPPLPLVTDGVWLLREAEEEPAAAACFGSDPIRRRLEQDD

SEQ ID NO: 53330 - protein, 84 aa, Zea mays
  Clone ID: 700050905_FLI.pep
SLEHTSRIHLLQASLANSSTGDFLSSIWMVTTSSTTAATATIACPSTIESTGAKPITSISPGRVITTTIARTTIAPSITLICTS

SEQ ID NO: 53331 - protein, 271 aa, Glycine max
  Clone ID: 700751282_FLI.pep
NFSIVMGTSILDALNVRVEGSGDKYLVLAHGFGTDQSAWQRVLPYFTRNYSVILYDLVCAGSVNPDHFDYRRYTTLDAYVDDLLNILDALRVPRCAYVGHSISAMIGMLASIRRPDLFSKLILIGASPRFLNDKDYHGGFEQGEIEQVFSAMEANYEAWVNGFAPLAVGADVPAAVREFSRTLFNMRPDISLFVSRTVFNSDLRGILGLVNVPCCIMQTARDMSVPASVATYMRDHIAGKSTIQWLDTEGHLPHLSAPSYLARQLEIALSQ

SEQ ID NO: 53332 - protein, 183 aa, Glycine max
  Clone ID: 700745326_FLI.pep
LATLPVFTFDPEKTGPECAVCLSEFEPGETGRVLPKCNHSFHIECIDMWFHSHDTCPLCRAPVERAPEPEVVVITVPDPVSETGSGENENRTGSSSSSSSVGLSKPKPSLVGVTIEVPPRDENFQNELQPSCDSSSSFRSPMSRMLSFTRMLGREKKGNVSPSSCGGGDCSSAAERGEREETQ

SEQ ID NO: 53333 - protein, 164 aa, Glycine max
  Clone ID: 700741958_FLI.pep
CIRDPNPVVFFEPKWLYRLAVEEVPEDDYMLPLSEAEVIRQGSDVTLVGWGAQLAIMEQACLDAEKEGISCELIDLKTLIPWDKETVESSVNKTGRLLVSHEAPITGGFGAEISASIVERCFSRLEAPVARICGLDTPFPLVFEPFYMPTKNKILDAIKSTVKY

SEQ ID NO: 53334 - protein, 107 aa, Zea mays
  Clone ID: 700433803_FLI.pep
VSSVLPVHFRTLSAVPKTARRLWLSRFAGIRWRRRLALMVSVQTRYCCFLGWSLRTVDDGAGDSDGHDDQQGHRRPGIATRRELLHGVGIDSYREVVFSFLASSPFI

SEQ ID NO: 53335 - protein, 270 aa, Glycine max
  Clone ID: 700840396_FLI.pep
APAAPASAAAPAPISSGSAVPESDIYGQAASNLVAGSNLEGTIQQILDMGGGSWDRDTVVRALRAAYNNPERAVEYLYSGIPEQAEAPPVTREPASAQPANPPAAAPQAAQPASVPSSGPNANPLDLFPQGLPNVGSGAAGAGSLDFLRNSQQFQALRAMVQANPQILQPMLQELGKQNPHLMRLIQEHQVDFLRLINEPVEGGEGNILGQLASAMPQAVTVTPEERQAIERLEAMGFDRATVLEVYFACNKNEELAANYLLDHMHEFDE

SEQ ID NO: 53336 - protein, 374 aa, Zea mays
  Clone ID: 700045622_FLI.pep
RGNLKELLIACARAVERNNSYAIDLMIPELRKMVSVSGEPLERLGAYMVEGLVARLAASGSSIYKALKCKEPRSSDLLSYMHFLYEACPYFKFGYMSANGAIAEAIKGEDRIHIIDFHIAQGAQWVSLLQALAARPGGPPFVRVTGIDDSVSAYARGGGLELVGRRLTHIAGLYKVPFQFDAVAISGSEVEEEHLGVVPGEAVAVNFTLELHHIPDETVSTANHRDRILRLVKGLSPKVLTLVEQESNTNTAPFAQRFAETLDYYTAIFESIDLALPRDDRERINIEQHCLAREIVNLVACEGEERVERHEVFGKWKARLMMAGFSPSPLSALVNATIKTLLQSYSPDYKLAERDGVLYLGWKNRPLIVSSAWH

SEQ ID NO: 53337 - protein, 428 aa, Zea mays
  Clone ID: LIB3632-014-H8_FLI.pep
QQRKAGSANRNSHGLHRRRRGRGGGRGGVHVRDAAGVVVHPAHDAEERHRAGPAGGAAEGGRRRQGGAGARGGGGADARGAQRPRRRRGHGGPHAPPARLLRRRPVPDGGPGRPVRAPLLRRARLQVAHPQRGRRVHGRPRAHEPGQGPHGELVLSQGRGAGRRHPVQQGVRDDGVRVPRDGPALQPRVQRGHEEPLGDHHQEAAGLLHGLRGRVDAGGRGRRRGRHAARHHVPPPAHLRGQLRPAARHLRGAAVPRRAPRGRGHVRVRARRRRHPHEVDPPRLERRALRHAAQELLRRAAGKWQGHRRRVRAAGQHGGHPQGAGRVPRRHDHARAQPRRQGAVRARVPRARQGRRLLRVQGHLHLRQRLGHRVHQVNTATTVAAMRCMAATCMLACLVLVSYVAVVVFFWLRCYLAALALAYACTFA

SEQ ID NO: 53338 - protein, 399 aa, Zea mays
  Clone ID: LIB3245-092-B2_FLI.pep
ALVQTSKQQSRSSKGSNLSSVQAKMGQQEKEVIPLMTPYKMGQLELSHRVVLAPMTRCRAIGDVPQPHAAVYYSQRASRGGVLITEGTGVSATAQGFPGSPGIWTQEQVAAWKPIVDAVHRKGALFFCQIAHVGRASTNDFQPDGQAPVSSTDAQLPPDAESGTVFSRPRRLRADEIPGIVDDFRRAARNAIEAGFDGVEIHGAHGFLLEQFMKDGANDRADEYGGSVENRCRFVVEVVDALVREVGASRVGIRLSPFADYLDCADSNPLALGHYMVEQLNRHEGFLYCHMVEPRMAIVDDRRQIPHRLLPFKAAFNGTFIAAGGYDREEGNKVVAEGYADLVAYGRLFLANPDLPKRFEVDEILNKYDRSTFYTQDPVVGYTDYPFLREDSEDLAAQA

SEQ ID NO: 53339 - protein, 280 aa, Zea mays; identical to SEQ ID NO: 46474
  Clone ID: 700164974_FLI.pep

SEQ ID NO: 53340 - protein, 242 aa, Zea mays
  Clone ID: 700352183_FLI.pep
AAYVEHANAIPKWTGLLPKSGNMVINTEWGSFKSGKLPLSEYDKAMDFESLNPGEQIYEKMISGMYLGEIVRRILLKLAHDASLFGDVVPTKLEQPFILRTPDMSAMHHDSSHDLKTLGSKLKDIVGVADTSLEVRYITRHICDLVAERGARLAAAGIYSILKKIGRDKVPSSGSKMPRTVIALDGGLYEHYKKFSSCVEATLTDLLGEEASSSVVAKLANDGSGIGAALLAASHSQYGESD

SEQ ID NO: 53341 - protein, 334 aa, Zea mays; identical to SEQ ID NO: 50022
  Clone ID: 700473710_FLI.pep

SEQ ID NO: 53342 - protein, 303 aa, Glycine max
  Clone ID: 700870119_FLI.pep
EDGYTPLFGDHNLAIHRDGKSVHLSLDERTGSGFVSHDLYLHGYFSASIKLPADYTAGVVVAFYMSNGDMFQNNHDEIDFEFLGNIRGKDWRIQTNVYGNGSTSIGREERYGLWFDPAEDFHQYSILWTDSKIIFYVDDVPIREVKRTESMGGDFPSKPMTLYATIWDASDWATNGGKYRVNYKYAPYVAEFSDLVLHGCAVDPIEHVAKCDSALGSEEVPSGVTQVQITKMRNFRLRHMTYSYCYDTVRYKVPPPECVISHQEAERLRKFDPITFGNGRRHRGKRHHHSSRGSQEEITASSF

SEQ ID NO: 53343 - protein, 305 aa, Zea mays
  Clone ID: 700264770_FLI.pep
KTTRATWPWLAPRRSPARRPPARASRPSTSSERRSPPDAVRLLVTPFRFAFLPLSPFIPIGARPPSRTNPPAPAFPGASLRFARDSIQALVGGMASSPASSYDCSFKVLLIGDSAVGKSSLLVSFVSAAHIDDDIAPTIGVDFKIKFLSVGGKKLKLTIWDTAGQERFRTITSSYYRGAHGIILVYDVTKRESFTNLADVWTKEIELHSTNKECIKMLVGNKVDKDEDRMVTKEEGLAFAQERGCLFVESSAKTRENVEKCFEELALKILQVPSLLEEGSSVVKRNTLTLKQKQENANRSGGCCQ

SEQ ID NO: 53344 - protein, 373 aa, Zea mays
  Clone ID: 700353590_FLI.pep
KYQSCSEMMGFSCQHRSASLRIFLVSVVLLLTAPAGRCHCYKRIFSFGDSIIDTGNFARSGPIMEYPFGMTYFHHPTGRISDGRVLVDFYAQALQLPLIPPNLPEKDTGLFPTGANFAVYGSTAMPPEYYRRWNHDVRACYLGVQMGWFKQMLQRIAPWDGAKRQILSESLIVLGEIGGNDYNFWFAARRPREQAGQFIPDIVATIGSAAQELIGMGAKAILIPNNFPIGCVPTYLSGYRSGNRADYDEHGCLRWFNDFSQRHNRALRGEVDRLRAQHPGVKLIYADYYGAAMEFVKDPHRFGIGDPLTACCGGDDQPYHINRPCNRAARLWGKPSGFASWDGMHMTEKAYQVISHGVLNGPFADPPFAKWSC

SEQ ID NO: 53345 - protein, 432 aa, Zea mays
  Clone ID: 700439054_FLI.pep
VKAKIQDKEGIPPDQQRLIFAGKQLEDGRTLADYNIQKESTLHLVLRLRGGMQIFVKTLTGKTITLEVESSDTIDNVKAKIQDKEGIPPDQQRLIFAGKQLEDGRTLADYNIQKESTLHLVLRLRGGMQIFVKTLTGKTITLEVESSDTIDNVKAKIQDKEGIPPDQQRLIFAGKQLEDGRTLADYNIQKESTLHLVLRLRGGMQIFVKTLTGKTITLEVESSDTIDNVKAKIQDKEGIPPDQQRLIFAGKQLEDGRTLADYNIQKESTLHLVLRLRGGMQIFVKTLTGKTITLEVESSDTIDNVKAKIQDKEGIPPDQQRLIFAGKQLEDGRTLADYNIQKESTLHLVLRLRGGMQIFVKTLTGKTITLEVESSDTIDNVKAKIQDKEGIPPDQQRLIFAGKQLEDGRTLADYNIQKESTLHLVLRLRGGY

SEQ ID NO: 53346 - protein, 145 aa, Zea mays
  Clone ID: 700454408_FLI.pep
QKPSILTRSMARTKQTARKSTGGKAPRKQLATKAARKSAPATGGVKKPHRFRPGTVALREIRKYQKSTELLIRKLPFQRLVREIAQDFKTDLRFQSSAVSALQEAAEAYLVGLFEDTNLCAIHAKRVTIMPKDIQLARRIRGERA

SEQ ID NO: 53347 - protein, 311 aa, Zea mays; identical to SEQ ID NO: 42276
  Clone ID: 700803194_FLI.pep

SEQ ID NO: 53348 - protein, 247 aa, Zea mays
  Clone ID: 700424101_FLI.pep
SSLRPHGHLSQRTAGSHHDDCKLPPCLLRWQPPSTPAEPTDAARDVPSRRLLPAAVVPVQEVSLPPRHRVRRPAPPTCRLRRRNRRRAGQQRLVADRVPLARAQDRQQGDQQRGDGHALLPQERHLHGGHRAQLRGARVPAAQHGLRPAGAGGPAGQGRLQLRQQVPPPQVHLHVLRLRQAHLRRRRQAALRRPRQPPLRQLRDAPGGRHSQGRRQDRRPLRRDKAHPPGAHGQDGLAEPQFFIHIS

SEQ ID NO: 53349 - protein, 245 aa, Zea mays
  Clone ID: 701165132_FLI.pep
VGALGELANGSVVAPSLPSATPSPTETALPRLPHCLPDCPPGPVYPLESQTRKRAGHRKESDHETARLLPLHLLHIYYLSTVSGGPDLLSSWCARSVSLPFSLARGQPRKRRRSRRGKGRRAGWSRADDVLRRRRGVPAARVAPGPALRAARRPRLLRRRRHLDHRAAHLVHLPLLPLRDGAAGGGRGARQGAAPCHDLVYLQDPLLAVPCFLLCGSYIHLALAGEVAVLYCTVVSFRRRLVRSS

SEQ ID NO: 53350 - protein, 241 aa, Zea mays
  Clone ID: 701173218_FLI.pep
STAAEESTTALGRAVATMAPPMKVYGWAVSPWMARALVCLEEAGADYEIVPMSRCGGDHRRPEHLAKNPFGEIPVLEDGDITLYQSRAIARYVLRKLKPELLREGDLEGSAMVDAWMEVEAHHMEPALWPIIRHSIIGQYVGRERDHQAVIDENLDRLRKVLPAYEARLSVCKYLAGDDISAADLCHFGFMRYFMATEYAGLVDAYPHVKAWWDALLARPSVQKVMAGMPPDFGYASGNIP

SEQ ID NO: 53351 - protein, 485 aa, Zea mays; identical to SEQ ID NO: 46975
  Clone ID: LIB143-002-A7_FLI.pep

SEQ ID NO: 53352 - protein, 112 aa, Zea mays; identical to SEQ ID NO: 42211
  Clone ID: 700155066_FLI.pep

SEQ ID NO: 53353 - protein, 117 aa, Zea mays
  Clone ID: 700076531_FLI.pep
SAAAMGCAGSTPKVDENSKKLKRPKAWKHTQPITPARLKQMRDEFWDTAPHYGGQKEIWDALRVAAESDLALAQTIVDSAGIIVSNPDMTLCYDERGAKYELPKYVLSEPANLIRDG

SEQ ID NO: 53354 - protein, 474 aa, Zea mays
  Clone ID: 700155960_FLI.pep
ADLLLAGDPAEATAFFLSGVHSAWAVGELVESKMGNCIDTTARVDHSMNNAAYPSKVTSKTSLSSIPSTIKSNSSRSTLTLPSMRDRNELPTPRTEGEILSSSNLKAFTFNDLKNATKNFRPDSLLGEGGFGHVYKGWIDEHTLAPSRPGSGMVVAVKKLKPEGFQGHKEWLTEVDYLGQLHHKNLVKLIGYCSDGDNRLLVYEFMPKGSLENHLFRRGADPLSWAIRLKVAIGAARGLSFLHDAENQVIYRDFKASNILLDSEFNAKLSDFGLAKAGPTGDKTHVSTQVMGTHGYAAPEYIATGRLSAKADVYSFGVVLLELLTGRRALDKSKPGFEQNLVDWARPHLGDKRRLYRIMDTKLGGQYPKKGANAIASIASQCICGDAKLRPPMSQVLEELEQLQDAKYGAPSPLVDIRKASHAAPKSPMSSTPKSPLSSTPKSPMRAQPAARPSPRRSLGAAAPLAGYRTAQVH

SEQ ID NO: 53355 - protein, 58 aa, Glycine max
  Clone ID: 700558803_FLI.pep
MKRRHRGLRTLPRPSTRCRLNWVFEFSVMVTWISGYCFFVLKFSFVLLPMMIWFDLNY

SEQ ID NO: 53356 - protein, 242 aa, Zea mays
  Clone ID: 700381860_FLI.pep
SELLLNGLEICGEVERRAQLDNAVDALEVAEGEGAVARRVVVAEELGGGADEAVRGGHDERGHRCPRHSQVGHHPVLDALQDPVRHNLKLASEVDDEGAGHRLHPDPVAPVGDLEARYHAGEEQGEEVAVTVRRQAERGVGVGAGRVVVDVEDDVAAADVPFQVVGAEAEALAQQAQDLHPQAPRLHREPLHHLPEPPGLVGPGRGAVADGGEGAGQAEAVAPVLLAARVEHGAGVDPGRPP

SEQ ID NO: 53357 - protein, 150 aa, Glycine max
  Clone ID: 700729990_FLI.pep
PAYYKRGDYVPGLKVDGMDALAVKQACKFAKEFALKNGPIILEMDTYRYHGHSMSDPGSTYRTRDEISGVRQERDPIERVRKLLLTHEIATEKELKDIEKEIRKEVDEAIAKAKESQMPEPSDLFTNVYVKGFGVEACGADRKEVRAILP

SEQ ID NO: 53358 - protein, 339 aa, Glycine max; identical to SEQ ID NO: 42241
  Clone ID: 700754105_FLI.pep

SEQ ID NO: 53359 - protein, 425 aa, Zea mays
  Clone ID: 700095139_FLI.pep
KMNHTHLRKMLDDGKELGMPDGVLMNGKGPYRYNDSLVPDGIEHETIKVEPGKTYRFRVHNVGVSTSLNLRIQNHNMALVETEGSYTMKQNFTNLDIHVGQSYSFLVTMDQNASSDYYIVASARFVNESLWTRVTGVAILQYSNSKGKASGPLPDPPNDEYDKTFSMNQARSIRMNVSTGAARPNPQGSFHYGSINVSQVYKLRNEPPVIINGKKRTTLSGISYSPPDTPLRLADLYDKKDVYTLDFPTMPIDGPPVIRTSVINSTYKNFLEIVFQNNDSTVQTYHIDGYAFWVVGMDYGEWTENSRGTYNKWDGVSRCTTQVFPGAWTAVMLSLDSPGFWNVRTENLDTWYLGQETYIRVVDPNGGYNVTEMVAPDNMLYCGLLKDKQKAQKPHGSRSSASAAKLNYHVLAALVSLVVALVLGH

SEQ ID NO: 53360 - protein, 107 aa, Zea mays
  Clone ID: 700155612_FLI.pep
LLWLESINKLYKPSPSFPETVAAAAAAGGGCLLLAVVRRAAVLGRWRVRRRWRDVRRRRRAVGLLARRWVARLVAHDRDRWVASVDQISCKNSNELASCMCCNCVCR

SEQ ID NO: 53361 - protein, 172 aa, Glycine max; identical to SEQ ID NO: 42230
  Clone ID: 700796591_FLI.pep

SEQ ID NO: 53362 - protein, 247 aa, Zea mays; identical to SEQ ID NO: 53348
  Clone ID: 700424002_FLI.pep

SEQ ID NO: 53363 - protein, 98 aa, Glycine max
  Clone ID: 700738029_FLI.pep
RMAALGGNRDVAGSQNSLEIDGLARFAVEEHNKKQNALLEFEKVVSAKQQVVSGTLYTITLEAKDGGQKKVYEAKVWEKAWLNFKEVQEFKLVGDAPA

SEQ ID NO: 53364 - protein, 233 aa, Glycine max
  Clone ID: 700837068_FLI.pep
SRRTSSSTATETSRSPTSGSPHCRSSSRTASSTPPAARRRTPRRRYSAGAAATTGPRPTPGPAASSSSSSLPDTSRSTTPTFRRCAKKISRRDYQFPEWISKPARFVIHKLLDPNPETRISLESLFGNAWFKKSLNPETAEENALGLSYVKSSYNYEGSKKSSGVTAFDIISMSSGLDLTRLFETTSDLGSKREKRFSSSARVEVVEEKVKEVGGVLGFKIEVGKSNGAIALV

SEQ ID NO: 53365 - protein, 270 aa, Glycine max; identical to SEQ ID NO: 53335
  Clone ID: 700848963_FLI.pep

SEQ ID NO: 53366 - protein, 196 aa, Glycine max
  Clone ID: 700873313_FLI.pep
MASATRLVHCELRSARPAVRAREPAGPVQVTIPKPKAAEAEGANIVLQPRLCTLRSYGSDRAGVLIKARKEGDDDDVSPFFAALSDYIESSKKSHDFEIISGRLAMMVFAATVTMEMVTGNSMFRKMDIEGITEAGGVCLGAVTCAALFAWFSSARNRVGRIFTVSCNAFIDSVIDQIVDGLFYEGDDPTDWPDEP

SEQ ID NO: 53367 - protein, 423 aa, Glycine max; identical to SEQ ID NO: 43754
  Clone ID: 700901573_FLI.pep

SEQ ID NO: 53368 - protein, 183 aa, Zea mays
  Clone ID: 701168423_FLI.pep
SRQSKPSTRTAAGWKREPRAGTPARRHGRRRRRRARAWPVHGQPWHGHGRAVRAEPAVVDHRVRRSPRRRAAEQRRLRGRRRQAALVALREEEVEQIRAGVGEAAALVAPQRRRGAPRLGAEERALSVGGAGGRGDGDRKGALHGGGEVAHAFVFFCFVFWLVRLDLEFLQTLKLLPLDLSFS

SEQ ID NO: 53369 - protein, 245 aa, Zea mays; identical to SEQ ID NO: 53349
  Clone ID: 700930218_FLI.pep

SEQ ID NO: 53370 - protein, 366 aa, Glycine max; identical to SEQ ID NO: 37097
  Clone ID: 701060335_FLI.pep

SEQ ID NO: 53371 - protein, 395 aa, Glycine max; identical to SEQ ID NO: 38715
  Clone ID: 701062577_FLI.pep

SEQ ID NO: 53372 - protein, 196 aa, Glycine max; identical to SEQ ID NO: 53366
  Clone ID: 700890412_FLI.pep

SEQ ID NO: 53373 - protein, 126 aa, Glycine max
  Clone ID: 700835521_FLI.pep
IMASGSPSSSSSSNYDVFLSFRGEDTRLGFTGHLYNTLQSKGIHTFIDDEELPRGEEITPALMKAIQDSRVAITVLSEHYASVSISEATSMASGNKDVKQKKVQEVQIAKKPKRKVRRPAYLKDYA

SEQ ID NO: 53374 - protein, 94 aa, Glycine max
  Clone ID: 700795352_FLI.pep
ENWDLKIPGYSSEEKKNQNKPLLNDLHKRRLDMVRTLMESLPSESSVNSSKEMSIQGISNPPPVGTHHLVRPLSSEQLISHAAGSQMLQQMTRF

SEQ ID NO: 53375 - protein, 274 aa, Glycine max; identical to SEQ ID NO: 42938
  Clone ID: 701065883_FLI.pep

SEQ ID NO: 53376 - protein, 358 aa, Zea mays
  Clone ID: 700438914_FLI.pep
FTMCNTVSGLNKINTSLLLQAAGWPCMNHDRCNASGSFTTRMHLAFHSKQLAAAAAAAGMLMHHVLVELEAGEHVVVDGVGEVVEQVLERADAGDEPLDEVTEDGEHGEPAVLDLLELELIHLLLGLAEAERVEEGPAGVGRVAGAGEELLEAEEVLLAHGARVVPVLEAAVLGEAHERHVEDEERVGVGPVVVGARGRDDARLEPRQRGLRGDDAHLAEDLRGDGAHRAQHGVAAVDHLAIGQPLGLDEAPGALRVREAQRVEAIVAGQRAIEVGEGLLGREPQLPVGTLLGWRAGAGPDDEGRLPRRRPRDGRLHGAAQQLPAGEESLGRHRSGTGASSNLSFRQRTCLRSRSCRW

SEQ ID NO: 53377 - protein, 172 aa, Zea mays; identical to SEQ ID NO: 36903
  Clone ID: 700050595_FLI.pep

SEQ ID NO: 53378 - protein, 135 aa, Zea mays
  Clone ID: 700434272_FLI.pep
IVWTLGGKNVYVEGSWDNWKSRKAMQKSGKDHSLLLVLPAGVYRYRFVVDGERRCLPDLPCEIDAMGNAVNLLDVNDYVPESVESVAEFEPPPSPDSSYSFQAPEDKDFAKEPPVLPSQLHLGVLNSQNSEESCA

SEQ ID NO: 53379 - protein, 87 aa, Zea mays
  Clone ID: 700432739_FLI.pep
VVPELKTDSFDWACSDEGPARHSLIVRGVIPMLSAATAKAFDNEATDEAIGFAIENAKTMGLCNTGQSVVALHRIGISSVIKLLTVK

SEQ ID NO: 53380 - protein, 223 aa, Zea mays; identical to SEQ ID NO: 42987
  Clone ID: LIB3115-038-B4_FLI.pep

SEQ ID NO: 53381 - protein, 132 aa, Zea mays
  Clone ID: 700445756_FLI.pep
RISVPSKERDQTIHELHGLAAAGVVEEEDVLLALRLEPLHRAAPPACCEGLVVRPVPRPQEVQLCRADEHPLTRQVPQARRRGGSQRIYPRVVQAVRRLEAHDPPQLLHQRHSLRRLSVDALPATEPRVQED

SEQ ID NO: 53382 - protein, 318 aa, Glycine max
  Clone ID: 700556816_FLI.pep
VPSAPPFLLLLQSMAATSTSLFFSNLHSLNPQPFSSSLSFFRNVHSTLSFPSSSKPSRGVVAMAGSGKFFVGGNWKCNGTKDSISKLVSDLNSATLEPDVDVVVAPPFVYIDQVKNSITDRIEISAQNSWVGKGGAFTGEISVEQLKDLGCKWVILGHSERRHVIGENDEFIGKKTAYALSEGLGVIACIGELLQEREAGQTFDICFQQLKAFADAVPSWDNIVIAYEPVWAIGTGKVATPEQAQEVHAAVRDWLKKNVSAKVASKTRIIYGGSVNASNSAELAKQEDIDGFLVGGASLKGPEFATIINSVTSKKVAA

SEQ ID NO: 53383 - protein, 274 aa, Glycine max; identical to SEQ ID NO: 42938
  Clone ID: 700752843_FLI.pep

SEQ ID NO: 53384 - protein, 366 aa, Glycine max; identical to SEQ ID NO: 37097
  Clone ID: 700844560_FLI.pep

SEQ ID NO: 53385 - protein, 463 aa, Glycine max; identical to SEQ ID NO: 49138
  Clone ID: 700993317_FLI.pep

SEQ ID NO: 53386 - protein, 374 aa, Zea mays; identical to SEQ ID NO: 53336
  Clone ID: 700045677_FLI.pep

SEQ ID NO: 53387 - protein, 428 aa, Zea mays
  Clone ID: LIB3245-349-C10_FLI.pep
LPPPPKRHHSMPENLFLLQNQLQPPPPPPQGLRFPPLHTTAPFQLQPSLQPPRGSMKTTPAAQQHQQLLDELAAAAKAAEVGNSIGGREILARLNQQLPPIGKPFLRSASYLKEALLLALTDGHQGSTHLSSPLDVALKLGAYKSFSDLSPVLQFANFTATQALLDEIASTTSSCIHIIDFDLGVGGQWASFLQEFAHRRGTGNAPLPMLKLTAFVSSASHHPLELHLTRENLTQFAVDLGIPFEFTDINLDAFDPAEFIAPSPNEVVAVCIPVGCSARTPPLPMLLQLVKQLAPKIAVAIDHGSDRGDLPFSQHFMNCFQSCMFLLDSLDAAGTNADAASKIERFLIQPRVEDAVLGRRKAENAMAWRAVFTSAGFAPVPLSNLAEAQADCLLKRVQVRGFHVEKCGMGLALYWQSGELVSVSAWRC

SEQ ID NO: 53388 - protein, 485 aa, Zea mays
  Clone ID: 700477196_FLI.pep
GPVAAIRMPMLRVSNFKGGTPEVMQTSYAILVLVLPNDGSLGWGRRELEIVEVVADQVAVALSHAALLEESQLMREKLAEQHRDLLQAKDEAMRAGDARNSFQTAMYDGMRRPMHSILGLVSMMQQESMNPEQRLVMDAIAKTSSVASTLMNDVMQTSTMNCEHLSLVRRPFNLHSFIKEVVGVVRCLTGCKGVEFEFQVENSLPERIIGDEKRVFHIVLHMVGTLTDRCNAGCISLYVNVHNEVEDRHNHDWMLRRANFSGGYVCVKFEIRIRKSKGYLLSSSSSQISQGSKPNNSEMGLSFNMCKKIVQMMNGNIWSVSDSKSIGETIMLVLQFQLEPVTPVSGASSDLYRSSAIPNFNGLRVLLADSDCTNRAVTHRLLEKLGCRVLSVASGVQCISSFAAESSFQLVVLDLDMQTMDGFEVARAIRKFSSNSWLPLIIALAARIDDNIRDRCQRSGVNGLIQKPVTLAALGDELYRVLQNN

SEQ ID NO: 53389 - protein, 325 aa, Zea mays
  Clone ID: LIB3245-504-D6_FLI.pep
PFDCAVCLCEFSPDDRLRLLPQCSHAFHLECIDTWLLSHSTCPLCRRNLLADLSPASSSPVVVVQLGSGSARDMAASAGGATHDDADGGEPSDRATPAQEMVEVKLGKFVCVEGNSDSASATATDAAGTSGDGDGGASAEEGLGQRRCHSMGSYEYVMDDRASLRVAIKPEPKKKPAASKSRRRGAMSECELGASKRGETSLRLPFPATVPKQQQQSDSDATMAKLAKDSFSVSKIWMVPSSKEDPDAAGERRTVSFRWPVRSKDEGDGRNRKSGSEADWDVEAGSGGGGNSAASSLAEERPSFARRTLLWVVGGRQQSRVGSCS

SEQ ID NO: 53390 - protein, 274 aa, Glycine max; identical to SEQ ID NO: 42938
  Clone ID: 701057815_FLI.pep

SEQ ID NO: 53391 - protein, 554 aa, Zea mays
  Clone ID: 700473295_FLI.pep
NQFGVVPCGLRRRRKSETLRAQYIDVRELRICAGTWNVAGRLPPNDLDIQEWLDMEEPADIYVLGFQEIVPLNAGNIFGAEDNRPVAMWEHIIRETLNKISPDKPKYKSHSDPPSPSRFKPSDDAFVMEDELISESDSEGDGEVHPLNEQDLVDSVDGIHGNKCEPQTILQDDEFSRLPSVKTFDRSNNLSFKESNLEEKICQKILTKTFSHSERLGMIWPEPPLDMLAQRLPDSTKSFASGKVLRSYLSFKSVNGDSGSFAEDNSVPDFHMSCAAVKRKRPYFVRIISKQMVGVYLSIWVRRSLRKHIQSLKVSTVGVGAMGYIGNKGSISVSMSIYQTHFCFICCHLTSGEKEGDELKRNADVQEIHRRTIFNPVSRVNMPKTIYDHERILWLGDLNYRINLPYEKTHELISKQDWNELFGKDQLKVELKKGHLFEGWTEGVINFPPTYKYKVNSEKYISDDNKSGRRTPAWCDRILSHGKGMRLLSYKTVDLRLSDHRPVTAVYMADVEVFSSKKLQRALTFTDAEAEEQLSFEEDSASGIYNLGLYESSR

SEQ ID NO: 53392 - protein, 463 aa, Zea mays
  Clone ID: 700282319_FLI.pep
PNPESLPASSVSRSIRIRAPYPAPAVPTAMEDNAVEEPELSGAAEFAPALVAAHPHGNSVAVAIGPELRVFDLRAGHPVSLSDDCGGHSHSDAIRAICFSVSGALFASAGDDKLVKVWKTDSWRCIQTITSEKRVSAVVISNDDLYVSFADKFGVVWLVTLREDSAEQVSVDNKPVSILGHYCSIITSMKFSPDGRFIATADRDFKIRVTLFPKNPLKGAHEIQSFCLGHTDFVSCITFTSISENQSFLISGGGDSTVRLWDYVNGCLLDTFQAKDKMGELLGPNETDDSSLAITDICPSNDGSLVAVAIQSFSGIMLLACDLVGKKLSFLKVITMEKSYIPTSLASSSASELLWTVMGASNMPSQASSHLLTRLRIITCFQKDRLSSSDAGPATLEDGDVPHGEKLLLALQGSLDVAKQEEVLASVLAALKVSMHKMLVKKHYSEERREQRKRGRNDKKMKN

SEQ ID NO: 53393 - protein, 124 aa, Zea mays; identical to SEQ ID NO: 47585
  Clone ID: 700343054_FLI.pep

SEQ ID NO: 53394 - protein, 366 aa, Glycine max; identical to SEQ ID NO: 37097
  Clone ID: 700843588_FLI.pep

SEQ ID NO: 53395 - protein, 398 aa, Zea mays
  Clone ID: 700451509_FLI.pep
LRLRLRGARARTNTSPMSSTAARVVHPAAAAPPPPRPRRLAPARCAAGSATDTATAGPTRVTTVSNRGDSLAICRVLNGMWQTSGGWGRIDRDAAVDAMLAHADAGLSTFDMADHYGPAEDLYGMFINRIRRERPPEFLEEVKGLTKWVPPPVKMTRSYVEDNINRSRKRMDVTALDMLQFHWWEYSNPGYLDALKHITDLKEEGKIKTVALTNFDTDRLQIILENGIPVVSNQVQHSIVDMRPQQRMAELCQLTGVRLITYGTVMGGLLSEKFLDTNVSIPFAGPPLNTPSLQKYKRMVDAWGGWSLFQTLLQTLKKVSLKHGVTISTVAVKYILNQTSVAGSMVGVRLGLSEHIKDTNAIFSLELDEEDMNIITEVSKRGRNLIDIIGDCGDEYRA

SEQ ID NO: 53396 - protein, 318 aa, Glycine max; identical to SEQ ID NO: 53382
  Clone ID: 700557259_FLI.pep

SEQ ID NO: 53397 - protein, 283 aa, Zea mays
  Clone ID: LIB3245-327-B5_FLI.pep
SIMERNPRWNQLPVPKEALYPWEDRSTYIRKPTYLEGMSMTPPAAPPTVTEAYCLLNLGDSITTDHISYSGKIPEGTPAAKYLLEYGVEPKNFSSYGGRRGNNEVVMRGAFANMRIVNKLLDGKAGPWTIHVPSGEKLYVYDAAMKYKSEGHDMVIIAGSEYGSGSSRDSAAKGPMLLGVKSVIAKSFERIHRSNLVGMGIIPLCFKAGEDADSLGLTGRERYTIHLPTSTAELSPGQDVTVTTHDGRSFTCTLRLDTQLEVTYFNHGGILPYMVRNLAAQMK

SEQ ID NO: 53398 - protein, 171 aa, Glycine max; identical to SEQ ID NO: 42231
  Clone ID: 700847152_FLI.pep

SEQ ID NO: 53399 - protein, 335 aa, Zea mays
  Clone ID: LIB3150-073-D9_FLI.pep
LKMNNHISILVILIVDVSVVLLLNSHVGLCSCYNRIFSFGDDTMDTGNFIHLIGKAPSKYKEAPYGKTFFRHATGRISDGRVLIDFYAEALKLPMIPPILPEKNSGCFPHGANFAVFGATARGKVFFSGSPWCIGTQMYWFDQLVDRIAPGDGKPPKDGNIISDVIADISHFIEELIVVNGAKAFVVANNFPVGCLASYLSRFHSDDHEDYDEHGCLKSFNEFSQKHNEQLYSAIGQIRYSYPNVKVIYADYYNATMEFIKKPSRFGIGDPLVACCGGNGPYHTSMECNGTAKLWGDPHHFANWDGMHMTEKAYNIIMEGVLNGPFADPPFPLSC

SEQ ID NO: 53400 - protein, 428 aa, Zea mays; identical to SEQ ID NO: 53387
  Clone ID: 700091411_FLI.pep

SEQ ID NO: 53401 - protein, 79 aa, Glycine max; identical to SEQ ID NO: 46014
  Clone ID: 700830740_FLI.pep

SEQ ID NO: 53402 - protein, 250 aa, Zea mays
  Clone ID: 700235435_FLI.pep
VRPGTAAVATGAMQRAEDAEEIGQLSAPHKALSAAAAGDSHASARLDWEGRDEGHAQGSLRGRQGHGRHQPRRPRRRPPPQGLRHRGRLRQRAFPPGPHPHPREAWSFPRRPQAPQPGCALPVHEIRARARQARQPHLHPLHQPCGAGAALPHHARLHCHLRPRQQGQPLPHARVRRLPRQVHLRARGRAPHHHRAPLRHQQERLGVRRHQEVSGRGRRQGHLRRHHQAARPRVEQGLHRRRFLEGRDYV

SEQ ID NO: 53403 - protein, 217 aa, Zea mays
  Clone ID: 700242490_FLI.pep
PHRSGGGGANAGEGEGVREGAPAMVHVNFYRNYGKTFKKPRRPYEKERLDAELKLVGEYGLRCKRELWRVQYALSRIRNAARHLLTLDEKNPRRIFEGEALLRRMNRYGLLAEGQNKLDYVLALTAENFLARRLQTLVFKAGMAKSIHHARVLIKQRHIRVGRQIVNVPSFMVRVESEKHIDFSLSSPFGGGPAGRVKRKNQKKASGGGDAGDEDEE

SEQ ID NO: 53404 - protein, 399 aa, Zea mays; identical to SEQ ID NO: 53338
  Clone ID: 700074810_FLI.pep

SEQ ID NO: 53405 - protein, 151 aa, Zea mays
  Clone ID: LIB4148-001-B5_FLI.pep
PTSRPRKTLPAQTRLLQLLLRRRIKRTLLRRRPRQDGSPERHRPSEPAGRARETQAQEEAPRPIPQLLLHGCQVPGMLQHNHGFQPLPDCCCVPRLPNCSLPAHGRKGEAHGGMLFPPEGRLEWSLLLVLDRLSISSMWIQILLCAQTLRS

SEQ ID NO: 53406 - protein, 242 aa, Zea mays; identical to SEQ ID NO: 48244
  Clone ID: LIB3912-008-G10_FLI.pep

SEQ ID NO: 53407 - protein, 345 aa, Zea mays
  Clone ID: JC-ZMXLIB3527P074AA07_FLI.pep
LARSRSKPGTTRAGGGEEEETYHTIDSEPDTQSVSCTITTRRAPGYQNLVWREMAPSSYEVAASILLCAEDSSSILDLEAEAEEEALLARSGEPGGGAEFPVPSEECVAGFLESEAAHMPREDYAERLRSGGMDLRVRTDAIDWIWKVHTCYGFGPLTACLAVNYLDRFLSLYQLPEGKAWMTQLLSVACLSLAAKMEETYVPSSLDLQAGDARYVFEAKTIQRMELLVLSTLKWRMQAVTPLSYVDYFLHRLRGGAAPSRRAVLRSAELILCIARGTHCLDFRPSEIALAVAATVAGEERAVDIDRAFTHRVHKERVSRCLEAIQQATATMALPQPLKSEGPSS

SEQ ID NO: 53408 - protein, 74 aa, Glycine max
  Clone ID: 700868865_FLI.pep
RLSLLCLLPSLLHMVAYSSRSKGFDRKRVSSIIFLQRQNKEKPSLYQCLLVFVLVFNSSVMSIPLFLKPFPPPP

SEQ ID NO: 53409 - protein, 172 aa, Zea mays; identical to SEQ ID NO: 36903
  Clone ID: LIB3079-042-G3_FLI.pep

SEQ ID NO: 53410 - protein, 353 aa, Zea mays
  Clone ID: LIB3689-216-G9_FLI.pep
TLESLELSVPDPLDLDILGRLGPEVGVGRLHALEDADDLAGLRVALGDAQRDVAGGGGGVLDVLLLELLLVTSAPGGERDGVVVAGGAAAALGVEEGGATVAGHEEGPAEALGLAGGDELLDGEEERHALAPRELHGDGGVVDAVLLLELERAVGADLERALDLVQRVREAGHELGLLELGRGVLGDALRLDGEGRRLQAQLLHLVLAGLERERLHAAVDGRALVRRARALHLHVRFALDLVVGQPLGRALRARARDEERRGGEREAGELRGVDAPAGDVLQGARDPGGAGVDAERPAGELRRRAGRQRGKGRPAADLGRLHQGGRGLERGCHRRRGGDAFWLLPFSSGGCVS

SEQ ID NO: 53411 - protein, 180 aa, Zea mays; identical to SEQ ID NO: 52264
  Clone ID: LIB3912-040-E12_FLI.pep

SEQ ID NO: 53412 - protein, 280 aa, Zea mays; identical to SEQ ID NO: 46474
  Clone ID: LIB3900-001-B6_FLI.pep

SEQ ID NO: 53413 - protein, 727 aa, Zea mays
  Clone ID: 700619151_FLI.pep
GIAVTDSKAASGAGGIGPWPAEMSGFVGVVVSDPSLQGQFTQVELRSLKAKFVSLKRDSGHVTTKNLPVMMKKLRGLNEVVSVEEIAAFLSESYPDSDQEIEFESFLREYLNLQARVSAKEGGAGGGRGGKSSFLKSSTTTLLHNLNQAEKSSYVAHINTYLREDPFLKKYLPMDPSGNQLFDLIRDGVLLCKLINVAVPGTIDERAINKKRVLNPWERNENHTLCLNSAKAIGCTVVNIGTQDLVEGRPHLVLGLISQIIKIQLLADLNLKKTPQLVELFDDSKDIDEVLSLSPEKMLLRWMNHHLKKAGYKKTVNNFSSDVKDGEAYAYLLKALAPEHSPETTLDTKDPNERAKLVLEQAAKLDCKRYLTPKDITEGSANLNLAFVAQIFQHRNGLTSDTKQVTLTQTATPDDVLVSREERAFRMWINSLGVESYVNNVFEDVRNGWVLLEVLDKVSPGSVNWKLATKPPIKLPFRKLENCNQVVKIGKQLKFSLVNLAGNDIVQGNKKLIVALLWQLMRFNILQLLNKLRFHSQGGSQGKEISDADILDWANSKVKASGRTSRMESFKDKSLSNGLFFLELLSTVQPRVVNWKVVTKGETDEDKKLNATYIISVARKIGCSVFLLPEDIVEVNQKMILTLTASIMYWSLQNQHQSQSEMPEQSEPSSMASDAASDIASEDGASTTAPSELDEVNSLSDSVSNLTTDDATSNAPSTENGNGVAGS

SEQ ID NO: 53414 - protein, 482 aa, Zea mays
  Clone ID: LIB3959-024-F2_FLI.pep
RINVCGCRGSTVHLHHLSSSSSPPPLPFHLLPPGDSSPSLPRRSIGPPIDRARGRRFQSGAVSIRSGSLPVWVGAMAAMDASADKNAVFRKLRAKSDNKMCFDCNAKNPTWASVTYGVFLCIDCSAAHRSLGVHVSFVRSTNLDSWTPEQLKMMVYGGNNRAQAFFKQHGWTDGGKIEAKYTSRAADLYRQLLAKDVAKSSTEDGNNSWPSSPVAASQAPNQAAAFPDLKLTEVSKENVSEKKDSEIVRSPRAPTHSFKKPIGAKKPGNKTGGLGARKLTSKPNESLYEQKPEEPAPVLPSSVIESTTTRSKSHTSRFDYVENAPALKNGNSSEGNHMSGHVAPPMSSNFFAEFGMDSGYQKKSTSSSSKVQIEESREARQKFSKAKSISSSQFFGDQASFEKDAQVSLQKFSGSSAISSADLFGHPANNSSVDLSASDLINRISFQATQDLSSLKNMAGETGKKLTSMASNIITDLQDRIL

SEQ ID NO: 53415 - protein, 257 aa, Zea mays
  Clone ID: LIB3061-039-A12_FLI.pep
ELATYIVKYTSNILAPMAAKIFAILALLALSASVATATIIPQCSQQYLSPVTAARFEYPTIQSYRLQEAIAASILRSLALTVQQPYALLQQPSLMNLYLQRIAAQQLQQQLLPTINQVVAANLAAYLQQQQFLPFNQLAGVNPAAYLQAQQLLPFNQLVRSPAAFLLQQQLLPFHLQVVANIAAFLQQQQQLLPFYPQVVGNINAFLQQQQLLPFYPQDVANNVAFLQQQQLLPFNQLALTNPTTLLQQPTIGGAIF

SEQ ID NO: 53416 - protein, 115 aa, Zea mays
  Clone ID: LIB3245-370-A5_FLI.pep
MTQDSGFHMKPKNLRNLLSCFSSSLLGPKMARRCSACSVVRPCGLHRRFSNTSSIGMFSRSTASLSTASRLDALSSILSPLLGVPEPGASSSQCRGQAGGRAGRRGRLATVAQGT

SEQ ID NO: 53417 - protein, 161 aa, Zea mays
  Clone ID: LIB3079-026-E7_FLI.pep
RDDEGSLCCGRSGRGGGRGLPRRAAGRGRRGRVRCDAAGHGGAEAGAVRVGGGGPRLRAVRLLLQRGARHREAEPQVPLRRHAVQHRQERRDQGRGRHHHPQTLQPRRPPRWLQVRRLHSAMSGGEVSRPDLLHGMPEYHRSASSCVERVRVCQSVSMCCP

SEQ ID NO: 53418 - protein, 366 aa, Zea mays; identical to SEQ ID NO: 48474
  Clone ID: LIB3180-007-D11_FLI.pep

SEQ ID NO: 53419 - protein, 472 aa, Glycine max
  Clone ID: 700725769_FLI.pep
IASMVDHYNKLVKLAARAFYDDLTSKGENQPKSGRSDNRGIAVVILDALTRRQWVREEDLAKDLKLHTKQLRRTLRFFEEEKIITREYRRETAKGAKMYSAATAATVDVQLTGKEGEEKVKLHTHSYCCLDYAQIYDVVRYRIHRMKKLLKDELDNKNTIEEYICTKCGKRYNALDALRLVSFEDDDFHCESCNGKLEVENDKFVAQEGGDGDENARRRRHEKLKDMLQKMEAQLKPLMDQLSRVKDLPVPEFGSLLAWEARASAMGRAANGDMSGDSKMSQLGYNGAPMPYSGDTKVVVDFNGTEDIKDVKSETGSASLKVLPPWMIKSGMVLTKEQRGEAKEEIKMDGTSTSSSAQYLDDKKSTVDHDDKKNIQDEYIKAYYAALLKQQHELEAASKQELPNTLTANDPSSSASNRQVGMKSKLEEDDDGTEWEEAPVAGIGNENYKVDLNVEADDTPADDDEEVDWEEG

SEQ ID NO: 53420 - protein, 191 aa, Zea mays
  Clone ID: 700077059_FLI.pep
HYSQVGLSPCRRSIPSGPTCHRTEWRLPPPFVTFQTRPQQPGATSEPTAAMGIGEHFEGVKQHWASNFAFLDYFKKVYGRAEPLPKWSDADVDEFIASDPVYGPQLKALRESRKFALAGALVGAAHLGGVALKYSKAPHGVLLATGFGAITGAVLGSEVADHWYQLYEMDKQGANLRFIYWWEDKVSGQKS

SEQ ID NO: 53421 - protein, 210 aa, Glycine max
  Clone ID: 700839445_FLI.pep
GKAWVGLVVLLCLIVTAIAEQCGRQAGGQTCPNNLCCSQYGWCGNTEEYCSPSKNCQSNCWGGGGGGGGGGGGESASNVRATYHYYEPEQHGWDLNAVSAYCSTWDASKPYSWRSKYGWTAFCGPVGPRGRDSCGKCLRVTNTGTGANTIVRIVDQCSNGGLDLDVGVFNRIDTDGRGYQQGHLIVNYQFVDCGNELDLTKPLLSILDAP

SEQ ID NO: 53422 - protein, 423 aa, Glycine max
  Clone ID: 700891859_FLI.pep
RIYIIVLSENFASSWYCLVEVVMILDEFAKGKGRWIVPIFFYVDPSVLVRTYEQALADQRKWSSDDKIEEWRTALTKLSKFPGFCVSRDGNIFEYQHIDEIVKEVSRHVICPIGLDEKIFKVKLLLSSGSDGVRMIGICGEAGIGKTTLAHEVFHHADKGFDHCLLFYDVGGISNQSGILSILHGKRVFIIFQDIKHFKQLEDIRELTKQLGSGSKVIITAQDKHLLDRYGIGFESICEIKGFSDSEADRLLEFKVLNSATVSPKYVNILNRIKSYALGHPWTLEVMCSNLSGKSIEECESALLKYESITDRDIQKILEVSFIALEKCQQQMLIHIALYLKDQKLVDVEAELCNKYKVCPRLDIRVLLDKSLIKINHHGQVTLHTSTQEMIKDKASRFEEHGNQEMQFVLNDGSGDWDPMELD

SEQ ID NO: 53423 - protein, 196 aa, Zea mays
  Clone ID: LIB4302-016-G3_FLI.pep
AYLRDSKLLPFPTAAAAAPPHSVDTMRECISIHIGQAGIQVGNACWELYCLEHGIQADGQMPGDKTIGGGDDAFNTFFSETGAGKHVPHAVFVDLEPTVIDEVRTGTYRQLFHPEQLISGKEDAANNFARGHYTIGKEIVDLCLDRIRKLADNCTGLQGFLVFNAVGGGTGSGLGSLLLERLSVDYGKKSKLGFTV

SEQ ID NO: 53424 - protein, 196 aa, Zea mays; identical to SEQ ID NO: 53423
  Clone ID: LIB4302-018-G6_FLI.pep

SEQ ID NO: 53425 - protein, 188 aa, Glycine max
  Clone ID: 701125957_FLI.pep
LQGIDLKAGGKSKKTKRTAPKSDDIYLKLLVKLYRFLVRRTGSNFNAVVLKRLFMSKVNKPPLSLSRLIRYTKGKEDKIAVVVGAVTDDIRVYEVPALKVTALRFTETARARIEKAGGECLTFDQLALRAPLGQNTVLLRGPKNAREAVKHFGPAPGVPHSHTKPYVRAKGRKFERARGRRNSRGFRV

SEQ ID NO: 53426 - protein, 158 aa, Zea mays
  Clone ID: 700342238_FLI.pep
FKATLELLVAYKDQVAEAKKQNEEAADDMDGFDADEEDDDEVDSDKEMGLDDEDGDEVSSLQLQKLAAEARGFQPADDDDSDDDFSDDELHSPIDEVDPFIFFVETVQGLQASDPARFQNLMHTLDFSYQALASGIAQHAEQRKNEIEKEKSEKANAQ

SEQ ID NO: 53427 - protein, 78 aa, Glycine max
  Clone ID: 700743959_FLI.pep
RRGLLLLRSKLLLLKFPCQQVVSWVMDLFEHKYYLEDLGCRFVVASLLLPELRIQTFYVSILLPVLLVEREDASISVL

SEQ ID NO: 53428 - protein, 165 aa, Zea mays
  Clone ID: LIB3070-008-B8_FLI.pep
KQAGGAAANPAHQTAPPIVVASHFSLTNQPNRATWLVPYVVPAATRRGARPVGARTVRHETTETMSTTTMKASDPGSAWFGSGARTRSAAGISHNARLVTTEVAAFVSVLGLALFLHLYVCHVRRRNRRRAAAVLPTTTAAAAAAAAPKRGLDPAAVAALPTVLY

SEQ ID NO: 53429 - protein, 131 aa, Zea mays
  Clone ID: 700624073_FLI.pep
TLLLYLYASSSSSSRLSCAIAGPGGPAQLQLQQEQPQLVPQLQVLQSQPPPSVAASKPPALALVVGAARTMVLMLLAAAVSTSGDMQLHELPQEQLEPQLHLPLLQDMITDEGEQALAVLGGGRGGRGVVP

SEQ ID NO: 53430 - protein, 128 aa, Glycine max
  Clone ID: 700741530_FLI.pep
VTEKMYEYGKNLGLSFQVVDDILDFTQSAEQLGKPAGSDLAKGNLTAPVIFALEKEPKLRDIIESEFSEVGSLDEAINLVKSCGGIERAQELAKEKADLAIQSLQCLPQSVFRLALEDMVAYNLQRIA

SEQ ID NO: 53431 - protein, 242 aa, Zea mays; identical to SEQ ID NO: 53356
  Clone ID: 700351492_FLI.pep

SEQ ID NO: 53432 - protein, 50 aa, Zea mays
  Clone ID: 700422028_FLI.pep
MVLDYPISNVQRLTQAPNVSSKNQAVYSAGFPLIDVRCSGRYAFVQTAML

SEQ ID NO: 53433 - protein, 183 aa, Zea mays; identical to SEQ ID NO: 42232
  Clone ID: 700553089_FLI.pep

SEQ ID NO: 53434 - protein, 58 aa, Glycine max; identical to SEQ ID NO: 53355
  Clone ID: 700557013_FLI.pep

SEQ ID NO: 53435 - protein, 66 aa, Zea mays
  Clone ID: 700577210_FLI.pep
GSALTEFHKNIAYYTHRQKPRPKEKKEKVASCHNYSLSISQYPSWSMAHDQPSNHRERARLFPPRG

SEQ ID NO: 53436 - protein, 256 aa, Zea mays
  Clone ID: LIB3067-051-B8_FLI.pep
ETMGWKYPGIGEFQCYDRYMQKNLRQSALSRGHLFWARGPDNAGYYNSRPHETGFFCDGGDYDSYYGRFFLNWYSGVLMDHVDQVLSLATLAFDGAEIVVKVPSIYWWYRTASHAAELTAGFYNTTNRDGYSPVFRMLKKHSVILKLVCYGPEYTVHEKDDDEAFADPEGLTWQVINAAWDQGLPLCIESALPCHNGEAYSRILDTAKPRDDPDRHHAAFFAYRQQQQPPLREACLSELCTFVKCMHGEAPQNGEG

SEQ ID NO: 53437 - protein, 354 aa, Zea mays
  Clone ID: 700472170_FLI.pep
RKAYGTRTLFFLTAAGTLKPIAIELCLPPMTDGCARAKRVFTPPADATSNWLWQLAKAHVCSNDAGVHQLINHWLRTHAAMEPFIIAAHRHLSTMHPIFKLLKPHMRYTLKINALARQILINGDGVIESGFTPGRYCMEMSSFAYRELWRLDQEGLPADLIRRGMAVEDPTQPHGLRLLIEDYPYATDGLLLWSAIRRWCDAYVAMYYPSDESVQGDTELQSWYREAVHTGHADKRDAPWWPRLSTPADLASLLTTLLWLTSAQHAALNFGQYPLGGYIPNRPPLMRRLVPAEGDPEYAHLVADPHRFFLSALPSLTQTTTFMTVIDTLSTHSADEQYLGERPDEAWTADPAAL

SEQ ID NO: 53438 - protein, 160 aa, Glycine max
  Clone ID: 700788328_FLI.pep
EACTGRVMGTFGYMAPEYALDGFFSTKSDVFSFGVVLLEILSGKKNTGFYQSKQISSLLGHAWKLWTENKLLDLMDPSLCETCNENEFIKCAVIGLLCVQDEPSDRPTMSNVLFMLDIEAASMPIPTQPTFFVKKHLSSSASSSSKPDIGQYESSYQEGR

SEQ ID NO: 53439 - protein, 142 aa, Glycine max
  Clone ID: 700836843_FLI.pep
LDVESSHGDMFTEEQNELIESAAEMLYGLIHARYILTSKGMAAMLDKYKNYDFGRCPRVYCSGQPCIPVGQSDIPRSSTVKIYCPRCEDIYYPRSKYQGNIDGAYFGTTFPHLFLMTYGQLKPQKPSQSYVPRVFGFKLHKP

SEQ ID NO: 53440 - protein, 216 aa, Zea mays
  Clone ID: LIB143-064-H9_FLI.pep
RVVRAGAQLVGDLHGEVGVQKLLDHLVHVLLLKQPAAPVPRRRRRRRRRGGDPHAGRHCRRDARERGGGGCRGVGLALRRLSGREVGAVKLGDERGGEERRRGLLLLLPVAAAAAACVLGEVGAHAGAAHDARRLVVGARRVLGRLEGAQPDPRLQEGVADLRDPGAPVALPHAAVPLLWPRHWRRTDGGAVACSDRRGAAALALASASVVCATGS

SEQ ID NO: 53441 - protein, 230 aa, Zea mays
  Clone ID: LIB3137-008-A4_FLI.pep
DSTSSLRALRSRSWSSRAKARDIVGASYACAARSGRRIGLDGVVQGAPPVGCRRRRCGVPGRRRGRQVRPAGTARHHRRRALQHRQPHRHRQLPRLPERGRGAAVRGQGGGGRDDQHQRHLLHGAGHDQRAGRVHRRLHAGGGHAARQVQRRPHRRRQPRLLPAGPAHAPARRHLPPLPRRLLLPRPTSLTSYLARALYVRTTGQHNQTLNMLLVLGAIYIATTTNVKCF

SEQ ID NO: 53442 - protein, 128 aa, Zea mays
  Clone ID: 700074620_FLI.pep
DLPSATGRQPTPSNGRGSGTSAPPPTPSRRTAADPVRPIRLGPGGSSGGIRCRSIDRERCGSSGAGSGPGGGRTTRGSSREPSTGRSASSASPSSRSSSSSSSSSPSFSSRTSCHSLNTISYLSRSLI

SEQ ID NO: 53443 - protein, 226 aa, Zea mays
  Clone ID: 700150413_FLI.pep
AVWVVFHRHQSPPFDTFRLMTLYLHETTQQFTFVMAITTKVIGSNLRASMVSTIRPVQIFGNTVIISMYQFMNHDLSYLILTGHVIAANLYPLLASVAAGGGAGRRPDEARPHQAPGTLHPLPQEPHRGMFERGADALDAFFVRHGGDRGALRRGLGGLADASLGATAAVPLRHFRPRAVPVPLSPTPAAAASRGLGSAGGGCVASVGMGLGSWFGPVGKVVGPET

SEQ ID NO: 53444 - protein, 212 aa, Zea mays
  Clone ID: 700244218_FLI.pep
TPQSEKARNLDVILTLLDLVQIYRRSVQEGTMTIVEMHVSIDCDGCEDNVRKALEKLKGVHHVSIDRMHGKVTVTGSVSQRKALRAARRTGKLAVLWPSAYNNPSYHQAHAMPAYYQYQYQARPAQAQQHQYYSSVQRAGKNSGGGGGSAVATKPAGQYPQSKASSYNYRVHGYYDSELYGNYHDHEQPGDVVPATVRSYFSDENPSACSIM

SEQ ID NO: 53445 - protein, 107 aa, Zea mays; identical to SEQ ID NO: 50211
  Clone ID: 700458862_FLI.pep

SEQ ID NO: 53446 - protein, 271 aa, Glycine max; identical to SEQ ID NO: 53331
  Clone ID: 700750583_FLI.pep

SEQ ID NO: 53447 - protein, 200 aa, Glycine max
  Clone ID: 700752579_FLI.pep
RSPTLSTPLSSPTSRTTPSRTCKRLTISSSTRWVSSPLGLSLSFSVVLPNSSVLAPPDLVRVVSRLSARRRATRLHTSAPMARYLTSTPTSRPVVLRHSRRFSTGRVAVTARRSARATTRSRSCPLRTVPVSARPSSPPSLSSVSRKARLLVSVTPRVCSRAPLPPSPAPTRFKFSYDPRTIGDGTHAIDGGRVKSLMLK

SEQ ID NO: 53448 - protein, 826 aa, Zea mays
  Clone ID: 700076615_FLI.pep
GAGLRSSSQSPRRPVTITTLQVVAQFQWSPASHSTRAHGQIVGPKSGSSPPNGYASAMLVALLCLLACCAGAGAAGAAAPNARPCASPYSASAYPFCDASLSIPARARALVSLLTLDEKIAQLSNTAGGVPRLGIPPYQWWSESLHGLADNGPGVNFSSGPVRAATDFPQVILSTAAFNRSLWRAVAEAVATEALGMHNAGQAGLTYWAPNINIFRDPRWGRGQETSGEDPAVAAAYSLEYVKGFQGEEGEEGRIRLSACCKHYTAYDMEKWEGFSRYTFNAKVNAQDLEDTYQPPFKTCIQEARASCLMCAYNQVNGVPMCAHKDLLQKTRDEWGFQGYITSDCDAVAIIHENQTYTKSGEDSIAIVLKAGMDINCGSFLVRHTKSAIEKGKIQEEDIDRALFNLFSVQLRLGIFDKPSNNQWFSQLGPNSVCTKEHRELAAEAVRQGAVLLKNDHNFLPLKRSEVRHVAIIGPSANDAYAMGGDYTGVPCNPTTFLKGIQAYATQTSFAPGCKDASCNSTDLFGEAVEAAKRADIVVVIAGLNLTEEREDFDRVSLLLPGKQMGLIHAIASVAKKPLVLVLLGGGPVDVSFAKQDPRIASILWLGYPGEVGGQVLPEILFGEYNPGGKLPITWYPESFTAIPMTDMNMRADPSRGYPGRTYRFYTGDVVYGFGYGLSYSKYSYSISSAPKKITVSRSSDLGIISRKPAYTRRDGLGSVKTEDIASCEALVFSVHVAVSNHGSMDGSHAVLLFARSKSSVPGFPIKQLVGFESVHTAAGSASNVEITVDPCKQMSAANPEGKRVLLLGAHVLTVGDEEFELSIEL

SEQ ID NO: 53449 - protein, 295 aa, Zea mays
  Clone ID: 700381665_FLI.pep
FKDLVGSAYYVAPEVLKRKYGAEADIWSAGVILYILLSGVPPFWAENEDGIFDAVLRGHIDFSSDPWPSISNGAKDLVKKMLRQDPKERLTAAEILNHPWIREDGEAPDKPLDITVIGRMKQFRAMNKLKKVALKVVAENLSDEEIMGLKEMFRSLDTDNSGTITLEELRSGLPKLGTKISESEIKQLMEAADVDGNGTIDYAEFISATMHLNRLEKEDHILKAFEYFDKDHSGYITVDELEEALKKYDMGDDKTIKEIIAEVDTDHDGRINYQEFVAMMRNNSPEIVPNRRRMF

SEQ ID NO: 53450 - protein, 122 aa, Zea mays
  Clone ID: 700426948_FLI.pep
LSVQNNPSRVWNQQLECRSRSCIIIPDSQIALRMSTAAWYSARVRIFGESMETTSSARNPSWSRHNSSLPWQTSSGRTSVLCRPGSSRSRSVSPLSPTSTDTLDRSMPHCIDRYLSARGRDA

SEQ ID NO: 53451 - protein, 694 aa, Zea mays
  Clone ID: 700346970_FLI.pep
TAMQGFTEKIVGMMKSENLFASQGGPIILSQIENEYGPEGREFGAAGQAYINWAAKMAVGLGTGVPWVMCKEEDAPDPVINACNGFYCDAFSPNKPYKPTMWTEAWSGWFTEFGGTIRQRPVEDLAFAVARFVQKGGSFINYYMYHGGTNFGRIAGGPFITTSYDYDAPIDEYGLVREPKHSHLKELHRAVKLCEQALVSVDPAITTLGTMQEARVFQSPSGCAAFLANYNSNSYAKVVFNNEQYSLPPWSISILPDCKNVVFNSATVGVQTSQMQMWGDGASSMTWERYDEEVDSLAAAPLLTTTGLLEQLNVTRDSSDYLWYITSVDISSSENFLQGGGKPLSLSVQSAGHALHVFVNGQLQGSAYGTREDRRIKYNGNANLRAGTNKIALLSVACGLPNVGVHYETWNTGVGGPVVLHGLDEGSRDLTWQTWSYQVGLKGEQMNLNSIEGSSSVEWMQGSLIAQNQQPLAWYRAYFETPSGDEPLALDMGSMGKGQIWINGQSIGRYWIAYADGDCKECSYTGTFRAPKCQSGCGQPTQRWYHVPKSWLQPTRNLLVVFEELGGDSSKIALVKRSVSSVCADVSEDHPNIKNWQIESYGEREYHRAKVHLRCARGQSISAIKFASFGTPTGTCGDFQQGDCHSANSHTVLEKKCIGLQRCVVAISPESFGGDPCPSVTKRVAVQAVCSPVA

SEQ ID NO: 53452 - protein, 191 aa, Zea mays
  Clone ID: 700474522_FLI.pep
VYYPRRPEMSPLQAIRAACGEDHYMCRFQEFGVAEAEFALYDIKWVFKKTFGMRKPAPLILPKDKSFFDSLDSDGTCPPWLSEEDISYYAEKFAKTGFTGGLNYYRCIDRSWELSAAWTGAPIKVPSKFIVGDLDITYNAPGVPDYIHKGGFKASVPNLEDVVVMEGVSHFINQEKPNEVSDHICEFFSKF

SEQ ID NO: 53453 - protein, 74 aa, Glycine max
  Clone ID: 700808401_FLI.pep
PKGGFFELVICPHYFFEITVFYGIFFISQTLYSFAFAVGTTMYLVGRSYSTRKWYLSKFEDFPKHVKAVIPFVF

SEQ ID NO: 53454 - protein, 372 aa, Zea mays
  Clone ID: 700169504_FLI.pep
SIRVSFPFLLAPSTPLHSATPPTSRLPDPAMEKMLHSAPAHGRLPECFIFPADKLPQAKATSATVSLPIVDLSLGRDEVRRAILEAGKEIGFFQVVNHGVSLEAMQDMETVCQEFFRLPAEDKAGLYSEDTGRATRIYSSTMFDTGGEKYWRDCLRLACSFPAVGDSAAAWPDKPRRLREVVERFTVQTRGLGMEILRLLCEGLGLRPDYLEGDISGGDVVLHVNHYPPCPDPNATLGLPPHCDRNLLTLLLPSMVPGLEVAYRGDWIRVEPVPGAFVVNFGCQLEVVTNGILKSIEHRVMTNLGVARTTVATFIMPTTDCLIGPAAEFLSDDNPPCYRTLTFGDFKRIYSVVKLGSSLNLTTNLKTVQKEL

SEQ ID NO: 53455 - protein, 139 aa, Glycine max
  Clone ID: 700890624_FLI.pep
IDNLQLHIGTSINTIDYFVYWFPYSHLLHSLVDCPPNPPHHKLYFFYNLKESCHWNPYHHFFSSPRVTFAHVIGLKSFGSALCMTSISLGNSVSSLLVAIVMKISATDEMPGWIPGNLNKGHLDMFYFLLAALTCCVVK

SEQ ID NO: 53456 - protein, 124 aa, Glycine max
  Clone ID: 700872405_FLI.pep
CPVTEKLPCCFFLIPDPSLPDRVAVGGDADLVGDVDSTFSWKCSCVVGIDTPTKTSGKGFQAIARRPAVHGGLGQGVEVSHSVAAPRLWPSTATKVAKARRHRDRDTAAVDPSMCHVCTHHNHV

SEQ ID NO: 53457 - protein, 181 aa, Zea mays; identical to SEQ ID NO: 42287
  Clone ID: 701182236_FLI.pep

SEQ ID NO: 53458 - protein, 442 aa, Glycine max; identical to SEQ ID NO: 44712
  Clone ID: 700854458_FLI.pep

SEQ ID NO: 53459 - protein, 217 aa, Zea mays; identical to SEQ ID NO: 53403
  Clone ID: 700084059_FLI.pep

SEQ ID NO: 53460 - protein, 611 aa, Zea mays; identical to SEQ ID NO: 41819
  Clone ID: 700093879_FLI.pep

SEQ ID NO: 53461 - protein, 366 aa, Zea mays; identical to SEQ ID NO: 48474
  Clone ID: LIB3150-054-H10_FLI.pep

SEQ ID NO: 53462 - protein, 335 aa, Zea mays; identical to SEQ ID NO: 53399
  Clone ID: LIB3150-072-H9_FLI.pep

SEQ ID NO: 53463 - protein, 334 aa, Zea mays; identical to SEQ ID NO: 50022
  Clone ID: 700049323_FLI.pep

SEQ ID NO: 53464 - protein, 358 aa, Zea mays; identical to SEQ ID NO: 53376
  Clone ID: 700097272_FLI.pep

SEQ ID NO: 53465 - protein, 382 aa, Zea mays; identical to SEQ ID NO: 41858
  Clone ID: 700214985_FLI.pep

SEQ ID NO: 53466 - protein, 115 aa, Zea mays; identical to SEQ ID NO: 53416
  Clone ID: 700431339_FLI.pep

SEQ ID NO: 53467 - protein, 335 aa, Zea mays
  Clone ID: LIB3245-505-C3_FLI.pep
TRRSAKMADFRTSTQRERWIFQSHDLMERWAAANQRAAQTLAQYGTTRLNVDLLDGSVSYPESMPDHVEGSSVVKPLSYEEEQLTRVFYEQKIQEVCAAFKFPHKIQATAIIYFKRFYLQWSVMEHQPKHIMLTCVYASCKVEENHVSAEELGKGIQQDHQIILNNEMILLKTLDFDLIVYAPYRSIEGFIDDLEDFCRAGNGPFQRLKELRQAAISHVDKMMLTDAPLLYTPGQLALAALHKSNDLLRVVDFERYLEIIFSRQHSDCPIEQFVQSINEINYLVDQLNIPTVKDMRHVDRKLKHCWDPSSHDEHNKKKEKKSKHKSKRTSTDAQL

SEQ ID NO: 53468 - protein, 338 aa, Zea mays
  Clone ID: 700045527_FLI.pep
AYCIHNAEHQKQLRSDRHGCRHHGYHLPRARRQAGGWHEGRLRRGPHHHAQDRRQAQAGGVRQPMVRCRPRPVPGPAVRLAPELPDRRVPRRLRVGHRGAVGGPGDLRQEPRAGGDPLPLGHARRARVRVPGAARPQRRQVRRGGVVQGGLPDLQRGRARLPRQPEPGPRAEHPGHLGVPGGAHGRRRGVPRRRRPARGGGRPAVPWRQLRPARARRRPGGVRRAQGEGDQERPPRHVLHVRLLRAGYRHRQGPPREPRRPHRRPRQQQRLGLRHQLRPRQVSEGMMLACVYRRRTVFLRTAGCTSICEGSCAWEPEIVPLVYFCMHAVELINEICCK

SEQ ID NO: 53469 - protein, 289 aa, Zea mays
  Clone ID: LIB4071-004-F10_FLI.pep
KPQPAHSRTKNPTHGFSQAAPPARHLVPELRPPGGRRLRPNDPDRGEQLPLPGVAGHPGQLRARRPGGRRLLPPAALPQVLPGAGPPLVRPHLGAHGLRGRRRAAPLRHGRLRRAAPVRRARRRGARDAGAGEPPPRQRPDLVRRERGGRLQRGPVRDPARGPRQLPRPRLPQEPHRDLPRRAAAALPGRQRPRVQERLRGLPHRRAVLPQHVQQPAHLPRLQVLGVLQARVPAGLHLRARQPLAHPRVRRAARAQGHLLPLELGARRAPPPSTSVASRGSRICGACVV

SEQ ID NO: 53470 - protein, 285 aa, Zea mays
  Clone ID: LIB3960-022-C3_FLI.pep
SLHNIANMQIILELTRCRGRNSRGGLHKCAPCTAMPNNKIVAANMEEKGAGGKAAVPHDELPRFTIFLIPNRREPPLDLVELVCLHHRISLGNGVPGSSPVVELAVVLVGVAVECAVQVPTPAVESRKSNPLPAGAAPVRPYLPPFGDRRHPLAGSGNISGLLHVHCLQLNLGNSYYRVAASNNRLHDGVAAVHDAVDRGGSQLGLILLRYHLLVALGAHVHGRRAAEEATVIDAEDGSLGGLAPSLLVLHGFLNSDETALFAIPLRRSPRGRRGGEGRGIAGNS

SEQ ID NO: 53471 - protein, 231 aa, Zea mays
  Clone ID: LIB3279-233-E1_FLI.pep
GVMAVSFANLNTEAGLKKLDEYLLTRSYITGYQASKDDLAVYTSFSSAPSSKYINVARWFNHIDALVRLSGITAEGQGVKVESSAVPSAPTPDVAEAQAPAAEEEDDDDVDLFGEETEDEKKAAEERAAAAKASGKKKESGKSSVLLDVKPWDDETDMAKLEEAVRSVQMEGLLWGASKLVPVGYGIKKLQIMMTIVDDLVSVDTLIEDYLCAEPVNEYVQSCDIVAFNKI

SEQ ID NO: 53472 - protein, 245 aa, Zea mays
  Clone ID: LIB3593-012-G11_FLI.pep
KMSLMRMERGDEELKLLGMWASPFVLRVQLALSLKGLSYEYVEVDISNKSELLLHSNPVHNKVPVLIHNGNPVCESQLILQYIDEAFAGTGPCLLPADPYERAVARFWAAYIDDKVLASWMQASRGKTEEDRAEGRKQWLVVLETLEGALRDCAAGKGMMMPFFGGDSVGYVDVVLGSLLGWVSANQEVWGIECFHPRRAPLLAAWADRFAALQTVQTVVPQVSRLVELGKMLRARQSDGAAAES

SEQ ID NO: 53473 - protein, 163 aa, Glycine max
  Clone ID: 700833817_FLI.pep
ELRLLPSLDTLKVKDKKDRGTLTVKVMYYQFNKEEQLVALEAEKKILEERKKLKEAGMIGSTMDALDGAVSVVGSGVGLVGTGVVAGAGLVGSGIGAGAGLVGSGIGAGVGIVGSGLGAVGSGLSKAGKFMGRTITGHSGSRKSGSSTPVNNALENGGGAKPL

SEQ ID NO: 53474 - protein, 611 aa, Zea mays; identical to SEQ ID NO: 41819
  Clone ID: 700092907_FLI.pep

SEQ ID NO: 53475 - protein, 826 aa, Zea mays; identical to SEQ ID NO: 53448
  Clone ID: 700076772_FLI.pep

SEQ ID NO: 53476 - protein, 185 aa, Glycine max
  Clone ID: 700662628_FLI.pep
DKLFLFSAKRRVLLKTYFGEKKYKKIEIKLSPKDLSSDAESFTFTLRFSMSAFDNVVGGKLKLKGKALDVAGGVKKKKKKNKRNQEQLLQVAEDEVSAGGNTEQAKDPNDGDINDVSELSGKGKTAHYDDHLTPAERRYIEQREQLDVHRLAKISNKSHRDRIQDFNQYLANMSEHYDIPKVGPG

SEQ ID NO: 53477 - protein, 200 aa, Glycine max; identical to SEQ ID NO: 53447
  Clone ID: 700751682_FLI.pep

SEQ ID NO: 53478 - protein, 150 aa, Glycine max; identical to SEQ ID NO: 53357
  Clone ID: 700726793_FLI.pep

SEQ ID NO: 53479 - protein, 158 aa, Zea mays
  Clone ID: 700356773_FLI.pep
FGDVVPTKLEQPFILRTPDMSAMHHDSSHDLKTLGSKLKDIVGVADTSLEVRYITRHICDLVAERGARLAAAGIYSILKKIGRDKVPSSGSKMPRTVIALDGGLYEHYKKFSSCVEATLTDLLGEEASSSVVAKLANDGSGIGAALLAASHSQYGESD

SEQ ID NO: 53480 - protein, 354 aa, Zea mays; identical to SEQ ID NO: 53437
  Clone ID: 700471442_FLI.pep

SEQ ID NO: 53481 - protein, 191 aa, Zea mays; identical to SEQ ID NO: 53452
  Clone ID: 700474747_FLI.pep

SEQ ID NO: 53482 - protein, 466 aa, Glycine max
  Clone ID: 700560219_FLI.pep
IKMAQPDTSLWIKSSDGRNEVLNHDEYARLFSPYIGSKPAAGYVTEATRGTGVVSASSLGLVEILMDADQWSEMFSSMIASAATVEVLSSGTGGTRSGALQVMLAEVQLLSPLVPARQVSFLRFCKKHAEGLWAVVDVSVDIGRNVTNSHPLMSCRRLPSGCVIQDMPNGFSNITWVEHSQYDESVIHQLYRPLVSSGIGFGAQRWIATLLRQCDCLAILRSPQGPSEDPTAQAGRTNMMKLAQRMTECFCSGICASSACKWDILHIGNLADDMRIMARKIDDPTEAPGIVLSASTSVWMPVSRKRVFDFLRDENLRGEWDLLSKDGPMKEMLHIAKGQDRGNCVSILHSANSECNVLYLQESWSDASGSMVVYSPINMQALQMVMSCGDSSFVPLRPSGFAILPDGTSNNGDGSDGGGSCLLTVGLQMLPNGNHQSAKFTMESVDAVNNLISFTIQKVKDALGVA

SEQ ID NO: 53483 - protein, 242 aa, Zea mays; identical to SEQ ID NO: 53356
  Clone ID: 700335853_FLI.pep

SEQ ID NO: 53484 - protein, 531 aa, Zea mays
  Clone ID: LIB3245-539-H7_FLI.pep
GGAAMAAGDLEVLTALDTAKTQWYHFTAIVVAGMGFFTDAYDLFCISLVTKLLGRIYYTVEGSATPGTLPPHVSASVNGVAFVGTLSGQLFFGWLGDKLGRKKVYGMTLMLMVLCSVASGLSFGHTPASVMATLCFFRFWLGFGIGGDYPLSATIMSEYANKKTRGAFIAAVFAMQGFGIMAGGLVAIVVSASFKARFPAPAYAVDPAGSTPPQADFVWRIILMLGAMPAALTYYWRTKMPETARYTALVAKNAKQAAADMSKVLQVEISAGAAEEDAVAATATAPAPASASASFGLFSGEFLRRHGLHLLGTSSTWFLLDIAFYSQNLFQKDIFSAVGWIPKAATMNALEELFSIARAQSLIALCGTVPGYWFTVALIDVLGRFAIQVTGFLMMTVFMLGLAVPYEHWTTPGHHIGFIVMYGLTFFFANFGPNATTFIVPAEIFPARLRSTCHGISAASGKLGAIIGSFGFLYLAQNRDPAKTDHGYPAGIGVRNSLFLLAGCNLLGLAFTFLVPESKGKSLEEMSGEND

SEQ ID NO: 53485 - protein, 206 aa, Zea mays
  Clone ID: 700380171_FLI.pep
GRRRRRGAGGPDGVQDGARPADGAVDADARVLGLRLAHGHQPPHAAALLHPHPQRVRQDARRQQRHPGQLAPQHLLPLLRPVQLTDRDPCPARNWSWLAGALLGSVTIVYSTILCSTTTRLLLLLLVYYHQVRRNGTASRRRRPWEGRCLRSPCRCSCIVIMVLGVVASGARFLGQASCAMFVGSGWHVMPCVTLIASRQARRQKN

SEQ ID NO: 53486 - protein, 299 aa, Zea mays
  Clone ID: LIB3066-045-C11_FLI.pep
CSVPNEQCVLYMRLITLLASSLQHVRNQRFDPRREVLKLGPVPPPGGAAPAGEVGRRSGGNGERVQRLRDHGEAEEGEDLEEVVRAGDEAEQAAPGDLVPCAVVGPQAREEAVVVEVAGEADGEDEHAGAEQVNGGVREAAAEVLRVDHGGRADQVAAGDGGRRAQRHAPAVPVHAQHLEDPLEEVRGERGAEQLGARALDGARHREGRGGGEQRRGVGQQHAVPASQERHPAPLPGVPAGGTRHGVPELGVGHVVAAELGEARVRHGHERHRRHRRHVRRRRRRVQEWEPHHPSPPPA

SEQ ID NO: 53487 - protein, 197 aa, Zea mays
  Clone ID: LIB3062-019-C9_FLI.pep
PAACPRLPQPTAVRPRSSCTACLATTSTLTRATRRRPARGLLRQVPGGPEPLEQDLPGRAPAYRGEVHLEALLGEADDPHRRVRVLEVRVQPGEARDPAVPGDAVRAQVPHHGEHRAAGRGGRALQQVMRDGGHRPDRSMSEREHSECRVFSLAISFFFSLPGGEKKSLLLLGGGRSLLLFASRVKFTYLVKVLFHH

SEQ ID NO: 53488 - protein, 157 aa, Zea mays
  Clone ID: LIB3182-001-A11_FLI.pep
ERFTNALFHYATMFDSLEAMHRCTSGRDITDSLTEVYLRGEIFDIVCGEGSARTERHELFGHWRERLTYAGLTQVWFDPDEVDTLKDQLIHVTSLSGSGFNILVCDGSLALAWHNRPLYVATAWCVTGGNAASSMVGNICKGTNDSRRKENRNGPME

SEQ ID NO: 53489 - protein, 236 aa, Zea mays
  Clone ID: LIB4698-002-E4_FLI.pep
PSRHKEERREISDLTTIMATAIVPTDAELLQAQADLWRHSLYYLTSMALKCAVELHIPTAIHNLGGSATLPDLVAALSLPAAKLPFLGRVMRLLVTSGVFASSDDVQYRLNPLSWLLVEGVESEDHTYQKYFVLGTVSRHYVEAGMSLADWFKKEEDEDRQLPSPFEALHGVPLVHESTKLLDEELDRVVEEGVAAHDNLAIGTVIRECGADVFSGLRSLTYCCGRQGNASAALEL

SEQ ID NO: 53490 - protein, 478 aa, Zea mays; identical to SEQ ID NO: 44927
  Clone ID: LIB4570-007-C11_FLI.pep

SEQ ID NO: 53491 - protein, 173 aa, Glycine max
  Clone ID: 700838708_FLI.pep
EGFTGQRYKNRELQLMRLMDHPNVISLKHRFFSTTSADELFLNLVMEYVPESMYRVSKFYSNTNQSMPLIYVKLYMHQIFSGLAYIHTVPGVCHRDLKPQNILVDPLTHQVKICDFGSAKVLVKGKANISHICSLFYRAPELMFGATEYTTSIDIWSAGCVLAELLLGQWTSL

SEQ ID NO: 53492 - protein, 474 aa, Zea mays; identical to SEQ ID NO: 42010
  Clone ID: 700100967_FLI.pep

SEQ ID NO: 53493 - protein, 337 aa, Zea mays
  Clone ID: 700239811_FLI.pep
RWRPCSSSSSSSAATRRRSSTCPRASGSTRRTRSWWRTTSARAPRGAARRCPSSPRSTCTASTPGTCRSAPSSGAASGTSSRRGTASTPTAPAPTAPPGRATGRPRARTSPWSTRAGRRGSRRRSCSTTASRRAGSRRSGSCTSTASPKPAAPAPRSPAPARSGWMTGCCAACTTRRTSGRRCSSRRRRRRRRWSRRRRSRTPTPTRGRRNRRSTTTRSRSWALYRRSTTWAQPQPLPASSCPRRRWRTSATSAATTGSRASTSTTCRCRGTPPISTAPCSSRRWPPRWSRTAASPSSEILRRLRGRPDAAQRKLCIVQIFFMEPTTTKKVLANILF

SEQ ID NO: 53494 - protein, 118 aa, Zea mays
  Clone ID: 700379928_FLI.pep
DSSSSPHLKDPNLGTTGFLHPRILVATSQQPCSSHLFSCRISLAFSASGYSQSVLGDRFSHSNSSTIVCLLLRFAPRSNRYSFQRFLLFHLMLLSLKGRFLPPFACQSTFDETDIYWI

SEQ ID NO: 53495 - protein, 428 aa, Zea mays
  Clone ID: 700224433_FLI.pep
RLLWWLKLLKEKEKAEKKKEKRSDRKAPKQCETSKHSKHSHKKRKLEDVIKAEQGPKRVPKESVEQLEKSGLSEEHGAPSFVHTIRDSPESSQDSGKRRKVVLSSPSQPKNGNILRFKIKSSQDPQSAVLEKPRVLEQPLVQQMGSGSSLSGKQNSIHHKMNVRSTSGQRRVNGDSQAVQKCLITESPAKTMQRLVPQPAAKVTHPVDPQSAVKVPVGRSGLPLKSSGSVDPSPARVMRRFDPPPVKMMSQRVHHPASMVSQKVDPPFPKVLHKETGSVVRLPEATRPTVLQKPKDLPAIKQQDIRTSSSKEEPCFSGRNAEAVQVQDTKLSRSDMKKIRKAEKKDKKFRDLFVTWNPVLIENEGSDLGDEDWLFSSKRNSDAIMVQSRATDSSVPIHPMVQQKPSLQPRATFLPDLNMYQLPYVVPF

SEQ ID NO: 53496 - protein, 199 aa, Zea mays
  Clone ID: 700243109_FLI.pep
LESLHQTLEWTNKQNGKPDRTRTKSGLEEQLTRGYCAVVAAPTAAAAAGFGAGGCGWWETTSGGLGARISASACFRALYISSVSTVTRRFTWVSIPRSDGVVRCSTVRWQRRRRMASSVRRWRRRVPGRPRTSVMYSRGLHATGTRDLNALNALPLISAPPLPATFFSSWSWRGRCGGRKPKPRRGVPVPCNPRRGWAG

SEQ ID NO: 53497 - protein, 101 aa, Glycine max
  Clone ID: 700808322_FLI.pep
GILLEADKDSKYRNIWNLYHSWFGRMALFFAALNIVLGMRAAGAGNDWKAGYGFLLSIVLVAVIVLEVLAYLKRSEKRSLPQTFQMDPVGDANFPTNLAKG

SEQ ID NO: 53498 - protein, 109 aa, Zea mays
  Clone ID: 701178852_FLI.pep
PHLLRCLSSSLSSLPSSRSIVIAIQASKPVRRLSSKKHTTTNGEVTVLRPGRGRQERPVDAGGGQAAGGLHQRQRPRELAPPAQARRPQPLRQELPPPLDQLPPPGHQA

SEQ ID NO: 53499 - protein, 343 aa, Glycine max
  Clone ID: 700836661_FLI.pep
QNVPASAGGETRVEEKKPTREDVTDERKSESTSAIINASELPPHVLLEMPALSPTMNQGNIAKWRKQEGDKIEVGDILCEIETDKATLEFETLEEGYLAKILAPEGSKEVAVGHPIAITVEDASDIEAIMNSVSRSSTNQQKAPQRDTKSEAKAQKNNIIRISPAAKLLITEYGLDASTLNATGPYGTLLKGDVLSAIKSGKLSPKPASSKEKVSSFQSHQQVAASQESKSDLKLSDAYEDFPNSQIRKVIAKRLLDSKQNTPHLYLSSDVVLDPLLSLRKDLKEQYDVKVSVNDIIVKVVAAALRNVPEANAYWNVETGEVVLNDSIDICIAVATEKVIDGV

SEQ ID NO: 53500 - protein, 86 aa, Zea mays
  Clone ID: 701162854_FLI.pep
HIADRLSASPSETRWRLGFCCLPSPNPRAPAPIPWRARLRLRLGGLVPQAGIRASAERKWHRVTNSIYLETSRTTTLPTSSQLPRR

SEQ ID NO: 53501 - protein, 204 aa, Glycine max
  Clone ID: 700836155_FLI.pep
LSSFQFWHHTMPTLNHVLTFTFFLLLSCHCHLLNGQEDTSFGRAIDRKLLGLKRKEKLSHFKFYWHDIVSGRNPTSVAVVPPPPKVNTTTAFGLVNMIDNPLTLGPELSSKLVGKSQGFYASASQTEIDLLMAMNFAFIEGKYNGSTITILGRNCVFHKVREMPVIGGSGLFRFARGYAEARTHWLDLKGGDAIVEYNVYVMHY

SEQ ID NO: 53502 - protein, 406 aa, Glycine max
  Clone ID: 701129526_FLI.pep
ADGKSRCFGFVNFENPDDAAKAVEGLNGKKVDDKEWYVGKAQKKSEREQELKGRFEQSIKESADKYQGVNLYLKNLDDTISDEKLKEMFAEYGTITSCKVMRDPTGIGRGSGFVAFSTPEEASRALGEMNGKMIAGKPLYVALAQRKEDRRARLQAQFSQMRPVAITPSVAPRMPLYPPGAPGLGQQFLYGQGPPAMMPPQAGFGYQQQLVPGMRPGGGPMPSFFVPMVQQGQQGQRPGGRRGTGPVQQPQQPMPMMQQQMLPRGRVYRYPPGRNMQDVPLQGVAGGMMSVPYDMGGLPIRDAVGQPMPIQALATALANAPPEQQRTMLGEALYPLVDQLEHDAAAKVTGMLLEMDQPEVLHLIESPDALKAKVAEAMDVLRNVAQQQTNPADQLASLSLNDNLVS

SEQ ID NO: 53503 - protein, 179 aa, Glycine max
  Clone ID: 701100555_FLI.pep
SISPRNIVSTVNLDCKLDLKTIALQARNAEYNPKRFAAVIMRIRDPKTTALIFASGKMVCTGAKSEQQSKLAARKYARIIQKLGFPAKFKDFKIQNIVGSCDVKFPIRLEGLAYSHGAFSSYEPELFPGLIYRMKQPKIVLLIFVSGKIVLTGAKVRDETYTAFENIYPVLTEFRKNQQ

SEQ ID NO: 53504 - protein, 54 aa, Zea mays
  Clone ID: 700047370_FLI.pep
PSSIRSIEEVHRLIEGCAHRHLTPSSAAQNYNLDNTRLVFVRGCPLDDHPCPST

SEQ ID NO: 53505 - protein, 451 aa, Zea mays
  Clone ID: 700220416_FLI.pep
SLYSRQIKHSTTGYTCRQTTEQKIKQQKYEAYRDGMGCDAMQCNAMQGPLVIWIWRPRFTPGSHDDLGLEDAGFDLLVREHDAAVAVDLVADVDVLAEDGHVLDARPLADGGVPADDAAGDAGVLLDARGAHDGAAGQAHPGLHHAAWPDRDVGPDEAAVPDDRGLVHQHVAQDVRARREPGGRLLPQRVQVQAQARDVVPRLPDVHPETRENHGEEGPVRRDAREHLLLDGRRLQLDAAEHGRVEQVDAGVDLVAHERLGLLHEPLHLAGALLHDHHAVLGRLVDLGHHDRGLAAVGPVELNELGERVLADHVAVEHEERVAGSVGELVAGQRQRACGPEGLRLLRAGDLDAKLALEVLEKVEHDLRLVIDGQDNLCNTNFLQSLDLVQDHGLVAEIHERLGHAERERAQAGAEASDENEGLHGCSSPPPNSAPTPPGEAFCAYADGRHV

SEQ ID NO: 53506 - protein, 356 aa, Zea mays
  Clone ID: 700241432_FLI.pep
VLSLSALVAAVRKAMVGLGWRVGSKVQRWVRSCLRGFSSAAVPSQLENVGFIGLGNMGSHMARNLITAGYKVTVHDINENSMKKFSEDGIPTKQSPLEVSESSDVIITMLPSSTHVLEVYNGPNGLLCRGERLGPWLYIDSSTVDPQTSRKISTAISRCLLKEKKGYAESPKILDAPVSGGVPAAEAGKLTFMVGGLEEAYLAAKPLLQAMGEKTIYCGGAGNGSAAKICNNMAMAISMLGVSEAFVLGQNLGIKATTLTDIFNCSSARCWSSDTYNPVPGVMEGVPSSRNYSGGFTSKLMAKDLDLAMASASGVGFKCPMGSNALEIYRKLCEDGCELKDFSCAFRHYYSGKNEE

SEQ ID NO: 53507 - protein, 95 aa, Zea mays
  Clone ID: 701183506_FLI.pep
PLPNLSLAASTHRNNKANDDAGPAAHGLHVLLIGQRRGAEGGGGGGGAAGGAVRARRAGGGAGGDGHADAHLLLPAEEGDLHGHEGHGAPGGRRG

SEQ ID NO: 53508 - protein, 412 aa, Glycine max
  Clone ID: 701128972_FLI.pep
REEERMAACTVYSTQSLSTNCSISTPSKTQLSFFHQKQVVFWRNSKKGSCSSRRSYVITCAAGDSQTVVIGLAADSGCGKSTFMRRLTSVFGGAAEPPKGGNPDSNTLISDTTTVICLDDYHSLDRTGRKEKGVTALDPRANDFDLMYEQVKALKDGIAVEKPIYNHVTGLLDPPELIKPPKILVIEGLHPMFDSRVRDLLDFSIYLDISNEVKFAWKIQRDMAERGHSLESIKASIEARKPDFEAYIDPQKQYADAVIEVLPTQLIPDDNEGKILRVRLIQKEGVKYFSPVYLFDDGSTISWIPCGRKLTCSYPGIKFFYGPETYYGNEVSVVEMDGQFDRLDELIYVESHLSNLSTKFYGEVTQQMLKHADFPGSNNGTGLFQTIVGLKIRDLYEQLIASKAETPVAAKA

SEQ ID NO: 53509 - protein, 245 aa, Glycine max
  Clone ID: 701129548_FLI.pep
MPNSPSFRVPLNDHTGELNRLSGVKPANLEDMFGSLDPSILSKYHGISLDVAGPQLQSPTGIQMRQNVNQQLGGYSSSLSTLNVIGSRSFRLDQSGEAASVALNPRVAAFAKRSQSFIERGVVNHHSELPSPKPSTFSNWGSPVGKLDWAVNGEELNKLRKSASFGFRGSDTPLTKTSTKMSANVDDEPDVSWVNSLVKDAPPESGESGEYSVEDQRKLLQCHNGTDAIPAWLEQLYLDQEQMVA

SEQ ID NO: 53510 - protein, 533 aa, Glycine max
  Clone ID: 701069867_FLI.pep
GAVAQLLFQNPENPKSAMVSNGRMLCSSLITAPPSSSLSRTTPSYFCSFPSRRIIFTPRIGSSPAPAQAQAQPKEAKLWGGRFEEGVTDVVERFTESISFDKKLYKQDITGSRAHASMLAHQGLISEIDRDSILQGLDEIERRIENGEFNWRADREDVHMNIEAALTDLIGEPAKKLHTARSRNDQVLTDFRLWCRDAIDKILLSMKQLQVSLITLALNNQGLIVPGYTHLQRAQPVLLQHLLLAYVEEIERDAGRLVDCRARMNFCPLGACALAGTGLPIDRFMTSEALGFTAPLRNSIDAVSDRDFVLEFLSANAITAVHLSRLGEEWVLWASEEFGFITPSDSVSTGSSIMPQKKNPDPMELVRGKSARVIGDLVTLLTLCKGLPHAYNRDLQEDKEPVFDSVKTILGMLEVSAEFALKITFNWERIQKALPAGHLDATTLADYLVNKGVPFRTSHDIAGKSVALCTSKNCQLLDLSLDELRSINPVFEEDVYEFLGVENAIKKFVSYGSTGSACVASQLDYWLRKLEMK

SEQ ID NO: 53511 - protein, 379 aa, Zea mays
  Clone ID: 700474104_FLI.pep
SFALFTIPPQNTSCDPRSLRRASIMSAYCGKYADELIKNAAYIGTPGKGILAADESTGTIGKRLSSINVENVEENRRALRELLFCCPGALQYISGVILFEETLYQKTKDGKPFVDVLKEGGVLPGIKVDKGTIEVVGTDKETTTQGHDDLGKRCAKYYEAGARFAKWRAVLKIGPNEPSQLAIDLNAQGLARYAIICQENGLVPIVEPEILVDGPHDIDRCAYVTETVLAACYKALNEHHVLLEGTLLKPNMVTPGSDSKKVTPEVIAQYTVRTLQRTVPAAVPAVVFLSGGQSEEEATLNLNAMNKLSTKKPWALSFSFGRALQASTLKAWAGKVENVEKARAAFLARCKANSEATLGTYKGDAAADTESLHVKDYKY

SEQ ID NO: 53512 - protein, 574 aa, Glycine max
  Clone ID: 700837911_FLI.pep
FQEERSAMDIGTYGYPTPAVKKIESYYDVPEGVDIRGRYDAEFAKILTKDALKFVADLQREFRNHIKYALECRREAKKKYNEGALPEFDPATRYIREQEWVCAPVPPAVADRKVEITGPVDRKMVINALNSGAKVFMADFEDALSPGWENLMRGQVNLKDAVAGTISLHDKARNRVYKLNDQTAKLFVRPRGWHLPEAHILIDGEPATGCLVDFGLYFYHSYSAFRRTQGAGFGPFFYLPKMEHSREAKIWNNVFEKAEKVAGIERGSIRATVLIETLPAVFQMNEILYELKDHSVGLNCGRWDYIFSYVKTFQAHPDRLLPDRVLVGMTQHFMKSYSDLLIRTCHRRGVHAMGGMAAQIPIKEDPVANEVALELVRKDKLREVKAGHDGTWAAHPGLIPACMEIFNNNMGNASNQIDTVKREDGANITEQDLLQIPRGARTMEGLRLNTRVGIQYVAAWLTGSGSVPLYNLMEDAATAEISRVQNWQWLKYGVELNGDGLGVKVNKELFGRVVEEEMARIEKEVGTEKFKKGMYKEACKIFTRQCTSPMLDDFLTLDAYNYIVVHHPRETSKL

SEQ ID NO: 53513 - protein, 670 aa, Glycine max
  Clone ID: 700897094_FLI.pep
RLDLSKRLGLENKQVKFWFQNRRTQMKTQLERHENIMLRQENDKLRAENSLIKEAMSNPVCNNCGGPAIPGQISFEEHQIRIENARLKDELNRICVLANKFLGKPISSLTSPMALTTSNSGLELGIGRNGIGGSSTLGTPLPMGLDLGDGVLGTQPAMPGVRSALGLMGNEVQLERSMLIDLALAAMEELLKMTQAESPLWIKSLDGEKEIFNHEEYARLFSPCIGPKPAGYVTEATRETGIVIINSLALVETLMDANRWAEMFPSMIARAINLDVISNGMGGTRNGALQVMHAEVQLLSPLVPVRQVRFIRFCKQHAEGVWAVVDVSIEIGHDAANAQPSISCRRLPSGCIVQDMPNGYSKVTWLEHWEYDENVVHQLYRPLLSSGVGFGAHRWIATLQRQCECLAILMSSSISSDSHTALSQAGRRSMLKLAQRMTSNFCSGVCASSARKWDSLHIGTLGDDMKVMTRKNVDDPGEPPGIVLSAATSVWMPVSRQRLFDFLRDERLRSEWDILSNGGPMQEMVHIAKGQGHGNCVSLLRANAVNANDSSMLILQETWMDASCSVVVYAPVDVQSLNVVMSGGDSAYVALLPSGFAILPDGHCNDNGCNGSLQKGRGSDDGSGGSLLTVGFQILVNSLPTAKLTVESVDTVNNLISCTIQKIKAALRVA

SEQ ID NO: 53514 - protein, 102 aa, Zea mays
  Clone ID: LIB3062-023-G10_FLI.pep
TRRRCNLRRGCQLSQRRESFLGLVWKSHFFQEIFIFLKEISLFFFEKIEFPWEIRVSKRALNFVKLCPESIFPIGAPWSLNLQNYMVQTKYCFFIRVDVLCG

SEQ ID NO: 53515 - protein, 904 aa, Glycine max
  Clone ID: 700834346_FLI.pep
EKKEKLTNTTAPNFLFLTMAASVDNRQYGTHINAVVRACGPDFNTPLPSDFDLDSSSDDEDQNDDASYLKELIQKANAETEASLLDPRDEGTADQWIPRNASMVRLTGKHPFNAEAPLPRLMHHGFITPSPLHYVRNHGPVPKIKWDEWTVEVTGLVKRSTHFTMEKLMREFPHREFPATLVCAGNRRKEHNMVKQSIGFNWGAAGASTSVWRGVPLRHVLKRCGILARMKGAMYVSFEGAEDLPGGGGSKYGTSVKREMAMDPSRDIILAFMQNGEPLAPDHGFPVRMIIPGFIGGRMVKWLKRIVVTEHECDSHYHYKDNRVLPSHVDAELANDEGWWYKPEYIINELNINSVITTPCHEEILPINSWTTQRPYVIRGYAYSGGGRKVTRVEVTLDGGETWHVCTLDHTEKPNKYGKYWCWCFWSLEVEVLDLLGAKEIAVRAWDEGLNTQPEHLIWNVMGMMNNCWFRVKTNVCKPHKGEIGIVFEHPTQPGNQPGGWMAKEKHLEKSQKPKPTLKKSVSTPFMNTSSKMFSISEVKKHSNPDSAWIIVHGHVYDCTRFLKDHPGGTDSILINAGTDCTEEFDAIHSDKAKKLLEDYRIGELITTGYTSDSSPNNSVHGNSEFTHLAPIKETTTPPSRSVALNPREKIPCKLVSKTSISHDARLFRFALPSEDQLLGLSVGKHIFLCATIDGKLCMRAYTPTSSVDEVGFFDLLIKVYFKGVHPKFPNGGLMSQHLDSLPIGSMLDVKGPLGHIEYTGRGNFMVHGKPRFAKRLAMLAGGTGITPIYQVAQAILKDPEDHTEMHVVYANRTEDDILLREELDEWAKIHNDRFKLWYVVEIAKEGWKYSVGFITESITREHLPKASRDSLALTCGPPPMIQFAVQPNLEKMGYDIKNDLLVF

SEQ ID NO: 53516 - protein, 272 aa, Zea mays
  Clone ID: LIB143-016-A11_FLI.pep
ILARLPPETTFCTYARWLQAGHETTSRRRYRSRCPPPRPVPRRRVDPPRQRNLPAGGEDADEEDAAGHDKLRRRRRCRLALAIRSPPPSSPPPPTPPPPPPPRGQAAMEPAAGDHSTTVRCWRGRGGRPALRRAEAAGSFGPQPLASLRCEAELASNKSSRRRWHPQRNTIISSNAGRPCACVDPACSFIIFMEAAQLACMHRLVRPSTVSIYTSVYAWRTSCILLCGSDRSGSSQSFVVELELLAELLTKHAACISLPRVSRHRTTLLTSS

SEQ ID NO: 53517 - protein, 249 aa, Glycine max
  Clone ID: 700835640_FLI.pep
LSMGRSPCCEKAHTNKGAWTKEEDDRLISYIRAHGEGCWRSLPKAAGLLRCGKSCRLRWINYLRPDLKRGNFTEEEDELIIKLHSLLGNKWSLIAGRLPGRTDNEIKNYWNTHIRRKLLNRGIDPATHRPLNEAATAATVTTNISFGKQEQQETSSSNGSVVKGSILERCPDLNLELTISPPRQQQQTQKNLCFVCSLGLHNSKDCSCNVSNAVTVNNTTPSSAAAAAAYDFLGMKTSGVWDCTRLEMK

SEQ ID NO: 53518 - protein, 132 aa, Zea mays
  Clone ID: LIB189-024-D3_FLI.pep
STNVYAYISIIALIVCIPPALIFEGPKLMQHGFSDAIAKVGLTKFVSDLFLVGLFYHLYNQIATNTLERVAPLTHAVGNVLKRVFVIGFSIIVFGNKISTQTGIGTSIAIAGVAMYSYIKAKIEEEKRKKSA

SEQ ID NO: 53519 - protein, 352 aa, Zea mays
  Clone ID: 700150644_FLI.pep
QAARCGGIHHTAHTQTHKISRYSYTNYSSYLLIVRPTRTKPALTSKPETALLRVSSVLDAERHDGSHALLRGNGHGLELAVERRQQCGLLHARPPDEAQQRLLQLGAVGPGVHLRLQPRGVLADEVPHGEAPARHDEVLPCQPQRRAVVAAAVAQVHDALPAGGRRRRLAEDAVQHLALAHVGRAGADAAPVQVVVGPDAEAAVGVGVGVAGVGVDLGEAAQQAVVRQDGVDEEGVGVAEDAQVAAERVGGLDGGGDARDDGRRTERLGDVVQRPAVRVQLPHHGVHERVPGHGGQEALERLGEAEAVHDPVVAVDVDDRLVEVEHHHDPGHGFSSCGALLCRRGVGCQELV

SEQ ID NO: 53520 - protein, 209 aa, Zea mays
  Clone ID: 700159574_FLI.pep
ENGQRVPIQASTKYQCTNNSLRAQHRQIYYEKDNTTICLFTLTPDAKDHMIPYRQQNVSLQDRVYLSISKPQFGELEVGLFVVIKESLLIRSIFLDKRAENRVAQQGFVTWELKKALLITTQKFLEVRVVKDQRVCSPGPLETRPLFVAPSQGVATREGNNVLIAQAHLLAKNLPQVVRTLSGVRKAALRWGLRLVLPTGVEGNLRPTG

SEQ ID NO: 53521 - protein, 114 aa, Zea mays
  Clone ID: 700421596_FLI.pep
TALDASPWQTTILTLSSQPIFITVSMQHLLAHTNSLHYPNTLNSSKSTPPQIETTAPNPQAPAPYEIDPAKPSQHRRKPDNPPTTPRRGQVGARRNDQLARSPSRGRRPCRGGS

SEQ ID NO: 53522 - protein, 208 aa, Zea mays
  Clone ID: 700236108_FLI.pep
ADGVGRTLSSACLSTVGLVTSSAPLRSPPLPNGRSLHGSSSWLQGAGDRWKLRQPRPRRQGRLAEEGRARLGVRQEPGGTGAPGVRAGRCDRQRREPRQVLEPPPQDRRVRPGGGGPQAGSWWRAGRRRGCCRRHGAGPEGVVPPARGRREAAPRRVSRAALLGQPTLLLAHKKGGGRAWQWQAPCSCSAGLGSLLISLQYYTTSSGA

SEQ ID NO: 53523 - protein, 381 aa, Zea mays; identical to SEQ ID NO: 43061
  Clone ID: 700448668_FLI.pep

SEQ ID NO: 53524 - protein, 426 aa, Zea mays
  Clone ID: 700220017_FLI.pep
RRASNKCPARPCFVCETVREREGGRDQREENMDRGVVHKSSAALVREMGEAGHSHGWWSMNNLLRPPFEQQHHASLFMPSTTTSSSTAAAAPSSSSSSPPLQSFSSLLLSNHYPLPTTTSTSPWQNDSSSTSSHGQPDSWSQLIHTGSKESQMAFPTTICSESGGGGSYVVYGAAAASHGSSTSDVEIQLPWGSSSVLQQQQQKASSPRSSSRTTATTTSPGSNMLEFSNNSSSSPRECISTVSGSAFKKARTQEPSPAQSTVKVRKEKLGDRITALHQLVSPFGKTDTASVLLEAIGYIRFLHSQIEALSSPYVGGSNGGGGGSKQNQQLHEASAQRESRHSIFPEDPGQLLHDSSAINKRAGLQPADGEQDEESCDEEKKKDLRSRGLCLVPVSCTLDVGVDVAAGPADYWAAAAPAFGMGFGA

SEQ ID NO: 53525 - protein, 360 aa, Zea mays
  Clone ID: LIB3066-050-H9_FLI.pep
PLSRRSIPKTAAEAEASKSSPLTFLLDAVLAKLGCVLDRLRENDSEESAMYRGTIRRHVDLETLRRRLNASAGSRADDDSHSSAHELYRDLLLLCTNIVVFFPGGTPENSAAVEACALVTGHASAVLHKPKQEHVAVAVAAPAPASADIVGSLIEKGKPLIVCRKRSSIAKAAASARKEESTMKGETAEETEDEKISVAAATKDKTWGVRTKKSRGGKNSAGPGRNLADGADGPRKGAGAGTDGLAKKRNAVDFLKRLNQSPPRKRGSGSHLGTTRKRPAAMDEQTTKRKRGTGRKEGTGRGGSRRGGKAAGAKRGVGRPRGGPEATFREDVGHAAAETYLVTGLAFTLLGYLGADYRWI

SEQ ID NO: 53526 - protein, 315 aa, Zea mays
  Clone ID: 700172473_FLI.pep
FSLPCAASAPPLQMEFWGLEVKPGSTVKCEPGYGFVLHLSQAALGESKKSDNALMYVKIDDQKLAIGTLSVDKNPHIQFDLIFDKEFELSHTSKTTSVFFTGYKVEQPFEEDEMDLDSEDEDEELNVPVVKENGKADGKKQKSQEKAVAAPSKSSPDSKKSKDDDDSDEDETDDSDEDETDDSDEGLSSEEGDDDSSDEDDTSDDEEEDTPTPKKPEVGKKRAAESSVLKTPLSDKKAKVATPSSQKTGGKKGAAVHVATPHPAKGKTIVNNDKSVKSPKSAPKSGGSVPCKSCSKSFISETALQAHSKAKHGGK

SEQ ID NO: 53527 - protein, 136 aa, Zea mays
  Clone ID: 700085075_FLI.pep
SPFLRKEQPSVSLAFPPVGWQRTVWQPGHTTTVWEWLKTVVMLKHPWHLTSMKKELGDWTSLFFLCLSFSSSAGGLSRSMSFWRTIFPPPQPEARWFSNDIDSEAPLALNIHEEGVGRLDESLFLVLNFSSSSGRV

SEQ ID NO: 53528 - protein, 315 aa, Glycine max
  Clone ID: 700831628_FLI.pep
VSELNSTQHSSIKSAMAAEPTRPVKIIAAADDFGTPLKDALVAHLRTLNIQVEDLGTSSYYSAGAEVGRRVSQSSSSDIRGLVACGTGAGVSIFANKYPGVYAATCLSPSDAVNARSINNSNVLAVSGKYTSPEAAVEVLDAWLNTPFKSACPANDDKPWPQEIHSFLEHSLVEMPEIGKEGAFDTCAVCCLVKNRELNPIDLIPGGSMKILRETPTSAFVRFKAGSVEPAHHHTFGHDLVVIEGKKSVWNLTKEQRYDLTVGDYLFTPPGDVHRVKYHEDTEFFIKWDGHWDMFFDEDLDTAKNAIDKELGLAK

SEQ ID NO: 53529 - protein, 318 aa, Glycine max
  Clone ID: 700835579_FLI.pep
EDDTTFVVWRPPEFARDLLPNYFKHNNFSSFVRQLNTYGFRKIVPDRWEFANEFFKKGEKHLLCEIHRRKTAQPQQGIMNHHHHHAHSPLGVNVNVPTFFPFSSRVSISTSNDSDDQSNWCDSPPRGATSLVNGAAAANYNTSVTALSEDNERLRRSNNMLMSELAHMKKLYNDIIYFVQNHVKPVAPSNSYSSSLLLCNTPSATPISSANNVSMMQRPMNQLLGYYSTNPKQGATQITQPQTYVVNSPTNTSRSSITIFEGPASSNINSCKTKLFGVSLQSKKRVHPDCGSNPETNRARLVLEKDDLGLNLMPPSTC

SEQ ID NO: 53530 - protein, 442 aa, Zea mays
  Clone ID: 700423591_FLI.pep
VHGALVDVRRAHDDVLIVHYHGLGVDVDHEAPGLLRPLVVGVGVRVLRRHVLAGARRLAVAEAEEGEVVPGVGPEPPGADGQRHVLIHHLHGAALPIQDGLHGAALRHALRPQRHHHVHDEPLAGLDLAHDLERQLLGDEVQRVDVLHRHAVVLPPRVGAPQEVLVLDVDEVPRPPDGVDVRVLDAALDHVVLAAHQPERRRLPGRVRGALREPRRRAAVDGPEHLHVPRLGVAPRGRLALRPRLVQRHQEVVPLALLLPPLLEVLQHVPRRGPLHAAVDVVPRLPRPALADGRAGEVGLVEVLAVRGAQRAEQRVVLRVVPPVAQVDAAEEAHEARRRLRRRRAAAVDDHRLLVVCEHGGRLDVLHVAPVLVGVARAEHALHARVAEEARRVLVVRGHQPVALDGAEPHRGAVVPHQHQHRDALVGLPDEQLAETLGRRRR

SEQ ID NO: 53531 - protein, 131 aa, Zea mays
  Clone ID: 700433649_FLI.pep
LVTSRGMERWSEKTTLAAREDGLGAAAPRDGGQPESEHDRSDLEPAGVLTTAEGKPTRRGSRRGAGPCAMAGRRPVRRLGRWRPSRGARQRRAHAMGRRCNWWSSALVGDGSMSGRPPGGLRKEEEKAGWE

SEQ ID NO: 53532 - protein, 296 aa, Glycine max
  Clone ID: 700829958_FLI.pep
KLSDFGLCKPLDCSTLEENDFSVGQNVNGSTQSSTPKRSQQEQLQHWQINRRTLAYSTVGTPDYIAPEVLLKKGYGMECDWWSLGAIMYEMLVGYPPFYSDDPMLTCRKIVNWKTYLKFPEEARLSPEAKDLISKLLCNVNQRLGSKGADEIKAHPFFKGVEWNKLYQMEAAFIPEVNDELDTQNFEKFDESDSQTQSSSRSGPWRKMLSSKKDLNFVGYTYKNFEIVNDYQVPGMAELKKKQSKPKRPTIKSLFETPEASDTSANDQPAQGSFLKLLPPQLEVSPHRDKNLPPRS

SEQ ID NO: 53533 - protein, 260 aa, Glycine max
  Clone ID: 700831637_FLI.pep
GSLENHLFRRGSYFQPLSWSLRLKVALDAAKGLAFLHSAEAKVIYRDFKTSNILLDSKYNAKLSDFGLAKDGPTGDKSHVSTRVMGTYGYAAPEYLATGHLTAKSDVYSFGVVLLEMLSGKRAVDKNRPSGQHNLVEWAKPYLANKRKIFRVLDTRLEGQYSTDDACKLATLALRCLSIESKFRPNMDEVVTTLEQLQVPNVNGGHQNGSRVRRRSADVNRGYQNPSVNGSRVRRRSADDISPMETPTAYPRPSASPLYT

SEQ ID NO: 53534 - protein, 309 aa, Glycine max
  Clone ID: 700904260_FLI.pep
GTKPGSAPEIPTVDLAAEESSRAAVVEQVRRAASTVGFFQVVNHGVPEELLLRTLAAVKAFHEQPAEERARVYRREMGKGVSYISNVDLFQSKAASWRDTIQIRMGPTAVDSSEIPEVCRKEVMEWDKEVARVARVLYGLLSEGLGLGTERLTEMGLVEGRVMVGHYYPFCPQPDLTVGLNSHADPGALTVLLQDHIGGLQVETEQGWIHVKPQPNALVINIGDFLQIISNETYKSAHHRVLANYSNEPRVSIAVFLNPSDREKHFGPLPELTSTEKPALYRNFTFHEFMTRFFTKELDGKSLTNFFRQ

SEQ ID NO: 53535 - protein, 242 aa, Glycine max; identical to SEQ ID NO: 45051
  Clone ID: 700837648_FLI.pep

SEQ ID NO: 53536 - protein, 228 aa, Glycine max
  Clone ID: 700834671_FLI.pep
ENSAYCVQPACIEPPSCIQPSCVAPTTCFSPRLFSSKSKKDRKPKTEIGNQVSPLPELIAEPTDARSMSFVGTHEYLAPEIIKGEGHGSAVDWWTFGIFLYELLFGKTPFKGSGNRATLFNVVGQPLRFPEAPVVSFAARDLIRGLLVKEPQHRLAYKRGATEIKQHPFFEGVNWALIRCATPPEIPKAVEFEKIPSPASSSGGEKAANHISIANQKGSDNYLEFDFF

SEQ ID NO: 53537 - protein, 159 aa, Zea mays
  Clone ID: 701170944_FLI.pep
QASSGAEQSLEIPPTICPPADAEPIASPAARTMGSVAEDSTAAAAAAASVVFRSKLPDIEIPRNLSLQAYCFERLPEVSSRPCLIDGQTGAVHTYAEVDRLSRSAAAALRGLGVGRGDVVMALLRNCPEFALVFLGAARLGAATTTANPFYTPHEIHRQ

SEQ ID NO: 53538 - protein, 93 aa, Zea mays
  Clone ID: 701177719_FLI.pep
DVLPPQESWNDLVYSPQSHMPQPLQDLARTSPELQCSPSPNLLPVSDPLYYARWYNTPHKIMPVCAHTTALKAIARGLASCLQASTDRSTSWP

SEQ ID NO: 53539 - protein, 528 aa, Glycine max
  Clone ID: 700834406_FLI.pep
EKWSLDLMQKLLPRHIEIIEMIDEELVRTIIAEYGTENSDLLEKKLKEMRILENVELTAEFADILVKSKEAIDIPSEEQQSSEQAEAEDEKDDDEVEAVAKKNGTDESSIEDEKEELPEPVPEPPKLVRMANLCVVGGHAVNGVAEIHSEIVKDDVFNAFYKLWPEKFQNKTNGVTPRRWIRFCNPDLSKIITEWIGTEDWVLNTGKLAELRKFVDNEDLQVQWREAKRSNKVKVAAFIREKTGYSVSPDAMFDIQVKRIHEYKRQLMNIFGIVYRYKKMKEMSAAEREANFVPRVCIFGGKAFATYVQAKRIVKFITDVGATVNHDPEIGDLLKVVFVPDYNVSVAEMLIPASELSQHISTAGMEASGTSNMKFAMNGCILIGTLDGANVEIREEVGADNFFLFGAKAHEIAGLRKERAEGKFVPDPRFEEVKEFVRSGVFGSYNYDELMGSLEGNEGFGRADYFLVGKDFPSYIECQEKVDEAYRDQTKWTRMSILNTAGSYKFSSDRTIHEYAREIWNIEPVQLP

SEQ ID NO: 53540 - protein, 328 aa, Glycine max
  Clone ID: 700835511_FLI.pep
FKEHCFFRRDESKFIDDLATDIFKIVSSKDLSREMFIVGREYRVKELKLLLDLESRDITCLLGIHGTGGIGKTTLAKALYDSIYKQFDGTSFLNVGETSNPKTDLKHLQEKLLSEILEDDKIHWRNIEEGTAKIERRLGFKRVLIVLDNVDDIKQLNNLAGKCAWFGPGSRIIITTRDKHLLDLGEVEKRYEVKMLDEKESLELFCHYAFRKSCPESNYKDLSNRAMSCCKGLPLALEVLGSHLFKKNVDVWKDALDRYEKSPHGNVQKVLRISYDSLFRHEKSIFLDVACFFKGQRLDYVKTVLDASDFSSGDGITTLVNKSLLTVD

SEQ ID NO: 53541 - protein, 54 aa, Glycine max; identical to SEQ ID NO: 44306
  Clone ID: 700837418_FLI.pep

SEQ ID NO: 53542 - protein, 152 aa, Glycine max
  Clone ID: 700835567_FLI.pep
NNIESYPPVLRHLDHHQLPPPPNPDPDKDPTQQDSDPIPIIDFSCLNHDKSKLDEACKDWGFFRLVNHGIPMTLLKKLQEVAKELFSLSFEAKEGACSGSPVSYFWGTPALTPSGTTTRGPQNMNWVEGFDVPLSQLPHFNPHQLPTLESIR

SEQ ID NO: 53543 - protein, 187 aa, Glycine max
  Clone ID: 700834123_FLI.pep
TVLKLTFPLIYTMSAYKDQDPRLHGIKTKIRVVPNFPKSGLMFLDITTLLLDPKAFKDSIDLFVERYKGKNISVVAGIEARGFIFGPPIALAIGAKFVPLRKPKKLPGKVISQEYILEYGRDCLEMHVGAVDDLIATGGTLCAAMDLLERVGAEVVECACVIELPELKGRERLNGKPLCVLVEYVDI

SEQ ID NO: 53544 - protein, 437 aa, Zea mays
  Clone ID: LIB4171-025-A1_FLI.pep
TRHTSTHHRPHARYSLSAAAGACCSPTRPQELANLSQFPATLPSFTMLASAATVKPSTAAAAATCKAAFKPLHLPPLPAAAGLRPLSLSVSARPLYRQEHVLASVAVAAAGRNERATSPAPPSATADGARPLEVAAPAETGRRAKIGVYFATWWALNVIFNIYNKKVLNAFPYPWLTSTLSLAAGSAIMLASWATRIAEAPQTDLDFWKALTPVAIAHTIGHVAATVSMAKVAVSFTHIIKSGEPAFSVLVSRFFLGEHFPAPVYFSLLPIIGGCALAAVTELNFNMVGFMGAMISNLAFVVRTIFSKKGMKGKSVSGMNYYACLSIMSLVILLPFAVAMEGPKVWAAGWQTAVAEIGPNFVWWVAAQSVFYHLYNQVSYMSLDEISPLTFSIGNTMKRISVIVASIIIFQTPVQPINALGAAIAILGTFIYSQAKQ

SEQ ID NO: 53545 - protein, 179 aa, Zea mays
  Clone ID: UC-ZMFLMO17267A01_FLI.pep
GLASRRDDETIECGKELENDDGPSRGVRARPTDSLRAGTSRRGGAERRQASQARDELRGRAARVQRTGKARAGLGHRRGNPKLRPAGHRAEVQRAQGDAPCRGDSAGSGKRSAGHGKGRTTGRDAGRSGRAGRATAVNNRGTTLGQGQATAGQRVGGSSRRARQGGKRVRGLRAEEQGE

SEQ ID NO: 53546 - protein, 112 aa, Zea mays
  Clone ID: LIB4172-045-G8_FLI.pep
DEQDVALKQLRKSLVIRAKPMPSFYQEGPPPKAELKKVPPTRAKSPKFTSSRRRSCSDTPLTPGGENTNATSTRPHRHSIGSPRDANRVQQCSPKSGVATKTRSVKAELKAL

SEQ ID NO: 53547 - protein, 197 aa, Zea mays
  Clone ID: UC-ZMFLMO17205H09_FLI.pep
IEPEVGRQAGELHIPGWRDVQKEYGTGYSDQQMAQELGSSSALWTAYWGGYGWGWYCCAAAAACHGCGYHRTCCFFSSSFFFLSPSFLSPSFLSSLAGPTETISAAATLRSLATTSTGSARPTTVRFEPFMSTEMESIPWRVETALSTFCLSLSSCRSSLSTSFLAAMAKPVLSSWGVCSSACLGGGSDGRSISWMG

SEQ ID NO: 53548 - protein, 306 aa, Zea mays
  Clone ID: LIB4766-075-G4_FLI.pep
TTLPPLSLTLDTAPFSLLAYCKSLQEPAREEQAGIVASMGRGRIEIKRIENNTSRQVTFCKRRNGLLKKAYELSVLCDAEVALIVFSSRGRLYEYANNSVKATVERYKKAHTVGSSSGPPLLEHNAQQFYQQESAKLRNQIQMLQNTNRHLVGDSVGNLSLKELKQLESRLEKGISKIRARKSELLAAEISYMAKRETELQNDHMTLRTKIEEGEQQLQQVTVARSVAAAAAATNLELNPFLEMDTKCFFTGGPFATLDMKCFLPGSLQQMLEAQQRQMLATELNLGYQLAPPGSDAANNNPHHQF

SEQ ID NO: 53549 - protein, 259 aa, Zea mays subsp. mexicana
  Clone ID: UC-ZMFLTEOSINTE099C08_FLI.pep
WLFLAPRAPTHLHALSQLDRPHWQSRRLPYPFLFLQKDWTGSSQSSCSESRRIFFDEASICCSPSACWGLAPYPKMSFRSMVRDIRESFGNISRRNFEVRIHHRGKSLGSSGDLQDRPAEVQQSRWASLPPELLCDVMKRLEEDDSSWPDRKDVVSCASVCTTWRDMCKDIVRSPEHCAKLTFPVSLKQPGPRDGVIQCFIKRDKSKLTYRLYLSLSSGVLDENGKFLLAAKRSRRMAHTEYAIFMDYGELKVRKCLLD

SEQ ID NO: 53550 - protein, 119 aa, Zea mays
  Clone ID: LIB3078-026-D9_FLI.pep
KIVVELTTMNSTRPQKQRLRIEIQFSSPGTCMRRLASDFLPPKNSSGTTLSCLRFLDLAIFWIVFGLVTRCSLVPVRSTFSCFRFSRSSRAFRFATLFCRISSLSSALRAWYARFRDFS

SEQ ID NO: 53551 - protein, 132 aa, Zea mays subsp. mexicana
  Clone ID: UC-ZMROTEOSINTE066A04_FLI.pep
NGIDASTSLQSDQNAAAVLYGLDNETSATIKTESCYSSNADFAFCGNTFLESCQSIGDASGGGSFSSSELNGQPLNDSILDMESSSFSFLNQMPQSFIFPDLADDFNQSAEITPFLTPETNFSDSTGGDHTG

SEQ ID NO: 53552 - protein, 213 aa, Zea mays
  Clone ID: UC-ZMROB73006F01_FLI.pep
ITADEERRIVELHAQWGSRWSRIARSLPGRTDNEIKNFWRTRTRKKALEERRAAAAATSTAAESASSVMTVSSSSECRRPPVSSSSSSSSLRRDEARRSGDETEEASTPTAAPATKHDEEPQPQPQECYDFPMDQLWNEIAAADAAAMSYLVVDACWGGAAVGGHCYYYGAAAASAASPPPPASPPWEYCGSDFSLWRIDDQEYYKKMLDSSS

SEQ ID NO: 53553 - protein, 287 aa, Zea mays
  Clone ID: UC-ZMFLB73026E01_FLI.pep
PRHALPPLHAGLRRVSAAQRDGRQRGGEGRGAQPDAARLRLHRPHQGAAREGVPRRGVLRRHRRARRPRLRRRHRRSVLERADGEARRHRVHQAGGAGPDPRAHHELHPTPPVLPEQEPQPRRPRLALRGSHDRHLPMQLLQRAPVQLHGARRARRRGPVAGPAVRREVAAQVQDADGQHDDRGDGPRQLPHLRPELLPRRAQAAGPVPVRRRAHHRRRLQGRHPQRDQRAARGVLPGLRGLHGQDGRHRGQDRLRGRDQEALRPRQQALGGGIHAGDGSIARKKSL

SEQ ID NO: 53554 - protein, 482 aa, Zea mays
  Clone ID: LIB4171-029-F12_FLI.pep
KGFSLANRTCSQPSPYQPTSSHRPKRPRSNAVASLPESSAPTKEAAPKVTLETQQHALQRPLQTQDNVAPKSVFGDNSELDSAHKSSLRPSGFDLDKSTIGMQRKLGSDIWMRMNRPDGYSEMLSGYQPPNEGARNSQGFCSLPDQIAAGRPNFWHTVNAHYQDQQGNHNLFPGSWSMMPSSTGFGMNRQSYPMIQEVGGMSQSCTNTKFGNGVYAALPGRGIDRYPSGWFGHTTPGGRVDDAQPRVIKPQPLVLAHGEALKMKGNSCKLFGIHLDSPAKSEPLKSPPSVATPAAEKWMADGIDTDKSSEPHKTPKQLGATQTQVDPVPERCPQASRGTQCKSQGGSTRSCKKVHKQGMALGRSVDLTKFNGYTELVAELDEMFDFNGELKGCSKEWMVVYTDYEGDMMLVGDDPWNEFCSMVHKIFVYTREEVQRMNPGALNSRPEDSGLANSTERGSASTAAAREAPGYQSASSLNSDNC

SEQ ID NO: 53555 - protein, 106 aa, Zea mays
  Clone ID: UC-ZMFLMO17003D03_FLI.pep
IKFLGSTLHGCSITSLPSSISLPWLICRLVTWTFHVVGNNEMVLGVKLSSLPDRRQGTNREERLLSGRTLRTSARLYEQAIHASGRRGELDLAWRLCKWIRTALAS

SEQ ID NO: 53556 - protein, 662 aa, Zea mays
  Clone ID: LIB3594-011-F10_FLI.pep
NLTKLAEEGKLDPVVGRQPQIERVVQILGRRTKNNPCLIGEPGVGKTAIAEGLAQRISTGDVPETIEGKKVITLDMGLLVAGTKYRGEFEERLKKLMEEIKQSDEIILFIDEVHTLIGAGAAEGAIDAANILKPALARGELQCIGATTLDEYRKHIEKDPALERRFQPVKVPEPTVDETIEILRGLRERYEIHHKLRYTDEALIAAAKLSYQYISDRFLPDKAIDLIDEAGSRVRLQHAQVPEEARELDKELKQVTKQKNEAVRSQDFEKAGELRDREMELKAQITALIDKSKELSKAEEESGETGPMVNEEDIQHIVSSWTGIPVEKVSSDESDKLLKMEETLHKRVIGQDEAVVAISRSIRRARVGLKNPNRPIASFIFAGPTGVGKSELAKALAAYYFGSEEAMIRLDMSEFMERHTVSKLIGSPPGYVGYTEGGQLTEAVRRRPYTVVLFDEIEKAHPDVFNMMLQILEDGRLTDSKGRTVDFKNTLLIMTSNVGSSVIEKGGRKIGFDLDSDEKDSSYSRIKSLVIEEMKQYFRPEFLNRLDEMIVFRQLTKLEVKEIADIMLQEVFDRLKAKDINLQVTEKFKERVVDEGYNPSYGARPLRRAIMRLLEDSLAEKMLAGEVKEGDSAIVDVDSEGKVVVLNGQGGIPELSTPAITV

SEQ ID NO: 53557 - protein, 113 aa, Zea mays
  Clone ID: UC-ZMFLMO17005D07_FLI.pep
ILHMMVAGDSVARVPRGLQHSKQAEGGVSGWLVAVEGVIQPRPVDAINADMRTGTIEVVAHHVLVLNSVTRSLPFPVTISDTVKEKFPEEIRLRFRVLGLVSSTNAVKLAVAP

SEQ ID NO: 53558 - protein, 286 aa, Zea mays
  Clone ID: LIB3079-002-H7_FLI.pep
CGIAGKPRQVVDDIDKLDVNNELAVVEYIEDIYTFYKIAQHERRPCDYIDAQLEINSKMRAILADWIIEVHHKFELMPETLYLTMYIIDQYLSLQPVLRKELQLVGVSSMLIACKYEEIWAPEVNDFILISDSAYSREQILSMEKGILNRLEWNLTVPTVYMFLVRFLKAATLGGKVEKEMENMVFFFAELALMQYDLVTRLPSLVAASAVYAARLTLKRAPLWTDTLKHHTGFRESEAELIECTKMLVIAHSTAPESKLRVVYKKYSSEQFGGVALRPPAEEICK

SEQ ID NO: 53559 - protein, 267 aa, Zea mays
  Clone ID: UC-ZMFLMO17233D02_FLI.pep
ASQSFLPSSCSFLLLLLHARGSVEVVVVVDDSAEVAGREVHHVHVAVVGVLGHVGEVGGLLRLHPELPHLQRRGRVVRHRRERRRARAAAPSARSAAGRRRRRRDELRLLLLHLRQPVLHLQQLGLEVAVVEDDGVVRGAELGELLLHELALVAGAAVLEPDGHLLGVEAQLGGQLHLAGRLQLALLPEAELQEPRLVVAQPPLPGLLVRALANLRRPRLAPPTLPSLLLLTTGAGGGGLLEALGKDEGREQQPLFLLAAHGFRSAS

SEQ ID NO: 53560 - protein, 358 aa, Zea mays
  Clone ID: UC-ZMFLB73160B02_FLI.pep
ITRANSEVLVDAEDVVGSAAAVEAVHDGCLLVVTHALLEEVGLPHQRDELHPVEGIGHVVHLLAPERHEQAVGHEFNVLAHEIPVHADERDREGVADELALDVDSVCDDLAYAGLVELVAEKLVEEAGEITVEALIAGDELVGEGEARHEPALLEPEDGAEGPREEYALDAGEGNDALSEALPAVDPAHGPVSLAPDRGHGVDGAEQAVLLDVVADVGLEQQRIHLRVDVLDGDLEAVEGPRLGDLHVGHEAGSEVLEHDAVGGSEEGEHVGDEVPLVGGQRLVPVPGVGREVNLLRRPEGGHRLLVELPDLRETDREHGEAVGGLRQQRLLRVARGQQRRRGRHRRRIVGTVASGEL

SEQ ID NO: 53561 - protein, 234 aa, Zea mays
  Clone ID: LIB3079-030-F3_FLI.pep
IARAHARLGNRWAAIARLLPGRTDNAVKNHWNCSLKRKLGAAAAASGSAVSADDSAAAAETEARRGKMMMMSISPPDSPSGSGSGSDRSDLSSHGAGSGSGSGSGQIYRPVAARSGGFEPADCAMSRPQEEDPLTALSLSLPGTDQRFHHHSAAADSHFQELPPSPSSPAPSAYPFSPEFAAAMQQLIRTEVQRYMASAGLRAGCGAVGATDLCMPQLVDGVMRAAAEQVGRMQ

SEQ ID NO: 53562 - protein, 320 aa, Zea mays
  Clone ID: UC-ZMFLMO17011D03_FLI.pep
QAPDSPRPRPAHPRDPYLSGRHPSPCPSRVGLFAELAEGQPDMSSSVGGGSAGGGGVDMVSLLEKAKDLDQLKKEQDEIVADINKIHKKLLASPEMVDKPVDTILLKLRGLYARAKELSENEISASNALIGLLDGLLQSGASTAQKKKIEVGEQKKKRIKSDTDSARFSAASMRNQLDQAASLKGEQVAARVKSDDEKDEWFVVKVIHFDKETKEYEVLDEEPGDDEESTQKKYKLPMSYIIPFPKKGDPSSAPDFGQGRQVLAVYPGTTALYRATVASHRKRKSDDYILEFDDDEEDGALPQRAVPFYRVVALPEGHRQ

SEQ ID NO: 53563 - protein, 101 aa, Zea mays; identical to SEQ ID NO: 40312
  Clone ID: LIB3079-030-G3_FLI.pep

SEQ ID NO: 53564 - protein, 474 aa, Zea mays
  Clone ID: UC-ZMFLMO17174D01_FLI.pep
IQTPTQGIRSRRAIVAKPRTPHTRQLRFFATSKDPQRRTPGENRRLKRQWPRHHRAKRSDKEPPQRRRTHKLEVFWAVPSRRRNEVEKSSPPAWYQPSKVSSEDLLSSADPPTQQPQPSEPQRRTSTSESPQEGRGEGSRIVVRGPRTAPSIGQGWRPRASPLSARKRAWLSPEALPPHAPTHGASRPCRRRRRQLQIRRRPTPQPRQVQASHAATTAGQPHAWVPTPQTSYDHASAQAPPQQPQGHPPKPATGRSGGRRPAPQIRADSPQIRPTQRRSRRRPPHRRRRRVEVPPPPIRSTAQAHRRTTPNTTPAHARDQPVDASEGWHAEAANPTRTRFQTSTRGAAPCPGGARQHLLRACDPRPAACPPAARTPIQDPQRPDVPYERRAHCRQDAAEAEPRRRRVAAPHTPLPPPGTRLDPGRRDQTREKSPRRHLPWGRADIRRRPLVTARWDGVEGGGGGARVSAARVVS

SEQ ID NO: 53565 - protein, 96 aa, Zea mays
  Clone ID: LIB3079-055-A7_FLI.pep
VFISYRSKFHSSLQSSQTSAIFNCRSRTPLQQMLGELIIFLLDTMMQWCSAMEILVDSLLVFQSPELSHKKSDQVTSCLSLAEHDGHLCSKHHMSC

SEQ ID NO: 53566 - protein, 273 aa, Zea mays
  Clone ID: UC-ZMFLMO17059D05_FLI.pep
LETTLRRRARLESFALHCNVFVTNRDASCEWDWDTPVEVDLLGPPALRDAYLSHIGCDTRLDTEHNMLYPSLCLDVVLARILTICSVVLLHVDSLSWLDPFKDMPNLEELQLLMDYEGYCLEAVSGFFKLIPLPVLQRLFVRLHIDHEPEGEGSSSAAVWSVENDDSEDMAPREEIVLDQLTFVKFVNFSGTWCQLQLLSFFLDKSPVLQQLVLVTPEGEEALGDDRLKVIYERVAALEKASSEASITMCRPKEDDTPNHPHTRYFHEEYETM

SEQ ID NO: 53567 - protein, 316 aa, Glycine max
  Clone ID: LIB3087-005-E9_FLI.pep
WGVFTGLAPTGKSSLFSTTVSVSNRTEFAPQPSEMLHLTTNVNRSWIAPTPDSMPVKPRILENEKKTTTKKLHVKAQPQLKPRRLLIIVTPTSTKLPHQAVFLRRLANTIKLVPQPLLWIVVEAKTNSKELPEILRKTGIMYRHVVFKENFTELEAELNHQRNLALKHIEHHRLNGIVHFAGLSNVYDLQFFHQLRDIEVFGTWPTALLAAHRKKVKIEGPVCDSSQVIGWHLKNMNNETDTITPPIHISSFAFNSSILWDSERWGRTSSVQDTSQNSIKFVKQVVLEDEAKLKGIPPEDCSKILLWRFNFRARTH

SEQ ID NO: 53568 - protein, 137 aa, Zea mays subsp. mexicana
  Clone ID: UC-ZMROTEOSINTE041F10_FLI.pep
QHCHSIGPFQRGGGGGAAAARYHSAAAVALAEQMYSSSTTSSFIPAARQQLFSLPPLHPQSSPPSSETTPPVVSSVTTTSFQRANDGDELWRTGYGSGVPVAQSPSTPPSVPPPAISVQKAGLLDDMVPHGVRHGTP

SEQ ID NO: 53569 - protein, 99 aa, Zea mays
  Clone ID: LIB3088-005-C12_FLI.pep
MLLDQLFDLKSKEQELLDLNKDLRKQLQETRPENALRVSWEEGGHSGASGNVLDPYQGLLQHLDNDPSLQFGYHHQAYMDQLNNEDLVDPNEHGRSGWI

SEQ ID NO: 53570 - protein, 153 aa, Zea mays
  Clone ID: LIB3069-025-E6_FLI.pep
QNQTTDVSQQQNGVLQHRQHKENPETTTVNSRQKIPNSSYGTTTRPKKHNFIGSFCRILRVHHQSSPKVVFFPALGVPALCLLPKPRPPRPRPPSLPPRRPPNLPPPSLPPDLSPNLPPPRRPPERSPNLPPERPPDLPPPRWPSPLGLASST

SEQ ID NO: 53571 - protein, 151 aa, Zea mays
  Clone ID: LIB3088-007-E5_FLI.pep
LCGRSLLSDSFLTRVPPAQPPPLLRSSHRLDTTRSLVSTYNNWAASTIWMMASRGTSAVLSRAARMRQKLQSALEASALDIEDVSYQHAGHAAVKDNANETHFNIKVVSPKFEGQNLVKRHRMVYDLLRDELSSGLHAVSIVAKTPKELGS

SEQ ID NO: 53572 - protein, 131 aa, Zea mays
  Clone ID: UC-ZMFLB73192B12_FLI.pep
DDVHIHLYSQSALGLYLIQQLQSHQARYLARGLSILKLFREGRARLRPASARLSEVWALLEELEVGVGAPAWRPPWTPNKARWLKPWDVRWANWIIATTWWNTPKPTKWGREGIRRKEARIIRTNMHAATA

SEQ ID NO: 53573 - protein, 223 aa, Zea mays
  Clone ID: UC-ZMFLMO170114G08_FLI.pep
PLHCWMKHGPLSRGAPSLVIIFILLTTLFIILVIDLRLGLVRLLFIFLLFLLGRSLLSCSALALVVGSDGLVVLELELVSLGYIGSLVRLAQGFPPVASSFPHRSDRLVLRVLLLELLAKFLHEHEESAGSPLRLVGVLAGLPFPALGGLLRPLALHRQLGIGLGGALGFGPLHGGFERRHGAQRSDPRLAEGIPVAGGRIGVESRAKLPLAARGEREGGKGK

SEQ ID NO: 53574 - protein, 132 aa, Zea mays
  Clone ID: LIB3088-045-E1_FLI.pep
SHHLQLRDVKVQNIETGKVHSVLHIEYPDWPDHGVATNTDAVREIWKRLHHIPTEHPIVIHCSAGIGRTGTYITIHTTIERILLGDKSSYDLAKTVKNFRSQRPGMVQTEEQYKFCYRAIADELKDLLNSDH

SEQ ID NO: 53575 - protein, 313 aa, Zea mays
  Clone ID: UC-ZMFLMO17010C09_FLI.pep
AKFSGNSSKVKGNARQTVNNDSNSGARSMRGRQKDAPDKEDNKPNKDDIQKRKVMMEAEAREEGEISESEAETKYRLDKEEKWLEWCSEVLNEEQETLKRLDRLQNTSVNLPKEKVLSRIRKYLLIIGDKIGEVVRQHSESYRQSRKCSRTSRMTMRLWNYVATFSNMSGEQLHDLYLKLSQDQLEGGVGPSHGANFTSIPSSKGGNSNQLHPTRNHRPTRSLQYNSESLHNNESSGSSEAWKRRRRADPDNQFDTQPLYQPPIMTNGNRLQESSSSAGILGWGPVEMRRYGNERPKRGVHPSHFPTGHGPLL

SEQ ID NO: 53576 - protein, 98 aa, Zea mays
  Clone ID: UC-ZMFLB73235A12_FLI.pep
HFYHSSQEAIIRSVQSSLLLLLLLLPAPLYQLLCNAAPPWLWGNQAPWSEEIRLLFLARIYVLVQEYVMHATLYVIPTCSWSICRYIWFVQTSILVCL

SEQ ID NO: 53577 - protein, 383 aa, Glycine max
  Clone ID: LIB3109-016-A2_FLI.pep
QAKAMEGGSSSSNGTSYLLAFGENNSGGLCPMTMMPLVTSHHAGHHPINPSNNNNVNTNCLFIPNCSNSTGTPSIMLHNNHNNNKTDDDDNNNNTGLGYYFMESDHHHHHHGNNNNNGSSSSSSSSAVKAKIMAHPHYHRLLAAYVNCQKVGAPPEVVARLEEACASAATMAGGDAAAGSSCIGEDPALDQFMEAYCEMLTKYEQELSKPLKEAMLFLQRIECQFKNLTISSSDFASNEGGDRNGSSEEDVDLHNMIDPQAEDRDLKGQLLRKYSGYLGSLKQEFMKKRKKGKLPKEARQQLLEWWNRHYKWPYPSESQKLALAESTGLDQKQINNWFINQRKRHWKPSEDMQFVVMDPSHPHYYMDNVLGNPFPMDLSHPML

SEQ ID NO: 53578 - protein, 272 aa, Zea mays
  Clone ID: UC-ZMFLB73234D12_FLI.pep
RDLGTSRMLCCAGHQASLLLFALLSVSSLLLVDGSHQDQEFGEAVGSRILQTNPDAHEVHCSRERSRAAWEAIDEYLMPFVEKEKYELPSKCRLRPDNDMFREQEQHKIHFDINEWHCGFCKKAFRAEKFIDQHFENRHKNLVDNSEGRCMADLCGALHCDLMMQFKKPKSKCNAAAATRNRHLCESLADSCFPINQGLAASRLHEFFLRQFCDAHTCSKGTKPFPKGGRKQTNRLYLALSILTLILLPLFYLIVFLHQREMRKGTQDLKRF

SEQ ID NO: 53579 - protein, 208 aa, Zea mays
  Clone ID: LIB3115-001-C3_FLI.pep
LLAKALDMLNHSPNANCFLHWRFKDRMLEVMIKAGQAIKKGDEMTIDYMSGVNSKFMERYGFSSPTNPWELINFSSPATIHMDSFLSVFNIAGLHDELYHNSALTSVVETDFVDGAVVAAARALPTWSDGDVPAIPSVERKSAQALQEECRQMLDSFPTTIEQDQQILDSDAHISKTREIAIKYRLHRKMLLQKIMDALDIYQDRILF

SEQ ID NO: 53580 - protein, 228 aa, Zea mays
  Clone ID: UC-ZMFLB73172C12_FLI.pep
VVRSMMAVTMSPLEALRALTALGLETDAWVITSSMSLASTPVSSTSSSLSSCPGPDVSGFKIIWLKSGALNCSAAWVCSWELRSSILASPNMTYVSEFGLLNTSGLEMTKSIFLLFFTVTRLTPVMGFMPSFSMALRLFFSLLLCFDLPLASPSSSSSSSLSSSSSSSSSSSSSSTTTSSASVFCSSSFCCSIWVASSSAVCAVILVSRCRGRGYEGRATATAAWQKP

SEQ ID NO: 53581 - protein, 270 aa, Zea mays
  Clone ID: LIB3115-005-E10_FLI.pep
RAVSGRRASVVRAAAAGDRAAPAGALPAALLFDCDGVLVDTEKDGHRISFNETFAERELGVSWDVELYGELLRIGGGKERMTAYFNQTGWPAKAPKTDDKRKEFIASLHKRKTELFMALIEKKLLSLRPGVQRLIDEALGKAVKVAVCSTSNEKAVSAIVSYLLGPDRADKITIFAGDVVPHKKPDPAIYILAATTLGVDPQSCVVIEDSTIGLAAAKAAGMKCIVTKSSYTAEEDFETADAVFDCIGDPPEVRFDLDFCAKLLKKQYVS

SEQ ID NO: 53582 - protein, 105 aa, Zea mays
  Clone ID: UC-ZMFLB73129B12_FLI.pep
KGRSRRRGPRRLRGPRRRRRHRGGRHQGVHLQAGGILQEATQGVLHPLHPQVGVREDPEEGAARQARGSRDRLRSLTLRFHALLRATRLVVAFTANPVYGYRRET

SEQ ID NO: 53583 - protein, 290 aa, Zea mays
  Clone ID: LIB3115-005-G3_FLI.pep
ALRHSESGMVDQVLLTTNADGLRFVKVRMRSVRIPQIGDKFSSRHGQKGTVGMTYTQEDMPWTIEGITPDIIVNPHAIPSRMTIGQLIECIMGKVAAQMGKEGDATPFTDVTVDNISKALHKCNYQMRGFETMYNGHTGRKLTAMIFLGPTYYQRLKHMVDDKIHSRGRGPVQILTRQPAEGRSRDGGLRFGEMERDCMIAHGAAFFLKERLFDQSDAYRVHVCEKCGLIAIANLKKNSFECRGCKNKTDIVQVHIPYACKLLFQELMAMAIAPRMLTHDMKTGKDQKKR

SEQ ID NO: 53584 - protein, 388 aa, Zea mays
  Clone ID: UC-ZMFLMO17060A03_FLI.pep
SKSHGGSHRSLARLRFPCSLGMELITNVTEYEKLAKERLPKMVYDYYASGAEDQWTLKENREAFSRILFRPRVLIDVSRIDMATNVLGFSISMPIMIAPSAMQKMAHPDGELATARAAASAGTIMTLSSWSTSSVEEVNSVGPGIRFFQLYVYKDRNIVRQLVKRAEMAGFKAIALTVDTPILGRREADIKNRFALPPHLVLKNFQALDLGTMDKTNDSGLASYVAGQVDRTLSWKDVKWLQTITSLPILVKGIVTAEDTRLAIEYGAAGIIVSNHGARQLDYVPATISCLEEVAREAKGRLPVFLDGGVRRGTDVFKALALGASGVFIGRPVLFSLAVDGEAGVRKVLQMLRDELELTMALSGCTSLREITRAHVITDSDRIGRSRL

SEQ ID NO: 53585 - protein, 237 aa, Zea mays
  Clone ID: LIB3115-018-C7_FLI.pep
HILSSFPLRPCRSSSHRARARAAENSIQKQATRAHPRFARSFVPGKHRAQLSARVPVRPTRSLAQSTDDGDPAGVLLPRRAQAGHRLLQAAQRRQGRRPADAGRGGAVPLPARRRGGRRPPARRGEGPAPRRGVRPAPGRARRAAAVRRPRLRRGRRVVGLHRVPRDAGGGGRGAAAGQLRARLPPRLHRPLDRPRPRDLPALPLRPPAARAGLGQPARPGPAHARSVRRTVFQGSF

SEQ ID NO: 53586 - protein, 186 aa, Zea mays
  Clone ID: UC-ZMFLB73022D07_FLI.pep
RPLPPLPSSSSSEPLQASHRRQRRLLTASLNPRPVQLATTTIRGPTSGPSPPPPARWSCRPCISPFMAVLERAVAGITLPLKTHVGGEDEAYAAGSDDHQQFQLAEPNQRAEEPPSPSRCSHRPCISPSIPVLDCVVAYVVPPPESPVNGEAETNACAPSGDDHHQLQLVEPHQRDEEWSLAAFSV

SEQ ID NO: 53587 - protein, 84 aa, Zea mays
  Clone ID: UC-ZMFLB73031F09_FLI.pep
NLQVDCCLVSFELCLALEAKVLNIDRTNCITTSLQFPKLQLKPSGNWIGLFTRKENSTSAQVRKRITTLAQHQLSHQYQYLLPV

SEQ ID NO: 53588 - protein, 205 aa, Zea mays
  Clone ID: LIB3115-024-D5_FLI.pep
NGTAVGVVGSRRYLPLAGEQLPDAVDWRERGAVAEVKDQGQCGGCWAFSAVAAVEGINKIVTGSLISLSEQELIDCDKFQDQGCDGGFMDNAFVFMIKNGGIDTEADYPFTGHDGTCDLKLKNTRVVSIDSFERVPINYERALQKAVAHQPVSASIEASRRAFQLYSSGIFDGRCGTYLDHGVTVVGYGSEGGKDYWIVKNSWGT

SEQ ID NO: 53589 - protein, 211 aa, Zea mays
  Clone ID: UC-ZMFLB73222A06_FLI.pep
SRSSNAPLMTDLDGNIVAVPNPSGRGPGYRYFGAARKLPGVRELFDKPPEMRKRRTRYEIHKRINAGYYGYYDDEDGVLERLEGPAEKRMREEIVSEWHRVERVRREAMKGVMSGEVAAAGGRSGEAAREVLFEGVEEEVEEERKREEEKREREKGEEVGREFVAHVPLPDEKEIERMVLERKKKELLSKYASDSLLVEQEEAKEMLNVRR

SEQ ID NO: 53590 - protein, 301 aa, Zea mays
  Clone ID: LIB3116-013-F12_FLI.pep
AALPASPPLRPHDGCAAPRLLHPPPRRCRGLRLLRRDPSRVRLRLRLLHPRGAGAALPPPGPAPPPRGPRQAPRRGRGRGGELRVRAVGGGRRERHPRADGLRPGEAGEGLRGRGRRRVLRQPHRPARGEGRAHRRDRQVVRAAAARRQLPQRRRRQLPRGHRAADRRRVRERLQLAHGHRGRHRHLRRAARVAGPGADRAARPEDDRRPERPHQDAARPGAHRRLHRAVRPRRLQLNRHERPEADRGDRVRVRVARRPARSLTGPRRPPSSPMRCFGASCCLSLPALHVYHSLIEYLSEW

SEQ ID NO: 53591 - protein, 181 aa, Zea mays
  Clone ID: UC-ZMFLB73137F09_FLI.pep
MALASRAAAAAVACVLLALAASAAGAGSNSPAPAPAVDCISQAASLIDCIDYVQKGSSARRPSAACCGEVKTAVASPVIVGCLCSLAGSNSSNLGFPIDMKRVLALPGACGASNAAFSKCNISALPPTEAPAPSAAGGSSSGGAAASSPRAAAASSPPMTATALLAAVAAPLLAYYCCYLF

SEQ ID NO: 53592 - protein, 72 aa, Zea mays
  Clone ID: LIB3116-014-D1_FLI.pep
RNGRRELIIRSVPLAETSPVFTPGSASVRFSSWFDTLVDIYADTSSHQTYLHTVVARSNEETKCRLVHIFVM

SEQ ID NO: 53593 - protein, 137 aa, Zea mays
  Clone ID: LIB3117-012-D5_FLI.pep
IPRLRLASGPRLRRPSARTHWPRPLSSSSHVTPVAAAGAGELEPPDLTRLANAARISLSPQEAEDFEPKIRQVVDWFGQLQAVDLEFIEPSLRAGTTADISLREDRPETFDNRDAIKEAIPSYDDPYIKVPRVLNKE

SEQ ID NO: 53594 - protein, 214 aa, Zea mays
  Clone ID: LIB3118-003-B2_FLI.pep
SITDAGDHYVLRSNSGSEYECMVTVVATPLDELNITFSPPISIPPRKMQHTHATFVRGILNPGYFGLNSASDIPELIGTLELPDIPFSCISVLKRYSEGDMAAYKMFSRAKLDDGLLDQIFRARIETIRINWAAYPHYQAPEEFAPIVLDGKQLYYVNTFESAASAIETGAVAAENVARLIISRLSLLPQAQQQQPHIIKSFAEQESQRRHVDL

SEQ ID NO: 53595 - protein, 267 aa, Zea mays
  Clone ID: UC-ZMFLB73169A11_FLI.pep
MAAARMALVSCARRLPSLPSPLTLSRPRAGAVSFLAAQPSPATAPRSGRNLALFCSLSPTSPSLTEAAVALPPPKAAVEETKPPVPSGDEKGEPTVEELAGLLDVRVGRVVKAWRHPEADTLYVEEVDVGEAEPRTICSGLVNFLPIEELQDRNVIVLANLKPRNMRGIKSNGMLMAASDASHENVELLIPSEGSFPGERVWFGSEEEKNRQSDPASPNQVQKKKIWEAVQPHLRTTDNCIAVLGDKQMRTSAGLVFCKSLQGARVS

SEQ ID NO: 53596 - protein, 95 aa, Zea mays
  Clone ID: LIB3118-003-B3_FLI.pep
LLALIENVAAWLEHLISKYNYTQVSNELHQFLTVTTQDKKQTCYSRNGCKLDYTGQNIVAALKTYRHRIPYLSRLQLTAYCRDHCAMMLVALPHG

SEQ ID NO: 53597 - protein, 187 aa, Zea mays
  Clone ID: UC-ZMROMO17107A08_FLI.pep
ITHNIHFWRNGFTVNDGPLRSFDDPANAPFLKSIKDSDCPTELVPADEKSIVNVNLVRTEEEFTEPVKRAAPFEGERRNLMEPSDNNTSNAAAAAAASSSATASRTITVDDSLPSTSLQIRFADGSRLVARFNTSHRISDVRAFIDATRPGASDYTLQAGFPPKPLEDTAKTIEEAGVANSVIIQSV

SEQ ID NO: 53598 - protein, 98 aa, Zea mays
  Clone ID: LIB3118-006-G1_FLI.pep
IPRLRLASGPRLRRPSARTHWPRPLSSSSHVTPVAAAGAGELEPPDLTRLANAARISLSPQEAEDFEPKIRQVVDWFGQLQAVDLEFIEPSLRAGTTA

SEQ ID NO: 53599 - protein, 84 aa, Glycine max
  Clone ID: LIB3039-019-G10_FLI.pep
VLLKLNNKGRCTTSSIANATNSVLPILLLQYPQKCHQNASTTATKRMTQCNSSTMYVYFFRVKSKKFLVISINKLTCAPFCRLL

SEQ ID NO: 53600 - protein, 161 aa, Zea mays
  Clone ID: LIB3136-003-C1_FLI.pep
GEVGPKTIHVPTGEKLSVFDAAMRYKSEGHATIILAGAEYGSGSSRDWAAKGPMLLGVKAVIAKSFERIHRSNLVGMGIIPLCFKAGEDADSLGLTGHERYSIDLPTNLSEIRPGQDVTVTTDNGKSFTCIVRFDTEVELAYFNHGGILPYVIRNLAAAHN

SEQ ID NO: 53601 - protein, 139 aa, Zea mays
  Clone ID: UC-ZMFLB73261G03_FLI.pep
GSTSAPPACWSPCRGRTASAPGSAGTTPRSRAAAGPARPSCTRPPARATSTSSPSLARRRRSPRWPSSSPSLTATSSRRSKSGTCRPLQCRDNISIPIVTSESEVIGSGNYIFFWVLDDDYCASEEKNGSSLQKPRPDG

SEQ ID NO: 53602 - protein, 380 aa, Zea mays
  Clone ID: LIB3136-003-D6_FLI.pep
VLPRHHAAAAQLHKPSSDLNPGAPSLPPSSPRDSERRRPPSMEHDAEARRGFARMGFGCKHYRRRCRIRAPCCGDVFHCRHCHNESTKDGHELDRHDVQSVICLVCDTEQPIAQVCCNCGVCMGEYFCAACNFLDDDVDKEQFHCHDCGICRVGGKENFFHCQKCGSCYSTTLRDRHCCIENSMKNNCPICYEAVPVRFAEGDVGAPLRPHHAPAVLPRDVEARQVLVPHMRHAHLRHGQVLQGPRRRDGGKLLVHGKGMGRVQRLQGHDAGLLRRGGPQVLPLPVPQHLPGGTPRPSVATTNTTSLLLELDAASQDTPPAATLLLPVAPALLHTAPFQSMMNCIISCHAGMYVHCYWRSEDLSDSGRIICTTTKHVLLL

SEQ ID NO: 53603 - protein, 324 aa, Zea mays
  Clone ID: UC-ZMFLMO17202D01_FLI.pep
SYNRALHRRLLRHAGQQPAVQQRRGAALQVQGHQRHAHLLPRRQSPRRPAQLRHRAHPRHRQRRRRPGPARQERLVRGLVGAEQRAPLLPRRRHQVRRGGQRGAGRRHAQPPPGDAQPGRRPGARRLPGHQVLHVGALRRGRQLVPALQRLLRAGLHGGRRALPGRHRRAAARQRVPLLRVPGQPARHQPGLRHVPAGHHRQGQRQRPQLQQPVRRHGGRRRRRAREGRRAQRQGRRVRERLALGRRLRGQRRQRAEIQPGTHRPRRPRHAQEDRPAGDLRLRHVQREPEGRRSHGEELRPLLRQQAARVPDPVQLIKSGGSEE

SEQ ID NO: 53604 - protein, 94 aa, Zea mays
  Clone ID: LIB3136-005-H11_FLI.pep
TNHAAPSKRCENFEDKCFSQQKSYRLHLFKPNIQAFIHTSPREHTKNLHFNLCSHPSFHAYITKKATVSADQTTAKDFTKNGIITLIRGIRRNK

SEQ ID NO: 53605 - protein, 348 aa, Zea mays
  Clone ID: UC-ZMROB73079H08_FLI.pep
RAATVRNRQRRLYTNNASGDWGGGDDGPRAWTHVKLEHPSTFATLAMDPDRKREVVDDLDMFRDGRDYYASVGKAWKRGYLLFGPPGTGKSTMIAAMANYLGYDIYDLELTAVKSNTELRKLFIETKSKSIIVIEDIDCSIDLTGKRKKKKKDKNDTRKKKKKAPWEEEDKDEGSKVTLSGLLNFIDGLWSACGGERIIVFTTNHKDKLDPALIRRGRMDMHIEMSYCCFQGFKVLAKNYLGVQEHDGELFGDIRRLLEEVDMTPADVAENLMPRSKTKDADACLRRLVKALEEAKEAALLAAKAKQLDGIKDDEGTDDEDDSDDDGSVTSRGHPSDGDEKSAKKEEM

SEQ ID NO: 53606 - protein, 356 aa, Zea mays
  Clone ID: LIB3136-006-D7_FLI.pep
AKWEKVWVFCNLSSPLLLGISVIILMKRATSWIFVGTFGRVLECWDRETHEYVAIKVVRSIHKYRDAAMIEIDVLNRLAENEKYRSLCVQIQRWFDYRNHICIVFEKLGPSLYDFLKRNRYQPFPVELVREFGRQLLESVAYMHELRLIHTDLKPENILLVSSEYIKVPSTKKNSQGEMHFKCLPKSSAIKLIDFGSTAFDNRDHNSIVSTRHYRAPEIILGLGWSFPCDIWSVGCILVELCSGEALFQTHENLEHLAMMERVLGPLPEDMIRKASSSAQKYFRRATRLNWPEGAVSRESIRAVRKLDRLKDLVSRNADHSKVALVDLLYGLLRFEPSERLTAEEALDHPFFRNPT

SEQ ID NO: 53607 - protein, 249 aa, Zea mays subsp. mexicana
  Clone ID: UC-ZMROTEOSINTE107A05_FLI.pep
APSSRAILGFLSPSAPPQIWTPPPPPPPPLTQVVLMAPAVEAVKETGSFQKVPALNERILSSMSRRSVAAHPWHDLEIGPGAPTIFNCVIEIPRGSKVKYELDKKTGLIKVDRVLYSSVVYPHNYGFIPRTLCEDSDPLDVLVIMQEPVIPGCFLRAKAIGLMPMIDQGEADDKIIAVCADDPEYRHYNDIKELPPHRLAEIRRFFEDYKKNENKEVAVNDFLPASAAYEAIQHSMDLYATYIVEGLRR

SEQ ID NO: 53608 - protein, 180 aa, Zea mays
  Clone ID: LIB3136-017-E10_FLI.pep
NSSLVHIRRRNKTPALSYLTKIRDYEVVLVVGDLDPGLLALANPSAAAAGGFGRPVVRRVVRRLVSEKLRHLRQRPAGFGRLLVEEVDVGEPLQLLEPERRLLVQLVAGLVVGELQELVDGPALRQELRRRGHLLHRGGDGGVRWLDGGLGRGVVVGVVGVAGVAAGGSRGEADADAGGR

SEQ ID NO: 53609 - protein, 125 aa, Zea mays subsp. mexicana
  Clone ID: UC-ZMROTEOSINTE093F06_FLI.pep
TNLQATKNNTNNNPYTYFIPHLISYTAYPAYATSLTTPYIYICVCIYACLTLLVNLRPCTMTAIIWLVGIPAAAPAGHPRLLTPSAHVIPHSPTTSSPAAHATKSCSSCDDPNRCLSSEPLMKSN

SEQ ID NO: 53610 - protein, 459 aa, Zea mays
  Clone ID: LIB3136-020-C12_FLI.pep
SRVVVVVGHGGVQGDADLGGPREAGVGDARGDAAAGLGGPVPDAPWPGGVDAHLPVGRGRGPGRDPGGAGQGAGLLLPAGGAHRGGGAAGAPRHPLHRRRRLLRGGRGGLQPGGRALPGAAPAAAQGGPRALPRRRPLARRAAQHHHDDADHQVHLRRLRDGPAVQPRVGGRHGRGAVHQRGGGHGAGAGGAEGAARVAPGEVPGPEHQARPAPGAARAGAGLRRARLPHGLHRRAQAGVQGAQRQVLLRLRRAHGQALAVPHPGAGPGPGRRGQALLLRQRPPPAQARPGVLRQLHLPRQDVRAGRQGAGLLARGGGRHHPGGQGQDGRRVLPLRWGGDGPGPVPDDLQLRVHLRLRLEQARLLRGRLRLRPAHLRRPARQQRLHRLRRLPQGAAPARRHQDARQLRHQGTLRGVRPWHEGRPALNLFFLAYYILLMIILSPGCREMMNGDVNMLLFR

SEQ ID NO: 53611 - protein, 70 aa, Zea mays subsp. mexicana
  Clone ID: UC-ZMROTEOSINTE102G04_FLI.pep
CKPQLGSLVGVTCWAVLYAWYLSYSALLLTLLNWSLGVWSKKKVAVFSRNMRPPSSGVNEGRRLWKLDIT

SEQ ID NO: 53612 - protein, 182 aa, Zea mays
  Clone ID: LIB3136-022-G2_FLI.pep
GRAVGPARRLRRRRGERVAHLLRRVGEARTGHGVEQRGGALAQQRARAVRPRVRQRVLDAHVRPAHPASRAEEVAHRPHRRRRAREPPADRRPDLHRVRPPVVAGARERAEAVGVAERRRRRGPYAAVRGGVAVRGRRGAPVGAATMGRRGRPASVGATAAGSGRRPTVRAAAVGRGATVAA

SEQ ID NO: 53613 - protein, 146 aa, Zea mays
  Clone ID: UC-ZMFLMO17209D08_FLI.pep
RNYNNDINKLNRSYSRIHNRSHRLVNMTRRLNSLFSPEGLFFPPFHLSMPQENHPVRPFLLLFSQRAIEQLLHIIQHFLALSVSSARVLDISLLDLLYFMWLLTRWPAACAEMRDSSPARTAPATTVAKSLALDPGDSLLAPLTPT

SEQ ID NO: 53614 - protein, 338 aa, Zea mays
  Clone ID: LIB3136-026-A5_FLI.pep
PFAAAHSSTRGSAPSAMAKKRKRTDAPAEATGAEKPDDSAPARPERTLFGFKDPVPDAEPASAGAEAAVAPFRNREKVLITCSRRITYRYRHLMQDVLSLLPHAKKDSKVESKQSKGNALNELLELRSCSSCLFFECRKQKDLYLWMVKSPGGPSVKFLVNAVHTMEELKLTGNHLKGSRPLLTFSTNFDEQPHWKLVKEMITQIFATPKDHRKAKPFHDHVFVFSIVDGHVWFRNYQISVPHNEIDKVDKGGLDKMTLIEVGPRFCLNPIKIFGGSFGGPTWYENPYYISPNQIRALEKRQKAGKYAKKVKAKVRRKMHEMENTLEPDEFAELWKGE

SEQ ID NO: 53615 - protein, 279 aa, Glycine max
  Clone ID: 700764887_FLI.pep
EKERQKEGELADEEQKKVKKEVKKKGSSSSKDGTAKSTSSKKKASGSDEDRTSPTHSQIDEKEEAPDEDDDDDVQWLTDTSLDAARQRIQEQLSAVTADMVMLSTDEPEKKKKTVSNGNGGSHNGNSMHYGTLVGEVKANLKKGVGANELLSHLAALPAPAQEKMSALVEALFDGIDKGFAKEADKKKNYFAAAVAEEGSQLLLLHAIEEFSCKSTSNALKEVALVLKAFYDADVLEEEHIVQWYQKGLKGDNKNSKIWKNAQPFIDWLQSAESETEEE

SEQ ID NO: 53616 - protein, 223 aa, Zea mays
  Clone ID: LIB3136-033-A3_FLI.pep
LKKQTNQCNAFLLLCGASTPRNDPLLSSTHRSHLDAEAEEELVQASLPAAAAFPAMARISSLESTAALPAGAQGCRQSIGPGVVGGGTLSRSLLPKQEVPAPVEADPLVFSECAGSAVGGGEDEAGRVGAEQRHAALAGVAAQRAADERGDRVALEDDEAQRAGAPEDGHRHQDAQGVVGPRGGGGGLAAGLRPPELHRQRGRHRDGHRRRRSASDRLASCFL

SEQ ID NO: 53617 - protein, 123 aa, Zea mays
  Clone ID: UC-ZMFLMO17104G04_FLI.pep
DEKTNNTKQGTGTQWAGEPRDEKTIPCAISHPAHKTNIFITMPAMRAHPTWQRPSRCHISLLFHVSFSPLLSRTLPCLQLGTDRRDQHLSDLIIIEISSNNYQYKEISSSRGAERRSSNPAAL

SEQ ID NO: 53618 - protein, 273 aa, Zea mays
  Clone ID: LIB3136-040-B6_FLI.pep
TATTRNCRASELAPCAMEGDEKSAGGAPAYWGLGARPCDACGAEAARLYCRADAAFLCVGCDARAHGAGSRHARVWLCEVCEHAPAAVTCRADAAALCASCDADIHSANPLARRHERLHVAPFFGALADAPKPFASAAPPKATDDDGSNEDEAASWLLPEPDHGQKEGATTEVFFADSDPYLDLDFARSMDEIKTIGVQQSGSPELDLAGTKLFYSDHSVNHSVSSSEAAVVPDAASGMAPMVAVVSRGLEREARLMRYREKRKSRRFEKTIR

SEQ ID NO: 53619 - protein, 257 aa, Zea mays
  Clone ID: UC-ZMFLMO17179A11_FLI.pep
PEFADFGKLFKSSAPVELTEAETEYSVNVVKHIFDGHVVLQYNCTNTIPEQLLEQVIVFVDASEADEFLEVASKPLESLPYDSPGQTFVAFEKPEGVIATGKFSNILKFIVKEVDPSTGETEDDGVEDEYQLEDLEIVSADYMLKVGVSNFRNAWENMDPETERVDEYGLGVRESLAEAVSAVISILGMQPCEGTDVVPSNSRSHTCLLSGVFIGNVKVLVRLSFGISAPKEVAMKLAVRSDDPEISDKIHEIVANG

SEQ ID NO: 53620 - protein, 258 aa, Zea mays
  Clone ID: LIB3136-054-A10_FLI.pep
HTFVPVTRKGYWQFNMGDVLVDGKSTGFCAGGCAAIADSGTSLLAGPTAIITEINEKIGAAGVVSQECKTVVSQYGQQILDLLLAETQPAKICSQVGLCTFDGTHGVSAGIRSVVDDEAGKSNGGLKSDPMCNACEMAVVWMQNQLAQNKTQELILNYINQLCERLPSPMGESAVDCGSLASMPDIAFTIGGNKFKLKPEQYILKVGEGQAAQCISGFTAMDIPPPRGPLWILGDVFMGVYHTVFDYGKLRVGFAESA

SEQ ID NO: 53621 - protein, 464 aa, Zea mays
  Clone ID: UC-ZMFLMO17122E05_FLI.pep
SETALEESKPPPPPHHRQKRPLLPLILIQNPGQRAGASKRDPLPRMASCLCFRRRRRPIIASSVPFFLLLVSFLASASASSTTTTKLLGSGNNATRRVAFSSEELRGLRSITARLARLRDASVKTIQSPDGDVIDCVPAHLQPAFEHPKLRSQKPEVGGARREAEEQRWPLLRRWPGRGRRPVAAGVAALRRVLPGGDHTSAANHGGRRAQGHRLFRHPVRDEGPRCGARVRAARLHRWRPRARGGVRDRRAVLRRQGEPERVAGAGGVAGGVQPLADLGHLRRLRQRPQHHRGRLAGQPSVVRRQQPQVLHLLDRRRVPGDGLLQPPLLGLRADQQPRGHRRRHLARLLLRRPPVRRHASHLEGPAPGPLVAAARLRRARRLLALRALHAPRLARRHGAVRGRGRQRAPRRRAAHAHADGLRPLPRRGIRARRILPQRAARRLGQQPRPGRRAPPARRPAGML

SEQ ID NO: 53622 - protein, 279 aa, Zea mays
  Clone ID: LIB3136-055-C12_FLI.pep
AQRQPMVSMSSTPHPLDPSVPAVVGGGKEEEEAVESCAAAAPLPPVGIDDDEEGPRRVRKPYTITKSRESWTDPEHDKFLEALQLFDRDWKKIEAYVGSKTVIQIRSHAQKYFLKVQKNGTGEHLPPPRPKRKAAHPYPHKSSKKALQVVLPQQVSHIMEQGCGTPMDVATVATDSSVNNAFPVQHFSPRHTQAMPDFARVYNFLGSIFDPETNGHLQKLKEMDPIDAETVLLLMKNLSINLTSPNFEEHRRLLSSDASSMDQKSGSSRVHLPFMITSK

SEQ ID NO: 53623 - protein, 52 aa, Zea mays
  Clone ID: UC-ZMFLMO17168C09_FLI.pep
AKMDKVVRIIYFLQLQQRSMPSREMTRMNSTFWPLITIPSNFNWTPTKNTCS

SEQ ID NO: 53624 - protein, 266 aa, Zea mays
  Clone ID: LIB3136-056-H7_FLI.pep
AAALFSTSLSPRFLALSSPKPAAPAASAFLPFTLPLRSVSAPAPARRVFEPVAVAVSSEYGTEGAEQQDGEFSEDLKLFVGNLPFSVDSAQLAGLFEQAGSVEMVEVVYDRMTGRSRGFGFVTMSSAEEAGAAVEQFNGYTFQGRPLRVNCGPPPPRDGSAPRAPRGGGGGGGGSSFVDSGNKVYVGNLAWGVDNSTLENLFSEQGQVLDAKVIYDRDSGRSRGFGFVTYGSAEEVNNAISNLDGIDLDGRQIRVTVAESKPRREF

SEQ ID NO: 53625 - protein, 109 aa, Zea mays
  Clone ID: 700573129_FLI.pep
PPQPKSGLFVGINKGHVVTKRELPPRPCHRKGKSTKRVSMVRGLIREVAGFAPYEKRITELLKVGKDKRALKLAKRKLGTHKRAKKKREEMAGVLRKMRSAGTHTDKKK

SEQ ID NO: 53626 - protein, 315 aa, Zea mays
  Clone ID: LIB3137-008-D8_FLI.pep
VGSLMFASPWQPVIGDKHQRLCVTPIAVDCSSSVKFSVKGFNIVQPTTKLLCVFDEKYLIQEETQMLLEDSTMQQGPQCLTFSCSFPCTSGRGFIEIEDYDQSSLSVPFVVTDKDVCSEIRMLEHGLDLVSFDQTSKRIDDLMIYRSRALHFLHEIGWLLQRSHVRATSEQRQYCPDRFPVARFRWLLSFAVDQEWCAVLRKLLNTMFQGDIDVLSPIEFALGENLLHTAVKKRSKPLVEFLLRYTTTNIAPVGGGDGAPVQFLFTPAMTELSNITPLHIAATISDAIGVLDALTDDPQQVTTLNCHVLTCCSLL

SEQ ID NO: 53627 - protein, 393 aa, Zea mays
  Clone ID: LIB3137-008-F2_FLI.pep
PSLKSTPSTRPPHSPFALFTIPPQNTSCDPRSLRRASIMSAYCGKYADELIKNAAYIGTPGKGILAADESTGTIGKRLSSINVENVEENRRALRELLFCCPGALQYISGVILFEETLYQKTKDGKPFVDVLKEGGVLPGIKVDKGTIEVVGTDKETTTQGHDDLGKRCAKYYEAGARFAKWRAVLKIGPNEPSQLAIDLNAQGLARYAIICQENGLVPIVEPEILVDGPHDIDRCAYVTETVLAACYKALNEHHVLLEGTLLKPNMVTPGSDSKKVTPEVIAQYTVRTLQRTVPAAVPAVVFLSGGQSEEEATLNLNAMNKLSTKKPWALSFSFGRALQASTLKAWAGKVENVEKARAAFLARCKANSEATLGTYKGDAAADTESLHVKDYKY

SEQ ID NO: 53628 - protein, 117 aa, Zea mays
  Clone ID: 700428321_FLI.pep
RKGFVLMAPPQPKSGLFVGINKGHVVTKRELPPRPCHRKGKSTKRVSMVRGLIREVAGFAPYEKRITELLKVGKDKRALKLAKRKLGTHKRAKKKREEMAGVLRKMRSAGTHTDKKK

SEQ ID NO: 53629 - protein, 96 aa, Zea mays; identical to SEQ ID NO: 41063
  Clone ID: 701160566_FLI.pep

SEQ ID NO: 53630 - protein, 371 aa, Zea mays
  Clone ID: LIB3137-016-A8_FLI.pep
ACTPSLWDDYGRRRSRPHLRQVPRHSLASSPVTRTYQTWSKPLNMSWAAIENDPGVFTELLQQMQLKGLQVDELYSLDLDALNDLQPIYGLILLYKWRPPEKDERPVIKDAIPNLFFANQIINKACATQAIVSVLLNSPGITLSDELKKLKEFAKDLPPELKGLAIVNCASIRMLNNSFARSEASEEQKPPSGDDDVYHFINYVPVDGVLYELDGLKEGPISLGKCPGGVGDAGWWLRLAQPVIKEHIDLFSQNEIRFSVMAILKNRKEMFTVEIKELQRKREGLLQQMGDPNASRHVEQSLAEVAAQIESVTEKIIMEEEKVKKWKAENLRRKHNYVPFLFNFLKILEEKQQLKPLIEKAKAKQKSHGPS

SEQ ID NO: 53631 - protein, 455 aa, Zea mays
  Clone ID: LIB3137-017-B2_FLI.pep
ARPPALTASPPLRSAPVPPYPTPPQERRGGGKGKGKMFGRAPKKSDNTKYYEILGVPKSASQDDLKKAYRKAAIKNHPDKGGDPEKFKELAQAYEVLSDPEKREIYDQYGEDALKEGMGGGGSHADPFDIFSSFFGPSFGGGGGSSRGRRQRRGEDVVHSLKVSLEDLYNGISKKLSLSRNVICSKCKGKGSKSGASMRCPGCQGSGMKVTIRQLGPSMIQQMQQPCNECKGTGESINEKDRCPGCKGEKVVQEKKVLEVHVEKGMQHSQKITFPGEADEAPDTVTGDIVFVLQQKDHSKFKRKGEDLFYEHTLSLTEALCGFQFVLTHLDNRQLLIKSNPGEVVKPDQFKAINDEGMPIYQRPFMKGKLYIHFTVEFPDSLAPEQCKALESVLPPKPSSKLTDMEIDECEETTMHDVNNIEEEMRRKQAHAAQEAYEEDDEMPGGAQRVQCAQQ

SEQ ID NO: 53632 - protein, 63 aa, Zea mays
  Clone ID: LIB3245-594-A3_FLI.pep
TNDKEKGGDVPNLQLTFSQQARRSTGFKQKEINYLADCDGLYVICMCLLLMRWTCKPYIVFYC

SEQ ID NO: 53633 - protein, 412 aa, Zea mays
  Clone ID: LIB3137-018-F11_FLI.pep
PLSAPSPLATISTASSRQASPPIPMATDRLLHLLRAPTGSPAAAATTRAVCWGRPRTQRVDVLQGASGIRRASVSCSSTSSGGQGGLTYKDAGVDIDAGAELVRRIARMAPGIGGFGGLFPYNDDYLVASTDGVGTKLKLAFETGIHDTIGIDLVAMSVNDIVTLGAKPLFFLDYYATSKLDVDLAEKVIKGIRDGCEQSDCALLGGETAEMPGFYAEGEYDLSGFAVGVVKKDKVIDGKNIVKGDVLIGLPSSGVHSNGFSLVRRVLEKSGLSLDDQLPRNDGITNTVGEALMAPTFIYVKQVLEIISKGGVKGLAHITGGGFTDNIPRVFPSGCGAKIFTGSWEIPPIFSWLQQAGNIDDAEMRRTFNMGIGMVLVVSRETADRIIEDTHGSSPAYRIGEVIEGDGVQYV

SEQ ID NO: 53634 - protein, 152 aa, Zea mays
  Clone ID: 701174842_FLI.pep
TVPFLFSTMSSDLIWQVIRNNNSFLVKRDGVQLSAEKNNLTNKHSFKYSGLANTKTVGVNLSKDKKITLAIKRTKTNAARHPATGYTVYALNKHQQNHTNKAAKTIRQLTTGSYYRPDLANAAVGRYHALHRSLKPVINKKSKRKPRGSKAK

SEQ ID NO: 53635 - protein, 273 aa, Zea mays
  Clone ID: UC-ZMFLMO17065F12_FLI.pep
VPPPSPPIGRTTGPAAGRIASAAMVKAYPTVNEDYLKAVDKAKRKLRGLIAEKNCAPLMLRLAWHSAGTFDVATKTGGPFGTMKNPAEQAHGANAGLEIAIRLLEPIKEQFPILSYADFYQLAGVVAVEVTGGPDVPFHPGRQDKPEPPPEGRLPDATQGSDHLRQVFSTQMGLSDQDIVALSGGHTLGRCHKDRSGFEGAWTSNPLIFDNSYFKELLSGEKEGLLQLPSDKALLSDPSFRPLVDKYAADEDAFFADYAEAHLKLSELGFAEA

SEQ ID NO: 53636 - protein, 518 aa, Zea mays
  Clone ID: LIB3137-033-A12_FLI.pep
LPHRSRVMRRASPSLSPARGPAVFAAAVVVFLPVLFPGLFSPLGHAFPSVFSEWNAPKPMHPSLLNEALRWTATDGQKKDLWSPLPYQGWKPCLTPSVSHKLPLEPSGYIQVFLDGGLNQQRMGICDAIAVAKILNATLVIPHLEVNPVWKDSSSFEEIFDVDHFINSLKDEVSIIKVLPKEFSWSTREYYGTGIRATRIKTAPLHASANWYLENVSPILQSYGIVAIAPFSHRLAFDDLPVDLQRLRCKVNFQALVFRSHIISLGETLVKRLRSPVRVHSSKSIHQVVGDTNQAEKYAVLHLRFDKDMAAHSACDFGGGRAEQLALAKYRQVIWQGRVLNSQLTDEELRNTGRCPLTPEEIGLLLVALGFDNRTRLYLASHKVYGGEARISSLRKLFPLMEDKRSLASEDELANVEGKASVLAALDYYISMHSDIFISASPGNMHNALVAHRSYENLKTIRPNMALLGRTFANKSMEWPEFQQVVQAGHKGRYGQIRLRKATQSIYTYPAPDCMCQG

SEQ ID NO: 53637 - protein, 610 aa, Zea mays
  Clone ID: LIB3076-025-F12_FLI.pep
PSSVRCAGMRRLLVGALVLCIAAVVESKPPLDSLGIPPQDEAYYIGGVIKCRDGSGRFSRDQLNDDFCDCPDGTDEPGTSACPEAKFYCKNAGHTPVTIFSSRVNDGICDCCDGSDEYDSNVTCKNTCWEAGKVAREKLKKKIATYKNGVVIRKQEVERAKEAFAKDEADLAKLKGEEKMLQGLVDKLKEQKKLIENAEEEERLRKEKEEKRTKEEAEKQAAVEKGALDASRDVDSKEIHDHLQEGENKHDGHATGHDNHVTESRASTEQHGSVRKNGISVEGGTVDELPQESAAPTIEKDSSSDNPEGLSREELGRMVASRWTGESVTEVSKDDKKGHEDQQEIPEPAEEALEDELEIPEPAEENYGGYHSEVEDDRRKYEDEEFYHESEDEYVDDYDEHVESYKSDDDQKDLTEPGHASWLDKVQQTVQNVFQKFNFFKTPVDLSEASHVRKEYDDASSKLSKIQSKISSLAEKLKHDFGNDKEFYSFYDQCFETKEGKYTYKVCAYKKASQAEGHSSTNLGRWDKFEDSYRVMHFSSGDKCWNGPDRSLKVRLRCGLSNELNDVDEPSRCEYVAVLSTPAVCVEDKLKELQNKLDAMSLKQPGHDEL

SEQ ID NO: 53638 - protein, 630 aa, Zea mays
  Clone ID: UC-ZMFLB73204F11_FLI.pep
LLGYAPNANAAAAASNSHNYSSGNQRPVLAHRQESDKTGEDGLSSDDKPSHSQKSGYEHNFAVPVHLPNFAMMPAAQPAGSQSEKKLSDHHHQQQQPQVSRGQGVRIDLASSQPFVMPFGSIGPPGSAPSGLDFSALAQSHAFLQSHQEAARHGYPQLNFAAAQSTQHKPQHGETKSVAGDSSLTHIAGDSQRKKSTSTKYSGDSQQHSLSFTRTESKNHVPPFLSGSTNESSSRTLSLIGTESSNTFMGSKSTNSTTPASTPPAASSSISQQHQHFLQMQVQHKHQHQQMIQHHHLNRPRSAAPSTQNSAGGYPDRLNMASFQNMMYPPNAAQGQGRVQSPQLKASSGRGTPSSTATTPPAAAPPNLIVMKTSSLHPQQAKIPMQALSTPGHQSQSSLSMSSSKMAPVTNLSTGGGDLSRSSNAPVASGSPSNSVSKSTGGSPPATGNAKGVQQPVQLPSPQQQLAKNSVSTCGSKSTPANHFSMAMPSILGQQPNSSPGSNTGSKQQSHMSSSMKQQPFPQGHFFISSTYAPQAPGAGGAAALGLYQKRPGDKTQPQAPHQQNALSAAAGSNMKSLHPSSGGFMHLAAATQSAGGGMPHTHMPAAQLSFGTMPVPLKPSSDQKPAAGK

SEQ ID NO: 53639 - protein, 360 aa, Zea mays
  Clone ID: LIB3137-033-H11_FLI.pep
STPIVVAVAVERTTCTHTRARAIVGRARNNRALLHGALGGEALLVALGVGAVVVDHVLALHPAHPLLQGEVQLLVVPVPGAGGGGGGAGALGADGGAAAGPAARDGDASVGLEPAVGGGEGGVGPVRLDAPALRRPVVRVPQAGVEPHRLALGERHPLALQVAEVPDGHVVHHEDDVLGVPEDGVGVEVGGGVEPEAELLLPLPLPPREHVGVQRVGLAGHVAQELEVDLVVRAALRRQVVGGDGAGGVARHQPQLHVDLAEQVLVPGLEPGAGRAVQRQRQQPPVVKDLAPPVAPRDVQLLVQAARREGAGHQHAQAQQQQGHPTRRRRHDRCNQPPRETDTYRHSTLMIEQVATRCST

SEQ ID NO: 53640 - protein, 306 aa, Zea mays
  Clone ID: 700092786_FLI.pep
ASPKDPQTLHPPAGALGDRRIEQVDGGEEASKMFRNQYDTDVTTWSPQGRLFQVEYAMEAVKQGSACVGLRSSTHAVLAAVNKPASELSSYQRKVFRVADHAGVALAGLTADGRVLSRFLRNECINHSFVYEAPLPVSRLALKLADKAQVCTQRSWKRPYGVGLLVAGLDESGAHLYYNCPSGNYFEYQAFAIGSRSQAAKTFLERRFQGYNDYTPEQLIKDALSAIKETLQGEKLSSSNCTVAIVGRKEDGTIEPFEMIGAARIQELIDSMEVAEEAPAEEASSMQEEERGPEDAAAAAPAPMDI

SEQ ID NO: 53641 - protein, 420 aa, Zea mays
  Clone ID: LIB3137-041-E5_FLI.pep
EPAPAPPLPPSPHNPVPSPYPSLDRAGSYGYGSGPGSGYGQELYPPKPAGGWSDDGAYAYNGGDAPEPYGSRGTAPRPGSGSALFDDYGRSIGSAADRGGRGGSAASPKVVRAVPKAETSEDVRGGVQKFRVKLLPEGAGSPMDVLCQVGLDGIRMLDPNTGRTLRIYPLETVTRCDVLDSSIFAFWSKSSVDVEGKRIRLKSNSYTSNTILDTVTAATVQFKEMGESSISRSRAIADASKPAEQQNERKKNFLDWRNLMKPMNEEKDHWVPDEAVSKCTACAADFSAFNRRHHCRNCGDIFCDKCTQGRTPLTTDADAQPVRVCDRCMAEVTQRLNNAREVANRPIVHSHEDLAKKLQEAMDINKRSSSGTRSSDVSGKRMREVACPTCTVHLQVEVPASGSETIECGVCQNPFLVSAR

SEQ ID NO: 53642 - protein, 326 aa, Zea mays
  Clone ID: 700197580_FLI.pep
AGECMQELLKSWKDFEATQEATNVESLQNGPTLEIRIPAEFVTSTNRQVKGAQLWGTDIYTNDSDLVAVLMHTGYCSPTSSPPPSAIQELHATVQVLPPQESYTSTLRNNVRSRAWGAGIGCSFRIERCCIVKKGGGTIDLEPRLSHTSAVEPTLAPVAVERTMTTRAAASNALRQQRFVREVTIQYNLCNEPWLKYSISIVADKGLKKSLYTSARLKKGEVIYLETHFNRYELCFSGEKPRGIGSSSNASDAEPEKHQSSSHHSQNGSVEHELRDVFRWSRCKKAMPESAMRSTGIPLPADQLEVLQDNLEWEYPLARVHFLSAN

SEQ ID NO: 53643 - protein, 68 aa, Zea mays
  Clone ID: LIB3137-050-F9_FLI.pep
SRNTIARIERIQVFLQLICGTFTAATTSNRGKLTTLYRKCSIHIAKLQRNYTVVSPIYLPNFTLLPIT

SEQ ID NO: 53644 - protein, 475 aa, Glycine max
  Clone ID: 700839193_FLI.pep
FPMATRKLIRDLLLSKRSLLHHQGWSRSRRLPLVWEDRRRYSVFNEFSKNIKGQAVRNQEFQQSVKELKEKADELKGVKEELKERTKQKTEKLYKQVDEAWTEAEAAAKKVSYNVKEKISAASEEVKETFGIGKQDSSGSTDSSTKQGADANGGNQTSREEEKNQQSGSSKDADSLFGKFKSTISPPNVSAAFQKLKDAKLVDITKKGYDIVKEELSSTPTKRKRVPFASSGETSTRTDLVVMPSKQSWWSKKFDEFREKVKGHPVSKRFLKYSDPVKTKGQEIVEDLRERYETSDSPIIHKIQDINDSMFQETDAAISYKEIRQRDPYFSLPEFVGEVQEAIKPVLNAYIKGDVETLKKYCSPELIERCKAEHNAYQSHGIFFDNKILHVSDLEIRETKMMGSSPVIIVMFQTQQIYCVRDRNGAITEGGKDTIHTVFYFWALQQMDQEDRGEDGIYLMWRLREMQQQGIQALI

SEQ ID NO: 53645 - protein, 247 aa, Zea mays
  Clone ID: LIB3137-060-C2_FLI.pep
SVEGIDEKLGQQEPETPEPRASAKLISDGSPNQSDEKQERPSPVSVLESSFEDIGSPDCINKKECELHGLQRTLYFPDNEPDVNVLWEDKNVRLDYIKLVLELSELCAEQNLEVWYLEDELISPCLFEELQSQGDQTDDRMLLFDCICEALTEIQERYFRLSSWLTFLKHDIRTPPTGENLITEVDRYVNGYIIQYSLPSTLEQTIKRDLEVQTWMNIRSKTEGIIMEMWEFVLDELIDETVSDLWI

SEQ ID NO: 53646 - protein, 1119 aa, Glycine max
  Clone ID: JC-GMLE01810064F06_FLI.pep
VDSSGRQIEMGLLGPVSSDIVAQSQGTSNEHVGLLRAVPGEPMSQGLPLLSMHSERVEVQASNPGMHQILSANKQSMQMGMLLKSSGPQQQTTTPKRKAPMELSSSISFNKRVAAMGNRPWLQQVPNASNKGSLQMQSPSNASRTQHLAASSKRKTQLDNTPSKSGTPRAMSSKSQNTQMKQSSKVQTESSDSVRSKMRESLAAALALVSQQGKPQPPNNNTPNDAANTRVKLENSSQCAGSAPASIDASLEQRQDISQSVNSSFAVADSVGHAAGEHMQSTTYEDFPEKYKDFEAGSTNASDNENILSSMHVLNCDKQDFQSSYTLTTDDVPFSDGFFMKDDLLQGNGLSWVLSDMVDVGNQRESQPNIEQRSEPEETGGGCREEVPLPELLASRIEAELFKLFQGVNKKYKEKGRSLLFNLKDRNNPELRERVMFGKIPPEQLCSMTAEELASKELSQWRIAKAEELAQMVVLPDSDGDFRRLVKKTHKGEFQVEVEHEDNVPVEEVSGGTTSVARSQTIKKDVEDASPSKPDVKTDAEKGNLQKDDTFSITISSNDGADPMQGLITDDALKDSDFLEPIVSLDDFMYSLTYAPPFENLPVESGKVVPTSDKDDSGVGTKSKPADLTPNEQADITGDNKSEKFQSTHVNSDSLKEKKVNAESGAISSDVGYSGSQADMKSTDGRTKERSTDDVKSASSDAELRGNLFRAEERYDNDNRYSKDAIPTKGECLWEGMLQPNISSTHSVISIFKSGEKTAAKDWPGFLEIKGRVRLDAFEKFLQDLRQSRSRAIMVSHFVSKESDDQSTLREVADSYILDERVGFAEPVPGVELYFCPPHKKTVEMLSNILPKEQIEPVNSIDNGLIGIIVWRKTNLTSSISPTTASHHKHSSKRQYFSRRQQDINVNANSTHKAVPSMGVKTTENDDDDVPPGFGPPAARVEDDLPEFNFSGSSNPSHLGQKSMGPPNMVPLHSANPAPPRPAEQMRELVHKYGQNKPNVPSVNWQDKFGGTIQPWNDDDDDIPEWQPQNSQNQFPPQQTMHNFHLRPHILNQSFPGSQQQPIMTPQYLQPPMNVTHGQRNFDPQWVPSPQGSNLQPGGGPPYAQGTTWPQDASRSRGY

SEQ ID NO: 53647 - protein, 306 aa, Glycine max; identical to SEQ ID NO: 42068
  Clone ID: LIB3139-065-E3_FLI.pep

SEQ ID NO: 53648 - protein, 429 aa, Glycine max
  Clone ID: UC-GMFLMINSOY075B06_FLI.pep
SVYSMFHWLFGIARNFGFVRGYQQGYIYQQKFSLVNIKLKWVKDRTLDAVVTGQRDLKAAGILVSIIYSSSECCLPIYHLSRHRGQLGLPSDLKLSTFIRRYPNIFNESSFLDSGGSPVPCFSLSPEALELHHEEVNILQQNQLELRDRLCKLLMLTSDRILPLQTIDQLKWDLGLPYDYQHSFVPNHPESFLYVRLPDDRIGLKLLFWDDKLAISELQKNTSLQQKAEDIKNGSLAFPISFTRGFGLKRKCMEWLKDWQKLPYTSPYINASHLDPRTDVSEKRIVGVFHELLHLTLHKQTERKNVSNLRRPLALPQKFTKVFERHPGIFYISKRSDTQTVVLREAYNGQEPVQNHALVQIREEFASLLKKGLLDRSKGVYKKSRHTNLVEGFRKEVCIAKKTNQLSSQDESDSMFSEYDSDGPPQNPC

SEQ ID NO: 53649 - protein, 625 aa, Glycine max
  Clone ID: UC-GMROPIC078C11_FLI.pep
AICHEFDVSDVDVYEQCSVASLLNFKICELNFVLNSAVEAINQFRRHHNFFFKRESAFYPSRELAAIELTWWKAQQCRLFAELFSRAVSNGLAAYPSQNPGRFLGEAATHYKKANSLIRILKSKLAAAPQQRQKSLLAGDPLQSFDFSMTTTYYGQRPWRMTTQLSDSTAQNVTKLPLLSSVNLQLLEHGAKLFLENNIHENYAHSLQLLSAAVAQCKRYGCERFANLSLFDMAEECVASQQFSKALQILHRLCIEDTSVLFYPFLREALVSFANAAFCSLSLNEWTWALLQLLHPQLANKSVTLRVFSVGENDQSIWMENLRRFLLGDLNFLPFPLTSSANDHRSIFSIEQLNSFQSQWRQLVAQSSSPLQFQLEMSNLNYSPIKFNARFLVINSSANNKRQTNEKFAFDEEIADGFQIATADDSLLIEVVLYNISNVPLRFEYCSLTLDEILNSSGAKKSKTLSEWSTAGNSSKNSTLVLVPKRPSRVFFIYKTTFATSLKQLMQLPASKAPTSRCQSPLMDEQNAKEILITVRHFSLRTSSGSLSWDIDHRSTSNRHHQNSIEEMDKNNYAVKVRPQRCNVLLTCPILADSTELELFVDECVQLTLTLCNAERNGTLLKNIW

SEQ ID NO: 53650 - protein, 120 aa, Zea mays
  Clone ID: UC-ZMFLB73134A11_FLI.pep
SQLCRPCGHHTHVRDQLDISNEPQPCNALLPSVACSCFLHPASASYPLATTLFPFDIANSPNYFHLDSLCTSVAISCWVNIHKSFLSRSHRQLHMQEACTWQSPRAKSDHPFQYLGLPSS

SEQ ID NO: 53651 - protein, 118 aa, Zea mays
  Clone ID: LIB3150-001-H5_FLI.pep
NKKVGFVYCIWCVSPNCRSHGDGVNEDTDAVGAKVQRHGRPNRQHLDVRVGHVLENGLRRLLDGHAHHLRPRRLLLAAAGSSSIHDDGTHHLRSDDDGFCYAVNNLVAHCTPSEVNSL

SEQ ID NO: 53652 - protein, 218 aa, Zea mays
  Clone ID: UC-ZMFLB73211C11_FLI.pep
TMAFSSSLAPFFPPSGTFRAHPARRLRADAPGRFVASCLPPPDVVVTREQGKNARLISALEKHNVHPLELPLIKHVEGPDTDRLLDVLRNDKFDWIIVTSPEAAAVFLQGWKAAGSPKVRVAVVGEGTARVFHEVSESDDQSLELAFSPSKALGKVLASELPRSNRNSCKVLYPASAKAGHEIEDVLSERGFDVTRLNTYTTVGIVSLVWGYCFFSTL

SEQ ID NO: 53653 - protein, 490 aa, Zea mays
  Clone ID: LIB3150-035-F10_FLI.pep
GDVCGSLPVALAARGHRVMVVMPRYLNGTSDKNYANAFYTEKHIRIPCFGGEHEVTFFHEYRDSVDWVFVDHPSYHRPGNLYGDKFGAFGDNQFRYTLLCYAACEAPLILELGGYIYGQNCMFVVNDWHASLVPVLLAAKYRPYGVYKDSRSILVIHNLAHQGVEPASTYPDLGLPPEWYGALEWVFPEWARRHALDKGEAVNFLKGAVVTADRIVTVSKGYSWEVTTAEGGQGLNELLSSRKSVLNGIVNGIDINDWNPATDKCIPCHYSVDDLSGKAKCKGALQKELGLPIRPDVPLIGFIGRLDYQKGIDLIQLIIPDLMREDVQFVMLGSGDPELEDWMRSTESIFKDKFRGWVGFSVPVSHRITAGCDILLMPSRFEPCGLNQLYAMQYGTVPVVHATGGLRDTVENFNPFGENGEQGTGWAFAPLTTENMLWTLRTAISTYREHKSSWEGLMKRGMSKDFTWDHAAEQYEQIFQWAFIDRPYVM

SEQ ID NO: 53654 - protein, 558 aa, Zea mays
  Clone ID: UC-ZMFLB73220G07_FLI.pep
FSPFARNAHTARSPISDPRSPRRSKMQIFVKTLTGKTITLEVESSDTIDNVKAKIQDKEGIPPDQQRLIFAGKQLEDGRTLADYNIQKESTLHLVLRLRGGMQIFVKTLTGKTITLEVESSDTIDNVKAKIQDKEGIPPDQQRLIFAGKQLEDGRTLADYNIQKESTLHLVLRLRGGMQIFVKTLTGKTITLEVESSDTIDNVKAKIQDKEGIPPDQQRLIFAGKQLEDGRTLADYNIQKESTLHLVLRLRGGMQIFVKTLTGKTITLEVESSDTIDNVKAKIQDKEGIPPDQQRLIFAGKQLEDGRTLADYNIQKESTLHLVLRLRGGMQIFVKTLTGKTITLEVESSDTIDNVKAKIQDKEGIPPDQQRLIFAGKQLEDGRTLADYNIQKESTLHLVLRLRGGMQIFVKTLTGKTITLEVESSDTIDNVKAKIQDKEGIPPDQQRLIFAGKQLEDGRTLADYNIQKESTLHLVLRLRGGMQIFVKTLTGKTITLEVESSDTIDNVKAKIQDKEGIPPDQQRLIFAGKQLEDGRTLADYNIQKESTLHLVLRLRGGQ

SEQ ID NO: 53655 - protein, 126 aa, Zea mays
  Clone ID: LIB3150-037-B5_FLI.pep
LRPDVVSYNTIISACCNKGDTDKALELLQEMNKYGIRPTLRTYHTLVSALASAGRVHDMECLYQQMLHKNVEPSSSIYGIMVDAYVRCENDSKVASLKKVMSEKGIAFDDTKRSNHELDRIIASPI

SEQ ID NO: 53656 - protein, 335 aa, Zea mays
  Clone ID: UC-ZMFLMO17018D02_FLI.pep
TPSAREPSPMENPRPQAPALTPPMAPLPVPIHPPIAPIPVPPPRVPAPAPAAAASMASTPTPSTGDGGEAEYEVSDDHRAARERHERAVQELLQRRRAYAMAVPTNDSAVRARLRRLGEPITLFGEREMERRDRLRALMVRLEADGQVDRLLRAQEDDQAARIGEEEEEEQIEYPFFTEGSQELLKARLDIARYSLPRAKARIERAKRRHEDPDEDPEAEAELVVKQAGEFVLECSEIGDDRPLTGCSFSRDASMLATSVFFLLLKGRSGAAARAISLSHQVVGAKQFLCICGGRRIVTVYPFPRPHSCGSLQHWVCPCCNFFVGSPYQWRELSH

SEQ ID NO: 53657 - protein, 383 aa, Zea mays
  Clone ID: LIB3150-064-E8_FLI.pep
TCASAPGSRTRKACRRSRSSTRPRGSPSSTPSASPTRSSSRLSARTRRTRRCCGRRARTWARASAASAWSTTPASTSTPSTATRTTAACTTAPASCSGSGARARTRAGRSCRGVPRPTPPRPTREARTPCASSARPAARTTASRCATARRAWRPPTRGTSTSTGSRTCATAPGCGTRRATRPSRSSTRSPARRSSTPRGRATPSSSCPTTRTTRTSPCSGPRAATSATASAASAWSTTSTSTSTPSTATRLTAASMTVPRSCSGSGARATTSAGRSSLGERTKETTSWYPNNNSAGCGDPQIKEAGCDASRSSRLSSGVCVRQPATVWLVFQHLSACLREEVGVTDSREGPGHRLLHYEFLIMSYVCTLNQLCMRSHLLSPTE

SEQ ID NO: 53658 - protein, 133 aa, Zea mays
  Clone ID: UC-ZMFLMO17002A08_FLI.pep
HMMDSIVSSGALVLSPAPTSSIVTTSTSFTSPPTLPNTNRQSMLRSTSTSSASVLPLMMFVSMCRRLLSSSTSSPRASQRRCSWSYAPVSTSVANRVSTVGGGEGVLECIVPIGPRPCIHPTMGLLFVPTPMS

SEQ ID NO: 53659 - protein, 190 aa, Zea mays
  Clone ID: LIB3150-089-H7_FLI.pep
ILHAYLIYANSCLCPRPSTFSVLPHAIHLYGGGGRRPWAGHGHHRRDLSAISLVVLLRHHRGRPTLRRRNIEAASASSPRAHLVVEAHGLGRGHRIAEQGGAVEVEPTGATTYTCCHRKHRHPRASVGVRVVGGHRVQGEVGQHGKLHRHGEGDVVLILIHLSAGHGHLVRRCSSGGLLDPSGLVEHTTY

SEQ ID NO: 53660 - protein, 454 aa, Zea mays
  Clone ID: UC-ZMFLMO17016G08_FLI.pep
IRQIMEELQDCNSRSLVALPGSLVLRLFRLFGQQDQSSWQKYILAYFLLVRNEYFSGESKKHSDVFCDISELDFFLYATDLDSEELELKEQKPITKAQSGGDSSGNRSNDCYFPGLHDDLSQDCLAWASRSDYPSLSCLNKRFNLLINSGYLYRLRRKYGIVEHWVYLACSLMPWEAFDPSRKRWMRLPRMPCDECFSCADKESLAVGTQLLVFGREYTGLAIWMYNLLTRSWSPCTPMNLPRCLFASGSSGEIAIVAGGCDKNGQVLRSAELYNSEIGHWETIPDMNLPRRLSSGFFMDGKFYVIGGVSSQRDSLTCGEEYNLETRTWRRILDMYPGGTSASQSPPLVAVVNNQLYAADQSTNVVKKYDKANNAWNILKPLPVRADSSNGWGLAFKACGDRLLVIGGHRGPRGEVILLHSWCPEGGEDGADWEVLSVKERAGVFVYNCAIMGC

SEQ ID NO: 53661 - protein, 67 aa, Zea mays
  Clone ID: LIB3150-092-D3_FLI.pep
GEEKESARHCFFNREEGQMKRDTRLPTVKTFHCCQLHAIGTPTYIPPLLLAPKLITMAPVCCCEAIE

SEQ ID NO: 53662 - protein, 244 aa, Zea mays; identical to SEQ ID NO: 36891
  Clone ID: LIB3151-001-D12_FLI.pep

SEQ ID NO: 53663 - protein, 987 aa, Zea mays
  Clone ID: UC-ZMFLB73018F12_FLI.pep
NRSGEEEKGVLMATAVAATAAAAGGSNVEFIRARSDKREYRRVVLANALEILLISDPDTDKAAACMEVEVGSFSDPEGLEGLAHFLEHMLFYASEKYPGEHEYTKYITEHGGSYNAYTSSETTNFFFDVNVDNFEEALDRFAQFFTKPLMSQDAVLREIKAVDSEHKKNLLSDGWRMYQLQKHLASKDHPYHKFSTGSWETLETKPKARGVDIRLELLKFYKNYSANLMHLVVYGKESLDYIQGLVERMFSDIKNTDQRCFKCPSHPLSEEHLQLLVKALPIEEGDYLRIIWPITPSIQFYKEGPCHYLSHLIGHEGEGSVFHIIKELGWAMNLMAGESTDSNEYSFFSVSIRLTDAGHEHMEDIVGLIFKYLHLLKVDGVHEWIFNELEAINEMEFHYQDKVDPISYVMRTVSTMRLFPPEEWLVGAALPSKYAPQRINMILDQLSPERVRIFWESKKFEGSTSSAEPWYNTPYSVENVAPTMIQQWIKKAPTEKLHLPEPNIFVPKDLSLKEVHEKVTFPTVLRKSPLSQLWYKPDTLFSTPKVHIIIDFHCPLSSHSSEAVVATELFVDLLVDYLNAYAYDAQIAGLFYSIYLTSAGFQVSLGGYNDKMRALLNAILVQIASFEVKPNRFSALKETSVKDYQNFNFRQPYSQASYYVSLILEDKKWPVAEKLEALSKLESDFFAKFVPHLLSKTFLECYVQGNIEPSEAKSVVQEIENTIFNAPNSLFKSMSPSEYLTKRVVMLENELKCYYQTEGLNQKNQNSSVIQYIQVHQDDAILNIKLELFSLIASQPAFNQLRTVEQLGYITSLSLRSDYGVLALQVVIQSTVKDPSYLDGRVDEFFKMFESKIYELSDKDFKRNVKSLIDSKLEKFKNLWEESDFYWGEIQAGTLKFDRVESEVTMLRELKKEEFIEYFDQYIKVDAPQRRTLSVQVFGGNHSAEFKTAIAEADPPKMYRITDIFGFKRSRPLYSSLKGGPGRITMD

SEQ ID NO: 53664 - protein, 125 aa, Zea mays
  Clone ID: LIB3151-019-D2_FLI.pep
QYILAAQMVKEQHARQRILRPNARLPVKRLLPYQGYTIHRCNTIVGSCFVDANAADLYDRPIVDGCILQDHHDSRPYVVPFFRVISLLDALTVCDHHVLPNPSIHVNDTVPYLCVPSYSNWDLPS

SEQ ID NO: 53665 - protein, 432 aa, Zea mays
  Clone ID: UC-ZMFLB73088F05_FLI.pep
LNDRMVHESIPLSEEKRLVKEIKDLEKTRSKVISNAANRAKLQGTVVEKEAIQDQVKIIGEGIDGIKKERQAVRSKIKVLEDELKLVDAEIGLLQEDLDAATARKDKAYESLQELRAVRDAKNASSMHNRTVLTRARDYSSRNMLTELQELHKTEVDKFMTQWCESKAFREDYEKRILTSLNSRQLTRDGRMRNPDEKPIFIESQAPAPAPEPIPVKLPAKQAKEVPAPQADDAPKTEAPSKGPVKSHKAKAALDADDDYEAEPLKEKAKPTEADVAKLKEIKRQEEIEKNKLALERKKKQAEKQAAKAAARAQKEAEKKLKKEEKKAKKKSGAADTDEPSESDAKSDEAMEAPVEQEVAPASTMIKKEQKESARHRNVVSKAPPPKAILKRKKAQSYWSWAGPAAMVAAVLVALLAVLGYYQYYLPANASN

SEQ ID NO: 53666 - protein, 461 aa, Zea mays
  Clone ID: UC-ZMFLMO17129F06_FLI.pep
KEPPKPRNNPVTPTPIRPAPPRAPHQPRRAAMTGTVSKLAAPRPAAPPLRPASIRAAAIAFAPSPRRVSVSVAGRARIPSVIAMASAKEGNGAPTKKTSLHDLYELQGLSPWYDNLCRPVTDLLPLIASGVRGVTSNPTIFQKAISSSSAYDDQFKQLISGGKDAESAYWELVIKDIQDACSLFEPIYDETDGADGYVSVEVSPRLANDTQGTVEAAKWLHKVVNRPNVYIKIPATAECVPSIREVIANGISVNVTLIFSIATYEAVIDAYLDGLEASGLSDLSRVTSVASFFVSRVDTLIDKMLEKIGTPEALALRGKAAVAQAKLANRLYQKKFSGPRWEALAKKGAKKQRLLWASTGVKNPAYPDTLYIDSLIGPDTVNTMPDQALQAFIDHGTVSRTVDANVSEAEGVYSALEKLGIDWAEVGKQLELEGVDSFKKSFDSLLVSLQEKGNSLKTATV

SEQ ID NO: 53667 - protein, 303 aa, Zea mays
  Clone ID: LIB3153-005-F10_FLI.pep
AAAPLDQRLVALRALGALARHDVADLPAEVHLGHHLVRAGRRGGVGGLAGAGAGAGALEGVEHGGVVVQRLREAVEECAGVVVGLLLHHRHDPRPHRAHGAQDLVECTGLREQPVQLAHRVYGDHLGLVVRVAAALRSQHERLQVSERGGDEATVLEVDADGVRELGKLPAHLLQGVGLVGLRRAYAGETERRGATGAEGEGLEESRPLHPLLDAEVDDVDAAAPGESLEDGLVRGEVGELEVGAGLVEVRVQEVGEGGVEEGAVRCRAEAIHAPGERLAEVGGDLAHGAALRRGQHGDLLHQ

SEQ ID NO: 53668 - protein, 160 aa, Zea mays
  Clone ID: UC-ZMFLMO17156B07_FLI.pep
ASCSRRSYILLRSNPSCHQPQPPLSAPPHGTPAPSLPLKQYTTATSPGRISLQGSRATAAAALRRQRTPSRSTPAMESTVNPKAYPLADVQLTMGILDIIQHSTNYKQLKKGANEAMNTLNRGISEFVVMAADTEPLEILLHLPLLGEDKTKSSHTRGDD

SEQ ID NO: 53669 - protein, 185 aa, Zea mays
  Clone ID: LIB3156-019-D5_FLI.pep
SNCTAANGNIVLRQEITLRLLGGLGGLLGLLGRLLGHLLGEEHSVDVGEDAAVGDGDAGQQLAELLVVADGEEHVARDDARLLVVPCRVAGELEHLGREVLQDGGEVDGGTRAYTLRVPALFEVPPDAADGELQPGPGGPRHRLLRRPAGLAPGRALFRLPACSAHVHGCYCGASRSRKKRDLGS

SEQ ID NO: 53670 - protein, 775 aa, Zea mays
  Clone ID: UC-ZMFLMO17202B08_FLI.pep
KHQFKVNLSKCSFAQTSLHYLGHIISQEGVATDPEKISAVKSWPTPRSVKDIRSFLGLAGYYRKFVKNFGIMSRPLTSLLKKGQLFVWTEDHDQAFQALKTALVSAPVLALPDFTKTFEIETDACDSGIGAVLHQAGHPIAFVSKTLGPRHQPLSTYEKKCLAILMAVDHWRSYLICGQFVIHTDQKSLTHLDDQRLTTPWQQKALTKLLGLQYKICYKQGTSNRVADALSRLSSEQMLALSVIQQSWLQDLADKYSSYPDTAPILQALSLKSPSGPYQITQGIIRYHNRILVPATSEFPLKIFTALHAAPIGGHSGFLVTYHKIKKQFVWRGMKKMIATWCSHCSICQQAQPERVKYPGLLQPIQVPAAAWQVISMDFIEGLPTSDKYNCIMVVVDKFSKYSHFVPLRHPFTALKVATQFMDHVFKLHGFPQAIITDRDRLFTSAFWKELFKLAGVDLRMTTAYHPQSDGQTERVNQCLETYLRCFIQACPTKWKKWLSLAEYWYNTSYHSSLQRTPFEVLYGHIPRQLGIDLPGQCDVPSLTDWLHERKLMLQLVQQQLIRAQQRQKHQADKLRSERVFQVGDWVYLKLQPYVQSSLVKRANHKLAFKFFGPFQIVARIGPVAYKLQLPATSAIHPVFHVSLLKKAVGSTDQVSSVLPSISDSLQWPEQILQRRVVHTPSGDVPQVLIKWSAWPEELATWEDEPVVKQRFPEAEASRRGECQDHGVKQTTDEGEASRSAQQPCLWARLDPVGFQPCIVSVGLLVVFCRVNKGD

SEQ ID NO: 53671 - protein, 214 aa, Zea mays
  Clone ID: LIB3156-021-C5_FLI.pep
RIQRRNVLSTMLSAWTILLLSPGQVSLAETTGGAFREYIDTFDGYTFLYPKNWIQVRGAGADIFFRDPMVLDENMSVEISSPSSSRYTSVEDLGPPEKAAEKVLGQYLTEFMSTRLGVRRESNVLSASSKVADDGKLYYEVEVNIKSYASNNELAVMPQDRVQSLEWDRRYLSVLGVENKRLYELRLQTPEQVFMQEEEDLRRVMDSFRVIKAA

SEQ ID NO: 53672 - protein, 308 aa, Zea mays
  Clone ID: UC-ZMFLMO17282E12_FLI.pep
HKTNVAAGLPDNLLVVDIGLGVHGHFTKRPEEIGAGDQGHMFGYATDETPELMPLSHVLATKLGARLTEVRKNGTCPWLRPDGKTQVTVEYRNEGGAMVPIRVHTVLISTQHDETVTNDEIAADLKEHVIKPVIPEQYLDEKTIFHLNPSGRFVIGGPHGDAGLTGRKIIIDTYGGWGAHGGGAFSGKDPTKVDRSGAYVARQAAKSIVASGLARRAIVQVSYAIGVPEPLSVFVDTYGTGAIPDKEILKIVKENFDFRPGMIIINLDLKKGGNGRYLKTAAYGHFGRDDPDFTWEVVKPLKSEKPSA

SEQ ID NO: 53673 - protein, 77 aa, Zea mays
  Clone ID: LIB3157-016-D12_FLI.pep
RLQYMCFQFKLFRRTHTYCLEVGVIPGKRFVSALGHEEAVIDQPSERPTDKRPDPVDPVVGPHPSHERGAEGARGVH

SEQ ID NO: 53674 - protein, 617 aa, Zea mays
  Clone ID: JC-ZMSHLIB3587P034E04_FLI.pep
QSKQYCGICKKIWHHTDGGNWVCCDECQIWVHVECDLTCNNVEDLENADYFCPDCKSKSKTVPATENLNTSTSECASTSKGKLTAMIAVCCNGEDALYVPEKHMILCQCKSCKERMMSLNEWEKHTGSRKKNWKMSIRQKSTGELLINLLDDIPCGTSKYSNPGIKKEELLQLQANPYSPVCAKWTTERCAVCRWVEDWDYNKIIICNRCQIAVHQECYGACAVQDLTTWLCRACESPQQKRECCLCPVKGGALKPTDIDGLWVHVTCAWFQPKVSFPVDETMEPAMGIMSIPVEYFKKTCVICKQMHGACTQCYKCSTYYHAICASRAGYCMELQCSERSGRHITKMVSYCDFHSTPDPDNVLIVKTPEGVFSTKFFLQNGEKQTAARLVRKENHQEKVLPPIISDCLVAKCLTYEMSKYKKQPGEAIAHRIMGPRHHSQDFIDGLNACMDRKDDQSFSTFKERLRYLQKTENLRVSCGRSGIHGWGLFAARNIQEGQMVIEYRGEQVRRCVADLREAQYHREKKDCYLFKISEDVVIDATDKGNIARLINHSCMPNCYARIMTVSDDRSEIILIAKRDVSAGEELTYDYLFDPDESEDCRVPCLCKAPNCRGYMN

SEQ ID NO: 53675 - protein, 116 aa, Zea mays
  Clone ID: LIB3157-019-A10_FLI.pep
RTLTSDLLFKGAVPGLAHIEPNKLRLCLELVQSAAMVMSREDAHTAVNAAPMYGEPSGGGVYSASGTSSTSLVNLNLDNRMVYLNLGMDAQFGKMGDGDDGGGRGPSSLFSPHGYH

SEQ ID NO: 53676 - protein, 585 aa, Zea mays
  Clone ID: UC-ZMROB73015G08_FLI.pep
VRGPAPSGGGSPRDDVGHGTHTSSTAAGSAVTGASYYGLAPGTAKGGSAASRVAMYRVCSQAGCAGSAILAGFDDAIADGVDVISVSLGASPYFRPDFSADPIAIGSFHAVAKGVTVVCSAGNSGPGAATVVNAAPWILTVAATTIDRDFESDVLLGGNNSAVKGVAINFSNLDRSPKYPLITGAAAKSSSVSDTDSASHCEPGTLDSSKIRGKIVLCHHSQSDTSKLVKADELQSAGAAGCILVMNDNESSVATAYLDFPVTEVTSAAAAAIHKYIAAASEPVATITAAATVTECKPAPVVAYFSSRGPSGQTGNVLKPDIAAPGVNILASWIPASSLPPGQKQPSQFNLVSGTSMACPHVAGAAATVKAWNPTWSPAAVRSAIMTTATTLNNEREPMTTDSGSPATPYDYGAGQVHPAGALDPGLVYDAGEDDYLRFLCNYGYNASTVRLVASTLPSGFSCAANVSKDLISDLNYPSIAVTGLLGNKSAAAGRSRTVTRTVTNVGAQEAASYTVAVSAPPGLDVKVTPSKLEFTRGVKKLAFQVSFSRSGNDDDAAAAKGALSGSITWSDGKHMVRSPFVVTS

SEQ ID NO: 53677 - protein, 91 aa, Zea mays
  Clone ID: LIB3157-021-B10_FLI.pep
EGNYSSRGLSHDKSIWGAMNRNKISQQCCGLLNSVWWVQCRLHSVEVLVEPADHVGEGRLCGLDGERVGGVVPAGEPVLDSLEDLGVVGNL

SEQ ID NO: 53678 - protein, 343 aa, Zea mays
  Clone ID: UC-ZMROB73058H07_FLI.pep
RSNRAKQHRMLIACLHALTLSSHRQGVSNCCHEHRTDHRLHVTLCYNFVTRNLLNTREREKKNGMVQHPPKEWNGRGFGRAQHKGRRTDHQMRLRSINSRRHCAAAAAAEEELSISLWSASAAVAGGEGGRVPVPLRRTSSTVLTTSATLGRRSGVLDTHAIAIWSISTISSSMSGTRSSAPSNTSAVHSSRTTDCTHLTRWTTSLPRPPDTWTGDLPVSSSSTRTPRLYTSEACDAFLVSATSGAQYPRERDLAAIGFASCARPRSEMQPYPSLLTNTLEALMLPWTNLPLFSAWTCATPLAAPRAIFHLVSQSNGVRSSPLFPERSTGSMSTSFDHVKSLD

SEQ ID NO: 53679 - protein, 248 aa, Glycine max
  Clone ID: LIB3167-002-D9_FLI.pep
CAIILMHAEVAKLNANEWYFFSFRDRKYATGFRTNRATTSGYWKATGKDRKVEDPATQEVVGMRKTLVFYRNRAPNGIKTGWIMHEFRLETPHMPPKEDWVLCRVFHKSKEDDNSSKLLQYETTPSSLTLLASSSPTNQAMPHGVGYNNRLATSFSNSFMPTHQYHHHFNPTQNANSLMDLLHFSRETNTNNTGFLTQIGAKGDDEYGFLWDMDLEENSLDDGVASNLDAIRFEVDNNNTNNNNMVLL

SEQ ID NO: 53680 - protein, 444 aa, Zea mays subsp. mexicana
  Clone ID: UC-ZMROTEOSINTE045H05_FLI.pep
DHSNGDVAADSYHMYKEDVRLLKEIGMDSYRFSISWSRILPNGTLEGGINPYGIKYYKNLINLLVENGIEPFVTIFHWDTPQALVDKYGGFLDQRIVKDYTDFAKVCFENFGDKVNNWLTFNEPQTFSSFSYGTGLCAPGRCTPGQKCANPIGNSLTEPYTVGHNLLRAHAEAVDLYNKYYKGENGRIGLAFDVMGRVPYEKSAFTDQQAEQRSWDINLGWFLEPVVRGDYPFSMRSLARERLPFFTDKEQEKLVGSYDMLGLNYYTSRFSKNIDISPNYSPVLNTDDAYASQETNGPDGNPIGPWMGNSWIYLYPEGLKDLLMIMKNKYGNPPIYITENGMGDVDHGDLPMEVALDDHKRVHYLQRHIATLKESRDLGANVQGYFAWSLLDNFEWFSGYTERYGIVYVDRNDGCKRYMKRSAQWFKEFNAAKKAAAKKILTPA

SEQ ID NO: 53681 - protein, 841 aa, Zea mays
  Clone ID: UC-ZMFLB73015F12_FLI.pep
HRHAAGAGPGARGGRRRRRREEEDVHRPHGQVGDAGRVRGPRRVVRRIAALRVRLSLRRQDALRVRHRPARFLRAPHAAGGQRPGVRRGGARRQPGGAVRAAHHADARVPGHRRPGTVPAVRHGGRRRRRRARHGRLAREQELRRRRPRRGARVVEGPVRGGTRLRRLRRLQPQARRRQVLQQGLRGRHGPHGHRPGVPVPARRRRPRHAHQLHGRRRRRAGRQPLRLRRGHGARHGAPGARRRLQGVLARRLLQLRHPRGHGRRRRRRLRRALALAGRGRRRLLARQRRHRRLRRHGAERPRLLLGRERRSRELHAVQRGAVDHHRGRRHARPRLPGVRRARRREELHGRLALRREAAAQRPDPHRVRGQRLQLHRGEPVHARHPRAGEGGRQDRRVRPRRQRARPEGPRRARRGRRRHGAVQHGRQRPGARRRRAPPARRRRRRDGRHGDQVVRGLRPEPHGDGRGRRDGGGRAPLAGGGGVLVARAQHGDAGDPEAGHDRAGGEHPGVVDGQGRADGPRRRHPPRGLQHHLRHVHVVPARERAGGAAPERAPGVEPRRRALGAHDHGLRQLLRRVVAAGRGDGRDGHAVRLRRGARGPRAGAGPGARLRSGHPRLRGLPVRAQVQLHHDRRRGAEPGVRVRREQDLLRGRPQLPVLLGGLLDGQRRRRRGLGHRDTHADADQRGRGGHVQGVHVARRCQGRGRGRGAGGAGVHVGGGEEELHGEVHVQVAAVGHRRFRAARVVGREAQRGQPDSVHVDLNLMDGWIIPYDSGFWRLSLKERPIIHHPCDGLVPYTTQSKGPKCRVGRFGGGTVQIGGFFCVAIITTNKVINPISVRRL

SEQ ID NO: 53682 - protein, 499 aa, Glycine max
  Clone ID: LIB3170-039-D8_FLI.pep
DQNIPSDKLQQRVSLDSDTTLSQGHDTKNDLSKPEEASILSIVVKNEEGKDSDAIACALESDQEGSTCSLPLEKPLQNPDTLSHELPRLQSSQEFPSIIREKVSKDGYNWRKYGQKHVKGNEFIRSYYKCTHPNCLAKKQLQQSNNGHITDSICIGQHNHPRPQLNSTVSVECVLPVVEQAPHKSSLATVEDKASVEHGCMPQQIQPLQSFPPAKVSPVNKLNASHLSLTKAKNQVHDNEEPESKRLKKDNTNPDVTRVDMSTRESRVVVQTSSEVDLVNDGYRWRKYGQKLVKGNTNPRSYYRCSNPGCPVKKHVERASHDSKVVITTYEGQHDHEIPPGRTVTQNAATNARTTASNGKAGTKSEGNITDDTGERSGLGSASRLTEQLNGESITKSKAGDMVEFCVISLSNEGPEIKLSEQQQQKDNSATKDDSVSNDVISHSSSGVLCRSNEQLKGEVKPISEGSKDCLNVVAVHDTRSTESEFNKQSTADAEPVQS

SEQ ID NO: 53683 - protein, 674 aa, Zea mays
  Clone ID: UC-ZMFLB73273G09_FLI.pep
EAELIGDFNDWNGANHKMEKDKFGVWSIKIDHVKGKPAIPHNSKVKFRFLHGGVWVDRIPALIRYATVDASKFGAPYDGVHWDPPASERYTFKHPRPSKPAAPRIYEAHVGMSGEKPAVSTYREFADNVLPRIRANNYNTVQLMAVMEHSYYASFGYHVTNFFAVSSRSGTPEDLKYLVDKAHSLGLRVLMDVVHSHASNNVTDGLNGYDVGQSTQESYFHAGDRGYHKLWDSRLFNYANWEVLRFLLSNLRYWLDEFMFDGFRFDGVTSMLYHHHGINVGFTGNYQEYFSLDTAVDAVVYMMLANHLMHKLLPEATVVAEDVSGMPVLCRPVDEGGVGFDYRLAMAIPDRWIDYLKNKDDSEWSMGEIAHTLTNRRYTEKCIAYAESHDQSIVGDKTIAFLLMDKEMYTGMSDLQPASPTIDRGIALQKMIHFITMALGGDGYLNFMGNEFGHPEWIDFPREGNNWSYDKCRRQWSLVDTDHLRYKYMNAFDQAMNALDERFSFLSSSKQIVSDMNDEEKVIVFERGDLVFVFNFHPKKTYEGYKVGCDLPGKYRVALDSDALVFGGHGRVGHDVDHFTSPEGVPGVPETNFNNRPNSFKVLSPPRTCVAYYRVDEAGAGRRLHAKAETGKTSPAESIDVKASRASSKEDKEATAGGKKGWKFARQPSDQDTK

SEQ ID NO: 53684 - protein, 272 aa, Glycine max
  Clone ID: LIB3170-078-F10_FLI.pep
ELKEGVEDSLSSSIVYSMDSSSSGSQLSQHPQLPPGFRFYPTDEELVVHYLKRKADSVPLPVSIIAEVDLYKFDPWELPSKATFGDQEWYFFSPRDRKYPNGSRPNRAASSGYWKATGTDKPILASHGHHHKVGVKKSLVFYGGKPPKGVKTNWIMHEYRLADSNSNSSSKPPSMASDHAQSCKKNSLRLDDWVLCRIYKKSNSTNLPRLPLVEQNKELSMLPMRSTLSMANNNTSQDSKPTSSISTSYGPLGVENDDNLFDGILGVDHQSM

SEQ ID NO: 53685 - protein, 800 aa, Glycine max
  Clone ID: UC-GMFLMINSOY001E02_FLI.pep
SLCLLFLSFHLMSLPTKRSSTAGSSLSPPPPMKKAKSLLLRSSSDDHDAVLDPSSMPLDDDLPNARAANLARKKATPPQPAKKLLIKLHKAKPTLPTNFEEDTWAKLKSAICAIFLKQPNSCDLEKLYQAVNDLCLYKMGGNLYQRIEKECEAHISAALQSLVGQSPDLVVFLSLVERCWQDLCDQMLMIRGIALYLDRTYVKQTANVRSLWDMGLQLFRKHLSLSPEVEHKTVTGLLRMIESERKGEAVDRTLLNHLLKMFTALGIYAESFEKPFLECTSEFYAAEGVKYMQQSDVPDYLKHVEIRLQEEHERCLIYLDASTRKPLIATAEKQLLERHIPAILDKGFAMLMDGNRIEDLQRMYSLFSRVNALESLRQAISSYIRRTGQGIVLDEEKDKDMVSSLLEFKASLDTTWEESFSKNEAFCNTIKDSFEHLINLRQNRPAELIAKFLDEKLRAGNKGTSEEELEGTLDKVLVLFRFIQGKDVFEAFYKKDLAKRLLLGKSASIDAEKSMISKLKTECGSQFTNKLEGMFKDIELSKEINESFKQSSQARTKLPSGIEMSVHVLTTGYWPTYPPMDVRLPHELNVYQDIFKEFYLSKYSGRRLMWQNSLGHCVLKAEFPKGKKELAVSLFQTVVLMLFNDAEKLSFQDIKDSTGIEDKELRRTLQSLACGKVRVLQKLPKGRDVEDDDSFVFNEGFTAPLYRIKVNAIQLKETVEENTSTTERVFQDRQYQVDAAIVRIMKTRKVLSHTLLITELFQQLKFPIKPADLKKRIESLIDREYLERDKNNPQIYNYLA

SEQ ID NO: 53686 - protein, 594 aa, Arabidopsis thaliana columbia
  Clone ID: LIB3175-025-F10_FLI.pep
LLASLAGKLLEESESSSTSTYASEADNLDHLGGLIKQELEDGYTTKPCKSEFFDPGNPASKSTSENTSVTCLPFSSFENDCILEQTPVSDCKRASGLKSLVGSITEETCVVNEDAGSEQGANTFSLKDPSQLHSQSPESVLLDGDVKLAPCTDQVPNDSFKGYRNHSKLVCRDDDENYCKYYKFSDKCKSYRPLSRVGNRRIMQSVRAISKLKCFEDTRTDGRLKALYRKRKLCYGYNPWKRETIHRKRRLSDKGLVVNYDGGLSSESVSNSPEKGESENGDFSAAKIGLLSKDSRVKFSIKSLRIPELVIEVPETATVGLLKRTVKEAVTALLGGGIRIGVLVQGKKVRDDNNTLSQTGLSCRENLGNLGFTLEPGLETLPVPLCSETPVLSLPTDSTKLSERSAASPALETGIPLPPQDEDYLINLGNSVENNDELVPHLSDIPADEQPSSDSRALVPVLALESDALALVPVNEKPKRTELSQRRTRRPFSVTEVEALVSAVEEVGTGRWRDVKLRSFENASHRTYVDLKDKWKTLVHTASISPQQRRGEPVPQELLDRVLGAHRYWTQHQMKQNGKHQVATTMVVEAGSSM

SEQ ID NO: 53687 - protein, 378 aa, Zea mays
  Clone ID: UC-ZMFLMO17020D12_FLI.pep
RIVLPCALVWLQIELTQYDPAGSGTTVGCEQEFCVANSAGGVPPTCPSTSSPCQFRITYGDGSTTTGFYVTDFVQYNQVSGNGQTTTSNASITFGCGAQLGGDLGSSNQALDGILGFGQSDSSMLSQLAAARRVRKIFAHCLDTVRGGGIFAIGNVVQPKVKTTPLVPNVTHYNVNLQGISVGGAALQLPTSTFDSGDSKGTIIDSGTTLAYLPREVYRTLLAAVFDKYQDLPLHNYQDFVCFQFSGSIDDGFPVITFSFEGDLTLNVYPDDYLFQNRNDLYCMGFLDGGVQTKDGKDMLLLGDLVLSNKLVVYDLEKEVIGWTDYNCSSSIKIEDDKTGSVYTVDAQNISAGWRFQWHNSLILLILIRTIWSCLVIA

SEQ ID NO: 53688 - protein, 198 aa, Arabidopsis thaliana columbia
  Clone ID: LIB3175-027-B12_FLI.pep
LDDWVLCRIYKKNNASRHVDNDKDHDMIDYIFRKIPPSLSMAAASTGLHQHHHNVSRSMNFFPGKFSGGGYGIFSDGGNTSIYDGGGMINNIGTDSVDHDNNADVVGLNHASSSGPMMMANLKRTLPVPYWPVADEEQDASPSKRFHGVGGGGGDCSNMSSSMMEETPPLMQQQGGVLGDGLFRTTSYQLPGLNWYSS

SEQ ID NO: 53689 - protein, 320 aa, Zea mays subsp. mexicana
  Clone ID: UC-ZMROTEOSINTE013H05_FLI.pep
LNMEMAIIMARDAGMDWIIHLDTDELIHPAGAREYSLRRLLLDVPDNVDMVIFPNYESSIERDDIKDPFTEVSMFKKNYDHLPKDTYFGLYKEATRGNPNYFLTYGNGKSAARVQEHLRPNGAHRWHNYMKSPNEIKLEEAAILHYTYTKFSDLTSRRDRCGCKPTKEDVKRCFILEFDRLAFIIASTATEEEMRNWYKEHVVWTDRDTNLKLLRKSVLTRIYAPMAIIRGLKESGVFTNAVTSAKAQSKTKSSNMGLGNKDPIQPNGTAGQSTLEGSHGKLQATVRKILEMVDTQEEAAMPPMSPPGFLELTEIATAFS

SEQ ID NO: 53690 - protein, 197 aa, Arabidopsis thaliana columbia
  Clone ID: LIB3175-061-B4_FLI.pep
RSSRSILLPNYTMPNITMGLKPDPVAPTNPTHHESNAAKEIRYRGVRKRPWGRYAAEIRDPVKKTRVWLGTFDTAQQAARAYDAAARDFRGVKAKTNFGVIVGSSPTQSSTVVDSPTAARFITPPHLELSLGGGGACRRKIPLVHPVYYYNMATYPKMTTCGVQSESETSSVVDFEGGAGKISPPLDLDLNLAPPAE

SEQ ID NO: 53691 - protein, 545 aa, Zea mays
  Clone ID: UC-ZMFLB73305H03_FLI.pep
NFRCFQEAAATMGNCCAAPSTEGSGKTRPKKQKENPYNVAYNRGAAAPPPPPARPGLVVLRDPTGRDLGAEYELGGELGRGEFGVTYLCTEPATGARYACKSISKRKLRTPVDVEDVRREVDIMRHMPPHPNIVSLRAAYEDRDAVHLVMELCEGGELFDRIVARGHYTERAAAAVMRTIVEVVQKCHRHGVMHRDLKPENFLYASKDSSPLKAIDFGLSVFFRPGERFTEIVGSPYYMAPEVLKRNYGPEVDVWSAGVILYILLCGVPPFWAETEQGVAQAIIRSVVDFKREPWPRVSEPAKDLVRRMLDPNPLTRFTAAQVLEHPWLHDSKNTPDVSLGDTVRARLQQFAAMNKLKKKALRVIAEHLSAEEVADIKQMFDKMDVNKNGKLTFEEFKAGLRKLGNQMHDSDLQILMDAADVDRNGTLDYEEFVTVSVHVRKIGNDEHIQKAFAYFDRNKSGYIEIEELREALADELDGSDEDIIGGIIRDVDTDKDGKIGYDEFAAMMKAGTDWRKASRQYSRQRFSNLSLKLQKDGSLGADTR

SEQ ID NO: 53692 - protein, 669 aa, Arabidopsis thaliana columbia
  Clone ID: LIB3175-077-F11_FLI.pep
TLKHICNNNPKIITFKPRTSSDSFKLSFFYVGRATRVLIMDPNFSESLNGFEYFDGNPNLLTDPMEDQYPPPSDTLLKYVSEILMEESNGDYKQSMFYDSLALRKTEEMLQQVITDSQNQSFSPADSLITNSWDASGSIDESAYSADPQPVNEIMVKSMFSDAESALQFKKGVEEASKFLPNSDQWVINLDIERSERRDSVKEEMGLDQLRVKKNHERDFEEVRSSKQFASNVEDSKVTDMFDKVLLLDGECDPQTLLDSEIQAIRSSKNIGEKGKKKKKKKSQVVDFRTLLTHCAQAISTGDKTTALEFLLQIRQQSSPLGDAGQRLAHCFANALEARLQGSTGPMIQTYYNALTSSLKDTAADTIRAYRVYLSSSPFVTLMYFFSIWMILDVAKDAPVLHIVDFGILYGFQWPMFIQSISDRKDVPRKLRITGIELPQCGFRPAERIEETGRRLAEYCKRFNVPFEYKAIASQNWETIRIEDLDIRPNEVLAVNAGLRLKNLQDETGSEENCPRDAVLKLIRNMNPDVFIHAIVNGSFNAPFFISRFKEAVYHYSALFDMFDSTLPRDNKERIRFEREFYGREAMNVIACEEADRVERPETYRQWQVRMVRAGFKQKTIKPELVELFRGKLKKWRYHKDFVVDENSKWLLQGWKGRTLYASSCWVPA

SEQ ID NO: 53693 - protein, 393 aa, Oryza sativa
  Clone ID: UC-OSFLM202031F07_FLI.pep
SKTDRIRLQTLDAAAMARRSAPLLQRLLSPTPSPSPSPPHPLAAAAVSRRTVTYMPRPGDGAPRAVTLIPGDGIGPLVTGAVRQVMEAMHAPVYFESYEVRGDMPTVPPEVIDSIRRNKVCLKGGLATPVGGGVSSLNVQLRKELDLYASLVNCFNLPGLPTRHDNVDIVVIRENTEGEYSGLEHEVVPGVVESLKVITKFCSERIAKYAFEYAYLNNRKKVTAVHKANIMKLADGLFLESCREVATKYPGIQYNEIIVDNCCMQLVAKPEQFDVMVTPNLYGNLVANTAAGIAGGTGVMPGGNVGQDHAVFEQGASAGNVGNVKVVEQKKANPVALLLSSAMMLRHLQFPSFADRLETAVKRVIAEGKYRTKDLGGSSTTQEVTDAVIAHLD

SEQ ID NO: 53694 - protein, 195 aa, Arabidopsis thaliana columbia
  Clone ID: LIB3176-030-G9_FLI.pep
LSLSLTHTHKRTYLSKVITMSFFIEDSGLIVTQLLYKMAVLITVLRWILAWILRYRSRSRSTSSSTSACPSISSQAIKESLSVTTFRDAAERSPAMINDTCAVCLGDLEDGDEVRELRNCSHMFHRECIDRWLDYECCGGDENNEGEEDNHRTCPLCRTPLLAANTTSCGDWPTKNEPSWAVERLLYLFGDDLHV

SEQ ID NO: 53695 - protein, 159 aa, Arabidopsis thaliana columbia
  Clone ID: LIB3176-057-D11_FLI.pep
SLITFYNRLFKFPDKQKMSSGAGSGTTKGGRGKPKATKSVSRSSKAGLQFPVGRIARFLKAGKYAERVGAGAPVYLSAVLEYLAAEVLELAGNAARDNKKTRIVPRHIQLAVRNDEELSKLLGSVTIANGGVLPNIHQTLLPSKVGKNKGDIGSASQEF

SEQ ID NO: 53696 - protein, 40 aa, Arabidopsis thaliana columbia
  Clone ID: LIB3176-064-E6_FLI.pep
VVGKGCFGIFRYRYIVYLCGVIVILDDWPSHELVLCMMQP

SEQ ID NO: 53697 - protein, 139 aa, Arabidopsis thaliana columbia
  Clone ID: LIB3176-086-F8_FLI.pep
ELFSLRNETTQLPCLHLYHAHCIVPWLSARNSCPLCRYELPTDDKDYEEGKRNVLDVSEDSSSSDDGTESGEEEYVERGESESGVSRVSRGRWLFLAAAPVVSLVGVVLAMWLSSPHRRGIAISHSQRENRTRRWLPFF

SEQ ID NO: 53698 - protein, 60 aa, Zea mays
  Clone ID: 700340033_FLI.pep
LVHQTSALDVPTKNEEKTLHLISEANPVSLISDLPKTTGHHQVKYRQYPIIVLTHPIGYV

SEQ ID NO: 53699 - protein, 46 aa, Zea mays
  Clone ID: 700442060_FLI.pep
AANDFLNVLLNPNRCSIKVHELQQGPMKQNRNYIDIYSVHLRSLIS

SEQ ID NO: 53700 - protein, 244 aa, Zea mays; identical to SEQ ID NO: 36900
  Clone ID: LIB3180-021-D1_FLI.pep

SEQ ID NO: 53701 - protein, 351 aa, Zea mays
  Clone ID: LIB3180-041-A11_FLI.pep
DDDRRFGFFCRSALEFLLQSGSSPNIIHCHDWSSAPVAWLHKENYAKSSLANARVVFTIHNLEFGAHHIGKAMRYCDKATTVSNTYSKEVSGHGAIVPHLGKFYGILNGIDPDIWDPYNDNFIPVHYTCENVVEGKRAAKRALQQKFGLQQIDVPVVGIVTRLTAQKGIHLIKHAIHRTLERNGQVVLLGSAPDSRIQADFVNLANKLHGVNHGQVRLSLTYDEPLSHLIYAGSDFILVPSIFEPCGLTQLVAMRYGTIPIVRKTGGLFDTVFDVDNDKERARDRGLEPNGFSFDGADSNGVDYALNRAISAWFDARSWFHSLCKRVMEQDWSWNRPALDYIELYRSASKL

SEQ ID NO: 53702 - protein, 156 aa, Zea mays
  Clone ID: 700460849_FLI.pep
VEPRRVLAQLVQDLVHLEHRWQRLHQHRCPDAPELDPSSFLRSLEHPVPYPRFPGVLHLGQVKERPEAGALACAEGSVVVEEVEAEVDEAANGRLAVDEDVCLGEVPAAGPDEELGGSVVELVRPPARRVAEADGASHGVPQVHLPVHQVLPRRRQ

SEQ ID NO: 53703 - protein, 185 aa, Zea mays
  Clone ID: LIB3180-041-D3_FLI.pep
HTQPHPAAAGENQRHLRLGRPPPEKCAVAKMQIFVKTLTGKTITLEVESSDTIDNVKAKIQDKEGIPPDQQRLIFAGKQLEDGRTLADYNIQKESTLHLVLRLRGGAKKRKKKTYTKPKKIKHKHKKVKLAVLQFYKVDDATGKVTRLRKECPNAECGAGVFMANHFDRHYCGKCGLTYVYNQQA

SEQ ID NO: 53704 - protein, 820 aa, Zea mays
  Clone ID: UC-ZMFLMO17321C01_FLI.pep
ADSDDEGAMAQILLHGTLHATIFEAESLSNPHRATGGAPKFIRKLVEGIEDTVGIGKGTTKIYATVDLEKARVGRTRMVSNEPVNPRWYESFHIYCAHMAADVVFTVKIDNPIGASLIGRAYLPVEDILGGDEIDKWLEICDEKREPIGDSKIHVKLQYFDVGKDRNWARGVRSTKYPGVPYTFFSQRQGCKVTLYQDAHVPDNFVPRIPLADGKNYEPHRCWEDIFDAISKAQHLIYITGWSVYTEITLVRDTSRPKPGGDVTLGELLKRKASEGVRVLMLVWDDRTSVGLLKKDGLMATHDEETANYFHGTDVNCVLCPRNPDDSGSFVQDLQISTMFTHHQKIVVVDHELPNEGSQQRRIVSFVGGIDLCDGRYDTQYHSLFRTLDTVHHDDFHQPNFEGGSIKKGGPREPWHDIHSRLEGPIAWDVLYNFEQRWRKQGGKDLLVRLRDLSDIIIPPSPVMFPEDRDTWNVQLFRSIDGGAAFGFPETPDEAARAGLVSGKDQIIDRSIQDAYINAIRRAKNFIYIENQYFLGSSYDWKPEGIKPEDIDCLHLIPKELSLKIVSKIEAGERFTVYVVVPMWPEGVPESASVQAILDWQRRTMDMMYTDITQALEANGIQANPKDYLTFFCLGNREVKQEGEYQPEEHPEPGTDYIRAQEARRFMIYVHAKMMIVDDEYIIIGSANINQRSMDGARDSEIAMGAYQPYHLATRQPARGQIHGFRMSLWYEHLGMLDDVFQRPESVECVQKVNKIAEKYWDLYSSDDLEQDLPGHLLSYPIGVTADGTVTELPGMENFPDTRARVLGNKSDYLPPILTT

SEQ ID NO: 53705 - protein, 248 aa, Zea mays
  Clone ID: LIB3180-061-H11_FLI.pep
CPFLTAAAATRSSNRAGAQPASSGPSPTATAAATALNTMADPAEHRPAEEDEEAAAAGEDEDTGAQVAPIVKLEEVAVTTGEEDEDVLVDMKAKLYRFDKEANQWKERGTGTVKLLKHKETAKVRLVMRQAKTLKICANHLVVATTKMQEHAGSDKSCVWHALDFADGELKEEMFAIRFGSVENCKKFKDTVEEIAEEQGKTEVKENEEVSTAAADLVQKLTVTEASKEGNAEEEEAPASDDKKDAKG

SEQ ID NO: 53706 - protein, 381 aa, Zea mays
  Clone ID: UC-ZMFLMO17051G08_FLI.pep
ITGGDAFIYGHSVRSTVGMSNIRRMIGVCPQFDILWDALTAKEHMELFASIKGLHPAAITLVAEESLAKVKLSQVTNARAGSYSGGMKRRLSVAIALIGDPKLVFLDEPTTGMDPITRRHVWDIIEEAKKGRAIVLTTHSMEEADILGDRIAIMAKGKLRCIGTSIRLKSKFGTGYIANVNFSGNGHMQSPNINSNTEAPVNPNIEAVKWFFKERLDVNPKEESRTFLTFVIPHHKEPLLTRFFGELQDREGEFGISDIQLGLTTLEEVFLNIAKQAELETSTAEGTLVTLNLSSGTTIQIPKGARFVGIPGTETEEHPRGIMVEVYWDQDENGSLCISGHSDEMPVPVHAELRRPPSLSRRASMDRGRPVGYMIDLNQVP

SEQ ID NO: 53707 - protein, 162 aa, Arabidopsis thaliana nossen
  Clone ID: LIB3234-049-D8_FLI.pep
SITVYLGGYDEEEKAARAYDLAALKYWGPTTHLNFPLSNYEKEIEELNNMNRQEFVAMLRRNSSGFSRGASVYRGVTRHHQHGRWQARIGRVAGNKDLYLGTFSTQEEAAEAYDIAAIKFRGLNAVTNFDINRYDVKRICSSSTIVDSDQAKHSPTSSGAGH

SEQ ID NO: 53708 - protein, 287 aa, Zea mays
  Clone ID: UC-ZMFLMO17319G07_FLI.pep
KCPLGSFQQVLEMEWHDLYCMLLVNHSIYLMLCSQSSEGKARFFSVLMLTWGLVADVDIESEKYRWMGSARLDFYLLLRILNLRRYNGRILFVPAPGYEEVGDPVDQATGYETNGFSTGFQDDGRTGSNGETCGYVGPSIKEAEAGLRWRSLNGPFVSVWLGNVPFASEDAMAAPKAEFADGYLDAAIIKDCPRWDVLGLVFQMKDGSYVNSPCVEYFKVKAIRIEPGLRVGSSTEGGIIDSDGEVIARGDESDSRAGDDEPGHLMAYGPPIQLTVDQGLATIFSPR

SEQ ID NO: 53709 - protein, 152 aa, Zea mays
  Clone ID: UC-ZMROB73019G04_FLI.pep
FFSRKEPIVTNTVSKKILLNQLFYGLVCRDLLEKYASKTKIVRNKVLRAMGKTLELGEDYFISQIGDRASAIARFNYYPPCPRPDLVFGIKPHSDGGAVTILLVDKDVGGLQVQKDGVWYTVPSMPHTLLVNLGDSMEVGWVSPCPKALSLT

SEQ ID NO: 53710 - protein, 260 aa, Glycine max
  Clone ID: LIB3242-049-B12_FLI.pep
LLLPLNSFSFPLSLSLTHKEAMDYLDHDHDHDPFHDHDDFNRRILIMAIVSLSVVLVLVFALHLYARVFLRRQTRRRAAIYQLSLNVAQAHAEPHNNTGLNPALITTLPSFPFKQNQHHDSAECAVCLSVLEDGEHVRLLPNCKHSFHVSCIDTWLSSHSTCPVCRTKAGPVQLEPVRLEPQPREGPTGLVLADVVAPTAPLLFENVEGTSDGANNNGSPKVSGSNSRLSSFRRILSRERSMRRILPSSHDDVEHDLERQ

SEQ ID NO: 53711 - protein, 202 aa, Zea mays
  Clone ID: UC-ZMROB73033D09_FLI.pep
VVLLAARQEPRRGGQDPGGGGGDRRGAEGGWGGRRGGGGARVQARGGEADGVPPRRALRGAPPLPVRPRRPQGGRGGRGVPGRDGAEEGHQGDLRHVLHGADGEHLGRRLPRVQAGAVAPGRTLRGRVRLQVHGLQRRPAPVPRQGLRLLPDEVHRRLHPPPLPRPRRRGPPRRAQDGAHHVHEARAQGDAHQERQGQLIKL

SEQ ID NO: 53712 - protein, 233 aa, Glycine max
  Clone ID: LIB3242-074-G7_FLI.pep
AETVPVDAAAALGPRARGRPKKYADEMVAAGRGRGRGRGRGGGGGRGRGRGRGQLPAQLRKSGARPVGRPKKGSTSASTSQNAANEDLRRKLEHFQSKVKESLAVLKPHFNHESPVTAIAAIQELEVLGTMDLNAPLRDETLPSQEEQPPLQQQQQPPQQQFPPPQQQPPQQHLAPQQLPPQPQAPIFQQTYPPFHLPQFHHHQPTLQFQQQPQPPQLFQHQAQPPSHQQFHP

SEQ ID NO: 53713 - protein, 217 aa, Zea mays
  Clone ID: UC-ZMFLMO17160G08_FLI.pep
VGVVCSFIGTRDLIQEHIAFRVWPLAGKWEMPKETIKESDEGGLVRLKYTFKYGDKFVEPDDDWLKNIETLSDELLGAYSKAENTALSAAFGCRKKKRLNRVFDAVGFVYPDYHYPILGRKRKNTSLATEATTSATSEPAPQRKKMKVLTHRARFIEPATVPEFIDEVSLASEATEPAPVPKIEEKSEAPSAEKAEKPRIEGQKILEILSPSANVET

SEQ ID NO: 53714 - protein, 186 aa, Glycine max
  Clone ID: LIB3242-162-D12_FLI.pep
VTGIQNHSENQNEDGSEILNSTTARGAESWTESEIARLQQLRAEMETRYMQSGCSEEVMWEEIATKMACFGYERSAVVFKEKWESISNYARSVKDGSKKRKEDSRSCFYFDNSDQSSLYNQGGAYCDINDQRHKTGRLQTNDGSSPSNSNVGNTVALDNCFPFLMTESGNLWENYSLKVNKASQNQ

SEQ ID NO: 53715 - protein, 321 aa, Zea mays
  Clone ID: UC-ZMFLMO17164C07_FLI.pep
LQKANRAKKLIEKRTAANEELKHDYLPRTKQVPPVPGLLTNVEHHQLVLNLCRTLALLQRYWDALQIINRTLKLGNDALTGDKKEELRSLGAQIAYRAPDPSHGFKYVRYVVQQHPYSLAAWNSYYKVVSRIEDRFPHHFKYLLRTREANPDCVPPIIISGHRFTAISQHQSAARDYLEAYKLDPENPLINLCVGTALISLALGFRLQNKNQCIVQAFAFLYRYLRLCDNSQEALYNIARAYHHIGLNTLAAVYYDKTLSTEEKDHPIPKLPYEAGSRAPEDLRPGYCDVRREAAFNLHLIYMKSGATDLARRILKTYCTV

SEQ ID NO: 53716 - protein, 157 aa, Zea mays
  Clone ID: UC-ZMFLMO17060E05_FLI.pep
RDATQVVRKPNRFSPFPCSPRPPHEIPCLITPISAVCNTSSCPIFINSSTPPHRGQIFGIGFCSVLPFGFGAEFSSDSEQLAAFSSSASEASLIPAMSLPAISMYTSPPGAVYSSEFDPASRGSSPCTTAAPPPPAASYRLPSGGGGLSCLFSSPAA

SEQ ID NO: 53717 - protein, 335 aa, Glycine max
  Clone ID: LIB3242-400-F4_FLI.pep
QKQEKNSHIHTQRKLEREREDKMGVNEDFNKDIDDHHHEYVDDDDVPLPGFRFHPTDEELVSFYLRRKLHKKPISIELIKQIDIYKYDPWDLPKTSATAEEKEGYFFCRRGRKYRNSIRPNRVTGSGFWKATGIDKPVYSHGGEGNDCIGLKKTLVYYRGSAGKGIKTDWMMHEFRLPSNKDNTTNLPSSKNYVDVPQEAEIWTLCRIFKRNVSQRKHTPDLKQLSAKRHSIHDKNSRMSNVEFNNTNQESYINFGGHYQNEQKPVINYTNSDQRNQYHVMTHQLFAAPVAQHHQQPQQLTSPSSNFWLNSPPGNDFFTFDNWDELGSVVKFVVD

SEQ ID NO: 53718 - protein, 237 aa, Zea mays
  Clone ID: UC-ZMFLB73045G10_FLI.pep
YKGPTLLEALDQITEPKRPSDKPLRLPLQDVYKIGGIGTVPVGRVETGVIKPGMVVTFGPTGLTTEVKSVEMHHEALQEALPGDNVGFNVKNVAVKDLKRGFVASNSKDDPAKEAASFTSQVIIMNHPGQIGNGYAPVLDCHTSHIAVKFAELITKIDRRSGKELEKEPKFLKNGDAGMVKMIPTKPMVVETFSAYPPLGRFAVRDMRQTVAVGVIKSVEKKDPTGAKVTKAAAKKK

SEQ ID NO: 53719 - protein, 325 aa, Glycine max
  Clone ID: LIB3242-403-E3_FLI.pep
PIGFKKYFGVWLETNNRENKKMNVKVHSSDDTKKDEEVVLPGFRFHPTDEELVGFYLQRKVDKKPLKIELIKQVDIYKYDPWDLPKVNSFGDKEWYFFCIRGRKYRNSVRPNRVTRSGFWKATGIDKSIYCVKEPHECIGLKKSLVYYRGSAGKGTKTDWMMHEFRLPPNAKSSPNDVQEAEVWTLCRIFKRIPSFKKYAPNLKDSTPATKPNPVNSNASTLDSDNCCKPYLICRDPMMMQQIERKPVIGQVDEKKHLFLGQFGPLSHLQAPSTTPYPNFWNQNNVEDHAFANENWDDLRSVVQFAIDPSTVFDCTETYIPPYFS

SEQ ID NO: 53720 - protein, 181 aa, Zea mays subsp. mexicana
  Clone ID: UC-ZMROTEOSINTE103E06_FLI.pep
CLRASGAQRGDFFGCGTRGRIPDLVKGTTPPSPLGYQPNCRLLVMLLRHPSSYLKINNFGEALFDISYLFCKQTTSFDTIYVVADFKNLVSLEVCGGFVTDAGVKNIKDLKALTLLNLSQNANLTDKTLELISGIVLPCWNKCTSFLQLKSHGHLVYRPDCFDQLERVKLTGVQCWSQTPE

SEQ ID NO: 53721 - protein, 246 aa, Glycine max
  Clone ID: LIB3242-447-E12_FLI.pep
RESNLNPHYTHIYRFLHSSLNLFCFLFPSLTSSFSPKQKQLRFCFLLYFSSCCYLTRLSESVVAAGSGATAMQSQVVCNGCRSLLLYPRGATNVCCALCNTITSVPPPGMEMSQLYCGGCRTLLMYTRGATSVRCSYCHTVNLVPPASNQVAHVHCGNCRTTLMYPYGAPSVKCALCHFITNTNNGRLPIPVHRPNGTNNAGTLPSTSTSMPQSQSQTVVVENPMSVDSSGKLVSNVVVGVTTDKK
